United States Patent Application Publication US 2004/0214272 A1 - sequence listing, part 59

SEQ ID NO: 335390 - protein, 61 aa, Zea mays
  unsure (1)..(61): unsure at all Xaa locations
  Clone ID: MRT4577_68986C.1.pep
RVRQTTWVLIFLPXPXXTXPLYARQCSLIVPGLSQMQTAASFGYAAGRGPLKRATTTSFFF

SEQ ID NO: 335391 - protein, 60 aa, Zea mays
  Clone ID: MRT4577_68987C.1.pep
DWLLYGGRPKSSVFEFLLIVLLLVFYGRRQDLLSSLCIVGHAISPSVPFDLRLRGTSSCS

SEQ ID NO: 335392 - protein, 65 aa, Zea mays
  Clone ID: MRT4577_68988C.1.pep
VVLQYPDLIHQKFAWQAHFCREPVLAATVYKRYQLECQDPRSVFHTGCSTKKQSFGPTRFVMAAT

SEQ ID NO: 335393 - protein, 111 aa, Zea mays
  Clone ID: MRT4577_68989C.1.pep
YRASTKSPAPVSGPDIRFFQFFMAEPQGQQKNIGFLGAAQTIPNKSFGGIQIPQTFGGIGTAPDLGTISKAANLGKHFHHIQGGEGITGHIPSPLSKSGGRRAFPWTGKGN

SEQ ID NO: 335394 - protein, 50 aa, Zea mays
  Clone ID: MRT4577_6898C.1.pep
PIWMGETAFLMLEIVVFCYHIGSVHKSYHERYRGYCCTKRRKAVSPIQIG

SEQ ID NO: 335395 - protein, 55 aa, Zea mays
  Clone ID: MRT4577_68990C.1.pep
AHNSMVAKFRTHYYIMVEYLIEASQPSDHNKCDNTSIKHPPRLGDEVYILQSQRG

SEQ ID NO: 335396 - protein, 79 aa, Zea mays
  Clone ID: MRT4577_68991C.1.pep
ARNSARGASRPRLLFRRQERQSPALPYRQVPATTPTPYPALGCRVPGRATAPSSQVRRQGRLLSETHRTLASRSDPRHY

SEQ ID NO: 335397 - protein, 145 aa, Zea mays
  unsure (1)..(145): unsure at all Xaa locations
  Clone ID: MRT4577_68992C.1.pep
ALVSKPATSTRDVFGDGRVTRRKTGGKPKPAGSGSPSYGADRILYLCPMCGQPPSYLTSEFPXGDYGWDTKALSADPETFAKNREIEASHCLWTMLSALGCMTPELLVLNVVXYSXANWIKAGXQIFSESRLDYLGDPSLIHAHS

SEQ ID NO: 335398 - protein, 43 aa, Zea mays
  Clone ID: MRT4577_68993C.1.pep
STKLQRKSIMAQLIEHAHREAYCAVTMPRIKTYMQQSQLETNR

SEQ ID NO: 335399 - protein, 70 aa, Zea mays
  unsure (1)..(70): unsure at all Xaa locations
  Clone ID: MRT4577_68994C.1.pep
GMLPEINIFPKVKCIFSEMHFIMTMHVXTHKNNKHRQFYTSSQSVDLKFQVKISHPPCIGRRVLLVFTIK

SEQ ID NO: 335400 - protein, 82 aa, Zea mays
  Clone ID: MRT4577_68995C.1.pep
QKLLGLVVNPIPFRICGVCLHSYKTVVGYMMSVFLGGNNGFSAPSCSCLKYIHWGLEPSNLVVTLFFPCMCMLDDCRSLWLM

SEQ ID NO: 335401 - protein, 82 aa, Zea mays
  Clone ID: MRT4577_68996C.1.pep
ARMAYISTRIHSYIIMQNHVSCIHRYKRILIIYLHLAVKILLSTTPLQYFLSLHFWFCVNSIYYFFIYFIFLSFLFNHIYFI

SEQ ID NO: 335402 - protein, 90 aa, Zea mays
  Clone ID: MRT4577_68997C.1.pep
LYQESQNLTGETPIKPGPLGVHRSPPKLGAIHDKLRPPLRSPPFYSNPKEWPPGGSPITGGGRPHPPYQRDLGELSPVRDLDPLGGGALG

SEQ ID NO: 335403 - protein, 57 aa, Zea mays
  Clone ID: MRT4577_68998C.1.pep
FTSSLLLPISVFNLRSMCIGCYSGVIPGLADPPTTQHMGLGALCVVPPVGVFFSVEP

SEQ ID NO: 335404 - protein, 110 aa, Zea mays
  unsure (1)..(110): unsure at all Xaa locations
  Clone ID: MRT4577_68999C.1.pep
NTGPKTLYFXSVKGIKGRLNPLPSAWVGNMFLPPVKKGKPPLRKKVMPPVFVPQPKPWPPKAGVSLSFENNVGVFLNPKGEMKGSPFPGPIGKECVVFWPRIASPPNPLV

SEQ ID NO: 335405 - protein, 158 aa, Zea mays
  Clone ID: MRT4577_6899C.1.pep
DWCTRSGTAWRPRRTPWRSSAAHACRPPSSLGAAACATSSFASKTRPRLSLHRARAASEDTSASGGDELIEDLKAKWDAVEDKPTVLLYGGGAVVALWLTSVVVGAINAVPLLPKILELVGLGYTGWFVYRYLLFKQSRKELVDDIETLKKKIAGTAE

SEQ ID NO: 335406 - protein, 266 aa, Zea mays
  unsure (1)..(266): unsure at all Xaa locations
  Clone ID: MRT4577_689C.1.pep
TQTDMSKTMRAILIDWLVEVTEEYRLVPETLYLTVNYIDRYLSVKEISRHRLQLVGVACLLIAXYEEICPPLVEELCYITDYSYTKEEVLQMEASVLNNLKFEMTVTTAKCFLRRFVRVAQVPDXYMFHCFAVPTNSMCWLIFFFFLQGSSLHLEFLVNYICELSLLEYSLLCYLPSMVAASSVFLAKFILMPIKNPWNSSLSYYTRYTPSELRGCVRVLHRLFRLGPGSNLPAIREKYSQHKYKFVAKKYCPQSIPTKFFQDLTS

SEQ ID NO: 335407 - protein, 49 aa, Zea mays
  Clone ID: MRT4577_68C.1.pep
HFARTHEAYVSLRCLVWSFVKKLESLTEGQAYFVFPVLSTSRIYEIATN

SEQ ID NO: 335408 - protein, 720 aa, Zea mays
  Clone ID: MRT4577_69000C.1.pep
MAPPALDSLPAPLRSLRLKTKQQELLLRVSALALIYVLAFAVRLFSVLRYESMIHEFDPYFNYRTTLFLTENGFSEFWNWFDFESWYPLGRVVGGTLYPGLMVTAALLHRLLRALYLTVHIREVCVLTAPFFAANTTLVAYAFGREIWDSGAGLVAAALIAIVPGYISRSVAGSYDNEGVAIFALLLTFYLFVRAVNTGSLAWALASAFGYFYMVSAWGGYVFIINLVPLYVLVLLVTGRYSQRLYVAYNCMYVLGMLLAMQIRFVGFQHVQSGEHMAAMGVFFLLQVFFFLDWVKYLLNDARLFKSFLRITLTCVITIGTLALGLGTASGYISPWTGRFYSLLDPTYAKDHIPIIASVSEHQPTAWSSFMFDFHILLFLFPAGLYFCFKRLSDATIFIVMYGLTSMYFAGVMVRLILVAAPAVCLISAIAASATIKNLTTLIRTKSRSPQTTSGKTTGSKSAAKGAVDQSLPFQHNAAIGLLLGAFYLLSRYAIHCTWVTSEAYSSPSIVLAARGHNGGRVIFDDYREAYYWLRQNTPPDAKIMSWWDYGYQITAMGNRTVIVDNNTWNNTHIATVGRAMSSYEDEAYEIMQSLDVNYVLVVFGGVTGYSSDDINKFLWMVRIGGGVFPVIKEPDYLVNGEYRIDKGAAPKMLNCLMYKLCYYRFGELTTEYGKPPGYDRVRGVEIGNKDIKLEYLEEAFTTSNWIVRIYKVKPPKNRS

SEQ ID NO: 335409 - protein, 95 aa, Zea mays
  Clone ID: MRT4577_69001C.1.pep
LSGPRPPLPCCIGRKKKKPFEMPPPAKGRNFRRSPPAEKRGREKKSVRVWPFGGAPPPSPLLVLFWSASKSSFFPQDCMIPLETKHQAQLLCLLF

SEQ ID NO: 335410 - protein, 55 aa, Zea mays
  Clone ID: MRT4577_69002C.1.pep
FHRLALRKKELHACFSSTNYTKLLTYVDMNLLCICFCRICKKYPFCCYLLLLIIV

SEQ ID NO: 335411 - protein, 35 aa, Zea mays
  Clone ID: MRT4577_69003C.1.pep
LIQLPSFYTTNRIPTAVVFNHTTSQILNPPKHTLH

SEQ ID NO: 335412 - protein, 110 aa, Zea mays
  Clone ID: MRT4577_69004C.1.pep
RGRLLCHHHQVRFSSFAFSALSEQVTAAGNGTGAPLLSAQHKGQAALRRLVVGRALGAGQLRAATAIRQRVGADRSSPAAAGALGAARPADGNTSAETISETRVRISLIL

SEQ ID NO: 335413 - protein, 137 aa, Zea mays
  Clone ID: MRT4577_69005C.1.pep
MQIFVKTLTGKTITLEVESSDTIDNVKAKIQDKEGIPPDQQRLIFAGKQLEDGRTLADYNIQKESTLHLVLRLRGGAKKRKECPTSTATTAASAASPTSTIRRRNPMRRFASPAYLSSIHLLVTRFEYHLDLFEVGT

SEQ ID NO: 335414 - protein, 118 aa, Zea mays
  Clone ID: MRT4577_69006C.1.pep
PPPHQPYLAAAAAAGGPRFVAKMQIFVKTLTGKTITLEVESSDTIDNVKAKIQDKEGIPPTHGQPLRPPLLRQVRPHICLQPEGVIACPDLLYPPTLSSIQLLVTRIVSHVDLSEVET

SEQ ID NO: 335415 - protein, 155 aa, Zea mays; identical to SEQ ID NO: 289427
  Clone ID: MRT4577_69007C.1.pep

SEQ ID NO: 335416 - protein, 162 aa, Zea mays
  unsure (1)..(162): unsure at all Xaa locations
  Clone ID: MRT4577_69008C.1.pep
QAKPILPAAAGGPPSPPRCRPFVKTXLRGKTITLEAESSDTIDNVXAKIQDKEGIPPDQQRIIFAGKQLEEGRTLADYNIQNESTLHLVIRLRGGATKRKKKTYTKPKKIEHKHKKVQLSALQFYKVDDATGKVNRLRKECPHHXCGRGRSSMAQPTSTRHL

SEQ ID NO: 335417 - protein, 155 aa, Zea mays
  unsure (1)..(155): unsure at all Xaa locations
  Clone ID: MRT4577_69009C.1.pep
MQIFVKTLTEKTITLQVESSDTIDDVKANIQDKEGIAPDQQRIIFAGKQLEDGRTLADYNIQKESTLHLVLRLRGGAKKRTKNTYTKPKKIKHRHKKVKLSVLQIYKADDATGKVTRLRKECPNTXSGAGVFMDNHFDRHYCRKCGLTYVYHHNV

SEQ ID NO: 335418 - protein, 151 aa, Zea mays
  unsure (1)..(151): unsure at all Xaa locations
  Clone ID: MRT4577_6900C.1.pep
MAATAYSVALLGGARLPAALLPRRSSVCHQQLRLQDAPRLSLHRARAASEDTSASALXGDELIEDLKAKWDAVEDKPTVLLYGGGAVVALWLTSVVVGAINAVPLLPKILELVGLGYTGWFVYRYLLFKQSRKELVDDIETLKKKIAGTAE

SEQ ID NO: 335419 - protein, 122 aa, Zea mays
  unsure (1)..(122): unsure at all Xaa locations
  Clone ID: MRT4577_69010C.1.pep
MQIFVKTLTGKTXTLEVESSDTIDNVKAKIQDKEGIPPDHQRLIFVGGGLEDGRTLADYNIQKESTLHLVLRLRGGAKKRTNKTYTKPKKIMRKHKKGKLSVLQIYKVDDTTDNVTRRRKES

SEQ ID NO: 335420 - protein, 110 aa, Zea mays
  Clone ID: MRT4577_69011C.1.pep
ATPGRNHGRHSPRTASSVGKLFFVAAYIYRRHYIQYQGRAPMTLRVRSRSTYCKTSILVTYFLLEPHSKVLEDLATLPKKVYMCDLNIHIQTVFDSMVEVNDRDIYAERW

SEQ ID NO: 335421 - protein, 107 aa, Zea mays
  unsure (1)..(107): unsure at all Xaa locations
  Clone ID: MRT4577_69012C.1.pep
RAAAKPYIGAVSCGRPASSPKVRIFVKTVTGKTITLEVESSDTIDNVKAKIHDKEGIPPDQQRLIFIGKQLXDGRTLADYNIHKESTLHLVLRLRGGAKKRXKKTYT

SEQ ID NO: 335422 - protein, 89 aa, Zea mays
  Clone ID: MRT4577_69013C.1.pep
SIRLTKSYNTYLASTNLVNDRNTKHIYFLMDCLVELYSLDVQKSYERAIISVEQLNAILRQASKTKEKCHRASLGIYIISSPGRSLGPS

SEQ ID NO: 335423 - protein, 54 aa, Zea mays
  Clone ID: MRT4577_69014C.1.pep
RAILYIFKVPILQKRPPQDIHREKAGSPSLILYREPRGPPPLTDATLLKAGHCD

SEQ ID NO: 335424 - protein, 161 aa, Zea mays
  unsure (1)..(161): unsure at all Xaa locations
  Clone ID: MRT4577_69015C.1.pep
MQIXVKTLKVKTITLEVEPSDTIDNVKAKIQDKEGIPPDHQWFIFAGKXFEDGRTLADYNIQKETTLHLAFRLRGGAKKRTKKTYTXPKKIKYKHKKVKLSVLQFYKVYDATGKVTRLRKECPNTECGAGAFMVKHFDRHYCGKCGLTYVYNQKAKLLATI

SEQ ID NO: 335425 - protein, 230 aa, Zea mays
  Clone ID: MRT4577_69016C.1.pep
GMTRDDLFNTNASIVAALADACAQYCPKAFLAIISNPVNSTVPIASEVFKKRGVYDPKRIFGVTTLDVVRANTFVAELKKLDVASTKVDVIGGHAGITIIPLLSRVQPSVSFSDEERASLTTRIQDAGTEVVKAKAGTGSATLSMAFAGAKFAFSLLEALNGKEVVECSYVKSDVTEASYFSTPVKIDKNGVKENLGLGKLSSYEEGLVKASIAELKASIKKGEEFVNKN

SEQ ID NO: 335426 - protein, 204 aa, Zea mays
  Clone ID: MRT4577_69017C.1.pep
MQIFVKTLTGKTITLEVESSDTIDNVKAKIQDKEGIPPDQQRLIFAGKQLEDGRTLADYNIQKESTLHLVLRLRGGARKRKKKTYTKPKKIKHKHKKVKLSVLQFYKVDDATGKVTRLRKEWPNTECGAGGFMGNHFERHYWGKCGLTYGYQQKAELLGPNCFIRPPIQHSEGGYSKWISFRTGWRWNLNGAGVSILLVPLVLG

SEQ ID NO: 335427 - protein, 134 aa, Zea mays
  Clone ID: MRT4577_69018C.1.pep
NSRADPRVQRNFHQLTHQTLCLATEMVRATRAPIEGHNLLQGASGDKTLQHTKHVAPMPEQEARDALPGMGAGGAAAPIADDAEQFGVNEPKKDPTEEEDEEPIPDHLKTDTSSKISKKRDQPDHSATSPERSH

SEQ ID NO: 335428 - protein, 47 aa, Zea mays
  unsure (1)..(47): unsure at all Xaa locations
  Clone ID: MRT4577_69019C.1.pep
KKKXQSIPRSKRSPXRQPPSLSSISGGSPSPLTRADALRKRGRQRMS

SEQ ID NO: 335429 - protein, 151 aa, Zea mays
  Clone ID: MRT4577_6901C.1.pep
MAATAYSVALLGGARLPAALLPRRSSVCHQQLRLQDAPRLSLHRARAASEDTSASASGGDELIEDLKAKWDAVEDKPTVLLYGGGAVVALWLTSVVVGAINAVPLLPKILELVGLGYTGWFVYRYLLFKESRKELVDDIETLKKKIAGTAE

SEQ ID NO: 335430 - protein, 72 aa, Zea mays
  Clone ID: MRT4577_69020C.1.pep
YWCVLLLLYAEFVCQTDRLANYTLAHCTALSLRERKKKEVHLTTDALHYIITVQKTNSFVDVVHARTVRVLQ

SEQ ID NO: 335431 - protein, 100 aa, Zea mays
  Clone ID: MRT4577_69021C.1.pep
ELRQFERMNSILSADNDEFRSKLYKYADYEDIERDLEVIESIEFSTGDDDDTGTLQEEATSTNSSARSAEYSLEQLLMARNERLSNELTVLRVSHRDHQS

SEQ ID NO: 335432 - protein, 78 aa, Zea mays
  Clone ID: MRT4577_69022C.1.pep
KVWRVSDSRCLESVVRAHGDAVNAVAAAGFDALVLTGSADGTVKAWRRRAAEGKGRATRHAMERVLREGDRADTAIIV

SEQ ID NO: 335433 - protein, 36 aa, Zea mays
  Clone ID: MRT4577_69023C.1.pep
GKQGHFGNQSRVWPDSETVLDKHHNSSTTELMVMRF

SEQ ID NO: 335434 - protein, 85 aa, Zea mays
  Clone ID: MRT4577_69024C.1.pep
FNFLGVKRVSPDPTNLEPFLTKFRVLANFCFWSKGGCSLFGGVKKKQPPFKLVTLVGHLLLRAPGEQNKKKTFVLGQLVALEDLH

SEQ ID NO: 335435 - protein, 129 aa, Zea mays
  Clone ID: MRT4577_69025C.1.pep
ILPYPMKAKNMRPREKDAEFNVLAIQISFSSETTMCHFAKTRTISNTNSVPTRILLPGSLHHHRHVKQVCQTKKISPAYASSSLLPLVFEISNKGKGHGISIFQAQSIRSLCRNQPCHPSCAFCLVKRK

SEQ ID NO: 335436 - protein, 69 aa, Zea mays
  Clone ID: MRT4577_69026C.1.pep
MELHSLVAYPINPPVTSMLQHMIQGPKRVTTAIIAQWYKWHTLAWIKTRTLNAHPGFGHTTGPSSKQVY

SEQ ID NO: 335437 - protein, 212 aa, Zea mays
  unsure (1)..(212): unsure at all Xaa locations
  Clone ID: MRT4577_69027C.1.pep
MKLHQVWQLGVKDMKAVPLPRPRSAPKRRAWIPAVAAFISIALVWAYLYPPPHYTSSVRDWLPAEPARELTDEERASRVVFRQILTTPPVLSKNSKIAFMFLTPGTLPFERLWEKFFEGHEGRYTIYIHASREKPEHVSPIFVGREIHSEKVTWGKISMVDAERRLLANALQDIDNQHFVLLSDSCVPLHNFDYVYXYLMGANLSFIDCFYD

SEQ ID NO: 335438 - protein, 371 aa, Zea mays
  unsure (1)..(371): unsure at all Xaa locations
  Clone ID: MRT4577_69028C.1.pep
MKLHQVWQLGIKDMKAVPLPRPRAATRRRAWMLAVAAFIFVALVWAYLRLPAEPAREFTDEERASRVVFRQILTTPPVXTKNSKIAFMFLTPGTLPFERLWEKFFEGHEGRYTIYVHASREKPEHVSPIFVGREIHSEKVTWGTISMVDAERRLLANALQDMDNQHFILLSDSCVPLHNFDYVYDYLMGANLSFIDCFYDPGPHGNFRYSKNMLPEVTEADFRKGSQWFSVKRQHALMIIADSLYYTKFKLHCRPGMEDGRNCYADEHYLPTVFHMMDPDGIANWSVTHVDWSEGKWHPKAYRAKDVTFELLKNITSIDISHHVTSDRKKVVTEKACLWNGAKRPCYLFARKFYPESINNLLTSFANYTLI

SEQ ID NO: 335439 - protein, 53 aa, Zea mays
  Clone ID: MRT4577_69029C.1.pep
DLSWDAASTCPQQALLGARRHPVGEAVQGLLRPVWTLEVVPLLLRQREHRRKV

SEQ ID NO: 335440 - protein, 65 aa, Zea mays
  Clone ID: MRT4577_6902C.1.pep
RIPGRPRVRYLAFDQDCGRCVVLRCLSWFRFIGAGGSRSNSLLRGAFDIVANFIIAPAWRQSRMV

SEQ ID NO: 335441 - protein, 69 aa, Zea mays
  Clone ID: MRT4577_69030C.1.pep
TSFLSHYSRTPPAVSENGRQIISSRLYTSVWWVGDGPGQAAAAARANSSLAGRNATRKRESGWRIAEGN

SEQ ID NO: 335442 - protein, 122 aa, Zea mays
  Clone ID: MRT4577_69031C.1.pep
MGLFGLATTGFVGALHSYIMLLEVALWTTPRGRKTFKLTPEFAEQTKTMAANQGLYNGFLSAGLVWSLLHPNPVFAKQLQIFFNGCVVVAGAFGSITTANTRILYVQAAPAALALGLILLGI

SEQ ID NO: 335443 - protein, 108 aa, Zea mays
  Clone ID: MRT4577_69032C.1.pep
VTPIFLIRTMRRRVAISCSVDHQLVCTQRHTMSWAQLSNSCNKRFAVSLEKAAFGDCPSHRHELTSTDVTMCPSNLQVRRNASFGEDNIYRCHGTVFLCTALTLLKHL

SEQ ID NO: 335444 - protein, 46 aa, Zea mays
  Clone ID: MRT4577_69033C.1.pep
LDPLESTPAFAPGSSSLVKWRSRRRRRRLRQRQASARRVRATRSRD

SEQ ID NO: 335445 - protein, 107 aa, Zea mays
  Clone ID: MRT4577_69034C.1.pep
KTARTAANLLAYFLYTHAPPKTGDHDMAADGQPVIDKHKPHSLDNPIYLAGDRPALMDKDKPNSLAHPLQHSYDELPAQVHSAIARPCGTNYHATKTRSLPRSSPNK

SEQ ID NO: 335446 - protein, 148 aa, Zea mays
  Clone ID: MRT4577_69035C.1.pep
RGRPGKTILLSAISARTGVEEVINDFISSQNGTKADLSILVGEWQLLWCSQTEGESWSSVASAGLKDFQIIREDGKLKNSASPFPGLTLNATGNICKNGSGNTFTMSMKEGAVKVGGLQFPLDAQGEFVMEILYGIHVFLKLKYEAYT

SEQ ID NO: 335447 - protein, 47 aa, Zea mays
  Clone ID: MRT4577_69036C.1.pep
RLSRALPLSRSLTRCARTLLLLEQVAAFSQACLHISTDFLPTARHSM

SEQ ID NO: 335448 - protein, 46 aa, Zea mays
  unsure (1)..(46): unsure at all Xaa locations
  Clone ID: MRT4577_69037C.1.pep
FQKTHLISLTDTXXFSKYSLINKHRITFHTLLTNILTKHTILISYS

SEQ ID NO: 335449 - protein, 104 aa, Zea mays
  unsure (1)..(104): unsure at all Xaa locations
  Clone ID: MRT4577_69038C.1.pep
QDSRLGAYPVIAALTVALARRAVADGRTSLLVPANAVAAAAGAGLRRAQVGGRARLLPATAWRLVPKAGVHDLARPRRCSPSPXARRRPGSGPRPRRPSSPPPA

SEQ ID NO: 335450 - protein, 159 aa, Zea mays
  unsure (1)..(159): unsure at all Xaa locations
  Clone ID: MRT4577_69039C.1.pep
FGSSDDCRRVYHKQMEDNLLSVLHHPKIIMCYGCTTSRCLELMVEXEDMGTGTCVDHLKVQRTPLHILSRRLGLIVTVETVTMLTYLHAMEITDTHGEVKSTSILLVADYHVQAGYFGLCLFWPLDATXHVITGEQGTPGDVDPESLKCYQTTDKTDEC

SEQ ID NO: 335451 - protein, 149 aa, Zea mays
  Clone ID: MRT4577_6903C.1.pep
MAATAYSVALLGGARLPAALLPRRSSVCHHQLRLQDAPRLSLHRARAASEDTSASGGDELIEDLKAKWDAVEDKPTVLLYGGGAVVALWLTSVVVGAINAVPLLPKILELVGLGYTGWFVYRYLLFKESRKELVDDIETLKKKIAGTAE

SEQ ID NO: 335452 - protein, 76 aa, Zea mays
  Clone ID: MRT4577_69040C.1.pep
KLNWGLKGGLMGYFEPLGEIFKPGGVTGPKHGFVPTLGGRLDLGRFLPGKLGPFGKKLFLSGLDLGKLNKGGHFSG

SEQ ID NO: 335453 - protein, 341 aa, Zea mays
  Clone ID: MRT4577_69041C.1.pep
NVYELDVVTGKGEVVTCSETENPDLFFGVLGGLGQFGIITRARIALERAPQRVRWIRALYSNFTEFTADQERLISLGSRRFDYVEGFVVAAEGLINNWRSSFFSPQNPVKLSSLKHHSGVLYCLEVTKNYDDATAGSVEQDVDALLGELNFIPGTVFTTDLPYVDFLDRVHKAELKLRAKGMWEVPHPWLNLFVPASRIADFDRGVFRGVLGGGTAGAGGPILIYPMNKHRWDPRSSVVTPDEDVFYLGAFLRSALPGAPESLEALARQNRRVLDFCAEAGIGAKQYLPNHKAPGEWAEHFGAARWERFARLKAQFDPRAILAAGQGIFRPPGSPPLVADS

SEQ ID NO: 335454 - protein, 318 aa, Zea mays
  Clone ID: MRT4577_69042C.1.pep
IGYLEAGRERLTGGNAWVVVVALQVRWIRALYSNFSEFTADQERLISLGSGGGGGRRFDYVEGFVVAAQGLINNWRSSFFSPQNPVKLTSLKHHSGVLYCLEVTKNYDDETAGSVDQDVDTLLGELNFLPGTVFTTDLPYVDFLDRVHKAELKLRAKGMWEVPHPWLNLFVPASRIADFDRGVFRGVLGGRTAGAGGPVLIYPMNKHKWDPRSSAVTPDEEVFYLVAFLRSALPGAPESLEALARQNQRILDFCAGAGIGAKQYLPGHKARHEWAEHFGAARWDRFARLKAEFDPRAILAAGQGIFRPPGSPALAADS

SEQ ID NO: 335455 - protein, 122 aa, Zea mays
  unsure (1)..(122): unsure at all Xaa locations
  Clone ID: MRT4577_69043C.1.pep
AGTQETPVTISRXERAKVTVTTDGPFSKRYLKXLAKQYLKKPXVRYWPRVVAANKDRKVYELRYFTSAETEAQEEVWVLLFPPPPVFKKKNPPPPPCGVKKKKKKIVCWISAKRYVVDKSVT

SEQ ID NO: 335456 - protein, 206 aa, Zea mays
  Clone ID: MRT4577_69044C.1.pep
DPSTRPALSPSRRPPWCSPPLRDAAPHPGGRALPWTPVLILRLPLPWRLFLPQPWMPSPSCSKSATPFSFLCGAQPLYRAVPALFPWPRSAQPLLPRRSSQIATPWLLLLSLPHLCNSAPPLLAPLCLYASSSTLGRPMSTTCTRCLMYCVNQIRRWFGTLIDHVLWKTSGIDLQVMLMDEAKMDESTKCQDGRCSPSGRQLTTLT

SEQ ID NO: 335457 - protein, 58 aa, Zea mays
  Clone ID: MRT4577_69045C.1.pep
NKRWNDITNCRYRTVMAPTTLVRVLRSGKNQGQMRALYQNKPGTDGCEPSQPGEKTGT

SEQ ID NO: 335458 - protein, 66 aa, Zea mays
  Clone ID: MRT4577_69046C.1.pep
CYSSAGHVTSYSSNDSLSRTVVASCHGPRPLVPCSISRRYLDCLSIFPCRRRFWSRSYSSYIALHR

SEQ ID NO: 335459 - protein, 90 aa, Zea mays
  Clone ID: MRT4577_69047C.1.pep
PGQNRVFANFIMYTSIFQFSIQIYKTFSTTTSTLHSKPLYKTCNNRGTLKPPKFLPLKRRTGPFILLHALMQYMQQRQFVTRFEQTHFFW

SEQ ID NO: 335460 - protein, 42 aa, Zea mays
  Clone ID: MRT4577_69048C.1.pep
MTTQGHSELCSPQYPAPTLQLCIVSTLLMPVSEDLEPTCDCS

SEQ ID NO: 335461 - protein, 175 aa, Zea mays
  Clone ID: MRT4577_69049C.1.pep
MGKIRMPVPSLFRRRSSKPPPPQPQQQAPAAGDGDGSGSPERATAEEEMARVFRKFDANGDGRISRSELAALFESLGHGASDDEVARMMAEADADGDGFISLPEFAALNATVAGDAAAVEEDLRHAFRVFDADGSGAISAAELARVLRGLGESASVAQCRRMIEGVDQNGDGLIS

SEQ ID NO: 335462 - protein, 150 aa, Zea mays
  Clone ID: MRT4577_6904C.1.pep
MAATAYSVALLGGARLPAAFLPRRSSVCHHQLRLQDAPRLISLHRARAASEDTSASGGDELIEDLKAKWDAVEDKPTVLLYGGGAVVALWLTSVVVGAINAVPLLPKILELVGLGYTGWFVYRYLLFKQSRKELVDDIETLKKKIAGTAE

SEQ ID NO: 335463 - protein, 70 aa, Zea mays
  Clone ID: MRT4577_69050C.1.pep
TIIVFNHRFIQHTQVQNCYRLIASTSYINIVLVCYIHPKMIHMSFIQSCTSYHRADSSSNAKIFKKPTRP

SEQ ID NO: 335464 - protein, 127 aa, Zea mays
  unsure (1)..(127): unsure at all Xaa locations
  Clone ID: MRT4577_69051C.1.pep
PVSISRGQSPTRPLFLKNSAGLKTHGTAECRRASAHRAAPRMAPCISAADDPHSTPTSSCCSSAHTIAHRPSCLSARLLGTPTRAPGNKPEVAITIPKRCNMANRPXRYKCRDYTLPYLNKTPITRP

SEQ ID NO: 335465 - protein, 46 aa, Zea mays
  Clone ID: MRT4577_69052C.1.pep
IQTLAGCFINTLEEENYQLSIVQGAFHLEASIYVNNWDNNINDMDT

SEQ ID NO: 335466 - protein, 48 aa, Zea mays
  Clone ID: MRT4577_69053C.1.pep
NCACFNTQSAEPVLLYKGDRKELKLKITGRVWKEQQTPDGACTSNLGS

SEQ ID NO: 335467 - protein, 81 aa, Zea mays
  Clone ID: MRT4577_69054C.1.pep
HTGIMKREIPVWVVLLVGGLLLFALCTSGKKARKGLCRCSSLRAPAILLAHEWGRCRPGLAQACATAAGSTDGASPRRGQE

SEQ ID NO: 335468 - protein, 48 aa, Zea mays
  Clone ID: MRT4577_69055C.1.pep
KGGISYNLGYILKFGMGDEFKMGHDFGTSILGQRGGGPKNIQQFSRGE

SEQ ID NO: 335469 - protein, 71 aa, Zea mays
  Clone ID: MRT4577_69056C.1.pep
PPLPIYDTGSGPAAVQSSRLVCSMGARHTDGVTQYPLDSHMASPRQPRDPPLGKSLNHGLISAFLDRQLIA

SEQ ID NO: 335470 - protein, 62 aa, Zea mays
  Clone ID: MRT4577_69057C.1.pep
AKKGSRLGLWSLLGLFQRGEAVVCVCAWHYVLGLRILWFLLPREAVLIGEGGGNLGWCLAHC

SEQ ID NO: 335471 - protein, 66 aa, Zea mays
  Clone ID: MRT4577_69058C.1.pep
LIRGATHTFVNPSYSETNIFLSSSSSLGRSLKEDKPASLHPLGPAIQHTFQRAHMLNLILPTPSPP

SEQ ID NO: 335472 - protein, 57 aa, Zea mays
  Clone ID: MRT4577_69059C.1.pep
MAMQAAKRANMLLPPEVNRILYIRDFPYKITAEDMYDIFGRYGPIRQIRVGNTPDTR

SEQ ID NO: 335473 - protein, 84 aa, Zea mays
  Clone ID: MRT4577_6905C.1.pep
GPSSHAHLPRHYLPINLISVRIQTELTNVKLNHHLTPLDRAAVGGDSVHDEHSWTSATSACAVPSPQAHIGITPACNANDDNSL

SEQ ID NO: 335474 - protein, 42 aa, Zea mays
  Clone ID: MRT4577_69060C.1.pep
GIEYGTANIKLSGVPQFRLSEFVENWLKFLSLNKSTSIVVFS

SEQ ID NO: 335475 - protein, 53 aa, Zea mays
  Clone ID: MRT4577_69061C.1.pep
TSARMIFFWKKYHILVFGARTEGVADDPSLLGLCVYYIQAIGMDLIFKFREPS

SEQ ID NO: 335476 - protein, 268 aa, Zea mays
  unsure (1)..(268): unsure at all Xaa locations
  Clone ID: MRT4577_69062C.1.pep
HWVPRGRPGRRIYRSSRDKAPHEPFSSTSDLAPPPSSRWPASSSARKEMEAQGFTNGHATWTSAMSSFMLSYLSNVVSIGERTSSGFKKVHYNSCAKAINEKFQITLNGEQIKNHLKTWSRRFAKINRIRKVSGTGWDEDSFTITMDEEHYNGYVKLCAHNSKIXQISDLCTPLGEDDEVDNEEVMAHAFTKRMSTCDDNAITSCTSKTRKKXKKRDSEDEGLIAAFKSVGDTLSSAIEKVATGDTDVPDDLFDSLITLPSVCALFLT

SEQ ID NO: 335477 - protein, 278 aa, Zea mays
  unsure (1)..(278): unsure at all Xaa locations
  Clone ID: MRT4577_69063C.1.pep
LEAAGSPSLHSDLAPPPSSRWPASSSARKEMEAQGFTNGHATWTSAMSSFMLSYLSNVVSIGERTSSGFKKVHYNSCAKAINEKFQITLNGEQIKNHLKTWSRRFAKINRIRKVSGTGWDEDSFTITMDEEHYNGYVKXAALGEDDEVDNEEVMAHAFTKRMSTCDDNAITSCTSKTRKKAKKRDSEDEXLIAAFKSVGDTLSSAIEKVATGDTDVPDDLFDSLINLPSVCALFLTSDVTLFSIICSNKNYCNLKPENYCNIFFDNLLNFVKKKKKSG

SEQ ID NO: 335478 - protein, 198 aa, Zea mays
  unsure (1)..(198): unsure at all Xaa locations
  Clone ID: MRT4577_69064C.1.pep
FAGVVSSGERTSSGFKKVXYNSCAKAINEKFQIALNGEQIKNHLKTWSRRFAKINRIRKVSGTGWDEDSFTINMDEEHYIVYVXGKFAKDSSATLGEDDEVDNEEVMAHAFTKRMSTCDDNATTSCTSKTRKXKKRDSEDEGLIAAFKSVGDTLSNAIEKVATGDTDVPDDLFDSLINLPGVCALFLTSDVVTYFLLI

SEQ ID NO: 335479 - protein, 176 aa, Zea mays
  unsure (1)..(176): unsure at all Xaa locations
  Clone ID: MRT4577_69065C.1.pep
MPATIVSTTETTTQVSAPSFFTPHPISPSPNPAACRRCEGHRAGMISCRKIKHGNFYWTIRRCMSEGSLSEAGLSIAATLPTATSPGTELLRNLPGKTTTSGISDRSSDGAALKTYFSMSCPAFSXAFGSSGATDVLSTNRLNITTTGRKYSSAPNVEATGSEFHPASIPIINKHG

SEQ ID NO: 335480 - protein, 73 aa, Zea mays
  Clone ID: MRT4577_69066C.1.pep
AAGHAVVAVPAAEQPRRREVARSNDVIEAARTKLMQKRQCSRVKALVGAFETVIDTQKDAAVGRPHHIYRKSA

SEQ ID NO: 335481 - protein, 57 aa, Zea mays
  unsure (1)..(57): unsure at all Xaa locations
  Clone ID: MRT4577_69067C.1.pep
IIGKHLRDSVILIWXPXSDGLIKTCVATKPDGRGHIVAYPAFIFYKFLNPLSSTVVR

SEQ ID NO: 335482 - protein, 70 aa, Zea mays
  Clone ID: MRT4577_69068C.1.pep
TPHYLANLTNVHNYYITYVSNVNALVGVITHGKLNHPVNRDCPWVGAHLVGRHTGHDLCRAPPVLGLGGG

SEQ ID NO: 335483 - protein, 118 aa, Zea mays
  unsure (1)..(118): unsure at all Xaa locations
  Clone ID: MRT4577_69069C.1.pep
PCCTGASASAWCVPPRSRRCSEPPPGAAAAPTLTAAPSLSSPGCPGISASPPPSRPSPXXSPPSPPPRTCPPPRPPLRRQRRWALAPAPLLSWGTPPPPPWWWGRQRSPQQLAARPPV

SEQ ID NO: 335484 - protein, 83 aa, Zea mays
  unsure (1)..(83): unsure at all Xaa locations
  Clone ID: MRT4577_6906C.1.pep
EPSRFTYARADAETDMAIEEAAGAPGWRMDRGTSRIGRQAICHGYGASRARMXIVHWGSRLSDLTKWRPTETTRVNKSSDCVH

SEQ ID NO: 335485 - protein, 70 aa, Zea mays
  Clone ID: MRT4577_69070C.1.pep
AIQRQGLRCIYMPAQCRAQVSDSVALTTGLPEIVIVACKHIIKGHLNAPFLQRSVLGLGPTLQINYPPAP

SEQ ID NO: 335486 - protein, 191 aa, Zea mays
  unsure (1)..(191): unsure at all Xaa locations
  Clone ID: MRT4577_69071C.1.pep
MRRWRGCVWDTMAPMILYVAVMPXNXPRARRGCEEAVSVYHIVHINFAADESKSPVHLVRNPVGQAPALDDGDLDLFLSLAICEYAGLRIEPQLSRAGNLHDAAMMDVLLEEAGSLDTAALNPILFQVLISPMLGGSSDQQVVHXSLDILDKALDVNEGRLYFWTHRGGDFLSLGDLRHVTGALCLICAPY

SEQ ID NO: 335487 - protein, 86 aa, Zea mays
  Clone ID: MRT4577_69072C.1.pep
ESCTFASFYVFILRCCILIFLVQSSLHFDSFTHISSFAQYLLHNSDMLILSFPTFLYVLKGFLRVFRTYPKSRTIGSSSIPCITPI

SEQ ID NO: 335488 - protein, 106 aa, Zea mays
  unsure (1)..(106): unsure at all Xaa locations
  Clone ID: MRT4577_69073C.1.pep
GQSVFATLSHKNLERTDARNAAGNTIGASRKGFASGTEAMASTAVIGASVMQAANSTVYVLSHKVLIGLIVRAMLVYWITSQLMNSVXSEALKIVVEVHQQFNMSP

SEQ ID NO: 335489 - protein, 216 aa, Zea mays
  Clone ID: MRT4577_69074C.1.pep
LLQCCAALSSPELFVRTIQERFGLSSYTDLGLAEQNEFESVLMQEMLIFLIQLVKERRFCGLSTADNLRRELIYKLAIGDATHSQIVKSLPRDLSSSDQLQNVLDSLAAYSNPSGMKQGKYVLRKSCWKELDLYHPRWNSRELQIAEERYYRFCEISALNAQLPRWTHVFNPLRSISNIATSKAVLQIVRAVLFYAVYSDASSASRAPDNVLVTGL

SEQ ID NO: 335490 - protein, 90 aa, Zea mays
  unsure (1)..(90): unsure at all Xaa locations
  Clone ID: MRT4577_69075C.1.pep
VFVRRASCSTCGSARAAMVHPEPLLVKHVARGNEDRWKTFYRGNYLISCSAIXEAYTDTQMTSNXDGTSRXLDHSSTLXDLHVVTNNTDF

SEQ ID NO: 335491 - protein, 143 aa, Zea mays
  Clone ID: MRT4577_69076C.1.pep
GGGATPIILDRFFCPQKVWPGKERNSWHVSFKKVPFRNFSGRWSRPEAVSLFCSKKHRCRGVWFFDVKVEYAGKNNKPMVVCSNAKGPAKGSLRALDCLVCWMPLHLHAFFFGFPFPDFIGFQKKKKPPRKKKRKKKKKKKGK

SEQ ID NO: 335492 - protein, 86 aa, Zea mays
  Clone ID: MRT4577_69077C.1.pep
SRRKNLTILSSVILLKKMLFVRSWSAPLWPSLKYSFFSLRFYCPQTPFLGGCFKRFFFFGHLSSFPKFFFFLGGKKKKKNKKKKKN

SEQ ID NO: 335493 - protein, 116 aa, Zea mays
  unsure (1)..(116): unsure at all Xaa locations
  Clone ID: MRT4577_69078C.1.pep
FWAPSSTLGLPPLRHPKGHRGGSRRIVFLFKQEGWPKGPRPAGGIVGLSSDISDELARWLGPDRRDLLXDGXVDRSEXAEYLPRVLXDYATPFGLGRKPEDFAKYQAYELIHARWA

SEQ ID NO: 335494 - protein, 159 aa, Zea mays
  Clone ID: MRT4577_69079C.1.pep
CCHGPRESGMAMLWSVHSPCCPPSRSSGCHRAGHGISFQSIMTPVGVVDLKLGNVLVVVQVVNVLRPAGLEYDRDETVVVLVGAPRQALVKINHSHEHAASRDARKCIPRACSCVLEGHQGQRSGARRIRRSGYASAFSVLCPRMFGSMRMTLVCAAPA

SEQ ID NO: 335495 - protein, 48 aa, Zea mays
  Clone ID: MRT4577_6907C.1.pep
KLLPNGGIHQINLKTHPKPTKSIIHCTFTLSPLLAFAKRTIPTIDHFT

SEQ ID NO: 335496 - protein, 58 aa, Zea mays
  Clone ID: MRT4577_69080C.1.pep
KKKRKRGGGVALGKRKKAEKARQKPKKRGIVHHRYFSRMDDEGRRVHARNHNVPYRNR

SEQ ID NO: 335497 - protein, 60 aa, Zea mays
  Clone ID: MRT4577_69081C.1.pep
ILSNRTRHYLIGLLGGYMRTVDWLKQKRNGVGRFLVQLGTNGTKLSTLRVDYGPRRWCCV

SEQ ID NO: 335498 - protein, 471 aa, Zea mays
  unsure (1)..(471): unsure at all Xaa locations
  Clone ID: MRT4577_69082C.1.pep
MYKSRLQELCQKRRWAPPLYEPTREGPAHAPLFRATVVVNGERFSSRDEGEKSLKEAYNLAAMAAFDNLIALPAAALAPAPAAPAPPSSETQLPYKSQLQIYAQKRGKLLPSYRPIHGGSLHAPLFKSEVTIDGQTFESPEYCHTMKEAETVAAKVALMSLPQEANPTQQLLLPSVNYKNLLQELVQKEGFPLPIYNTASDVSNYSAAFVSTVEIHGVTFHGKPGNTKKQAEMNAAKSAFEHFKNINHDAGSSGSANPLPVAATKQSVDGNTLRAKLEVNKSHLAEPSTEVEAIYSSTEXQTATSRAKHGYRSNGLXLLKLTNCPXERSMDVKVVNSSLKVDKLHFAEPITEAEVIHSSLQVDEPLIPKPGMSSSLENTPAVNGHSAPISPTITPTLISVPTATMPVSNDRCGCYMSTNRIQVYPRHTDMVIPEGAAVLPISDNQWVAVSLPYSMEQRDFCCRNPDCHLGR

SEQ ID NO: 335499 - protein, 64 aa, Zea mays
  Clone ID: MRT4577_69083C.1.pep
SWVCCLGRPGWFVFVRSFILHRLYIRSIFPLPSSMECLAMDEREECSPSLPFALSVFLAFNFNI

SEQ ID NO: 335500 - protein, 91 aa, Zea mays
  Clone ID: MRT4577_69084C.1.pep
LYQFDGPFYLSQLPSVNYKNLLQELVQKEGFPLPIYNTASDVSNYSAAFVSTVEIHGVTFHGKPGNTKKQAEMNAAKFAFEHLKTSVDGTL

SEQ ID NO: 335501 - protein, 99 aa, Zea mays
  Clone ID: MRT4577_69085C.1.pep
IGLGRLSWTAAPSRAPPMCRVAATKCTYLLPPLLCIHDRDLTRSCQRGGHGLPQEDGMLVTAQGADKEAVNAHTRAQVGWQRAIPRRGIPPHPRDDFFP

SEQ ID NO: 335502 - protein, 260 aa, Zea mays
  Clone ID: MRT4577_69086C.1.pep
SACTDGARLPRHPPAVPDSKELCQKRRWAPPLYEPTREGPAHAPLFRATVVVNGERFSSRDEGEKSLKEAYNLAAMAAFDNLIALPAAALAPAPAAPAPPSSETQLPYKSQLQIYAQKRGKLLPSYRPIHGGSLHAPLFKSEVTIDGQTFESPEYCHTMKEAETVAAKVALMSLPQEANPTQQLLLPSVNYKNLLQELVQKEGFPLPIYNTASDVSNYSAAFVSTVEIHGVTFHGKPGNTKKQAEMNAAKSAFEHFKNIC

SEQ ID NO: 335503 - protein, 61 aa, Zea mays
  Clone ID: MRT4577_69087C.1.pep
ELLSEQTDDRERLVNVTSYVIYHRRFDTDAQRVHIAANIIPLSRHAEDNDPRRMTMPTTRS

SEQ ID NO: 335504 - protein, 458 aa, Zea mays
  unsure (1)..(458): unsure at all Xaa locations
  Clone ID: MRT4577_69088C.1.pep
MYKSRLQELCQKRRWAPPLYEPTREGPAHAPLFRATVVVNGERFSSRDEGEKSLKEAYNLAAMAAFDNLIALPAAALAPAPAAPAPPSSETQLPYKSQLQIYAQKRGKLLPSYRPIHGGSLHAPLFKSEVTIDGQTFESPEYCHTMKEAETVAAKVALMSLPQEANPTQQLLLPSVNYKNLLQELVQKEGFPLPIYNTASDVSNYSAAFVSTVEIHGVTFHGKPGNTKKQAEMNAAKSAFEHFKNINHDAGSSGSANPLPVAATKQSVDGNTLRAKLEVNKSHLAEPSTEVEAIYSSTEXQTATSRAKHGYRSNGLXLLKLTNCPXERSMDVKVVNSSLKVDKLHFAEPITEAEVIHSSLQVDEPLIPKPGMSSSLENTPAVNGHSAPISPTITPTLISVPTATMPVSNDRCGCYMSTNRIQVYPRHTDMVIPEGAAVLPISDNQWVAVSLPYSMEQR

SEQ ID NO: 335505 - protein, 200 aa, Zea mays
  unsure (1)..(200): unsure at all Xaa locations
  Clone ID: MRT4577_69089C.1.pep
MPCWGPPRRVWRLPGEFRFYSWGLRSEPEKLGWNGEAEVVHWRGAMLGGEGIFIPEVLNKNRGLNTPFWDPGGEEQYFTHTTPLFIIQLLLIGWGQGPPWAYIIQAGKGKTQPIFPKNXLTETKYGXPGGLWVEPLGWGIGFPEKNKGLRTQENQKRRLALVPGMGGRVQGEXTGTGPIDNSFANLPDLGTATFFKASTP

SEQ ID NO: 335506 - protein, 116 aa, Zea mays
  Clone ID: MRT4577_6908C.1.pep
MNNGSIKKRSKHDTSISTSAKKIRGHDGYFYECVECDLGGNLLCCDSCPRTYHLECLNPPLKRAPPGNWQWPRCRTKQVSLKLLGNADADTSKRERTKRMRTSTIADSPSPHNKSL

SEQ ID NO: 335507 - protein, 61 aa, Zea mays
  Clone ID: MRT4577_69090C.1.pep
THTLILAIFIKPSAYAYVSNKCTLARWGSIPATVICHLVSSMVFTNFLAPHKTRKFHLFLP

SEQ ID NO: 335508 - protein, 93 aa, Zea mays
  unsure (1)..(93): unsure at all Xaa locations
  Clone ID: MRT4577_69091C.1.pep
ELFVGGRPIVFTWALHEEVFAHPDXVGFLXHSRWNSTVDAISEGVRTCCCPLVQDQLMHMMYPRDLCKVVTELEAEQLESGHVNAVIKRLFKT

SEQ ID NO: 335509 - protein, 182 aa, Zea mays
  unsure (1)..(182): unsure at all Xaa locations
  Clone ID: MRT4577_69092C.1.pep
MAVKMIIFAACVATTLAQYAAPAYPAHHAYAPEHSYESPTPYNFEYSVNDPHSYDVKSXQSEHSDGHGNVKGSYSLLESDGSTRVVEYTADHSGFNAEVKKIEGHSHGYSAPASAYKSAPAYKPAYAAPAHSYAAPAHSYAAPAHSYAAPAHSYAAPAHSYAAPAAYAKHSYAAPAHSYAAP

SEQ ID NO: 335510 - protein, 53 aa, Zea mays
  Clone ID: MRT4577_69093C.1.pep
RQRHASERYKNVFDNIQYLRQSKHIYSNFDTKIFLYRSFEHIFSTSFLTRIFK

SEQ ID NO: 335511 - protein, 64 aa, Zea mays
  Clone ID: MRT4577_69094C.1.pep
FFRRLALEQKLFPLKKPGMVGGAKSHPKKGVVGGFRNKTQPRRCRGAFSKVVGLPPKGGHLITP

SEQ ID NO: 335512 - protein, 140 aa, Zea mays
  unsure (1)..(140): unsure at all Xaa locations
  Clone ID: MRT4577_69095C.1.pep
GHVRDLTAYTNNAIRSLLLLVLFCVGHGDKEESKGMHAKAHAPGGSLDITXLRASGIGTTHSTKVEQEAXPSAGDGTGKQTILMPKGDFLVEQLNFTCPCLGDVTXIHEDRNLLATTGLLQCKDHVNWIEILRVDNLLMT

SEQ ID NO: 335513 - protein, 43 aa, Zea mays
  Clone ID: MRT4577_69096C.1.pep
KTDGESIKLMVFDSRQFWAICLFMVSGPLKNVLGRLQINSGHP

SEQ ID NO: 335514 - protein, 146 aa, Zea mays
  Clone ID: MRT4577_69097C.1.pep
GKQAGPGSTLPPQNTLPTPENLQRNIRGSLPQNPKKNNQILNLKGSWKGPFKSPPGKGRLLSPKLGGAPPPWKDAPRQFIPGGAPNLVFVQMMLLPRAGECKKASGGQQKGLSKKPRPLSGDPRQQIPCKMQEPRPKTWVPCEPQQ

SEQ ID NO: 335515 - protein, 67 aa, Zea mays
  Clone ID: MRT4577_69098C.1.pep
VLNKCWLGLTMSSLTDYPNSCLKFKHFAQAGEFMSRRISSSLSPPYSTRTCDLLLFVPLVFYEDPVN

SEQ ID NO: 335516 - protein, 72 aa, Zea mays
  Clone ID: MRT4577_69099C.1.pep
RTRGEIRDVAGDSLRVLFSQNGALLPFIRLCQKNSLLFPLLLLTQHCGSIYIYILKPSVIKQPIFLQLDAVT

SEQ ID NO: 335517 - protein, 66 aa, Zea mays
  Clone ID: MRT4577_6909C.1.pep
IPHVSSPGPPQKKTARLLLLLRRAGSHVWHLSRARVLRLLSGKEGCNPPLLRTGAAQASSRRCTTT

SEQ ID NO: 335518 - protein, 193 aa, Zea mays
  Clone ID: MRT4577_690C.1.pep
MGLCMSRGETTPTRAAPPPSKDTALVLMPSGEMREYPPHTATAARVLQDASASASADWFLCDADRVGFEGPVPALGGAEALRAGQIYFVLPAAARRRGLRREDVAALAVRASAALSARHSCARGKRSRRCGAVAPLVFAPPPPPEAEEEHGRWETFVAARKAPPVRRPSRSGRRLQRFASDLTAIPECEMASE

SEQ ID NO: 335519 - protein, 153 aa, Zea mays
  unsure (1)..(153): unsure at all Xaa locations
  Clone ID: MRT4577_69100C.1.pep
SGVGQIVLWDWLYGVLSSLGLWQKEAKILFLGLVNAGKSTLLHMVEDDGMWQFPSTQDPNSDELSILNIKCNSXLSHAAPRLARRXWKEYYAKVYAEEYLADAYDTERFAESETDLDVLLSDDXSLLKVPFLILVMKIDIPYVASVEDLRDHL

SEQ ID NO: 335520 - protein, 637 aa, Zea mays
  Clone ID: MRT4577_69101C.1.pep
MAACLLHPYPPGLHSSRANPYSASRQPTHLKWELGRWRRHLLLCVAASAGILQRELIMLPSARTTQNPGPVNPRNQFDIMPERSTENTKSAANPLDESLGTGGQIASGRDPHEVGEKSESAVFVALAHAGRHAEVVELFRSMRREGVPVNRFVLPSVFRACADLWDSRMLRAVHGLVINCSLCQHVVVGTALAAAYIDLGLVDDASPVFDDISQPNVVSWSVIIGGYARSSQWDKAWDAFSAMQCSGLPPNGSVLVMAIQACGALGCLVRGKQAHTVAVVLGFERNATVWNCLIDMYGKCGSVESCRRVFDTTVSRDQVSWNTIISCYARLGLCEEALETIVRMQESGFTIDRFVLGSGVAACANLADIDSGRAFHGYLIRRALDTDVIQGSALVDMYGKCGYMDLARLVFDRMDERNDVSWDALLSGFVENGLVDAALDTFRQMESAKIKSNQHTFVNLLRLCGDRRYREYGRQIHGHAIRVINQMNVVLETELIDMYAKCGCIEVSQLLFLRMNERNLVSWNTLLSGYVGDGQPVATVNIYRQMELARVGPDHYTLAGLLNMCRFQGLLRYGRQIHAHLIKTGSEMNVVLQTLLVHMYFKCRRWRDAHNVCTLIRERNSHVYEAFFKVYGDDYLI

SEQ ID NO: 335521 - protein, 165 aa, Zea mays
  Clone ID: MRT4577_69102C.1.pep
HASDLFDYLPLTALIENQGPCLHGGLSPSLDTLDNVRSLDRIQEVPHEGPMCDLLWSDPDDRCGWGISPRGAGYTFGQDIAQQFNHTNGLSLISRAHQLVMEGFNWCQDKNVVTVFSAPNYCYRCGNMAAILEIGENMDQNFLQFDPAPRQIEPDMTRKTPDYFL

SEQ ID NO: 335522 - protein, 98 aa, Zea mays
  Clone ID: MRT4577_69103C.1.pep
GLGSLSRKEPERKPPVRRVKSKRPFKKSVLEQQIQQKGASSSCSANTNQQLENHKLKQQIQPKGGNSSWFFDTDQLSENHESMSRGVSFSGVKKRGKI

SEQ ID NO: 335523 - protein, 71 aa, Zea mays
  Clone ID: MRT4577_69104C.1.pep
ITFIFSISNSKVHKDKNVVTVFSAPNYCYRCGNMAAILEIGENMDQNFLQFDPAPRQIEPDMTRKTPDYFL

SEQ ID NO: 335524 - protein, 328 aa, Zea mays
  unsure (1)..(328): unsure at all Xaa locations
  Clone ID: MRT4577_69105C.1.pep
MPSHGDLDRQIAQLRDCKYLPESEVKALCEQAKAILMEEWNVQPVRCPVTVCGDIHGQFYDLIELFRIGGDSPDTNYLFMGDYVDRGYYSVETVSLLVALKVRYRDRITILRGNHESRQITQVYGFYDECSSTYKHANVWKSTSDLVDXPPPALLLAGGLAGSRDRPPPRLCLLGRRRQELGKWRQGKGRFEVRAEPQRRCRRTRIWTTRSRSCGIASSCEPWSSRRWGSRPRGAGYTFGQDIAHEFNHTNGLSLISRAHQLVMEGFNWCQDKNVVTVFSAPNYCYRCGNMAAILEIGENMDQNFLQFDPAPRQIEPDMTRKTPDYFL

SEQ ID NO: 335525 - protein, 141 aa, Zea mays
  unsure (1)..(141): unsure at all Xaa locations
  Clone ID: MRT4577_69106C.1.pep
PWSGGGGSGEPLPPPPLIPGRGFPFGPPNLISGGPVPXPWPGKPRAAPPIGPALQPPXPPGXMGKGPPPPLFPKCPTPDGVRAPPLFRAXPRGWGGFPPGGPPXGRRPSARPFRFPPFLVPRVGRLPPPSSKWGAPFGVPF

SEQ ID NO: 335526 - protein, 74 aa, Zea mays
  Clone ID: MRT4577_69107C.1.pep
GHSTTARAMMDEYLVGEIDAATIPTKVKYTPPKQPHYNQDKTPEFVIKILQFLVPLAILGLAVAVRIYTKSESA

SEQ ID NO: 335527 - protein, 147 aa, Zea mays
  unsure (1)..(147): unsure at all Xaa locations
  Clone ID: MRT4577_69108C.1.pep
MAIPVIDLSKLEGPERAETMAAIAAGFEHVGFFQLVNTGIPDELLERVKKVCSDCYMLRDEAFMDSNLAVKALAELVEKESEGGVPVRKIEGMDWEDVFTLHDDLPWXSNPPAFKETMMEYRKELRKLAEKMLGVMEELLGLEEGHI

SEQ ID NO: 335528 - protein, 138 aa, Zea mays
  unsure (1)..(138): unsure at all Xaa locations
  Clone ID: MRT4577_69109C.1.pep
ENTPVRSHASSQNGSRKLITAAGPPILTRXNFLGVTTISQANIGHISATELAAYALDCTELMTSINGILLAMASALETSSRQSDSARHYHMLDIYQQRPXIIQVACALPLLPMYLFTEPTQVAQVQDPDIPALNQTIY

SEQ ID NO: 335529 - protein, 336 aa, Zea mays
  Clone ID: MRT4577_6910C.1.pep
KGILKAQAASSLARSPSRPRVSINVQDNEISLERTRLWRGVGGNGKRQQQQQQQQAGPRRRSVEEVLREAGADIIGLQNVRAEEERGMRPLSELAEGLGMRYVFAESWAPQYGNAVLSRWPIKRWKAHRVADQSDFRNVLRVTIEVPDAGEVNFHCTHLDHLDEGWRMKQVDAIMRSGGDGPHILAGGLNALDGTDYSADRWADIVKYYEEIGKPTPKVEVMQYLKAKQYVDAKDFAGECEAVVVVAKGQDVQGTCKYGTRVDYIMASPNCPYKFVPGSYTVVSSKGTSDHHVVRVDVAVPHAREPDDAEATANGQRSRVVKMTKKSSRKGIWGAK

SEQ ID NO: 335530 - protein, 130 aa, Zea mays
  Clone ID: MRT4577_69110C.1.pep
MVRVSVLNDALKSMYNAEKIGKRQVMIRPSSKVIIKFLTVMQRHGYIGEFEYVDDHRAGKIVVELNGRLNKCGVISPRFDVGVKEIEGWTARLLPSRQFGYIVLTTSAGIMAHEEAPRKNVGGKVLGFFY

SEQ ID NO: 335531 - protein, 195 aa, Zea mays
  unsure (1)..(195): unsure at all Xaa locations
  Clone ID: MRT4577_69111C.1.pep
SSLRAHRLFPRQDRIPYRPDAIRGSDGEVLEVVPSTRHLHPSGELPFQKVVRYTVGKITPIQKREVHASDFGPTASFWMNFSKEGSRLTPSHSAEDFKWKDYCPMVFRNLREMFKIDAADYMISICGNSALRQLSSPGKSGSVFFLSQDDRFMIKTLRESEVQVLLRMLPKYYXHVRTYENXLINQFFGXHRGET

SEQ ID NO: 335532 - protein, 102 aa, Zea mays
  Clone ID: MRT4577_69112C.1.pep
NVQQGERGAARALLPNRKKGKGTRRNKIGMGRAWLSQAVKCRATASKLVFRIQKRRGSKPEARGREPGNRKAAAPFFFFFFLSLFFFFFFFFFFFFFFFFFF

SEQ ID NO: 335533 - protein, 83 aa, Zea mays
  Clone ID: MRT4577_69113C.1.pep
HIALASPHTHPARHPRICKRRASSHAFAFKLPSSDGVCAAQGSFSLCAATSFLGGGRQYTGRRISPSLSLSLYFVPHLIRGVE

SEQ ID NO: 335534 - protein, 87 aa, Zea mays
  Clone ID: MRT4577_69114C.1.pep
QRGDEYVVFVVAIDGNRYVPRRRGNRRGRGCETTGRDDIVIYYDVFVMLIFGWAILDDDRYRCSEVVWVRAITESNPVSAACLCTST

SEQ ID NO: 335535 - protein, 106 aa, Zea mays
  unsure (1)..(106): unsure at all Xaa locations
  Clone ID: MRT4577_69115C.1.pep
LHTKHIRGPTLSDQIFSLGMLLXGRYASAATATIMPQCWHAYITMLITMYLSPDVCXICVNPFTILHAIQQAITDGITAVXPCCYHTYXAIVHEIPKEHISAQNIR

SEQ ID NO: 335536 - protein, 102 aa, Zea mays
  Clone ID: MRT4577_69116C.1.pep
YPLGLRKACNVMCSNTWAYINTSCTPTLFIYDIITPSHARQLHTYIDVCKYILECRTTSRSDYLGNTRFKILDDNVYDKPCFGEELAPIFIIYMPPFLHGHY

SEQ ID NO: 335537 - protein, 41 aa, Zea mays
  Clone ID: MRT4577_69117C.1.pep
TVSGTGVLGSLGDKKTTDIFLNPYFTQGVKGRNATRVSILF

SEQ ID NO: 335538 - protein, 127 aa, Zea mays
  unsure (1)..(127): unsure at all Xaa locations
  Clone ID: MRT4577_69118C.1.pep
VTERGRLATAHSVANQWPPPWSSRSSTPPRRTATAAASPACPSRGAPCAATACSPPTDTESDTNARIPXLPAESGDAGQPGQCCDYVTKVPIIRRPPRWRYNDVENKCSADCHECEESLADHAFHCD

SEQ ID NO: 335539 - protein, 122 aa, Zea mays
  Clone ID: MRT4577_69119C.1.pep
DTQPFFFFFLFFFFFPGPTTGWRKKPRKTNHTSGGGGEPNKNPAYHGKKHAKGGNQDTARGPLGETHLGAKPSPLGAIPRAAENGPPLAVTQDKRAARGKWKTRDNSRENQPQNIKGKAWGA

SEQ ID NO: 335540 - protein, 685 aa, Zea mays
  Clone ID: MRT4577_6911C.1.pep
MEAVDKIAEPKDPFVLTAQKVQSSEPPIPIKASCEGNDSQQQEETDLPDDGEESFRSMDSSDEGVRSSFSGASHPPEPIDMDIMKTVYVAIDEKSEPPVSLVRGVSVKGPFIDDLSIRVTGAKANLVVGAGGAEGMAEERKVSASAVASVTTARSSQATSLPQDSEEKECVWDASLPASGNVSPHSSIDSMGVVTAMSTLNSCTSTYKSETIAGEAMLNVERNCESVKGVRGDLLESAKTSMSRASDSSVVSDDSSWSHITGGARKPHKGNDPRWKAIHAVRTRDSVLGMSHFRLLKRLGCGDIGSVYLSELSGTRCYFAMKVMDKASLASRKKLNRAQTEREILQLLDHPFLPTLYTHFETDRFSCLVMEFCPGGDLHTLRQRQPGKHFSEYAARFYAAEVLLALEYLHMLGVVYRDLKPENVLVRDDGHIMLSDFDLSLRCAVSPTLIRTSAFDSDPRRAGGSFCVQPACIEPTSACIQPACFLPKFFGQKSKKKTRKARSELGHNAGTLPELVAEPTSARSMSFVGTHEYLAPEIIKGEGHGSAVDWWTFGIFLHELLYGKTPFKGSGNRATLFNVVGQQLKFPESPSTSYSSRDLIRGLLVKEPQSRLGVKRGATEIKQHAFFEGVNWALIRCSTPPEVPRPVEAELPVKYGVAEAIGSNSKRVVGADVKSAGKYLDFEFF

SEQ ID NO: 335541 - protein, 226 aa, Zea mays
  unsure (1)..(226): unsure at all Xaa locations
  Clone ID: MRT4577_69120C.1.pep
MPELRSSTRQACLRSKKLEDLQLGEPPAKPVSPAPPRAGKRAPTRAARGRKGATGKGVPPAPKTRRKRGNIVDLEADPACEDPPKAVKGLEVAAAAAPKNLPLKEVAEVGVLKMNGVSAEKIIGAEDESTATPVPERVQVGNSPEYITDRKLGKGGFGQVYVGRRVXGGAARTGPDAYEVALKLEHRNSKXCNYGPPYEWQVYNTLNGCYGIPSVHYXGRQGEYYI

SEQ ID NO: 335542 - protein, 87 aa, Zea mays
  Clone ID: MRT4577_69121C.1.pep
SSPQGGPLMFPPRLSPVGPQSGVPILSPPVFPLGDWSPSVFPLGPPLWGSQFRGPCFKFLKGECNWDHFFGFLPPRLLGGAIWGFPL

SEQ ID NO: 335543 - protein, 101 aa, Zea mays
  Clone ID: MRT4577_69122C.1.pep
QPKLQSCKCYCDRQHSVCRVRPSIHGVKQNTKGSSVFPMHVRTCVHTTRKEVETEEVVGCVGGAQNNARTFLFLLPPVAASAAAAPARATGGLGGHYSLPA

SEQ ID NO: 335544 - protein, 47 aa, Zea mays
  Clone ID: MRT4577_69123C.1.pep
DQGKFIIHKRGVMFNYTRLLHLVFLNTTDHLHSFLLHQKPCFPRTRT

SEQ ID NO: 335545 - protein, 192 aa, Zea mays
  unsure (1)..(192): unsure at all Xaa locations
  Clone ID: MRT4577_69124C.1.pep
LIHPQSTRHSPRNGGGGDGGGXRKMARKPLDYEELNENVKRVQYAVRGELYLRASELQKEGKKIIFTNVGNPHALGQKPLTFPRQVVALCQAPFLLDDPHVGLMFPADAIARAKHYLAMAPGGLGAYSDSRGIPGIRKEVADFIHXSDHYPSSGGRLPCHHVELQEVQRLVHGTVRGLLQAVSRKRNKRLQI

SEQ ID NO: 335546 - protein, 133 aa, Zea mays
  Clone ID: MRT4577_69125C.1.pep
PAGRNRQGDRSGEQGSGRAGDIIVIQGFSIGSDGDQGGGEEKAAENVYIKKVEQEKLEKLARKGPSSGEQPSSTTGSAASDVKADAGPTESASASVSTDKNKNYAVLAGAVAALGGLGWYLLLKPKKSEEVVD

SEQ ID NO: 335547 - protein, 71 aa, Zea mays
  unsure (1)..(71): unsure at all Xaa locations
  Clone ID: MRT4577_69126C.1.pep
LEAGRAGFHCLXLLEATGISTVPGSGFGQKEGVFHLRTTILPAEEDFPTIMSSFKKFNDSFMEQYEVYSRM

SEQ ID NO: 335548 - protein, 84 aa, Zea mays
  Clone ID: MRT4577_69127C.1.pep
ILYYFFFSPKTEQALKIYSVLLQSIWIEEVSIYSTSNLLQSKSISPNTYELKITEQALKYFGPLSPLHYSQPSCLTYRIESQIL

SEQ ID NO: 335549 - protein, 118 aa, Zea mays; identical to SEQ ID NO: 191572
  Clone ID: MRT4577_69128C.1.pep

SEQ ID NO: 335550 - protein, 320 aa, Zea mays
  unsure (1)..(320): unsure at all Xaa locations
  Clone ID: MRT4577_69129C.1.pep
MARRRPMDYEELNEKVKKAQYAVRGELYLRASELQKEGKKIIFTNVGNPHALGQKPLTFPRQVVALCQAPFLLDDPNVGLMFPPDAIVRAKRYLAMAPGGLGAYSDARGIPGIRKEVADFIHKRDGYPSDPELIYLTDGASKGVMQMLNAIIRNERDGILVPVPQYPLYSAIISLFGGSLVPYYLEEEANWSLDFVNIRQTVAXRAMVMINPGNPTGQCLSEANIKELLQFCYHENLVLLADEVYQQNIYQDERPFISARKVMFDMGPPISSELQVVSFHTVSKGYWGECGQRGGYFEMTNLPXKTVDEIYXVASIALSP

SEQ ID NO: 335551 - protein, 171 aa, Zea mays
  unsure (1)..(171): unsure at all Xaa locations
  Clone ID: MRT4577_6912C.1.pep
LVQVATGXAMTLYYRPTVTEALSSVQYIMTEANFGWLIRSVHRWSASMMVLMMILHVFRVYLTGGFKKPRELTWVTGVVLAVLTASFGVTGYSLPWDQIGYWAVKIVTGVPEAIPVIGSPLVELLRGSASVGQSTLTRFYSLHTFVLPLLTAVFMLMHFPMIRKQGISGPL

SEQ ID NO: 335552 - protein, 478 aa, Zea mays
  Clone ID: MRT4577_69130C.1.pep
MARKPLDYEELNENVKRVQYAVRGELYLRASELQKEGKKIIFTNVGNPHALGQKPLTFPRQVVALCQAPFLLDDPHVGLMFPADAIARAKHYLAMAPGGLGAYSDSRGIPGIRKEVADFIHKRDGYPSDPELIYLTDGASKGVMQILNTIIRNEMDGILVPVPQYPLYSATISLYGGSLVPYYLEEEANWSLDFVNIRQTVAEARSKGISVRAMVMINPGNPTGQCLSEANIKELLQFCYHENLVLLADEVYQQNIYQDERPFISARKVMFDMGPPISSELQVVSFHTVSKGYWGECGQRGGYFEMTNLPPKTVDEIYKVASIALSPNVPGQIFMGVMVNPPKPGDISYLKFAAESKSIHESLRRRARMMTDGFNSCRNVVCNFTEGAMYSFPQIRLPPRAIEAARRAGKSADVFYCLKLLEATGISTVPGSGFGQKEGVFHLRTTILPAEEDFPAIMSSFKKFNDSFMEQYEGYSRL

SEQ ID NO: 335553 - protein, 70 aa, Zea mays
  unsure (1)..(70): unsure at all Xaa locations
  Clone ID: MRT4577_69131C.1.pep
ARATRPGLLAFLPRCLLLHTHMQRDXICATSQATTTCITTPVTTHRTNSLTTSLSSTSTACLTLTPPLQG

SEQ ID NO: 335554 - protein, 478 aa, Zea mays
  unsure (1)..(478): unsure at all Xaa locations
  Clone ID: MRT4577_69132C.1.pep
MARKPLDYEELNENVKRVQYAVRGELYLRASELQKEGKKIIFTNVGNPHALGQKPLTFPRQVVALCQAPFLLDDPHVGLMFPADAIARAKHYLAMAPGGLGAYSDSRGIPGIRKEVADFIHKRDGYPSDPELIYLTDGASKGVMQILNTIIRNEMDGILVPVPQYPLYSATISLYGGSLVPYYLEEEANWSLDFANIRQAVAEARSKGISVRAMVMINPGNPTGQCLSEANIRELLRYCYHENLVLLADEVYQQNVYQDERPFISARKVMFDMGPPISREVQLVSFHTVSKGYWGECGQRGGYFEMTNLPPKTVDEIYKVASIVLSPNVPGQIFMGVMVNPPKPGDISYPKFTXESKSILESLRRRARMMTDGFNSCRNVVCNFTEGAMYSFPQIQLPARAIEAAKRAGKAADVFYCLKLLEATGISTVPGSGFGQKEGVFHLRTTILPAEEDFPTIMSSFKKFNDSFMEQYEGYSRM

SEQ ID NO: 335555 - protein, 488 aa, Zea mays
  unsure (1)..(488): unsure at all Xaa locations
  Clone ID: MRT4577_69133C.1.pep
MARRRPMDYEELNEKVKKAQYAVRGELYLRASELQKEGKKIIFTNVGNPHALGQKPLTFPRQXTSSRSRAQVVALCQAPFLLDDPNVGLMFPPDAIVRAKRYLAMAPGGLGAYSDARGIPGIRKEVADFIHKRDGYPSDPELIYLTDGASKGVMQMLNAIIRNERDGILVPVPQYPLYSAIISLFGGSLVPYYLEEEANWNLDFANIRQAVAEARSKGITVRATVIINPGNPTGQCLSEANIRELVRFCYHENLVLLADEVYQQNIYQDERPFISARKVMFDMGPPISSELQVVSFHTVSKGYWGECGQRGGYFEMTNLPPKTVDEIYKVASIALSPNVPGQIFMGVMVNPPKPGDISYLKFAAESKSILESLRRRARMMTDGFNSCRNVVCNFTEGAMYSFPQIRLPARAIEAAKRAGKAADVFYCLKLLEATGISTVPGSGFGQKEGVFHLRTTILPAEEDFPTIMSSFKKFNDSFMEQYEGYSRM

SEQ ID NO: 335556 - protein, 248 aa, Zea mays
  unsure (1)..(248): unsure at all Xaa locations
  Clone ID: MRT4577_69134C.1.pep
YACRYRSGIPGSTHASAGKKEDLYLKPIQRTILMMGRYVEPIEDVPCGNIVGLVGVDQFLVKTGTITTFEHAHNMRVMKFSVSPVVRVAVEAKNPADLPKLVEGLKRLAKSDPMVQCIIEESGEHIIAGAGELHLEICLKDLEEDHACIPIKKSDPVVSYRETVSEESNVLCLSKSPNKHNRLYMKARPFPDGLAEDIDKGEXVSACQELKARARYLAESMSGDXAEARQIWXCFGPDGTGPHILTDI

SEQ ID NO: 335557 - protein, 130 aa, Zea mays
  Clone ID: MRT4577_69135C.1.pep
GPSEVEEELVGRRKNNRFFAHSCGCFSVPGFPAMEEVEVANMAAVESCHRVLALLSQQQDPALLKSVASETAEACAKFRKVAALLGSASGGGGCGHARGRFSRRVRPLGLVNQKSPLGIATGSGNPLEMM

SEQ ID NO: 335558 - protein, 71 aa, Zea mays
  Clone ID: MRT4577_69136C.1.pep
IAQMLVGWVNSYPNFGYNFSFKNFFWATNKPHDFLPFVFKPLQLAIRGNMRAIPKGSYGLLPLPRKGVFCF

SEQ ID NO: 335559 - protein, 367 aa, Zea mays
  Clone ID: MRT4577_69137C.1.pep
MEEVEVANMAAVESCHRVLALLSQQQDPALLKSVASETAEACAKFRKVAALLGSASGGGGCGHARGRFSRRVRPLGLVNQKSPLGIATGSGNPLEMMPSTAAAAGSPSPPQSTSYAQMRARLSSAPESSRGLDLACSSSRCSPHPFGAPKLVQPLSVQFQIGSVAHRYPFHQQQSRQKLQAEMFRRSNSGISLKFDSPSPSGGAAGTMSSARSFMSSLSIDRSMASLDGKRPFHLVGTPVASDPADAHRAPKRRCTGRGEDGRGKCATTGRCHCSKRRKLRIKRSIRVPAISNKIADIPPDEYSWRKYGQKPITARAHPRGYYKCSSVRGCPARKHVERCVDDPAMLIVTYEGEHSHTQLPAQPAQT

SEQ ID NO: 335560 - protein, 78 aa, Zea mays
  Clone ID: MRT4577_69138C.1.pep
SVAVVLVNVEVTAASAMMWPALASMDELLNALQVVVALALLLGREEVDAVLVLLSEPVAPPALIVPRLVFAVHQKEMP

SEQ ID NO: 335561 - protein, 95 aa, Zea mays
  Clone ID: MRT4577_69139C.1.pep
FFWDKGHSSLNSTSRLKDYLSTEKTNPSSRVRDSTKVQYKADVYVCNAVPVQQHTAPTNMDISAQMPDQFRSGSLRDQSGTTNPPPQTSTLAAQG

SEQ ID NO: 335562 - protein, 122 aa, Zea mays
  unsure (1)..(122): unsure at all Xaa locations
  Clone ID: MRT4577_6913C.1.pep
VAPEQVERCTSPFRXAKMVNVPKTKKTYCKNKECKKHTLHKVTQYKKGKDSLSAQGKRRYDRKQSGYGGQTKPVFHKKAKTTKKIVLKLQCQSCKHYSQHAIKRCKHFEIGGDKKGKGTSLF

SEQ ID NO: 335563 - protein, 93 aa, Zea mays
  Clone ID: MRT4577_69140C.1.pep
MSSETAAAPSETEAARVNLLKRNSDDVGWEYGVLVDANNKDKVKCKFCDKEMRGGIYRLKEHLAHVGKNVKKCTSATPQALEAKEKCKKAIEA

SEQ ID NO: 335564 - protein, 44 aa, Zea mays
  Clone ID: MRT4577_69141C.1.pep
DPHRNAAPGAYLMEKDDTSLHHSLSCLLRTDVGQMSVLDKIDGT

SEQ ID NO: 335565 - protein, 85 aa, Zea mays
  Clone ID: MRT4577_69142C.1.pep
PREALPRAIPRPTRLRSPSLLSINRNAITAGGSNPPYLQKIMEAIAELIERTGCSSQAIDMYVGDNARLLSERHLKKHALHSTPW

SEQ ID NO: 335566 - protein, 30 aa, Zea mays
  Clone ID: MRT4577_69143C.1.pep
TRDFKLRIVYVLGDTPEGVASYSEGLIGVG

SEQ ID NO: 335567 - protein, 154 aa, Zea mays
  Clone ID: MRT4577_69144C.1.pep
MAAEHHLPPEHADHHRGGRKGVHADDLKPRWWRRSPRYSYYYGGGEGGGAVRALCFAVLVLLLAAGITLLVLYVVYRPSHPTFAVTSAAVLALYNATANVAVFAGAASGLVAVLAVAVLFTLVLLLGRVRFVHEPFHLGVVLVFFRLRPPSWCS

SEQ ID NO: 335568 - protein, 104 aa, Zea mays
  unsure (1)..(104): unsure at all Xaa locations
  Clone ID: MRT4577_69145C.1.pep
PGWIPNLNPRTKSATATTEAEVRESLGTKFGRLKEQAKDMASRHPVAGAAAVIAVSAVGAYFLWPVAAPAVXVLKAPGFXVVLLLGAVXLPVLRLCCLLLLFFS

SEQ ID NO: 335569 - protein, 132 aa, Zea mays
  Clone ID: MRT4577_69146C.1.pep
DAWVFVSLVKRFDLEDTPLEPDGQECKTDEEDRMDELVKKKDRKDAESTEFKTDEVDMKDGESTECKTVEIGRKDEKSTDATVELNNKRSLLLELISTFVEIADEDLLDKLFGFIKTWLLDSSMFCHSKVLF

SEQ ID NO: 335570 - protein, 390 aa, Zea mays
  unsure (1)..(390): unsure at all Xaa locations
  Clone ID: MRT4577_69147C.1.pep
LRGVSLXSGFLGGVHRTEERVAPRAPHAAARDAEVVRPLSKLPNSSIGLYDSSFERDACGVGFVAELSGDYKRETVNDAIEMLERMAHRGACGCEKNTGDGAGIMVALPHDFFKEVAKDAGFELPPPGEYAVGMFFMPTDEKRREKGKAEFMKVAESLGHVILGWRLVPTDNSDLGESALETEPVIEQVFVTKSSRSEAEFEQQLYILRRLSIISVRASLNIKRGGERDFYMCSLSSRTIVYKGQLKPSQLKGYYYADLGHENFMSYMALVHSRFSTNTFPSWDRAQPMRVLGHNGEINTLRGNKNWMTAREGLLEAEKLGLSKEQLSRILPIVDATSSDSGAFXKNDNVLELLVRGGRSLPEAVMMMIPEAWQNDVDMATATATATEFE

SEQ ID NO: 335571 - protein, 90 aa, Zea mays
  unsure (1)..(90): unsure at all Xaa locations
  Clone ID: MRT4577_69148C.1.pep
RERISIHIGQAGIQVGNTRWELYCLEHGTSADGQMPGDNTIGGGDDDFSTXFFRETGGGEPHPRAGLADLEPNDLEEEREGTYXRQRLHP

SEQ ID NO: 335572 - protein, 249 aa, Zea mays
  Clone ID: MRT4577_69149C.1.pep
VAACALNKCGLPLEALECLSTNSSIDGKDSIIAHGDGDHKIFYGILSPVSASKNWLSSSVISGIESNLKLTMASKYLSSLLRKHSLCSQLNAPLSEEKVLNEYNNHQIEKLTCDITTVISIFDKRFSLKFADIAEKILIFCSHDGLLFLAYVLLWGTRSPDVATDNYILECHPLCPIDYLLLFSFKESCKFFSRYVVLSSMCSVLNMEDTNSTAWALKERHKYIVISLSNYLNVSRLLLKHDKSGNYIL

SEQ ID NO: 335573 - protein, 72 aa, Zea mays
  Clone ID: MRT4577_6914C.1.pep
PTRSDEFKKEEKQHKHGQHLGEARTIADCALALYEKHQAKNDPEHSHRHKIEEEVPAAAALGFSGFAFHEHH

SEQ ID NO: 335574 - protein, 114 aa, Zea mays
  Clone ID: MRT4577_69150C.1.pep
MARGDAAQTKVHYKGKAEDFIVFVDSSEAVQEWKKDSSVPLAQVVSGFKILVTDNHGTQGILNTASKGTLENEFGTSNEDEVIKQILQKGDVQTTQNSERQGDTNDSKGSMLAH

SEQ ID NO: 335575 - protein, 76 aa, Zea mays
  Clone ID: MRT4577_69151C.1.pep
QHLVTTRRQTSPISYTFVLSGGTASPIVSAVAPPNIPVISYPDRCEPLSAAAARHASASESLCDWKLRHCLAIEGW

SEQ ID NO: 335576 - protein, 137 aa, Zea mays
  Clone ID: MRT4577_69152C.1.pep
TATDCSRTPFLEASVFLGPLAQPPPNEEPPPSLPSTLRPMPGRGLRGGQRPLVHAAAPADPVAPDRLPAFVVGAWSQHRHAGAVRRIRGRHTKDSRMSRATALVPSPTSRYRGGGSPARSCPHHKSLCPLSSAPPVE

SEQ ID NO: 335577 - protein, 75 aa, Zea mays
  Clone ID: MRT4577_69153C.1.pep
IPPNQIQPENKREALKMHLDKELLSAICLMHCNLYCCYSSPRSGGRFFRAGGMMEMINAMLNLTLTVLPAAIGDD

SEQ ID NO: 335578 - protein, 66 aa, Zea mays
  unsure (1)..(66): unsure at all Xaa locations
  Clone ID: MRT4577_69154C.1.pep
YLEDGRAGGSLTSEAXRSGYLSSNKXRRAGGGGRAKTRCLPRSAHTPFRLFSAFPPQSQSARGDRE

SEQ ID NO: 335579 - protein, 78 aa, Zea mays
  unsure (1)..(78): unsure at all Xaa locations
  Clone ID: MRT4577_69155C.1.pep
SSRCXFLESRLPPSFYCLFPNTAIFGENEMLNTQNKGASFLTQANFLFSFLSFSPLNQQGYSLQDRKKTMFTCLLEKN

SEQ ID NO: 335580 - protein, 71 aa, Zea mays
  Clone ID: MRT4577_69156C.1.pep
LSYKRLRAENEFAHKIAEEKALKLVRRTMGPHARPVHKHGRSLRPQKWTNHALHRVWSQMALMIEGRGGTL

SEQ ID NO: 335581 - protein, 98 aa, Zea mays
  Clone ID: MRT4577_69157C.1.pep
GGGRLSAPAHFCYNLPMGRTRAENEGAFKKTGPTKKAPLHGGAKRPNKTRRVIHFLRTRKTAQKKKICRRCISFTKKYIFHWTGKGKLLNWTTPGQER

SEQ ID NO: 335582 - protein, 42 aa, Zea mays
  Clone ID: MRT4577_69158C.1.pep
TTESKSNIWLSRTHTLFFKFGIGEDTTATGIHYAYLNNRSML

SEQ ID NO: 335583 - protein, 113 aa, Zea mays
  unsure (1)..(113): unsure at all Xaa locations
  Clone ID: MRT4577_69159C.1.pep
AEPRGRNTGPSTPPGFPFAELGTTPXAXGEQQTADNGDGQGQSTGARNTAKGEPQXAKANGAEPRDEPCGKGNIPAPGLADDFANTAAGARNIMLPKQPKTSQRAVTMGGGHG

SEQ ID NO: 335584 - protein, 47 aa, Zea mays
  Clone ID: MRT4577_6915C.1.pep
AHVVTEICRNTLESADVGERLHDLVGSNLCLLRALHRVIIKRRRTRG

SEQ ID NO: 335585 - protein, 183 aa, Zea mays
  unsure (1)..(183): unsure at all Xaa locations
  Clone ID: MRT4577_69160C.1.pep
LPHRPTPSTPAGAGAGAAIASSSLPRRSTAPFSTRAQVPANKPSPVAASPPTXPQTXPPPPGPPPCLRQLPPPRRTPXPPHCVLPPTPLXARDDPSYPAPPTIPPRPQTLAAPAITAPAPPAPSLPPPSAGAADPDRVVLNPKGLVDLVRLADLVDPYGEELRQRTAGMGVRVRAAGIHECAG

SEQ ID NO: 335586 - protein, 113 aa, Zea mays
  unsure (1)..(113): unsure at all Xaa locations
  Clone ID: MRT4577_69161C.1.pep
GRCKYKKNKPHKRKKNKKKKARRREKKKKERMXNKKKKRKKKSNEKKNNQNYKNTKATQKNNPKHKKKKIDQNKKKKVSTHTKKHKNKQKVSIIETKINIQVTSVRSTYIPNR

SEQ ID NO: 335587 - protein, 55 aa, Zea mays
  Clone ID: MRT4577_69162C.1.pep
TYKNADYTLNIIIRALQASCAKLTLCRVQQIKYKTRTGGGGAKENQSQHIQLICL

SEQ ID NO: 335588 - protein, 152 aa, Zea mays
  unsure (1)..(152): unsure at all Xaa locations
  Clone ID: MRT4577_69163C.1.pep
MPFPKGASKETXGLHPRRRFLLPPYSPPDFEIDGFFVPTGAGVLFNAWGLGRGRPPWEKPGEFFPDRFVQEPGPVGVPMKGKGLRFFPFGSGRGICPGINFGFPPMEIMLAHFMYPFYWEVPGFPPGGSMGESFGVTLSRKEKFFLVPRIAS

SEQ ID NO: 335589 - protein, 90 aa, Zea mays
  Clone ID: MRT4577_69164C.1.pep
FNPHSKIHGGPSDEERHVGDLGNVAAGKVGVANVSIEDRVISLSGEHSIIGRTMVVHEKQDDLGKGGNEEIPRLEMSGSALACGVIGIAQ

SEQ ID NO: 335590 - protein, 70 aa, Zea mays
  Clone ID: MRT4577_69165C.1.pep
SSGVHSSKLISFAASRSGYSVSAARESLAPCQYVLSRSSVSEFSNKRGPECIQRGPSFLILLVSLTPFVA

SEQ ID NO: 335591 - protein, 146 aa, Zea mays
  unsure (1)..(146): unsure at all Xaa locations
  Clone ID: MRT4577_69166C.1.pep
RPTRAGPPIYLVDNQGCIKLANFGAFKPGEKLATXTGGQKIKGSPFWMAPKGIGGSRHHWSCXFWNGGCPGIEKGNGQPPXWSLDFKKVPLLYXVGPTNSHPPIPNHLSTKAKDFLLKGLQKDPELRSVGSNLWQHPLVTQVLEKF

SEQ ID NO: 335592 - protein, 51 aa, Zea mays
  Clone ID: MRT4577_69167C.1.pep
QRRNWKNPGVPQLNPFAENPLFPSWGNSKKAPTDPLSQHLPTLNGKWNPPF

SEQ ID NO: 335593 - protein, 563 aa, Zea mays
  Clone ID: MRT4577_69168C.1.pep
MGTLKRKVQIDDAMVLHADTIRQQLINTEDIRRIRKKAPCTRSEIWMIEKGSLEDDIFHEPIFSCLSEELNKLHNRTYEAIVHPAVQNMELQSQLDMPEAIPEDSNIAGFGAATIDGPLHIPDGIQSDAMLPRANDAYGATAAFSLQVPPNNQVNGASNDFVIGTLFQGLTGPFIGNEKEVALADRERAQVNTLYSDHFQDVPSDLHSTDANISSQDVTLDNSGQACAHATDGMTRELTHFVHSNANIFESNEVPASEITGVEYNQGASGFPQPTEDENAVGYNQDVSGFPRPTEDENAVDYNQDASGFSRPTEDVQDASGFPRPTEDENVVDYNQDASGFPRPTEDVNAVGYNQDASGFARPTEDVNAVGCNQDASGFPRSMKDENAVEYNQDGSGFPRPAENDVSAMGDNSGFHENNMGSLTDLDMVNDYELKESNDFGSAINGVDTDFLNYDDDDGGDFDDANDDEPNPNEFQSLDNSGWSSRTRGVARYLKALFDDESGLERKSVAIDHLVRGKTRKEASRMFFETLVLTTKDYISVDQPNPFDLVRIKPGSKLLMSEF

SEQ ID NO: 335594 - protein, 228 aa, Zea mays
  Clone ID: MRT4577_69169C.1.pep
MGGTSAAVPSHGLACAPPAAVTLNPRARRRRASSGSGGHRSSPQQPLRSDLLPPATVACRARSQSASSSNVNFGRGDDADKLLEDLLKQHGEVVYSSGGPPDPTVEADDDAECLSFAVSLAKAASEIKATDIRVLCVRRLVYWTRFFIILTAFSNAQIDAISSKMRDIGEKQFSKVASGDTKPNSWTLLDFGDVVVHIFLPQQRAFYNLEEFYGNATPIELPFDTQRQ

SEQ ID NO: 335595 - protein, 236 aa, Zea mays
  unsure (1)..(236): unsure at all Xaa locations
  Clone ID: MRT4577_6916C.1.pep
MPRRLATTYAGRIAAATPSPSGPSITVTVSPTPAPTPLDTRGYSLPRRHLICAVARILRSPVSPTPLLDLDDYLRSLRLTLTTAEASEVMKALAPDTSLALGFFRFAATSLPGFRHDAFSYNRILVLLFGNRADPAEAMRLIAEMERDGVPGNISTVNLLVGMGVXVXRCLDLASKWGLRLNGYTYKCLVQAHLRSRKVWKGFEVYEKMRRKGYKLDIFAYNMLLDALGKAGMVDQ

SEQ ID NO: 335596 - protein, 94 aa, Zea mays
  Clone ID: MRT4577_69170C.1.pep
MGGAPTTVTKYSAYLVPPAGPTPGGSLPISSMDKTAGVRISVDFIQVFLCPRSVNEDRSRSSTIAAMCEGLAKEMLTYYSEVRCMGEPIPGEPD

SEQ ID NO: 335597 - protein, 82 aa, Zea mays
  Clone ID: MRT4577_69171C.1.pep
DFGLEKFGPVEEKTHISTRVMGTYGYCAPEYIRTGQLPVKTDVYSFGVFLLELITGRRAVDTSRPASEQILVNWVRTSILLL

SEQ ID NO: 335598 - protein, 99 aa, Zea mays
  Clone ID: MRT4577_69172C.1.pep
RRINNIVVPFFLISNGPKAAKLWGGKHNITPSHFSLPTDLYAHQKKTKQGGKGLRGSFSTPPIQKQNASEQIFSNPPPTNKLALLSFQENKKTAPKQGP

SEQ ID NO: 335599 - protein, 82 aa, Zea mays
  unsure (1)..(82): unsure at all Xaa locations
  Clone ID: MRT4577_69173C.1.pep
EPCPMWFGAVLLSRIKRLVFGAKAEAALPLGFGDFIANAFKGPGFFPKAPMEIKKAAGNGALIPEQVFXKTKEKFPMFLCLA

SEQ ID NO: 335600 - protein, 255 aa, Zea mays
  Clone ID: MRT4577_69174C.1.pep
MAFLLTLLLPWWPLSPWLSPAAAWFIFFNAVVSAIAVMSTSGSGSGGAGATPPSPRRRLCRSGSSMVLDRLLSLFIFPVEVEQLPIDESSSAAAASHCCWPEAEAASATQVAAAATTGETAAISSTAQPSASVAVATAVVHAPPAPPTEEEGNAEKEQEHDESAISLDEAYALAHRHRTKPLASPPPSAAASATAALPTEHKKVVADWRRVPKAGEALEGKAELNARADLFIRQFREELKLQRLNSVLNHTHALG

SEQ ID NO: 335601 - protein, 146 aa, Zea mays
  unsure (1)..(146): unsure at all Xaa locations
  Clone ID: MRT4577_69175C.1.pep
YDILYLSRTKDTRTQWSXSTNQFFLSILKEYNLPRHRAQKGWTKEAWNSKTQRMNEKSVSANFIVSQLKDREQRLKKDHNAVHLILSKSGFGWDPNLKMATTVSXNWQDLPQKLQKWKDKAFPYYEDLHEIYNPIYKSILLYGKKQ

SEQ ID NO: 335602 - protein, 190 aa, Zea mays
  unsure (1)..(190): unsure at all Xaa locations
  Clone ID: MRT4577_69176C.1.pep
YLIGSRITVWWPDDNMFYAGVVESFDASYKKHKVSYDDGDVEVLMLKKRGWEFISEVQDTDPDAVSNMPRGRKAKGSSGPQMKGGKTGTPQSDVKNPPKKRGRPKGMHDSNNMPNADSSVTPARLKGKSIEKDTQVTPKTGNNSKKEGPGPXSTTGKXQNACVKASSKDEPDSTDNLKDDACSEDKNSKD

SEQ ID NO: 335603 - protein, 130 aa, Zea mays
  unsure (1)..(130): unsure at all Xaa locations
  Clone ID: MRT4577_69177C.1.pep
KDGYYSIIKLARPTHKSYRNGRIKPSXYYEDLHEIYNATGKNCRSSLEKAYKSELIVLDEDELMSTPSPTTPTMQNSWTDFFQEEIDLNTQHGLNYDVHHSQYRAMGEEQKTKEVRSCSLPQTDREGASY

SEQ ID NO: 335604 - protein, 68 aa, Zea mays
  Clone ID: MRT4577_69178C.1.pep
YMQNYGPLVEQEGNASKYVRYTVDGLEKMLSALYMPRPRRAGSFQIKHSSGKIASAMTGLHRSASAVK

SEQ ID NO: 335605 - protein, 77 aa, Zea mays
  unsure (1)..(77): unsure at all Xaa locations
  Clone ID: MRT4577_69179C.1.pep
WTMEIAYSDYYERTLMSGELNIQRGLDPGENIFMLPHRPGRSNAISYHGCGTHDQSYRCWYGTWXITSLYKLGEYIY

SEQ ID NO: 335606 - protein, 122 aa, Zea mays
  Clone ID: MRT4577_6917C.1.pep
GYLEAGRDTTLGTSTPPLSQALSAPPPPLNCQSSRYGRARGGSGRDAARRRRRGFNLLGEAPPPHLPPHPTSSHREGHRYSYSPHHRLRCPMSVPRPPSSAGFGLPPVPRVRGSGLCDRTDF

SEQ ID NO: 335607 - protein, 209 aa, Zea mays
  Clone ID: MRT4577_69180C.1.pep
EEDARECVWVSAQHPHRLPQDLQRVHRAADTPRLPSILARGRGPPRRAAAIAGPVARPACARGFLEKSIDRPSSRSGLPSRELPRLLISDDTLDNGACCAKTMVVASPASTEVATLVQHREDLVVDVVLRIRRRIGRGRSTGEDGKDARVEWWSTGGDGRGTGGVWKGRARMEGSRGRRMTIGFAGGITGKGTEAGACKEGARQFLSPG

SEQ ID NO: 335608 - protein, 102 aa, Zea mays
  unsure (1)..(102): unsure at all Xaa locations
  Clone ID: MRT4577_69181C.1.pep
MSSQLIVDHRSAAEVHXGTXLCERKSREFLLQLGLPDGLLPLPSLHEVGYNRSTVFVWLWXAAALTHTFGLIGXQVWFFFFVTPPAQPGRMHALACVKSKEL

SEQ ID NO: 335609 - protein, 281 aa, Zea mays
  Clone ID: MRT4577_69182C.1.pep
MLGHGLVTDPSRTLRCPVNSRVSSAPLGLVSSLNFNRGCKGKNKIFNVDRHTKYSTSFCYAPRNARITPLATASFGDMADSSTPIFPRIHVKDPYQRLGISREASEEEIRAARNYLISKYAGHKPSVDAIESAHDRIIMQSFFDRKKPKMNLKKKFRELSQSRAVKAIQGRFQTPRSKVIWQTAIAFVLLGVLTLAFPTEEGPTLQVAISCAANIYFIYQRVKSGWRAFFYGFGSFFASWFLGTFLMVSVIPPILPGPRNLEVSTACVTYVLLFISSTFLK

SEQ ID NO: 335610 - protein, 267 aa, Zea mays
  unsure (1)..(267): unsure at all Xaa locations
  Clone ID: MRT4577_69183C.1.pep
MCDYFLQRMDQGDHHHHHQAGDLTDVVRAGGGAMHQAAVAELSSADTGWQLPAEPAAGASLFPPPQPSSSDCDGFADAFAGLPDPFASDFRTSSSSSGVGLGPADFFDFEAPAAAAAAGGGARRGGGVLAGAQMPALSPREIRPYPVTMGGDTVKIGAPTMMPGLAVGPPCCAFDAVAGMQMPSAHAHGEGMKRKKNQARKVVCIPAPAXMXGGGRTTGEGVRSDLWAWRKYGQKPIKGARYPRGGYRCSSSKGWPARKQVERKRTD

SEQ ID NO: 335611 - protein, 59 aa, Zea mays
  Clone ID: MRT4577_69184C.1.pep
TKRTSKFLLIKILSYGFKANHKEPSLFMICVYLFTHVSIPISHWLMPICFVPCGKKNHT

SEQ ID NO: 335612 - protein, 81 aa, Zea mays
  unsure (1)..(81): unsure at all Xaa locations
  Clone ID: MRT4577_69185C.1.pep
PVFTWSGFRFGCVRVSCLGPGLFFFRGPVVVCRWLVCSLLFLRXRWLCLVSVHHLFLVCGPVSLPHTRRLVGRSPGSELTS

SEQ ID NO: 335613 - protein, 145 aa, Zea mays
  unsure (1)..(145): unsure at all Xaa locations
  Clone ID: MRT4577_69186C.1.pep
SLDCSATSRPRTIYQSIQLSDPLTSSSWERCKNLWRQFKAKTEYTVAQAITAQEANKRNNNWLPPSWALIAMSILGFNEFMTLLRNPXYVFAIFXVIYLVGKALWVQSKIGREFQHGFLPTILSLVMKFGPSIMNILKRLTDLGQ

SEQ ID NO: 335614 - protein, 44 aa, Zea mays
  unsure (1)..(44): unsure at all Xaa locations
  Clone ID: MRT4577_69187C.1.pep
RQESTLQLXTRQRGESREAAHYNHGPRTARTHQNDTEGGAARAR

SEQ ID NO: 335615 - protein, 139 aa, Zea mays
  unsure (1)..(139): unsure at all Xaa locations
  Clone ID: MRT4577_69188C.1.pep
RHGKYMACCMMSREXVVPKDVNSTVATIKTKRTIQLVDWCPTGFKCGIKYQAPTVVPGXVLAKXQRAVCXISNSTSVARXVSRIISKVXFMXPKRAFVPWYVGEGSXQGEFSKARXDLAALIRIREVPRGGSIRCRGVI

SEQ ID NO: 335616 - protein, 71 aa, Zea mays
  Clone ID: MRT4577_69189C.1.pep
AKIKQSKKFLVTRRWICNLYLEECGTRDLPRRIRRRGTKETVPHKTNEAQMVLDEAFVLKRSRRGSPHQQD

SEQ ID NO: 335617 - protein, 243 aa, Zea mays
  unsure (1)..(243): unsure at all Xaa locations
  Clone ID: MRT4577_6918C.1.pep
MGTGGVGLVAAALTVVVVTMLWTVLVRLVWRPYAVARAFARQGIHGPPYRVFVGSSKEVQAMRAATSGDTMDRTSHDFIPRVMPQYHAWMTXYGKVFLMWSGSTPTLAVGSYDMVKRVLFDKSGLYSKTDPGPTILSLMGMGLTFTNGEDWSRHRRVVHPAFAMDKLKSMTGAMVACAAELIRAWEARAAARGEKVTTXLEVGQQFKELTADVISXTAFGSSYRQXGKEVFVAQWELQYIAFS

SEQ ID NO: 335618 - protein, 84 aa, Zea mays
  Clone ID: MRT4577_69190C.1.pep
SWRNNFYFLLNSISILFYLNVILNSLRIICVSHLNKYPHKFSFIPSSWFIFVYSFQEVKTTFLRLLQPTVLYFSYESRNSCFHS

SEQ ID NO: 335619 - protein, 93 aa, Zea mays
  Clone ID: MRT4577_69191C.1.pep
RAGPLGAPKGPPAPLGGPKGPRVRPCPVRALGGGTTGREINGSGGGGLHGPGFFFSSTRTCRFFSLSVCVPVCCSYTSGFRVDCPVRPASAMG

SEQ ID NO: 335620 - protein, 172 aa, Zea mays
  Clone ID: MRT4577_69192C.1.pep
PNPRTRRNPSTPGDPPRRFLLYLSIDCTKGNLPRRQRQAPARTEGDDGARQAMHDHGEGRMRRIGHGEWRSGEGIAGAAVRGSGDTPRRALAQVDQAAVGKLRWLATPASRGRATPGEREREEMGMERGMRGDHHGRTETNDMGSTRPLADDSFGREKDEVGDVAATRVVGK

SEQ ID NO: 335621 - protein, 101 aa, Zea mays
  unsure (1)..(101): unsure at all Xaa locations
  Clone ID: MRT4577_69193C.1.pep
IPYSKSYYCSCQDNTSSTLSSSTCITVTLDGFSATDFHRGCDFQGPCVAGGYIHGGFPFGRFSPAGYPSTDYHYETLDAFLFHCAESTXVPAPPVELPNVG

SEQ ID NO: 335622 - protein, 106 aa, Zea mays
  unsure (1)..(106): unsure at all Xaa locations
  Clone ID: MRT4577_69194C.1.pep
LEAGRGAGRSKNLCVAPESPTTMVLSSLSEASTSTAALHYEVVDFIKPALGKLEGXNHCWFNIMNDTWRNXNLNHEGIYLILYQSCGTXNNGDKHPIAFESLKHLQ

SEQ ID NO: 335623 - protein, 82 aa, Zea mays
  Clone ID: MRT4577_69195C.1.pep
KVLKQVHPDMGISSRAMSIMNSFINDIFEKVAGEAPKFARYNKKPPFPSREIQTSVGLVLPGELAKHPVFGGPKAVPKFPSS

SEQ ID NO: 335624 - protein, 36 aa, Zea mays
  Clone ID: MRT4577_69196C.1.pep
IGSCLVLESEIPVLKDDENNGLRLFYFLIRPHRCAV

SEQ ID NO: 335625 - protein, 91 aa, Zea mays
  Clone ID: MRT4577_69197C.1.pep
LFLFFNILSRNSPAFSRKKVFAVHLHTHTVYIHSKSNIPRRGKYICVVMLKVVDFLGVLFGVLHSSPCSKLWANLENQTPSNLRRRFEFPN

SEQ ID NO: 335626 - protein, 64 aa, Zea mays
  Clone ID: MRT4577_69198C.1.pep
DLSLRCKPITPSERTLKHFKGCQIPDYLCTRTRLHTRLLAQRRSFGKTQPSDDHEVAGFGPKAK

SEQ ID NO: 335627 - protein, 234 aa, Zea mays
  Clone ID: MRT4577_69199C.1.pep
MNSHGAGSHSRLLDLNYPPAEGAGEGASRFSSIPVSHREGSSSMPVQHIQASSSTPPATGEPRIGMRSCPIDVEAIDDDAVIYSSRPLPRARQQLTTTESITIIIDDDSETNLETAGDALDEHVNLLLSLGIERSHEPTSATNTFPGISMVDTPKVNTFKWIQVPPEPVKEVPKEPKLSCPICMNEITEAASTVCGHIFCQPCIKAAIKAQKKCPTCRRKLTPRQQHRVYLPSP

SEQ ID NO: 335628 - protein, 88 aa, Zea mays
  Clone ID: MRT4577_6919C.1.pep
VCMGGKSKKSGGLVFLQEFKKVVGPGGPVFGSKCLGKCGLGPNVRLRNGPFSKGFAKGNPLCIGVGFENVAPIVGGFFGGADLGMPPP

SEQ ID NO: 335629 - protein, 372 aa, Zea mays
  Clone ID: MRT4577_691C.1.pep
MEMESTPLLTPYKMGDFNLAHRVVLAPLTRCRAFGNVPQPEHMALYYRQRATPGGFLIAEACAVSESARGYPDVPGLWTHQQVVAWKPIVDAVHASGAVFFAQLWHTGRASPSEFQPNGQAPISSTDKQIPAQVNHSGDVNTFAVPRRLETEEIPHVVNDFRVAARNAIKAGFDGVEIHAANGYLFDQFMKDSTNDRDDSYGGSLENRCRFTAEVMAAVADEVGANRLGVRLSPFADYMDCHDSNPEALALHVIDETLNPLGVLYCHMVEPRMRVNPDDGIMTLEHMLLPFRRAFRGTFIANGGYDREEGNDAIARGRGYADLIAYGRIFLANPDLPMRFAKNAPLNKYDRSTFYTSDPVVGYTDYPFLDQL

SEQ ID NO: 335630 - protein, 95 aa, Zea mays
  unsure (1)..(95): unsure at all Xaa locations
  Clone ID: MRT4577_69200C.1.pep
QQHLPYCQVPAAXYPQQXVSFIQLARSNSPAYLQQQHLLPFIQLAGVSPATLLIQPQMLPIYQHAVPNAGTLLQLQHXLSFNLLALSNPAPFYLQ

SEQ ID NO: 335631 - protein, 160 aa, Zea mays
  unsure (1)..(160): unsure at all Xaa locations
  Clone ID: MRT4577_69201C.1.pep
LNPRARRGTNPGTKQEEGDDPPTKARANGPTASRAANARRRQPHTRSTPNNYKADQPATEERXGSTRTKQENAPQEEADPESADIIEHEKARQGKGLELTPAEKSTAGAGTQAGGTGMTNKDSEGAPGARHHRGNEAKETAEPQGQKPAPGGTREDPAKR

SEQ ID NO: 335632 - protein, 86 aa, Zea mays
  Clone ID: MRT4577_69202C.1.pep
SVAQEPTALSIPAKRRETTSHSQAFWTNGNVLKQAARDPAPADVPTSNQPVKSNVSRQLRNYRKRAWYNTVLLKEDSRCKPLLTAV

SEQ ID NO: 335633 - protein, 133 aa, Zea mays
  unsure (1)..(133): unsure at all Xaa locations
  Clone ID: MRT4577_69203C.1.pep
SICWIAAGYVGGPTMTVIAHECPEIDVTVVDISKLRIEDRNSDILPIYEPGLEDDVKQRRCMNLFVRTDGVKHAAXEXDIILVSTKTPTXIRGLGTGWAAELTYWESAARVIADVSKXDKNVGEMSTVPVKTA

SEQ ID NO: 335634 - protein, 100 aa, Zea mays
  Clone ID: MRT4577_69204C.1.pep
VERKATRRKRCPAWENPPTTMAMRRRWNAQLPSPRMSPTTRNKRGAFMLFRAMLLPFRRSDDGNEEYRRPRHDHQKVEPSWLLMTNDSLTATNQPWGSAS

SEQ ID NO: 335635 - protein, 196 aa, Zea mays
  Clone ID: MRT4577_69205C.1.pep
CPPDEVTYNAFLIGLCKAGRVDEAIERLEALRHTGTFVLGLKGYSCLIDGLFLAGRYEEGFQCYMEVLEQADVSPDIVLYTIMIRGCAEAGRTNDAFAFFDEMKEKGFTPDTFCYNTLLKALCDAGDLDGARSLMSEMVRNNVVLDIHTYTTMIIGLCKEQLVDEAMQVFDGMVEVGCHPSVMTYNVLIDGLYRAH

SEQ ID NO: 335636 - protein, 93 aa, Zea mays
  unsure (1)..(93): unsure at all Xaa locations
  Clone ID: MRT4577_69206C.1.pep
VGRVGGGGGPXNINXXXSXIGSXRVYNVDDLKEXVEANKEDRLRKACXAQTIITEEVGGXXXXXXXXETVPTIKKLRSYADRIRASELEKCLQ

SEQ ID NO: 335637 - protein, 73 aa, Zea mays
  Clone ID: MRT4577_69207C.1.pep
SARGFIYGFCSPKRATHTLEEVEGRSQAQVEGLCSPACFTTRDDCIHTSQCFRFKYHGYVHCSSRTLIGSMPL

SEQ ID NO: 335638 - protein, 69 aa, Zea mays
  Clone ID: MRT4577_69208C.1.pep
DSARSLAPSLTLAPVPISLGHIRRCLEPLRSAAGCDAKISWARLRCLYQGAVVYSGSTTTICCGVKLKS

SEQ ID NO: 335639 - protein, 141 aa, Zea mays
  unsure (1)..(141): unsure at all Xaa locations
  Clone ID: MRT4577_69209C.1.pep
KSSQAPCSSAPEVSSNGISFACSNDWLFGEXRGSGGSXRVSRVRQARLDHIGMVACILETSSAWFANARQGTDVACDGSCTVGSCGPTEHAVFGAVXPLAGERELLSYRXAPHSGGRIGAADQQYXCLRAGWCAVLSPCEG

SEQ ID NO: 335640 - protein, 220 aa, Zea mays
  Clone ID: MRT4577_6920C.1.pep
MKIAWGKKSKVKKQSVVVSTIPGLPFGAGSDNDEVEREADAWADAWGPGTKPVETAELLQSQGDKLAEEGKYHEALAKWEAALILMPDNAILHEQKAQVLLEVGDAWRALTAATRATELDPFWPEAWVTLGRAQLNFGEPDSAILTFDKALAMKPDYTDAKADRETAARLVKKRGQLHTSGLSANKRRFTVGEYPKEGGAEGEEKGKETAEQLQKITQEN

SEQ ID NO: 335641 - protein, 141 aa, Zea mays
  unsure (1)..(141): unsure at all Xaa locations
  Clone ID: MRT4577_69210C.1.pep
MASANSWTLEIASPVAPQRLFRAAVMDWHTLAPKVASHVVASAQPVEGDGGVGSVRQFNFTSVMPFSXHEGGGIGVAIETATSHIKVEPAAGGGSVVKVESTYKLLPGVEVKDEIAKAKESVTAIFKGAEAYLVANPDAYN

SEQ ID NO: 335642 - protein, 37 aa, Zea mays
  Clone ID: MRT4577_69211C.1.pep
GTRPILGHIQSPGRVFAIVQSWDSINRRIVHRNDILA

SEQ ID NO: 335643 - protein, 347 aa, Zea mays
  Clone ID: MRT4577_69212C.1.pep
MVFRIVAPRWPVSRGTRLGADGRSLQEVQIKDNFAKLSEALYVAEQKAREAVQMRSKVQRELMLKEKERKEQELRALAQRARMERTGAPPAPSGVPAGGGRGAIQDVDEVMDMEQPREPRESREQRRESREEREGRIERDRIREERRRERERERRLEAKDAAMGKKSKITRDRDRDISEKIALGMASTGGAKGGEVMYDQRLFNQDKGMDSGFATDDQYNIYSKGLFTAQSTMSTLYRPKKDGDSDVYGDADEQLEKVMKTERFKPDKGFTGASERTGKRDRPVEFDKQEENDPFGLDQFLTEVKKGKKAVEKIGGGGTMKASGGSSMRDDYDGGSGRSRINFERGR

SEQ ID NO: 335644 - protein, 160 aa, Zea mays
  Clone ID: MRT4577_69213C.1.pep
MASANSWTLEIASPVAPQRLFRAAVMDWHTLAPKVASHVVASAQPVEGDGGVGSVRQFNFTSVMPFSFMKERLEFLDADKCECKNTLIEGGGIGVAIETATSHIKVEPAAGGGSVVKVESTYKLLPGVEVKDEIAKAKESVTAIFKGAEAYLVANPDAYN

SEQ ID NO: 335645 - protein, 50 aa, Zea mays
  Clone ID: MRT4577_69214C.1.pep
FPFSDAFSTRAIASYRPSPMYARSHSLADIQSPQVTFISPHLFYGPGGGV

SEQ ID NO: 335646 - protein, 169 aa, Zea mays
  unsure (1)..(169): unsure at all Xaa locations
  Clone ID: MRT4577_69215C.1.pep
MSMETCFRXWLHAPAVRKDRLLGCNLQVLPSNWALATMSVGRCTTCRTRYVXQTNNTVDEVVEADEKNCDALLMVCDTTVMEEFWTPRCGPSRMIAPRIDELYMEYADKISWCMVNTDQMLNVAYTYGIRIIPTVLIXYKGGENKESLIRAVPKSTLXTALIDKYIGSS

SEQ ID NO: 335647 - protein, 430 aa, Zea mays
  unsure (1)..(430): unsure at all Xaa locations
  Clone ID: MRT4577_69216C.1.pep
RGTGFVPRRPEDFXDGGAFPEIHVAQYPLGMGRRDDKGGSKILALTVDAHGSVAFDAVVKQGENAGKIVYSKHSDLVPKIATADSQATSDDDEEQKQIEETTERTKAALEKVVNVRLSAAQPKNVPTHDSESKFIKYKPSQQSAAFNSGAKERIIRMSEMAVDPLEPPKFKHKRVPRASGSPPVPVMHSPPRPVTVKDQQDWKIPPCISNWKNPKGYTIPLDKRLAADGRGLQEVQINDNFAKLSEALYVAEQKAREAVQMRSKVQRELMLKEKERKEQELRALAQRARMERTGAPPAPSGVPAGGGRGAIQDVDEVMDMEQPREPRESREQRRESREEREGRIERDRIREERRRERERERRLEAKDAAMGKKSKITRDRDRDISEKIALGMASTGGAKSGEVMYDQRLFNRXQGMDSGFATDDQYISTL

SEQ ID NO: 335648 - protein, 104 aa, Zea mays
  unsure (1)..(104): unsure at all Xaa locations
  Clone ID: MRT4577_69217C.1.pep
TDCVAACSAQHPELDRTPLTIIVPAKIRSEVCKYLIDDGVLYAKKDYDLANSPQIGVTSLQVIELMQSFRSKEYARETFSWQXXYWYLTSDGIEQLRNYLNLPS

SEQ ID NO: 335649 - protein, 174 aa, Zea mays
  Clone ID: MRT4577_69218C.1.pep
FIIPSRKNKGEKLMDWDKCRKLQWDIILLLGAGFAIAEGFRSSGLTDILSDGLRFLKGAETVVIVPVACVVSGVVTEFTSDDATTTLLLPLFAELAKAIDVHPALLMVSGAVGAQLSYLLPTGSPSNVIGFSTGHITIKDLVTTGLPLKLVGIAALTVLMPTLGSQVFGTNSKF

SEQ ID NO: 335650 - protein, 160 aa, Zea mays; identical to SEQ ID NO: 335644
  Clone ID: MRT4577_69219C.1.pep

SEQ ID NO: 335651 - protein, 164 aa, Zea mays
  unsure (1)..(164): unsure at all Xaa locations
  Clone ID: MRT4577_6921C.1.pep
MKIAWGKKSKVKKQSVVVSTIPGLPFGAGSDNDEVETEEKSDANTNCPGTKPVETAELLQSQGDKLAEEGKYHEALAKWEAALILMPDNAILHEQKAQVLLEVXDAWRALTAATRATELDPFWPEAWVTLGRAQLXFGEPDSAILTFDXALAMKPDYTDAKADP

SEQ ID NO: 335652 - protein, 90 aa, Zea mays
  Clone ID: MRT4577_69220C.1.pep
PTRPLSPRQELLEHQAQEEGHGGQEHPNILRGARHAGALARLLVRHQLQRRLAPRREVHRAGADSAVGPARTLWRYADRARARAGSRAPG

SEQ ID NO: 335653 - protein, 44 aa, Zea mays
  Clone ID: MRT4577_69221C.1.pep
FFIYSEQIRQELAPSCLASVPFYLMPSFQHTRFPVIAIITSFTQ

SEQ ID NO: 335654 - protein, 186 aa, Zea mays
  Clone ID: MRT4577_69222C.1.pep
MAYLLRTAGRSRAILPRVNAHTASRVPTALNRRYATAAAAVATDSGEQSFFPDEPKQPIVKTQIPGPNSQKAIEKLGKVFDIRSLNMMADYSRSYGNYIADLDGNVLLDVYAQIASIPVGYNNPSLLLAATSPEMASAIINRPALGNFPQHDWADILESGILSVAPKGLNQVFTAQAGSDANELAY

SEQ ID NO: 335655 - protein, 120 aa, Zea mays
  unsure (1)..(120): unsure at all Xaa locations
  Clone ID: MRT4577_69223C.1.pep
YVTEFDPFQTLGVMSAENAGFIWKAPLDKVRIEERLNWIRECEPPIEALYQNISSALHEARIWGEEYFNDLSGRLNSALVRVLLERPDVSCQDCQAXWWAILTDDALGHPSCLALVSNAS

SEQ ID NO: 335656 - protein, 72 aa, Zea mays
  Clone ID: MRT4577_69224C.1.pep
KICGPPMPRGCPSCPRTFNWLEGPVVKGPKFSVYCTWEGPRSMVCICSMLPFCGSNICGGSNSKNSPEVDEW

SEQ ID NO: 335657 - protein, 44 aa, Zea mays
  unsure (1)..(44): unsure at all Xaa locations
  Clone ID: MRT4577_69225C.1.pep
MVLKTEICRFSGHTIYPRXGIRSIRSTSQVHLYASSKCKRYIHK

SEQ ID NO: 335658 - protein, 42 aa, Zea mays
  unsure (1)..(42): unsure at all Xaa locations
  Clone ID: MRT4577_69226C.1.pep
LEGFTFDKNPKASSLGRNRTYFFTHLAFXRLAAGIEHTFLPI

SEQ ID NO: 335659 - protein, 75 aa, Zea mays
  Clone ID: MRT4577_69227C.1.pep
LNITSDKWSCPECVSPLTEMERILDIEVLEAPREDSSSTEPRSKKMERYLIKWKGLSYIHCSWVSEKRIFRSREY

SEQ ID NO: 335660 - protein, 61 aa, Zea mays
  Clone ID: MRT4577_69228C.1.pep
KEATYIIIIIIMYGNTLTNIHTHVTTNVPNATKLNENRSTHLTETMTRERESTTQSPALQP

SEQ ID NO: 335661 - protein, 109 aa, Zea mays
  Clone ID: MRT4577_69229C.1.pep
RGFSPGAKKNGPGDPPKGARVKRGGPLRGVPPGPRTRLRLLQVQENFVPTKGRQGVATRFENPRKRCNHCVKKVVPQGRRDNHVSPGGNGGNTTISGCKCPHGEPEQGW

SEQ ID NO: 335662 - protein, 43 aa, Zea mays
  Clone ID: MRT4577_6922C.1.pep
FCTQYTRGPSPLKIRRLQQRQVDSVSYGYSVNRRTYAPTGCLR

SEQ ID NO: 335663 - protein, 43 aa, Zea mays
  Clone ID: MRT4577_69230C.1.pep
HPRCSSCMILMLRALHSILRDAGLFVDACVRGGCSERTAVGRD

SEQ ID NO: 335664 - protein, 137 aa, Zea mays
  unsure (1)..(137): unsure at all Xaa locations
  Clone ID: MRT4577_69231C.1.pep
LRXPRQIEAASGFMFRYDLSVMTGLRASTVPLFRQNFVHSSDSPPRLWHAACLDKLVAEPKQACVACAPPLAYGPPLAVLAGRCSSTKYRPRGPPIASRIDCLRCPALCSGEAAECRACAVCHQSRWPCTVGRDGNR

SEQ ID NO: 335665 - protein, 82 aa, Zea mays
  Clone ID: MRT4577_69232C.1.pep
GAWNASRFRLFHERAMALTKRIVTVAVVLPAVASLHHRHAHALGPVAHQRAPVPALARGRHGLRRIQVCTRSICKETRLDVP

SEQ ID NO: 335666 - protein, 172 aa, Zea mays
  unsure (1)..(172): unsure at all Xaa locations
  Clone ID: MRT4577_69233C.1.pep
RNGRFAARASFYREDVDVVAANDPFMTTDYLIYMLKDDTVRGHCKHGDITLKDCKTLIFRDKMGTAFGIRNSEEIPCGEDGANYLLETTGVFTDKDEAGAXLEGVAKKDDISAPSKDAPMLVAGGNEDKDTSHVNIVSHANCTTGXLLALLTAIHDNFRIVHGLMTTVRGLT

SEQ ID NO: 335667 - protein, 139 aa, Zea mays
  Clone ID: MRT4577_69234C.1.pep
RSPNVGRPMGSPATLAGGSPKNSIHLPPRCQELRPGPGCRTATRFTRACHRRMPPPPVARSSLCVVVVCCWASPQWCYNMDIRALDDGWGATLARVVHPGGTYSDAYGRWPSCSSRDLLPLRVADAAAAERDEALAQAS

SEQ ID NO: 335668 - protein, 189 aa, Zea mays
  unsure (1)..(189): unsure at all Xaa locations
  Clone ID: MRT4577_69235C.1.pep
PEHNVQENALTTSTLCAKNGESDTDLYACDKLTDKIDMINAKRTWAKXRLNGAMTLTRTTPKHIGSPSSRYGQRARMRMAQXTVTDAIAGRHTXPGTLTKQIQSCFSEPCLMMLTDPRTDHETINETALGNMPTIAFCDTDSPMRYVDICIQANNKGRNSIGCLFWLLARMVVQMRGTILPGHKWEVMV

SEQ ID NO: 335669 - protein, 48 aa, Zea mays
  Clone ID: MRT4577_69236C.1.pep
CYFVKKKKKKKKKKKKKKKKKKKKKKKKKKKKKKKKKKKKKKKRGRPF

SEQ ID NO: 335670 - protein, 272 aa, Zea mays
  Clone ID: MRT4577_69237C.1.pep
MVVNDKEKESIFNEPRDEKPTDSGSSHKKRDRKKRRIKKIIYYDSNTSSSSPRDDDDDDSSSKKKTVNQNYSFDYSRIPYNSNAHLLSIPLGKPPHFDGEDYSFWSHKMRSHLFSLHPSIWEIVENGMHFDSSDNPMFINEQIHKNAQATTVLLASLCRDEYNKDTLKISHEGNVATMITKMELVEGELGRSFTITDPHIVNLIRENPRYTKMTPEEILGKFVSKRMMVKEARYVDDALNGPLPVYEPQPIALKATSSREALPIKIAQVEAA

SEQ ID NO: 335671 - protein, 34 aa, Zea mays
  Clone ID: MRT4577_69238C.1.pep
VQDPEEVAVMHHFGRCGYEWFWVRTHGGRPLFRT

SEQ ID NO: 335672 - protein, 352 aa, Zea mays
  unsure (1)..(352): unsure at all Xaa locations
  Clone ID: MRT4577_69239C.1.pep
MDPKGKGMVVNDKEKEFIFNEPRDDKPTDSGSSHKKKDRKKKRRIKKIIYYNCDASSSSPRDDDDDDSLSKKKTVNQNYSFDYSRIPYNSNAHLLSIPLGKPPHFDGEDYSFWSHKMRSHLFSLHPSIWEIVENGMHFDSTDNPVFINEQIHKNAQATTVLLALLCRDEYNKVSVLDNAKQIWDTLKISYEGNDATMITKMELVEGELERFAMIRGEEPTQTYNRIKTLVNKIRSYGSTRWTDHDVVRLMLRYTKMTPEEILGKFVSGRMMVKEARYVDDALNDPLPVYVPQSIALKATSSREALPSKVAQVEAAGLNEDEMTLITKRFKTVLKERKEXPNKNKTRGKCSCL

SEQ ID NO: 335673 - protein, 61 aa, Zea mays
  Clone ID: MRT4577_6923C.1.pep
HRFEYSEHNCILSIECSKGNPPRDYGSAATTTYHNYLHCSVSRSTSTDITRIDDPRTTAAT

SEQ ID NO: 335674 - protein, 75 aa, Zea mays
  Clone ID: MRT4577_69240C.1.pep
EPDTNPCEGKQCKNFLHTQLARTGKSHISHYEKYRHERWPRQEPAPQPTAPSTTSLCYVCVGPCKLPPLRAAVQV

SEQ ID NO: 335675 - protein, 143 aa, Zea mays
  Clone ID: MRT4577_69241C.1.pep
SGEGVPRPGGLRPAAGGAPHLAPVEVGGWDPETWAPTDAVLVYDFLSGAWRRGAPMPGPRRSFFACAAVGGAVYVAGGHDAEKNALRSALAYDPGADAWAGLPDMAEERDEPRGLCVAGRFVVVGGYSTRAQGRFVASAESFD

SEQ ID NO: 335676 - protein, 87 aa, Zea mays
  unsure (1)..(87): unsure at all Xaa locations
  Clone ID: MRT4577_69242C.1.pep
SPPLSQPRNCHTESCPSSAIVLNLLFIVVPLVILEEGLGKDAGEGLFFRSAVHLSVLQGFCSRDPGPSWWSXLTLARHMFLEPNSEP

SEQ ID NO: 335677 - protein, 382 aa, Zea mays
  unsure (1)..(382): unsure at all Xaa locations
  Clone ID: MRT4577_69243C.1.pep
MGDLIPGLPDEVARECLVRVGFDQLPVVRRISRQWKSEVESPDYHRQRRAEGLARPVLALVQAQPTAPPDDDDDAGPAHKRSTAANSYRLVLLEPAEGRWTPLPPPPGPSQSLPLFCQVAAAVDGGGQGRKRLVVVGGWDPETWAPTDAVLVYDFLSGAWRRGAPMPGPRRSFFACAAVGGAVYVAGGHDAEKNALRSALAYDPGADAWAGLPDMAEERDEPRGLCVAGRFVVVGGYPTRAQGRFVASAESFDPAAAASPAWGWAPVHDRLLPEDGACPRTCCAAPRSVGRMYMLRDGHLVARDGAAAWRPVARVPDDALTAPVVFAFPDGRVVVVGSGXATAGTRPCTCSARRAGDLRPGRARRRRRRSXGHVQASCFLEL

SEQ ID NO: 335678 - protein, 95 aa, Zea mays
  Clone ID: MRT4577_69244C.1.pep
LTMLRCLRGMARLFWVPFYQERNRYGLLMAAALLARAPTGPFAKLDRAFDPSMLVTALLGTAIPFAGFTGASMVAKRTEYLYLGGLLWSWLSILL

SEQ ID NO: 335679 - protein, 480 aa, Zea mays
  Clone ID: MRT4577_69245C.1.pep
MVKICCIGAGYVGGPTMAVIALKCPDIEVVVVDISKPRIEAWNSDTLPIYEPGLDDVVKQCRGRNLFFSTDVEKHVAEADIIFVSVNTPTKTRGLGAGKAADLTYWESAARMIADVSKSDKIVVEKSTVPVKTAEAIEKILTHNSKGINYQILSNPEFLAEGTAIEDLFKPDRVLIGGRETPEGRKAVQALKDVYAHWVPEDRILTTNLWSAELSKLAANAFLAQRISSVNAISALCEATGANVSEVAYAVGKDTRIGPKFLNASVGFGGSCFQKDILNLVYICECNGLPEVANYWKQVIKINDYQKSRFVNRVVASMFNTVAGKKIAVLGFAFKKDTGDTRETPAIDVCKGLLGDKAQISIYDPQVTEDQIQRDLAMNKFDWDHPMHLQPTSPTAIKQVSCVWDAYEATKGAHGVCILTEWDEFKTLDYQKIFDNMQKPAFVFDGRNIVDPEKLREIGFIVYSIGKPLDAWLKDMPAVA

SEQ ID NO: 335680 - protein, 117 aa, Zea mays
  unsure (1)..(117): unsure at all Xaa locations
  Clone ID: MRT4577_69246C.1.pep
MAKICCIGAGYVRGPTMAVIALKCPDIDVEXADICKPRIEAWNSDTLPIYDPGLDDGGKQCRGRNLLFSTDDEKHVPEADIMCVSMNTLTKTPGLGAGKDADLTYWESAGRMIADGC

SEQ ID NO: 335681 - protein, 152 aa, Zea mays
  unsure (1)..(152): unsure at all Xaa locations
  Clone ID: MRT4577_69247C.1.pep
KVLTADDIXXPKALLHRVSGKGELAEVLYILRPVAYALAMQHFSGDRKSWRPWLIGVSIEYGARQLAKKDFQERLAGGLRGLTGLEREELRKRGWSMGWWAMRGAFYENITKAWSHSITSKLKGKPLLDMVGGVIEDYEFLWDQYYFPTATL

SEQ ID NO: 335682 - protein, 370 aa, Zea mays
  Clone ID: MRT4577_69248C.1.pep
MVKICCIGAGYVGGPTMAVIALKCPDIEVVVVDISKPRIEAWNSDTLPIYEPGLDDVVKQCRGRNLFFSTDVEKHVAEADIIFVSVNTPTKTRGLGAGKAADLTYWESAARMIADVSKSDKIVVEKSTVPVKTAEAIEKILTHNSKGINYQILSNPEFLAEGTAIEDLFKPDRVLIGGRETPEGRKAVQALKDVYAHWVPEDRILTTNLWSAELSKLAVLGFAFKKDTGDTRETPAIDVCKGLLGDKAQISIYDPQVTEDQIQRDLAMNKFDWDHPMHLQPTSPTAIKQVSCVWDAYEATKGAHGVCILTERDEFKTLDYQKIFDNMQKPAFVFDGRNIIDPEKLREIGFIVYSIGKPLDAWLKDMPAVA

SEQ ID NO: 335683 - protein, 247 aa, Zea mays
  Clone ID: MRT4577_69249C.1.pep
SSNPSTCRTMKPILRRTPGSSREKIVSSRNVNNSTIDDIVAYEVHREFIRTDCPSTEHSATPSDESCQSADWDTEPSIDDAHEDFSGSSEASLISSQSSPPINITPKKEVEIKDEMSLFLLSSKSFVNQAAQLIGTDAYDYDHLIEQYKDTGKAEMGDHELYVDIAMEQLERKHRQQNSLYYTGYRTQKCGATPYFSLEALLGDIGDGTRKLKSYTDDKDDHGSGTKDSMSMKLERDLGCADPSINS

SEQ ID NO: 335684 - protein, 108 aa, Zea mays
  Clone ID: MRT4577_6924C.1.pep
MATPALVLLPEWGSGHLMSMLESCKRVLLSSSGGKAFSITLLVMRPPTAEATSEVEAHVRREAACGLDIRFHRLPAVEAPTDAVGVEEFIARYIGLHAPHVRDAVAVM

SEQ ID NO: 335685 - protein, 480 aa, Zea mays
  Clone ID: MRT4577_69250C.1.pep
MVKICCIGAGYVGGPTMAVIALKCPDIEVVVVDISKPRIEAWNSDTLPIYEPGLDDVVKQCRGRNLFFSTDVEKHVAEADIIFVSVNTPTKTRGLGAGKAADLTYWESAARMIADVSKSDKIVVEKSTVPVKTAEAIEKILTHNSKGINYQILSNPEFLAEGTAIEDLFKPDRVLIGGRETPEGRKAVQALKDVYAHWVPEDRILTTNLWSAELSKLAANAFLAQRISSVNAISALCEATGANVSEVAYAVGKDTRIGPKFLNASVGFGGSCFQKDILNLVYICECNGLPEVANYWKQVIRINDYQKSRFVNRVVASMFNTVAGKKIAVLGFAFKKDTGDTRETPAIDVCKGLLGDKAQISIYDPQVTEDQIQRDLAMNKFDWDHPMHLQPTSPTAIKQVSCVWDAYEATKGAHGVCILTEWDEFKTLDYQKIFDNMQKPAFVFDGRNIVDPEKLREIGFIVYSIGKPLDAWLKDMPAVA

SEQ ID NO: 335686 - protein, 34 aa, Zea mays
  Clone ID: MRT4577_69251C.1.pep
LILYIMRLLVSSVSSELRSSATSTILALPVGATG

SEQ ID NO: 335687 - protein, 165 aa, Zea mays
  Clone ID: MRT4577_69252C.1.pep
ALSLLPGASSPRARFLVGCALLPGSSLRAPLALPVMRPLRSVQSQLPALLARAASGSLARCAPISLSCGSLASSSAFPSQVCSSAAVLAPARPCALAFAMATAPCSSARSALLAPCARVQPKFPASARRSELLARIPPARQPCASSTSSMAPCNFVPRSSADRCC

SEQ ID NO: 335688 - protein, 161 aa, Zea mays
  unsure (1)..(161): unsure at all Xaa locations
  Clone ID: MRT4577_69253C.1.pep
ILLFFFFFLCFFFFFRCFFLSPFFFVQTRNTNSRGKENPQLEGGPAPSPPPMDPPGGKKSPTPPRKYKPRQPPSRKNRNPAPTPILEQPPPPPQTGQGGGTPKGTPGLNPQVPPQAPXAAQGKAXKKPPPPRQRGTXAPTQTPPGDPPGPGQPPRPKNNPP

SEQ ID NO: 335689 - protein, 57 aa, Zea mays
  Clone ID: MRT4577_69254C.1.pep
RTRRSTQRFSSASSSRNDWVGCIYIHGWPFECLATHAHVVDLVFVTLYGLPESIIEM

SEQ ID NO: 335690 - protein, 41 aa, Zea mays
  Clone ID: MRT4577_69255C.1.pep
DHSFCPFPHPNKKILIKGPLFPLLSNYLRKYLELHNSSIYK

SEQ ID NO: 335691 - protein, 63 aa, Zea mays
  Clone ID: MRT4577_69256C.1.pep
PPREKCAGPLCPNPYKYRDSKTLFPFCSLGCYKVFQGPPPYQGTPAPGSGGGQENLGKQAFLI

SEQ ID NO: 335692 - protein, 73 aa, Zea mays
  Clone ID: MRT4577_69257C.1.pep
VFVRIQKAEFVISIELGVTDKASLSRVLRSGPCNGNEAKRSWVKKKKKKKKKKKTKKKKKKKKKKYSALLPLL

SEQ ID NO: 335693 - protein, 47 aa, Zea mays
  Clone ID: MRT4577_69258C.1.pep
KKNKQIKNFFKQKKIKKKKKKKKKKKKKKKKKKKKKKKIKKKKKKKN

SEQ ID NO: 335694 - protein, 55 aa, Zea mays
  Clone ID: MRT4577_69259C.1.pep
LAFVTECTTRGCSCIGLSPSGWPLENHAVINELLVTSLMRKERNRRPPLGMLIEM

SEQ ID NO: 335695 - protein, 166 aa, Zea mays
  Clone ID: MRT4577_6925C.1.pep
MASRILARSKSLHLVAALTPAAAKAATPIAGARALSSLPRYPSAPSPHGLGKVLGYEPKVVAFSPLEAAIAKPRSSPLTSESSKVRRSEIATQVTFYMIPALLLASKNSISTSLLVGAVFHQVYMFHKEILLDYVHHDITRKWALIYFKLLLLVMAKDTIMYFNLF

SEQ ID NO: 335696 - protein, 71 aa, Zea mays
  Clone ID: MRT4577_69260C.1.pep
AVYIPGTTEPVLQSACWTDAGGFTSSNVVNYLLFGGLYTEHRALRDPVASNNAHYTVHERAETWVQTSMLI

SEQ ID NO: 335697 - protein, 108 aa, Zea mays
  unsure (1)..(108): unsure at all Xaa locations
  Clone ID: MRT4577_69261C.1.pep
ATRACFRGENFYEPLNNTRKSLGREHLEQTASTADGENPDDDRRRWRKYXQKEILGANHLRGYYRCSHRYSQGCHATNQVPRTDKDQTLYYIIYHCEHTRAPHRPAGG

SEQ ID NO: 335698 - protein, 91 aa, Zea mays
  Clone ID: MRT4577_69262C.1.pep
SRFYQLFFRPTPFFFLGGVFSTMGGPTTNTRRRPLVKYTIIKGRHVDPMLLISSDANSQVSYRDETTLYLYAMDRTTFEDKGELGLLADQP

SEQ ID NO: 335699 - protein, 95 aa, Zea mays
  Clone ID: MRT4577_69263C.1.pep
KSQPLAEVQDSVGGKVNTSSVASAAINNAKSSLFGFHLLPSSVKFGVLKEGHTYATVVKLKNVGVDFCRFKVKQPPPCTGLKVTYKPGPVAAGMQ

SEQ ID NO: 335700 - protein, 108 aa, Zea mays
  unsure (1)..(108): unsure at all Xaa locations
  Clone ID: MRT4577_69264C.1.pep
FGSGVFFGGXKKEGPQLYIKKPPXFSKKTFXITQGKGRVSPKTKIKKFKPLEITRPKGIVNAAKKIFGGGAETKGKSFWLEFSRSLQETTPQPQKGSKKMLEKDKTPV

SEQ ID NO: 335701 - protein, 45 aa, Zea mays
  Clone ID: MRT4577_69265C.1.pep
HFLQQQSTSYTKRMTKDKWKALKSNQYFKGTLKARIILKLLLLLV

SEQ ID NO: 335702 - protein, 78 aa, Zea mays
  Clone ID: MRT4577_69266C.1.pep
FSGVTISPPLPWVYSPPIKGVCLIPTNCWKIFFLKNFFKKNLGPKRLCWVSPHFICWKEFLTPRKLKSPPKKKKKTPK

SEQ ID NO: 335703 - protein, 62 aa, Zea mays
  Clone ID: MRT4577_69267C.1.pep
KKKKKKKKKKKKKRKKKKKKEKKQKRNKENTKQKKKKKNKPNDNTKPNQPKANRVAARREKS

SEQ ID NO: 335704 - protein, 165 aa, Zea mays
  Clone ID: MRT4577_69268C.1.pep
RLLRLPSGQLPIDPRRRACLQRVQAVHGRFSCRFCTVFDGRHRPGRWFDFAGLRGRRDGAELAGVRAHVPPAVHRRLAAPDAWARSKPVRTLFVRMSLGNREPMRVHTCPRPGAEYCRVVGVQDTWFFLAYLDYFFLLFSTSWARMYRYSTWLTLSHTLCGCKYV

SEQ ID NO: 335705 - protein, 81 aa, Zea mays
  unsure (1)..(81): unsure at all Xaa locations
  Clone ID: MRT4577_69269C.1.pep
YTLNHALPMHWTICSDVISGLSLFIIIVFRNTTTVILCATYWMCMXTLYLKSNMNRYLVCVAWTFTSFWNELVILVHLGAG

SEQ ID NO: 335706 - protein, 215 aa, Zea mays
  unsure (1)..(215): unsure at all Xaa locations
  Clone ID: MRT4577_6926C.1.pep
MASWILARSKALPLAAALTRGAAYAAPPIAGARALSSLPRYPSAPSSHGLGKVLGYEPTSHVSGAQVLPRWFSSLASNGSQISETYXWWXMKQSDARKSSEEATPTPKVVAFSPQEAAIAESRSSPLTIESWKVRRSEIATKVTFYMIPALLLVSKNIMSTSVLVGAVFHQVYMFQKEILLDYVHHDITRKWALIYLKLLLLVMAKDTIMYFHPF

SEQ ID NO: 335707 - protein, 59 aa, Zea mays
  unsure (1)..(59): unsure at all Xaa locations
  Clone ID: MRT4577_69270C.1.pep
FIVLALLLVAFFYSFSAFLALSIFPSLNLVSFIXQDETVLKNFPAEGGYLIHQRRVKFQ

SEQ ID NO: 335708 - protein, 81 aa, Zea mays
  Clone ID: MRT4577_69271C.1.pep
HASAHASAHAFAHASAHASVYEELKKHATKAIPFGSTPKNNDGTSDAGTNWLMFELLWRDFFRFITKKSSSVQKTSEVATG

SEQ ID NO: 335709 - protein, 43 aa, Zea mays
  Clone ID: MRT4577_69272C.1.pep
SRCVSEEPRFSLNDVYTLLVCACLVRLLDTNPALVMAVCSVSL

SEQ ID NO: 335710 - protein, 116 aa, Zea mays
  unsure (1)..(116): unsure at all Xaa locations
  Clone ID: MRT4577_69273C.1.pep
TQHKPHRPRQRAGGGREEHTNNGKSPNXGDQTGSNKNAHRKGNGEPXRKTEHGADATSXAGTPREGGGEXPGRGXTGQRXSATAXHXNNGNRGKAGAEASPEQRPRNPAPAPXSQN

SEQ ID NO: 335711 - protein, 112 aa, Zea mays
  Clone ID: MRT4577_69274C.1.pep
VGNQFSHFNIKPPLTEIPRRKTKGQKNPQRRSAKRKTSEGPTIITHRPCTKSRKRPELNLRKRRLSNSKNANHPPWKTTKTDGTQPLRLLPRKSPLPQLKPSKLKPTPTAEL

SEQ ID NO: 335712 - protein, 160 aa, Zea mays
  Clone ID: MRT4577_69275C.1.pep
GLARNGPTGDRTHVSTRVVGTRGYAAPEYVATGHLSTKSDVYSFGVVLLELITGRRAVDAASSADTTLVDWAYPQLGDPRRLSRIMDTRLGGQYPKKQAQEVAALALRCLQTDPKNRPAMADEVLPVLEQLQHHNHHKSSSSRPLHGRPGPQCRHSKSKT

SEQ ID NO: 335713 - protein, 94 aa, Zea mays
  unsure (1)..(94): unsure at all Xaa locations
  Clone ID: MRT4577_69276C.1.pep
LFLREXCIISKSLEPKVRSHMSRYLIDVGALNIISDVLQSQDKELFSAGANILGYFVDLHPDLVRTFIANHEENLEGSSLLEFLVQGMVVDSAN

SEQ ID NO: 335714 - protein, 90 aa, Zea mays
  Clone ID: MRT4577_69277C.1.pep
GRPGRYKLFFFFFFFFFVFFFFFFFFFFSKHPFSLYIKPIHYNATHREWLTLPPKGRGNTQLPIAAKPGNQLYEANKPFHYIITTAPPPT

SEQ ID NO: 335715 - protein, 130 aa, Zea mays
  Clone ID: MRT4577_69278C.1.pep
QQITRAYRDLLNYKCSQGSNPPVDNNVRDEDYDVVARFMPGFTSRVRKIPDFLDNSFYHNNLAKIVTFHSDWTLLTHKEAFGHVVEYAENATLWDEDFSDSLLKLSKLPMPKGSKGEIRKKCSVVNHRLY

SEQ ID NO: 335716 - protein, 84 aa, Zea mays
  Clone ID: MRT4577_69279C.1.pep
VFLGGGNPCLPPPSFSGETPTPLPLKKAHWCTALLFEPKTLGTPGPTGGEVFFFSPRVCCKGSRPLLWVGIGAKKGKNHVKTGV

SEQ ID NO: 335717 - protein, 219 aa, Zea mays
  Clone ID: MRT4577_6927C.1.pep
MASRILARSKALPLVAALTPAAAKAATPIAGARALSSLPRYPSAPSPHGLGKVLGYEPTSHLSGPQVLPRWFSSLASNGSQVQKSQISETYKSGGEMKQSETRKSSEEATPKVVAFSPLEAAIAKPRSSPLTSESSKVRRSEIATQVTFYMIPALLLASKNSISTSLLVGAVFHQVYMFHKEILLDYVHHDITRKWALIYFKLLLLVMAKDTIMYFNLF

SEQ ID NO: 335718 - protein, 348 aa, Zea mays
  Clone ID: MRT4577_69280C.1.pep
MKLSVAVLCALLAVQAAVLLATVPTSQASELEVGYYSKKCKGVENVVKWHVIKALKASRRTGAALVRLLFHDCFVRGCDGSVLLDASYDNPHPEKEAPVNIGLAAFDLLEEIKAAVEKRCPGVVSCSDILIYAARDAASVLSNGHVHFAVPAGRLDGFVSKAEEAQAELPDSNQDVQQLIDNFARKNFTVEELVILTGAHSIGQGHCSSFTGRLSEPPHQITPAYRDLLNYKCPQGSNPPVANNVRDEDYGVVARYMPGFTSRVRKIPDFLDNSFYHNNLAKIVTFHSDWTLLTNKEAFGHVVEYAENATLWDEDFSDSLLKLSKLPMPAGSKGEIRNKCSVVNHRLY

SEQ ID NO: 335719 - protein, 68 aa, Zea mays
  Clone ID: MRT4577_69281C.1.pep
LTVPTVYGKFCCILAHIMNSPTNPATCLRTLRAPRPTAGGRGWASFLAAQHFTGTQQGPQHQTQDRAN

SEQ ID NO: 335720 - protein, 190 aa, Zea mays
  unsure (1)..(190): unsure at all Xaa locations
  Clone ID: MRT4577_69282C.1.pep
YKIYVRGRSWSVSLKYILACDSPVLLIATPFKDFFXRGLVAGRHYWPVDPGARKCRPGNFAVHDWGNAHPEQARRMAEEGSGFARHQLSMDYVYDYMLHLLTQYAGLLRYKPTVPENAVELCAETVACPAAHHSNRREFDFMMQSRERYIADYQPCTLPPPFTDRHIREMTRRDQEVRANVHKMMTTVTP

SEQ ID NO: 335721 - protein, 149 aa, Zea mays
  Clone ID: MRT4577_69283C.1.pep
MAMAVSGAVLSGLGSSFLTGGKRGATALASGVGTGAHRVGRKTLIVAAAAAQPKKSWIPAVKGGGNFLDPEWLDGSLPGDFGFDPLGLGKDPAFLKWYREAELIHGRWAMAAVLGIFVGQAWSGVAWFEAGAQPDAIAPFSFGSLLGTQ

SEQ ID NO: 335722 - protein, 32 aa, Zea mays
  Clone ID: MRT4577_69284C.1.pep
PHVYSHVTEVIRGVVLSCCYNTHQFPALFIVT

SEQ ID NO: 335723 - protein, 95 aa, Zea mays
  unsure (1)..(95): unsure at all Xaa locations
  Clone ID: MRT4577_69285C.1.pep
MADQANXPTVLHKXXGQXXLSXXXSEGXRXRXICPXVXSXEXGXAXXXNXTXGLWXPSMSGSXGVNGAVMQTPXLWANAPAEKGGXNFMIDFMXG

SEQ ID NO: 335724 - protein, 64 aa, Zea mays
  Clone ID: MRT4577_69286C.1.pep
GKIIIILSKHHSILDLNMFAFVNRFFEWIRSLFWKEELELTLVGPQNQGRLHLECYCCRQFQET

SEQ ID NO: 335725 - protein, 47 aa, Zea mays
  Clone ID: MRT4577_69287C.1.pep
HAKSPRCLQNLANFDAHYNGTGPEILRQTNGEIDAFVAGAGTCGTLP

SEQ ID NO: 335726 - protein, 77 aa, Zea mays
  Clone ID: MRT4577_69288C.1.pep
LRKKWGVKQFVGSAGGPRYVFRNHSCWHLLSGWLTRALSIWVLAASPAFVVGSTSLPWRDLSCSRVCELCLPRCIIA

SEQ ID NO: 335727 - protein, 112 aa, Zea mays
  Clone ID: MRT4577_69289C.1.pep
RVPQETLKCSCFPSGDAAPYQSLVLPLNDGGGKGDEKGCICSTLWRVASSGCLSLLDIHFVMRVLSLDVCLPWPRCGRHRPGILDTFLGSFALCCGLPPLGPSEAVPWFTKT

SEQ ID NO: 335728 - protein, 84 aa, Zea mays
  Clone ID: MRT4577_6928C.1.pep
NLDPYLIFSMNTPYPQITTTSTPNTMAQVQAITRPQTLYLPTMILKPQDIPAYKIAFNRASYICLCTSKGAIWIPQCETHHTIK

SEQ ID NO: 335729 - protein, 125 aa, Zea mays
  Clone ID: MRT4577_69290C.1.pep
KAKIKTCLFEVGFKKSSREKFPFLKAPNFAPIFKAPKKFLGEPSNFEMAKIFPKIPALGISQIKLLGVFFFSPGIPAPPKNFPFKRGVFSFGKIFFFSPPQKNPFPFLIFSAQCPPGCFYSLPPG

SEQ ID NO: 335730 - protein, 198 aa, Zea mays
  unsure (1)..(198): unsure at all Xaa locations
  Clone ID: MRT4577_69291C.1.pep
PVSVPGGAVKPLLSEPPLPVGCPFXVPGGAPGFPPGSRPXGLPIYVGWPPPLPPRGFPFFVPGFLFVGSLSGLPFPPXCFPPGFPXVGPWPAPPPGAPLSPGFPPPPAPPGRPCCCPAVGPLSPFPSAAPPVSGVLPRWVPPPPGWPSPPPPGWAGSLVWAFPLGVRVFGNTKKKTKKKKKKKKKKEKKKKKKKKKAC

SEQ ID NO: 335731 - protein, 101 aa, Zea mays
  Clone ID: MRT4577_69292C.1.pep
DERMLIYIGSMRMRQQHEAISRLWVHEENRLPCGLPRQAWGELAEMPPYSWSCWHWCRQAWRELGEIERNEKKNANLITLPYLDDNLMEPTIIISAIFHRL

SEQ ID NO: 335732 - protein, 91 aa, Zea mays
  Clone ID: MRT4577_69293C.1.pep
DLIAAARASGWRHSGRLRPLAGGGSFRALSSRWSGGPSPSTPSPLRSLPDLLHLLVLVHGGAIRPNRSVTVGGGGRSGGGWVGDWTERQRE

SEQ ID NO: 335733 - protein, 68 aa, Zea mays
  unsure (1)..(68): unsure at all Xaa locations
  Clone ID: MRT4577_69294C.1.pep
SIPLTVSVPLPTSGRPLPPAYGRCDLHLRDVRHRSTHSFSSVHAVRNGSSKNQLXXGLKFSPFGGGGG

SEQ ID NO: 335734 - protein, 123 aa, Zea mays
  unsure (1)..(123): unsure at all Xaa locations
  Clone ID: MRT4577_69295C.1.pep
NEVFRKGPQFYSEGFTRFFDRKMNGVVATLGWFRPWAEQLLQSFFVAPKGVWVLHLVAFSFGPPLTILGIQNGRAFYXMYMEDLLHDRQQVQGPCQMKIMVMPGFYVQNKGVKSRVLPTRSAA

SEQ ID NO: 335735 - protein, 60 aa, Zea mays
  Clone ID: MRT4577_69296C.1.pep
QRVFIPGRPSRGPLGVPVLHSMSHRIAGSHSRLPDRKSHAFTLLHNRRPESIMGKDSGAY

SEQ ID NO: 335736 - protein, 96 aa, Zea mays
  Clone ID: MRT4577_69297C.1.pep
SPHSSAFPTPYPYPPPPPPRTISFPVTHHAAGLLSSPAPGSLRRRDAAAMVSAPPDAGPPWRRSTSTPPSSTRRRPPLVGQTSTSCAPTGTCSRCS

SEQ ID NO: 335737 - protein, 303 aa, Zea mays
  Clone ID: MRT4577_69298C.1.pep
MSGMSLSHRLPPAAAAVDPYYVYAAHPDPQRQGVLTLFVAGLPDDVKPREIHNLFSHRPAFDHCLLEYTGRGNQAVAFVTFFTHEAALSAMSSLNGTIFDPESGDRLHIELAKSTSRRPRGGVEGYRVIDKRANKTEGNADHENVGDEDDDEVWGEDEDGGNDNNGDGGSDEPSGTENENPSNKNELPTDKSDQPGHKQQNGQSLSNEGRDKSSSDIPPCSTIFIANLGHTCTEDELKEVLSKEPGFHVLKMRRRGGMPVAFADFTDIESSTAAMNRLQGTVLASSDNDGLHIEYARSKMRKS

SEQ ID NO: 335738 - protein, 42 aa, Zea mays
  Clone ID: MRT4577_69299C.1.pep
TTHYCKEPGKTQKTEESKGPRITPGVYTTKRLNNYNHPDARK

SEQ ID NO: 335739 - protein, 235 aa, Zea mays
  unsure (1)..(235): unsure at all Xaa locations
  Clone ID: MRT4577_6929C.1.pep
MAGKGDGPAIGIDLGTTYSCVGVWQHDRVEIIANDQGNRTTPSYVAFTDTERLIGDAAKNQVAMNPINTVFDAKRLIGRRFSDSSVQSDAKLWPFKVIPGPADKPMIGVQYRGEDKQFSAEEISSMVLNKMKETAEAYLGTTIKNAVVTVPAYFNDSQRQATKDAGVISGLNVMRIINEPTAAAIAYGLDKKSTSVGEKNVLIFDLGGGTFDVSLLTIEEGIFEVKATAGDXHLG

SEQ ID NO: 335740 - protein, 93 aa, Zea mays
  Clone ID: MRT4577_692C.1.pep
TQVHHHQRLLNFLTLEFYRTKKIPWFSLKIHHFLKQGFQYKSPTIKNNKRLLQNKISTNTPVPTSLSFFFNNHLNKGPSQNRPIRGIPFFSLP

SEQ ID NO: 335741 - protein, 86 aa, Zea mays
  Clone ID: MRT4577_69300C.1.pep
GRHPHVVVMVCGAGGIIIVFHRRCVVTHPAFPALQHRGSGSGSVNEKGNRGTPWRALMKRVVGPTLAQAVQTDTLVIQTEQLQPIL

SEQ ID NO: 335742 - protein, 36 aa, Zea mays
  Clone ID: MRT4577_69301C.1.pep
WLIHRNANHRDRKIKGSFDQIDIREDPLPDLNFILR

SEQ ID NO: 335743 - protein, 313 aa, Zea mays
  Clone ID: MRT4577_69302C.1.pep
FGVICQPLTQLLKKGVHFIWTSEHDTAFSTLKQALTSAPVLSLPDFASPFTVETDASAVGIGAVLMQHGHPVAFLSKALGPKTRGLSTYEKEYMAIIVAVQQWRSYLQHGEFTILTDHKSLTQLNEQRLHTPWQHKVFTKLLGLNYRIQYRSGSDNRAADALSRHSFAECQAVSVIVPQWLVAVQDSYHQDKQALSLISKLAVDPAAVPNFTLHDGLLRYKERIWVGEDTHLQHRIVEALHSSPLGGHSGIPVTYSRVKKLFAWTKLKPFVQKFVQECQVCLQAKPDRAAYPGLLQPLPVCNTSNPSIKIIHY

SEQ ID NO: 335744 - protein, 87 aa, Zea mays
  unsure (1)..(87): unsure at all Xaa locations
  Clone ID: MRT4577_69303C.1.pep
FXXGXPTXTKXFFFXYXNXGKXNAQGQINKSSVSETGIGGRXKTNQSRSIFLDIKQTKSYTFCSTKGAQNEKLARGDHTXLYKQGXX

SEQ ID NO: 335745 - protein, 57 aa, Zea mays
  Clone ID: MRT4577_69304C.1.pep
QQTHGCGITFVRSIQKGHLYITKVPITSRYKLHPAHMHYTPLTITGIKPQASCACNT

SEQ ID NO: 335746 - protein, 105 aa, Zea mays
  Clone ID: MRT4577_69305C.1.pep
VLLPLVPEDFVPRGSPVGGVLPFLGPDGQRGPPHLHFLPQGGMGLPPPQGGGPSLKGGVLYASVGGPRGVGGLFLFRAPRGRGGLLFKGASFCHPIRSFEEVMAY

SEQ ID NO: 335747 - protein, 124 aa, Zea mays
  unsure (1)..(124): unsure at all Xaa locations
  Clone ID: MRT4577_69306C.1.pep
ILPGGRXATSSPSASSSSSSSSSSSRSAFSSSASASFRSARSPAACSSMTMRSRVFAFSAADEDGGEEEEEQAAAPMCFSVVRHESFRAFRGCRVAMTVKSALASVGAGGGHGHGAGPAAAQKV

SEQ ID NO: 335748 - protein, 104 aa, Zea mays
  Clone ID: MRT4577_69307C.1.pep
MAYFPDEVVGYILGYVTSHQDRNAVSLVCRAWYDIERHGRHSVLVRNCYAVCPERVHMRFPNMRALSLKGKPHFAEFHLVPAGWGATANPWVDACARACPSLEE

SEQ ID NO: 335749 - protein, 89 aa, Zea mays
  unsure (1)..(89): unsure at all Xaa locations
  Clone ID: MRT4577_69308C.1.pep
RKTADEQNSHSSTIHMXHLLSANYRRTSPRCNITPRCSNLHTDGGWEGIIDPLDSDLRRELLRYGDTMQATYQAFNSKPTKSERHRGIM

SEQ ID NO: 335750 - protein, 52 aa, Zea mays
  Clone ID: MRT4577_6930C.1.pep
ELWTLKRVLNLVVNKGLICFPCEGQGCLQLLKGFWKKKLEQLFVIVKTILYP

SEQ ID NO: 335751 - protein, 136 aa, Zea mays
  Clone ID: MRT4577_69312C.1.pep
RGNFPFFSLRERNRRNRGPVRLEKEQPEDTGGRGRGGHAAQVGGDRKSQRGPGGPEQRPPDHGGQGGREHRRDAPIPPDPEEAERAARIDVSLSAVSGANASGNSRSRLSISRASAARTGRTANTENIAPTDPSAR

SEQ ID NO: 335752 - protein, 173 aa, Zea mays
  unsure (1)..(173): unsure at all Xaa locations
  Clone ID: MRT4577_69314C.1.pep
MMMLIDCSRCRTPLQLPHGAPCIRCAICGAITHVAPAPPVEPNRGAVQPPPGWGPPPPPVHGRKRAVVCGISYRHSRYELKGCINDVKCMRHLLMTRFNFPDDSIIMLNGRLKKKDKYMNMLAWPFWIXMMFRLRIXNQKEEEQTDPYKIPTKHNIGMAMYWLVQGCQPGDSL

SEQ ID NO: 335753 - protein, 101 aa, Zea mays
  Clone ID: MRT4577_69315C.1.pep
MATLQDLGVSAFINILGAFVFLLLFAVLRIQPINDRVYFPKLYIAGKRAADHRGARRAINLNLCTYFKFLSWVPGALRMTQTELIHHVGLDSGVYLRIYTL

SEQ ID NO: 335754 - protein, 237 aa, Zea mays
  Clone ID: MRT4577_69316C.1.pep
MAGVSGRGAAERVAAAVEAVGSGGWEFRNAYRRQLLALSRRIRLLGPFVEELREVPCVPAVEPERALAVLADALEEALDLLQLGRDGSRIFLVLDRDKVMKKFHESIVQLEQALCDFSYDKLDISDEVREQVELVHVQLKRAKERVDMPDDEFYNELLSLYNKSHDPSAELDILGRLSEKLHLTTITDLTQESLALHEMVASGGGNDPGEHIEKMSMLLKEDQDFVQTQNPEMGPMT

SEQ ID NO: 335755 - protein, 94 aa, Zea mays
  Clone ID: MRT4577_69317C.1.pep
MPFFLDQRRDPRLLSVPPPQSHSRCSNWCSALPLSLELSCPRKCSQLLPAAPHRSTPATAARCVCAWLGACALCGGVESWAWLWCTSNVVHPLI

SEQ ID NO: 335756 - protein, 107 aa, Zea mays
  Clone ID: MRT4577_69318C.1.pep
KNRPGASKKNKGPGPKKKTPSPGGGGPKANPPWGVQVFGGPLGGEKPRGITLVPPRGGGEGKKGGLLVGEPGPKPQQSDPGPLGGKKYFFGFPTLKHPHWGGPLLLR

SEQ ID NO: 335757 - protein, 85 aa, Zea mays
  unsure (1)..(85): unsure at all Xaa locations
  Clone ID: MRT4577_69319C.1.pep
KAPNTGVPSSCIGDGWTNEVDNGLVADGRALVTEVPRRLLLQRNLQELVLVDVAVARHELGRRARIWGGGRRWEGERARVXXTRG

SEQ ID NO: 335758 - protein, 61 aa, Zea mays
  Clone ID: MRT4577_6931C.1.pep
ISAAAKAFGGFAQKKSWPRRRRTVRALAVGPSRAAFVSWGFSCVLCWFFFFPFFPSFGGGG

SEQ ID NO: 335759 - protein, 134 aa, Zea mays
  Clone ID: MRT4577_69320C.1.pep
GQPEIRSYISKKKKKKKKKKIEPRPDRQIKGKNYACIYPGGRRSGRAFRGACPCISFPLAFRGPSFSWAESGLIGGVFILLGWGWITLGLANLCGFGPHPLCPTCRFTHWAHSGRAPHQLPFLNGEWPLRALGP

SEQ ID NO: 335760 - protein, 137 aa, Zea mays
  unsure (1)..(137): unsure at all Xaa locations
  Clone ID: MRT4577_69321C.1.pep
MLTSLRSCSTTTEILLSLYPKRWRYLPVPDNQTSINERDLKGQGQYREFTLRLSLLPRQLILSIAVCQCKKLRCLNLCGCVRAASDRSLQAIAXCNCGQLQSLNXGCCDSITDKGVTSLASGCPELRAVDLCRCVLI

SEQ ID NO: 335761 - protein, 56 aa, Zea mays
  unsure (1)..(56): unsure at all Xaa locations
  Clone ID: MRT4577_69322C.1.pep
AGAVAGTRVRSPPFRPXTVALREIRRYQKSTELLIRKLPFQRLVREIAQELQRLDL

SEQ ID NO: 335762 - protein, 103 aa, Zea mays
  unsure (1)..(103): unsure at all Xaa locations
  Clone ID: MRT4577_69323C.1.pep
KRGNGKNPGVTKLNALEKNPPFXKWGKNQKGPTQSPFQKVANPKGQREPPLNRAIKRAGGXVTPRGPVKLARPQAPALWVFFPPFLATSPGFPRKXLKRGPPL

SEQ ID NO: 335763 - protein, 64 aa, Zea mays
  Clone ID: MRT4577_69324C.1.pep
DRSPKGCAELAKLHEIGGREPLLTFIHAQKTGLRDILYARPATFTPWYGGVDDQPKVHKRVHSH

SEQ ID NO: 335764 - protein, 82 aa, Zea mays
  Clone ID: MRT4577_69325C.1.pep
FCTRSWYFPNLLGLGGFFSLTLGEETPLFFAQKFMQMGGGFGFTPPMGLGPKKDTLDFMQHDWVFPKMERPPKNVFNQFLKK

SEQ ID NO: 335765 - protein, 62 aa, Zea mays
  unsure (1)..(62): unsure at all Xaa locations
  Clone ID: MRT4577_69326C.1.pep
NLLLGILLPLLFSTISNPFLVHLLDEQQIQNQLXWFHPFTPQLPPHLCWVSERRERKGLHQL

SEQ ID NO: 335766 - protein, 62 aa, Zea mays
  Clone ID: MRT4577_69327C.1.pep
PKSASVCSICIRYFASTGGQGCPVLSSFHIFVALPDVFPWLCVLAPLFASGFFEEKIKKNPP

SEQ ID NO: 335767 - protein, 368 aa, Zea mays
  Clone ID: MRT4577_69328C.1.pep
METELKICIDENCVLKRDLDVALIAKMEADECHTKEKEEFCGIIKEKGMMIDKLQQYVAVLEEENMVKKLDLGSLIKMECDKSIREVKNWYSEIAEISDKKLLELEERLRFAEQKFSCKEQEIMNMFDQEESDWYTLIAEKEIAISDIQRTVESVQLDIKHLLEAAAAKVAEVQLEVNQLYGFAETLNSLNIIQEHDTVFKDMLIAECERELDSLQVNLVQEKHQSRNLKNLIEQLEAQTASEMSEKAEEHLEVTNKLKSLEERNETLDEHLRELKSRTTDMSNAVLQERNQLVNELTGLTNTIGEVIYGGESMMSNLRRISQKINEEEPCNDRLTSEKTNDRSSAPVIRKKPRHDPVRRSPLKEQNY

SEQ ID NO: 335768 - protein, 126 aa, Zea mays
  Clone ID: MRT4577_69329C.1.pep
LDRSNKPDFSQKGNSKRPKSGNATSENPLSEGASASMVFLKGSVKRKSPGFLSDKPSFKKQKPHKPDSGRPDGKRFVRDSDTSAPFVKNAGKQKQSIAELADLAGKEKLTASEVRKLLKPEMSGKS

SEQ ID NO: 335769 - protein, 97 aa, Zea mays
  Clone ID: MRT4577_6932C.1.pep
PRAEHDFQLVGVVQFFGGNGGQLQIFQGGVGPQPLVFVPRFFYFLPPPLFPWCCFVNGIQGNYFFLFAIFEVFTIYFGPPFSILGFGRPPPNKNRYT

SEQ ID NO: 335770 - protein, 125 aa, Zea mays
  unsure (1)..(125): unsure at all Xaa locations
  Clone ID: MRT4577_69330C.1.pep
AACLSXFXLFVSSGSFFRLVLVVVSVSFGAVVXLLLLLVVVPRVACVXGXRRPPPXALSPLRXLRFRLALAGAPLASLLLLPVLLRLLALWAAALRWXGVWGALPPPGGXVGRGXGAAFGLXLAP

SEQ ID NO: 335771 - protein, 243 aa, Zea mays
  unsure (1)..(243): unsure at all Xaa locations
  Clone ID: MRT4577_69331C.1.pep
LQYPVRNSRVDPASASAGAYVQLNMPGSDLERRAHLLLAQLEDLEPSEAESEALSPAPVLSLKPASQLEPALLLTPSQVVTSTPVREPAAAPVPVLASSPVVAPAPELEPVPEPPQEPEPSLALAPELEPAVSQSLELESAPVPTPALEPSWSLPEATENGLTEKPHLLLFPPDLVAEQFTLMDAELFKKVVPYHCLXSIWSQRDKKGKEHLAPTIRATVAQFNNVANCVITTCLXDQSMKAP

SEQ ID NO: 335772 - protein, 107 aa, Zea mays
  unsure (1)..(107): unsure at all Xaa locations
  Clone ID: MRT4577_69332C.1.pep
LISCGRKQLCCVFGNEKKKKKKKKKKKKKKKKKKEKKKKKKKKKKKXXKKKKKKKKKKXPRRGTPRLKGKSHXNWGPFFGVPTWAPIGAKFWPSRSPGGNCFPQTLP

SEQ ID NO: 335773 - protein, 128 aa, Zea mays
  unsure (1)..(128): unsure at all Xaa locations
  Clone ID: MRT4577_69333C.1.pep
PGSIQAPKLTSYKARDGTIGLHKELRPNGMGPGNNTPSAAVNQMVADARHYIDKDYNEHMKHLHDTKHRLCSLENKLTDXDVSDQEVNSILKQFDKKDMEYMQLQRHIVNVKDFELLTMIWNGAFGDV

SEQ ID NO: 335774 - protein, 69 aa, Zea mays
  Clone ID: MRT4577_69334C.1.pep
TTKKLHRTHRSRFTFTENRYIGRNRFLCHNTLTRYKEQHKGLGLGATQVSFGSGHACKSCANLFTCLRS

SEQ ID NO: 335775 - protein, 140 aa, Zea mays
  unsure (1)..(140): unsure at all Xaa locations
  Clone ID: MRT4577_69335C.1.pep
SKPRQTKRFIDTLESYLLEIRRILRITSRRFGSQSKQQSRAREIDHMRPRPANXIKSRGRLITGGELIKTTKAGGSESPTTDSVTMSEDDELGGYGFFDAGMLLQALKARNESLDAGEPKPFELASRRRNIGKKLRLLEY

SEQ ID NO: 335776 - protein, 100 aa, Zea mays
  unsure (1)..(100): unsure at all Xaa locations
  Clone ID: MRT4577_69336C.1.pep
IGEEAGWVSAAGGVRGPAQRGQRGGAATVGVRGGGASMGRXTSRDGXXXGDTSPAHPGGCPARKQVERSQADTAGVIVSDKGEDDQKGPKHKTRGGSCWY

SEQ ID NO: 335777 - protein, 66 aa, Zea mays
  Clone ID: MRT4577_69337C.1.pep
AAALLFFWWIYIKFWGVFSSLRRNNITVFIHRRCSRSIAPTSKQRFRGTKYPTHIMNRTTSSACPL

SEQ ID NO: 335778 - protein, 771 aa, Zea mays
  Clone ID: MRT4577_69338C.1.pep
MRLLHKSVPLRLLLPRRPLKTFLLPPPSRPRCLSLLPRAAMGSVAGDTAARLAYPPARRDDSVVDDYHGVRIPDPYRWLEDPDSEETKEFVARQAELAETVLAGCPDRENLRREVTRLFDHPRHAAPFRRGNKYFYFHNSGLQAQSVLYMLDDLDGKAEVLLDPNTLSKDGTVALSTYSISEDGNYIAYGLSESGSDWVSIHVMSITNKQPMPDKLSWVKFSSISWTHDGKGFFYGRYPAPRGGEVDAGTETNINLNHQIYYHVLGSDQSEDILCWKDPEHPKYSFGASVTEDGKYIILGIYEGCDPVNKLYYCEISSLPQGIEGFRGTQDLLPFVKLIDNFDAQYQVVANDGDEFTFLTNKSAPKNKLVRVNIKNPELWTDVLSEHEKDVLESADAVNNNQLLVNYMSDVKHILQIRDLRTGNFIHQLPLEIGSVSEISCRREDKEVFIGFTSFLSPGIIFRCNLASTIPEMKMFREISVPGFDRTSFQVKQVFVPSKDGTKIPMFIMSKKDIDLNGSHPTLLYGYGGFNISITPSFSVGRVVLCKNMGFVVCVANIRGGGEYGEEWHKAGALAMKQNCFDDFAACAEFLISNGYTSSRRLCIEGGSNGGLLVAASINQRPDLFGCALAHVGVMDMLRFHKFTIGHAWTTDYGCSDKEEEFQWLIKYSPLHNVRRPWEQSSGNNCQYPATMLLTADHDDRVVPLHSLKLLATLQHVLCTSTEDSPQTNPIIGRIDRKSGHGAGRPTQKMIDEAADRYSFMAKMLGASWTE

SEQ ID NO: 335779 - protein, 151 aa, Zea mays
  Clone ID: MRT4577_69339C.1.pep
CLALHSVACLQWVGLIVAGFEAASSFRSLLWMCLWRSSQLFGGRRTTHSRCRARRQILVFAREFCGVRCICFGLGSSCLGLKQCVAGMGLLLALSFAVWAREFSNSDYFFTRFPFQIEFGSFFLSREDELDITLAVFHQLSVDGFQLFQSI

SEQ ID NO: 335780 - protein, 71 aa, Zea mays
  Clone ID: MRT4577_6933C.1.pep
ADNVPGVKSRNGGRWLLKERRRRRRRKGVFTRSSCADWCLVCLTHNATQQILINKSLRSNVIYVGLLHVDL

SEQ ID NO: 335781 - protein, 199 aa, Zea mays
  unsure (1)..(199): unsure at all Xaa locations
  Clone ID: MRT4577_69340C.1.pep
IRHEDDTQIFVHGGRSSGCPDNAGAAGTLYEAVPKSLXVSNNNLSTQTDTLLLEFPNQPLWTNVFVRNRAKVAVPLLWSRVQVEGQLSLLSGAILTFGLTRYPYSEFELMAEELLMSDSTIKVFGALRMSVKMLLMWNSRMEIDGGGDSIVATSLLDASNLIVLKESSVIHSNANLXGVRXQGLLNLSGDGDTIEAQRL

SEQ ID NO: 335782 - protein, 59 aa, Zea mays
  unsure (1)..(59): unsure at all Xaa locations
  Clone ID: MRT4577_69341C.1.pep
TKFLARQHVMGQDCTIPNRLFGERSSPLDQSVLSLSIYLCDALGNXXXXXXXXXXXXXS

SEQ ID NO: 335783 - protein, 46 aa, Zea mays
  Clone ID: MRT4577_69342C.1.pep
TTCYYIMGGCNRTRVVSHMFIAHQHVANNMHELPKGGGLCKVKSWP

SEQ ID NO: 335784 - protein, 103 aa, Zea mays
  Clone ID: MRT4577_69343C.1.pep
KNNYPPLKRVKSQIFGASTGPKGQKPIKRPPPPPRGKLDSPGQSKPCPKSPHGGTVSRSIFGRHQPLFKKKKSVKRLLLPDFLGFQGFGGSIPPLFYLVGVPP

SEQ ID NO: 335785 - protein, 343 aa, Zea mays
  unsure (1)..(343): unsure at all Xaa locations
  Clone ID: MRT4577_69344C.1.pep
MDAQDGDERPLIIHRLPLLQDESTSEFTSDGTVDLRNQPARKQRTGKWKACFFILGAEFAECVAFFAISKNLVTYLTGVLHESNVDAATTVSTWIGTSFFTPLVGAFLADTFWGRYWTILAFLSVYVTGMTVLTASALLPLLMGASYSRSAHRLFAYLGLYLAALGTGGIKPCVCALGADQFDASDPVERRAKGSFFNWYYFSINIGSLLSATVVVWVQDNVGWGVGFAIPTLLMLSGLVLFVAGRKVYRYQRVGGSPLTRASQVVVAAVRNYRLVLPEPDDSSAALLHQAPPGTTEGNYSTMQHTSQFRFLDKAAIVAPSSGXSXATASPWRLCTVXQVEEL

SEQ ID NO: 335786 - protein, 460 aa, Zea mays
  unsure (1)..(460): unsure at all Xaa locations
  Clone ID: MRT4577_69345C.1.pep
MDAQDDDERPLIIHRLPLLQDESTSGFTSDGTVDLRNQPARKQRTGNWRACFFILGAEFAECVAFFAISKNLVTYLTGVLHESNVDAATTVSTWIGTSFFTPLVGAFLADTFWGRYWTILAFLSVYVTGMTVLTASALLPLLMGASYSRSAHRLSAYLGLYLAALGTGGIKPCVCALGADQFDASDPVERRAKGSFFNWYYFSINIGSLLSATVVVWVQDNVGWGVGFAIPTLLMLSGLVLFVAGRKVYRYQRVGGSPLTRASQVVVAAVRNYRLVLPEPDDSSXVLHQAPPGTTEGNYSTMQHTSQFRFLDKAAIVAPSSGEKGATASPWRLCTVSQVEELKTVLRMFPVWVSMVLFFAATAQMSSTFIEQGETMDNRVGPFTVPPASLSTFDVISVMVCIPIYDKALVPLARRATGKERGLSQLQRLGVGLALSVAGMVYAALLEARRLSLARAAADR

SEQ ID NO: 335787 - protein, 67 aa, Zea mays
  unsure (1)..(67): unsure at all Xaa locations
  Clone ID: MRT4577_69346C.1.pep
NDRDGWHADTHFEVIDIVDAKNLDDSVPXGTNCVIPHVNRTEHLQLDLSQDGDVILNTLHGNLVDDL

SEQ ID NO: 335788 - protein, 62 aa, Zea mays
  Clone ID: MRT4577_69347C.1.pep
KCSYFVGVWNDRLWPDDWTPVPANGKRSAHFEQTLLVPKTEFEVFPARLPSSPEVFPWLKNP

SEQ ID NO: 335789 - protein, 103 aa, Zea mays
  Clone ID: MRT4577_69348C.1.pep
PKMGNRLVQKNPPKGAPSREIWGPSSSRSRSMSNRIATGGSSKGPSKGQSKGLCSMPKAGNQGFLLNPHRFPGIWTRINIPFQILCPCFALCKGRSPLRPPRP

SEQ ID NO: 335790 - protein, 52 aa, Zea mays
  Clone ID: MRT4577_69349C.1.pep
TSRLTYTCGRLHNYSILPPNFNSLPTFLQHHHSKNPVITQLNPLTPHPPLSN

SEQ ID NO: 335791 - protein, 87 aa, Zea mays
  unsure (1)..(87): unsure at all Xaa locations
  Clone ID: MRT4577_6934C.1.pep
RGVGGGRGAAALECGGDLRANVXAWLGRAXIAEXRMRADLRRLCRDRSXAETDLARGGRAPAPPXARRGAAISLSSLARCGERRXAR

SEQ ID NO: 335792 - protein, 51 aa, Zea mays
  Clone ID: MRT4577_69350C.1.pep
NPNISKYTETECVEKVQFITTAQGQGRERQDVEHTGLHIYHVSNQKDNAST

SEQ ID NO: 335793 - protein, 77 aa, Zea mays
  Clone ID: MRT4577_69351C.1.pep
QHHECLRCGPQFTCVRPCHLCAQTRPVVFQDQVRVWERWIGHPCSQGHCLCDGLVMRTVLGLLVWHGKLASCHKKGR

SEQ ID NO: 335794 - protein, 235 aa, Zea mays
  unsure (1)..(235): unsure at all Xaa locations
  Clone ID: MRT4577_69352C.1.pep
RKVSICSLKKLSFKRNVVSLSSELKGVRSKLASXEQLFVRESQTRKLAETKTRSMEEEVIKLQKCLQDKDEQLCSSTSSTEQLXGEAGVASAKLARMXCMSLLKELNEKDSSLKDHRLRVNNLGEQLDLLQKDVQAREVTQMQLKDIVIRIETNIMDEVAKAFEIAILRGEIGILSTHWTNKTKNLESQLKKHQRTDQELKKRVLKLEFCLWSCHPLDHANRMLNFYAPVELLIE

SEQ ID NO: 335795 - protein, 73 aa, Zea mays
  Clone ID: MRT4577_69353C.1.pep
LRPLLNIYTYSCVHFTIISTVHILRTLMCHVQHHNLIVVPTFLCTIPVDDRTRDKIQASEPLLQLLISSLVLF

SEQ ID NO: 335796 - protein, 168 aa, Zea mays
  unsure (1)..(168): unsure at all Xaa locations
  Clone ID: MRT4577_69354C.1.pep
LAETKTRSMEEEVIKLQKCLQDKDGQLCSSTSSTEQYHHELDDLRTHLSFTQATGEAGVASAKLARMXCMSLLKELNEKDNSLKDHRLRVNNLGEQLDLLQKDVQAREVTQMQLKDIVIRIETNIMDEVAKAFEIAMLRGEIRILSTHWTNKTKNLESQVCYISFICS

SEQ ID NO: 335797 - protein, 87 aa, Zea mays
  Clone ID: MRT4577_69355C.1.pep
GLPGGPGRDQAREGEEWRAWWWLGMESCCRMKDGLRLQIGEVCAQMPRDELETRLEQMKEDGGGGVGEGRGGEGMDPGPDGRAEEDD

SEQ ID NO: 335798 - protein, 43 aa, Zea mays
  Clone ID: MRT4577_69356C.1.pep
GPEMSDKQLCKQGLRPTFNIIYELTRSSGCILETQNRSAVPTC

SEQ ID NO: 335799 - protein, 166 aa, Zea mays
  Clone ID: MRT4577_69358C.1.pep
PRVRAASLSLCSLSPAEAPFFPGLPWRRSLLPELAPARSALFPTARPLPLVSLLAAAPARSSGSRAQPASPPVAPAARSAPISLRPLSFDTRLLPSPRAPQLRPVLLHGARLLPPKVPSSPCHLCYFHFFLLRTFCFDFELGRFVLRLIFSAAGELTCSCRSPWGV

SEQ ID NO: 335800 - protein, 78 aa, Zea mays
  Clone ID: MRT4577_69359C.1.pep
QPKVRGIVMRMSIPRQNQKRREYPKKKSGRWSSILIINIPCPPLFDTTKGYVLRHASHCFVFITLVQWLQTTSPLFFW

SEQ ID NO: 335801 - protein, 85 aa, Zea mays
  Clone ID: MRT4577_6935C.1.pep
SSRIRSSKRGRAKDVCRDFLFCTGLSLMGEHMKKVPQSSVDLADCPYGDSQRLRYRYVSSTYKESNRTVRRIDFLWKGSVSDDLS

SEQ ID NO: 335802 - protein, 117 aa, Zea mays
  unsure (1)..(117): unsure at all Xaa locations
  Clone ID: MRT4577_69360C.1.pep
PFPQLGSLNLGFFLPXQXFPFGQLLGAYPQQFFPFYQLAALTFPVFLQQQHLFPFSRLVGVSPAPFLTQPQLLPFYQPVGPNAGPLFQLQQLLPFNPLVLSNPAVFYPPPPLGGALF

SEQ ID NO: 335803 - protein, 59 aa, Zea mays
  unsure (1)..(59): unsure at all Xaa locations
  Clone ID: MRT4577_69361C.1.pep
REGTAAASRRRRTGGRAGRRGRIPGADATCPRRRRSPPSLLGGGWVGEQQRPRXRPRGR

SEQ ID NO: 335804 - protein, 34 aa, Zea mays
  Clone ID: MRT4577_69362C.1.pep
EEDREMAAAVTAAMAGRQAEVRPNTRRGTKGRGY

SEQ ID NO: 335805 - protein, 166 aa, Zea mays
  unsure (1)..(166): unsure at all Xaa locations
  Clone ID: MRT4577_69363C.1.pep
ASTFNTRLRLYRLYCCIPLGREXWAGSRNGYXIHGQXTQMMXRVTSRPTYKTECTTYRDPCIGCENILYVFRSCNAFINNMHVISQPYIFHNTTNLQLYXVLTTATSTYXKPLLDFGRXLAVDRNHDSIEAITLKSPEDTIDMDIEDQHEAELAAAXAQPSWHDDG

SEQ ID NO: 335806 - protein, 53 aa, Zea mays
  Clone ID: MRT4577_69364C.1.pep
LYLAIGSCWVGFWSSYILTHPRNSSLGMVSVALKLSSTSGSPDPCRLNDIFST

SEQ ID NO: 335807 - protein, 87 aa, Zea mays
  Clone ID: MRT4577_69365C.1.pep
EIGLRHHRFWTCGLCGKVYTHEALSPISDIGLGMDGADSITFTNACKHTWCVGTLHDTQLADRRAVRLLPGGVSHLQYGRTPCWDMV

SEQ ID NO: 335808 - protein, 187 aa, Zea mays
  unsure (1)..(187): unsure at all Xaa locations
  Clone ID: MRT4577_69366C.1.pep
MTGFSDLHTVDXLKSLKAHLARXTYVPXYSITKDDINVFDEVPSHTLVAEFPNAALXYETVSATACSRFPDKAVDINLPAISVPAXLLHAHDAEDDDDXLDLFGDETDNXQNAGEDRVADANAXLKRNERGTSSVXLMDVKPWDDETDMNNLQEAYRKVQTXGTEXGPSKLVPGSIXIKNMTIMMTI

SEQ ID NO: 335809 - protein, 176 aa, Zea mays
  Clone ID: MRT4577_69367C.1.pep
LISAVPNDWLVLVHLLLMAIFQRQLQSRLVCAASLQWWSVMALKSNSSDFPRSFGSSSSAWRSVVTLPRDSSGAPLFRSPRRGMRSPSVPCGRCTSFSGLPALPSQKRAHTQMDISYHHKREDRSGSVVRKQVHDGPDSWIWRREATRSARQTARRREAVRAGCVPRQAHEKGPGC

SEQ ID NO: 335810 - protein, 51 aa, Zea mays
  Clone ID: MRT4577_69368C.1.pep
FLVVGLMLSAVYCLGLEMNSVVVVVVSVIRVRVRIGQVCIGVVQMMVGCVV

SEQ ID NO: 335811 - protein, 113 aa, Zea mays
  Clone ID: MRT4577_69369C.1.pep
INGALRRERPPFPSSLPSSSLRRLPCRHRYCLLEGRSLSRATHEASRRRHAANVYRTTRRLGLGRASPRLARRYWRLPLVLDVHPARACSPPAAMRQDLAKIHPRQLQCTLSR

SEQ ID NO: 335812 - protein, 51 aa, Zea mays
  Clone ID: MRT4577_6936C.1.pep
FGSRFPEPFFFHVQIRPTGRATIENSAPHGLRSCSSPMCSDCGAGRHHPPS

SEQ ID NO: 335813 - protein, 94 aa, Zea mays
  Clone ID: MRT4577_69370C.1.pep
RGLNIAPRTQRAHDSHSRREFPQLQQATGAVYPHRLANARSEHRPSTDARPTSLMDLFDPFDSMLRSHRAADVAVNRPLCCCGELPTSKKWVLH

SEQ ID NO: 335814 - protein, 151 aa, Zea mays
  Clone ID: MRT4577_69371C.1.pep
GAVHNKQGTLINHPFSAFCKPFCPCSSSPLHFFCIISGPRALFTYKKGSVIKLPKLPVIVGGGRMGRVYIKVLVSFYFLGGLRFRTNRSLSIPPLKAHPPLFFYLQPGAPGSCVPWMEGRGRRVSGCWLLYVHSLGHGGDAMATAAAPKSP

SEQ ID NO: 335815 - protein, 146 aa, Zea mays
  unsure (1)..(146): unsure at all Xaa locations
  Clone ID: MRT4577_69372C.1.pep
PERNDKNPEQPTQNRNPREKHPKKKGKEKGTEKQSEKKQKKASGNKQGKNRGGPARRGEPQEXPDGGGPPEGDRPGIPAEXAGTQRVTNPGGGTQGATVAGRTRGDPPPDQGGRTRGPPPALKDHGRPPLKHRHPYPGGGNRKRNP

SEQ ID NO: 335816 - protein, 104 aa, Zea mays
  Clone ID: MRT4577_69373C.1.pep
MGDRPAPIEKVAVPEKMALFLHAAVTSPGHQQQHGASSHEAPAAANITPRTTTARNKQQHLPVSPGACLCSPTVHEGSFRCRLHRGSGSGSGLHEMKMSKKAGV

SEQ ID NO: 335817 - protein, 88 aa, Zea mays
  Clone ID: MRT4577_69374C.1.pep
FGTRREGKAHYYILGKRDASCGRVQTEPDAVRTGRPPAMTGPSWPPRTIPDRSQCAQHCTYYRCARNPQVRTDGVVYARLWLHSDASS

SEQ ID NO: 335818 - protein, 103 aa, Zea mays
  Clone ID: MRT4577_69375C.1.pep
MGDRPAPIEKVAVPEKMALFLHAAVTSPGRQQQQHGASSHEAPAASITPRTTARNKQQHLPVSPGACLCSPTVHEGSFRCRLHRGSGSGSGLHEMKMSKKAGV

SEQ ID NO: 335819 - protein, 104 aa, Zea mays
  Clone ID: MRT4577_69376C.1.pep
MGDRPAPIEKVAVPEKMALFLHAAVTSPGRQQQQQHGASSHEAPAANITPRTTARNKQQHLPVSPGACLCSPTVHEGSFRCRLHRGSGSGSGLHEMKMSKKAGV

SEQ ID NO: 335820 - protein, 289 aa, Zea mays
  unsure (1)..(289): unsure at all Xaa locations
  Clone ID: MRT4577_69377C.1.pep
MANIPKCRWTQNPLILLSYAAVVLAVLSTLTLPLLASSDLDAVNFKKFCLVLKNQYLCLGQNAEPRARNAMALLLNSEGISGPLPTALGAFSNLSYLALANNKLTGPIPPSVGHLHHSLREIVLLNNQLSGCLPGELGMLSKAVVIDAGMNQLTGPIPPLFSCLSRVEQLNLAGNRLYGHVPDALCRLAGPAGRLSNLTLSGNYFVAVGPACAALIKDGVLDVKNNCISGFANQRPAAECAVFQSHPKTCPEEASTXVMPCRSYHAHERCAAEGSAEDHQGLLQLRDVR

SEQ ID NO: 335821 - protein, 65 aa, Zea mays
  Clone ID: MRT4577_69378C.1.pep
SDHYAPAVWGEPTRRAQPLSGLNPACAYAETALLSRPHPAVLGKWHGVRSNSDWPKMTRVSSGKT

SEQ ID NO: 335822 - protein, 306 aa, Zea mays
  Clone ID: MRT4577_69379C.1.pep
MANIPKYRWTQNPLILLSYAAVVLAVLSTLTLPLLASSDSDAVNFDTFCPGFKNLYLCVGAKKSPGLRNNVLLASMAGARNARALLLNSEGISGPLPTGLGAFSNLSYVALANNKLTGPIPPSVGHLHDSLREIVLLNNQLSGCLPGELGMLSKAVVIDAGMNQLTGPIPPLFSCLSRVEQLNLAGNRLYGHVPDALCRLAGPAGRLSNLTLSGNYFVAVGPACAALIKDGGVLDVKHNCISGFPNQRPAAECAAFQSQRKTCPEEASTQVSCPAAATMHMNAAPPRDQRKTTRDYYSYVTYASLR

SEQ ID NO: 335823 - protein, 61 aa, Zea mays
  Clone ID: MRT4577_6937C.1.pep
SPVPTCLLFSFFTRGSFLHPSHPLFSDPLPSFPIRCSVRKAWVVPAIPSGFVQAGVLSFQL

SEQ ID NO: 335824 - protein, 90 aa, Zea mays
  unsure (1)..(90): unsure at all Xaa locations
  Clone ID: MRT4577_69380C.1.pep
GLASCAWQLWEAMEPSSSITFASSSSYLSNGSSPCSVALPPPGPPQTPPLPAGXGWGAGVAAAXSGGSVXXVXSLNRLSKNLERLLLDPD

SEQ ID NO: 335825 - protein, 67 aa, Zea mays
  Clone ID: MRT4577_69381C.1.pep
IKILDIGDQKKRSLSMADGQIEPRIGFGIKAFPKSCAACLRNSFRYCGFRLSLATNSSLSQYLNPPL

SEQ ID NO: 335826 - protein, 84 aa, Zea mays
  Clone ID: MRT4577_69382C.1.pep
IRHYLSRDNTDTAWEGRFTCQGQLCGAKAHFGLVHEQATRDLSYGHYLAVRLVKYPKQVILEDFDKNTANKSCGTGLITLVKLT

SEQ ID NO: 335827 - protein, 552 aa, Zea mays
  unsure (1)..(552): unsure at all Xaa locations
  Clone ID: MRT4577_69383C.1.pep
MICKRKKKKKRGGTPHQKKPTKIPKERKGTNRRYKERDARLVSSRAAAMAALGRGLPLLLLLLLLAVSGAANAAAAPGGMSIITYNEEHGARGLERTEPEVRAMYDLWLAEHGRAYNALGEGEGERDRRFLVFWDNLRFVDAHNERAGARGFRLGMNQFADLTNDEFRAAYLGAMVPAARRGAVVGERYRHDGAAEELPESVDWREKGAVAPVKNQGQCGSCWAFSAVSSVESVNQIVTGEMVTLSEQELVECSTDGGNSGCNGGLMDAAFDFIIKNGGIDTEDDYPYRAVDGKCDMNRKXARVVSIDGFEDVPENDEKSLQKAVAHQPVSVAIEAGGREFQLYKSGVFSGSCTTNLDHGVVAVGYGAENGKDYWIVRNSWGPKWGEAGYIRMERNVNASTGKCGIAMMASYPTKKGANPPRPSPTPPTPPAAPDNVCDENFSCSAGSTCCCAFGFRNVCLVWGCCPVEGATCCKDHASCCPPGYPVCNVRAGTCSVSKNSPLSVKALKRTLAKLSTXHEDLDLGLPSAFLTHQEQDFIDYLYVCISTVTVP

SEQ ID NO: 335828 - protein, 139 aa, Zea mays
  Clone ID: MRT4577_69384C.1.pep
SSRCLVVLLLDTAPVDPILGYIPAVSMGLSVLPLRRLAFILRLRVGQDLMDLVRPPVVLGIIVPRLLLALSVGGLRRLGFLVRGKGILGFTARLGGSRLLVLVGSAGHRSGIFPAPPQESSWMQKAERRLWNRTRPASR

SEQ ID NO: 335829 - protein, 57 aa, Zea mays
  Clone ID: MRT4577_69385C.1.pep
IVLDWSPFSSKEELLQQFQDVGSHGTKVVVYNLWMNDDGLLELDFEDDDEDILLRDQ

SEQ ID NO: 335830 - protein, 31 aa, Zea mays
  Clone ID: MRT4577_69386C.1.pep
FPKDMKTINFRSPYILHKLVGRLRISIQHDW

SEQ ID NO: 335831 - protein, 134 aa, Zea mays
  Clone ID: MRT4577_69387C.1.pep
LGRLATLYVSVALLGVCFGISLSVIISTSSELFGLKHFGKIFNFIALANPVGAFLFNTLAGYVYDLEVEKQHATASGSDVACHGPNCFRLTFFVLSGVACLGTLLSTVLTVRVRPVYQMLYAGGSFSQPRNPAH

SEQ ID NO: 335832 - protein, 183 aa, Zea mays
  Clone ID: MRT4577_69388C.1.pep
AESDYSGFPEGARSWNQSLLPAQPRSATAPQRRRPHLPRAAVHPYRLREIPARIRNPTNLVPETFDPPATMSSSSQSPPASSHRATLHRCHARPDLHAGPSHHRVIIQSAHDDERTAHSGHPPFLHELGSVASWSVRDQAPPGGHPAAAHTVVVVCGQRDNGGFTAAGPNGAICTAPSVAVPR

SEQ ID NO: 335833 - protein, 58 aa, Zea mays
  Clone ID: MRT4577_69389C.1.pep
SMVAAAAPPSCCGKPGWRGLLVPAPGMFTSAGTGSSPGLNGRHGRLASAALFGPAGGH

SEQ ID NO: 335834 - protein, 114 aa, Zea mays
  Clone ID: MRT4577_6938C.1.pep
GLFSEWSTAVGITDLGLGMVGRDFIGWVVCREAYIRRSCFSTSCICLDCLGRIGIRVPISCKYPRLFNATSYLFEVLRLSDSLLVFAQTAGKRKMIGMIKTTITYLRWIIKRYI

SEQ ID NO: 335835 - protein, 83 aa, Zea mays
  Clone ID: MRT4577_69390C.1.pep
PECSKIEPPAHFGTGRKVACMLCRIAKEKDILALGRQQRKRTELGNSQFRCSSWDFGGFRLWSSKCLVFARQSCSLDVVGCGD

SEQ ID NO: 335836 - protein, 73 aa, Zea mays
  unsure (1)..(73): unsure at all Xaa locations
  Clone ID: MRT4577_69391C.1.pep
RDRALREPQLITKTMDRIICMHAYAVCMLAMRCLYXRYEVHXNNGPCCSHASAVCTIMLYIYIYTVFRYRIKT

SEQ ID NO: 335837 - protein, 61 aa, Zea mays
  Clone ID: MRT4577_69392C.1.pep
SITFQYFYITSWDRYITSYHLSPPNPSLYFNYHLHSIHYPPSYIFLTLQTLTIPYLLTLYH

SEQ ID NO: 335838 - protein, 53 aa, Zea mays
  Clone ID: MRT4577_69393C.1.pep
PPSRFFFFFFYAQMLLCCLWICKCACILILEAFLAVQSVFVKERRREAIEISD

SEQ ID NO: 335839 - protein, 45 aa, Zea mays
  Clone ID: MRT4577_69394C.1.pep
RSVCLLWLVPGRVVFAARRFLASLPLASGVRSFPGVPARFLPAGS

SEQ ID NO: 335840 - protein, 139 aa, Zea mays
  Clone ID: MRT4577_69395C.1.pep
MPGKANCCCPARMQHSVLCPRFRGEDGSEDLPVRFGAVLVDAAVGADVVAAGESFSTDEPISATRGPTSGSLALMFGSCPLSGDANESLPATASVLGPSLLLQRSPASHQGFRRPAGPPMWGVVRTCGGGTGVPFVMAP

SEQ ID NO: 335841 - protein, 356 aa, Zea mays
  Clone ID: MRT4577_69396C.1.pep
RPGTFGSCSAAVSNRTLCGGHGAVCARGVLALGSHSSRRRARRRHAVVFAKRRRRRLSKWQRPWWKTFFSDWNEDDESLAGWREEDELLEEIGANQELSDNEKFKVWRSKAEAIVEMREAQQDAMNAEERSWEDWISGGGTSGTGGGGDWNREDSLLDQITDDPSEIVRDKSIIRIFRDSINEDYEDMLFEDRVFMYASTNSAKFLALLIVVPWVIDFLVHDYVMMPFLERYVQKVPLAAELLDVRRSQKLQMVKDLNIEKARYRLEVEIGKSPPLSDEEVWHELREKAIELRDDWRLENRNAFANIWSDTVYGIVLFLLMCFNQSKVAMLKFTGYKVLNNISDSGKAFLIILVSD

SEQ ID NO: 335842 - protein, 67 aa, Zea mays
  Clone ID: MRT4577_69397C.1.pep
TGTFSALEGTYRYQNDVQVLGKHTGCGVFINQREPPYTSPFFLNRYKQLRESGHPHPKKKAAREILA

SEQ ID NO: 335843 - protein, 73 aa, Zea mays
  Clone ID: MRT4577_69398C.1.pep
SDSVAHRRLDSNTPANRTTTPTHGARITLLRFCLYERTSVIIPQATCPMPLFTVVHQSKWASNIQPCSLQAQL

SEQ ID NO: 335844 - protein, 148 aa, Zea mays
  unsure (1)..(148): unsure at all Xaa locations
  Clone ID: MRT4577_69399C.1.pep
PAGLARKYASGILSDASIVNMDDRSLAAMLTMVKGIGAWSVHMFMIFSLARPDVLPSADLGVRKGVQMLYALQDVPRPSQMDRLCERWRPYRSVGAWYMWRLIESKVPQPAPPIPALPSPDGQIMLQQQQQQSVIQMIIPFXMLPGMG

SEQ ID NO: 335845 - protein, 151 aa, Zea mays
  Clone ID: MRT4577_6939C.1.pep
MQMRRTATASLPLATAAVFLLVFLAATTVEVEAIRLLDAESRAAANRQQAIVPSASVLVTTQQQQQQHGRRQGETGLTRTVDAPASREERSSSSSPAPAAAAAGENSEAGRSVVAVAVAGQQDQAVEAAAHRLPEFHEDYYGASVHEPRHH

SEQ ID NO: 335846 - protein, 89 aa, Zea mays
  Clone ID: MRT4577_693C.1.pep
AGDLASLAPKLLGHMYNIFTFMILQIVMYIIRFCCSSVHTDLYRYTSLRWVYSRLFRACVNLFRSLESKHQKDLRSLGEFVPDAGRTRG

SEQ ID NO: 335847 - protein, 101 aa, Zea mays
  unsure (1)..(101): unsure at all Xaa locations
  Clone ID: MRT4577_69400C.1.pep
PRPPPPSGAKPPGPKKKAGRXPTGGPPPPGEPPGPKKNRGLFIPPGLGAWGVSPGGPPPTHGAXGVNQGALIPGXPPPRFLTRGCFPVSKCPGPGPPNKGG

SEQ ID NO: 335848 - protein, 50 aa, Zea mays
  Clone ID: MRT4577_69401C.1.pep
SSSSSNLKLAPSTRASRRWAGSPAQALVRPPWPRLGCSRASARWSIESEG

SEQ ID NO: 335849 - protein, 153 aa, Zea mays
  unsure (1)..(153): unsure at all Xaa locations
  Clone ID: MRT4577_69402C.1.pep
TQRRRCRWPPPPPPPTPVEGSGGAEEGVEITYKIFFWVLFXPXXIFLAGGEQNXPYSIFFWGXGGYLRGEGNILAXXARDGKCXGTVVCMMGELRGAFRGCVALLXXLTPYLGRGNAPGLVSFFFWAMTESVFGAGTPAALVSFLGALVLHGR

SEQ ID NO: 335850 - protein, 40 aa, Zea mays
  Clone ID: MRT4577_69403C.1.pep
NTRPDPLIRLDNHIYNISFNTVSFNPRARSNTHKASPHLT

SEQ ID NO: 335851 - protein, 78 aa, Zea mays
  Clone ID: MRT4577_69404C.1.pep
VAHNVAHQRSRRIGTSGGRPRGVSLVYRVPERPLRAPWPARTRLKGVCMSDHNCAQVCLHEATPRHCAASCPGKCIGG

SEQ ID NO: 335852 - protein, 137 aa, Zea mays
  Clone ID: MRT4577_69405C.1.pep
MPHMKQSSIDVGLQPAADNFFPCPPPPPASRQIHIANPNAAAAKTQQPPLQQCLAGRSRFKDVDMRVRVRGGGKTSQVFAIRQAVAKGLVAYYQNYVVEAAKKEVKDVFSRYQRTLLVADPRRCVWGMDIPGPTPGR

SEQ ID NO: 335853 - protein, 383 aa, Zea mays
  Clone ID: MRT4577_69406C.1.pep
MHGRRHLAASLTRALIQAPSRSISSTPSLLQTLDPSVPSPPAAGAGRLAELRRRLQADAPSLGDFTYSVEVGTRQRPLPKPKWMKETVPGGAKYAAIKAKLRELKLHTVCEEARCPNLGECWSGGETGTATATIMILGDTCTRGCRFCNVKTSRTPPPPDPDEPSNVAQAIASWGLEYIVITSVDRDDLPDQGSGHFAETVQKLKALKPEMLIEALVPDFRGDPSCVEKVATSGLHVFAHNIETVEELQRNVRDYRANFKQSIDVLEMAKEYAPPGTLTKTSIMLGCGETPDQVIRTMEKVRAADVDVITFGQYMRPSKRHMPVSEYVTPEAFEKYRALGVEMGFRYVASGPMVRSSYKAGEFYIKAMIEAERAKGTAADSSA

SEQ ID NO: 335854 - protein, 110 aa, Zea mays
  Clone ID: MRT4577_69407C.1.pep
RPGRTSLQNSTPRAVASSAPSVPIPRVIASALPNATMNMNTADPSSRLPQHTAHAIDDLNMPAFYDRTISQGRSTVDGSRPTEFQGSIVYQSSMECDSDRAIDSLCKKDV

SEQ ID NO: 335855 - protein, 114 aa, Zea mays
  Clone ID: MRT4577_69408C.1.pep
MAGRTEHGDADDGNDREFGGPGGGTFKGDIGDYQGPVAVPHAISQDTEGSGYGYMGDIDAGPDVETCEEVFTGDPARIDLPANGVEGVMNARGSHHQLRELKRRIERIRSASQT

SEQ ID NO: 335856 - protein, 87 aa, Zea mays
  Clone ID: MRT4577_69409C.1.pep
HPLSICSTYRYALYHISVVVVGDEVLQNESGLAILDTVTGTLVGFARSAVVTQYSMARLGLRHPQLLLVITWASIVCLQQERERARA

SEQ ID NO: 335857 - protein, 214 aa, Zea mays
  unsure (1)..(214): unsure at all Xaa locations
  Clone ID: MRT4577_6940C.1.pep
TERPSMIGITQAGSHPITSVSWLPTLRLLVTISKDGALQVWKTRVIINPNRQPMETHFFERAAVETMDITKILTLQGGEAVYPLPRIKNLAVHPKFNLAAVIFADMSGTEXLQRTKLHTQEKGGDNFLLFFRELGDXAAVLKEKLLALGSSGILAEHQLQAQLQEQHLKGQSQLTISDVARKAFLHSHFMEGHAQSGPIPRLPLVTISDSSNLL

SEQ ID NO: 335858 - protein, 233 aa, Zea mays
  Clone ID: MRT4577_69410C.1.pep
MRTSRLVFLFAIVPLLLLLASSDLTPTKASAAGCPHPRSMILYPDLPCDPDVCAKSCAKGLNNGNGTCMRPLGCDCEYCVPAATVAKRPAAVSTRLTTTTTTMASAGCPHPRSTILYPDLPCDPDVCAKSCAKGLNNGNGTCMRPIGCDCVFCVPETVAKRPAVSTRLTTTTTTMASAGCPHPRSTILYPDLPCDPDVCAKSCAKGLNNGNGTCVRPIGCDWVFCVPKTAPKR

SEQ ID NO: 335859 - protein, 102 aa, Zea mays
  Clone ID: MRT4577_69411C.1.pep
TRTFGIGPPLPWPELKRKFFRELGDIPGFFRCPGLSILMGGGIPPGPDAQLEGPLKDLPGCPREVQRGFSPPLVPEAECNLAPLTGVAECPWIFGGGTIPPQ

SEQ ID NO: 335860 - protein, 68 aa, Zea mays
  Clone ID: MRT4577_69412C.1.pep
PLPPPGAPPPRRGRRAPARPCLRARPLLPADCPASAAARWVVRAALRRLALLCLARSIFFFSSAYLYA

SEQ ID NO: 335861 - protein, 411 aa, Zea mays
  Clone ID: MRT4577_69413C.1.pep
CRQWLRSIKKHAFVASPYPVIITLEDHLPSQLQEKVAKMVVEVFGNILYYPPDDTHELKELPSPEQLKGRVLLSTKPPKEYLETKLSDSTKEGDADLHLGKGTGDDAVWGKEVPDFRTEIQSAEKDDENDDVDDEEEQKLQPHIAPQYKHLITIRAGKPKDSLADALKSDPEKVRRLSLSEQQLAKAAKDHATEIVRFTQRNILRIYPKGTRVTSSNYNPFVGWVHGAQMVAFNMQGYGRALWLMHGFYKANGGCGYVKKPDFLMQTEPQVFDPREPQPVKKTLKVKVYMGDGWRMDFKQTHFDQYSPPDFYTRVGIAGVPADSVMKKTNAIEDNWTPVWEKEFSFPLTVPELALLRVEVHEYDMSEKDDFGSTVWPPVSELRPGIRAVALFDRKGMKYNHVKLLMRFEFA

SEQ ID NO: 335862 - protein, 55 aa, Zea mays
  Clone ID: MRT4577_69414C.1.pep
TINRQMNLYSAKLVQISPEAIPLRQWEVLPTFVLRLVRAPSQQLRNDQRPKHVTR

SEQ ID NO: 335863 - protein, 44 aa, Zea mays
  Clone ID: MRT4577_69415C.1.pep
KHGYYRAPEGKASGGICSSAKTSNQCKNKVESMKKRYRRRRGAS

SEQ ID NO: 335864 - protein, 76 aa, Zea mays
  Clone ID: MRT4577_69416C.1.pep
HVVSVIWYISCQEINVSYVSVDVAFLFPIRSHSSSSSSSNSRKIGSEAGVDEPVASRAAHESIHYSLSYEISRSLR

SEQ ID NO: 335865 - protein, 74 aa, Zea mays
  Clone ID: MRT4577_69417C.1.pep
HQYTILAHTGYGQTKEGKPCTTVMAGKAHKNILSLNINKLCISIIILAIPCRMEAVTYIWNVSSLRQTRLIETK

SEQ ID NO: 335866 - protein, 214 aa, Zea mays
  unsure (1)..(214): unsure at all Xaa locations
  Clone ID: MRT4577_69418C.1.pep
MALVLHSGAGNKNAFKALIAAEYSGVKVELTKDFEMGVSNKTPEFLKLNPLGKVPVLETPDGPVFESNAIARYVARLKDDNPLFGSSRIEQAHVEQWMDFAATEVDPGVGWYLYPRLGYIPYAHTTEETAIASLKXMVLDDWKRLYSNTKTNFREVAIKGFWDMYDPEGYSLWFCDYKYNDENTVXFVTLNKVGGFLQRMDLCRKYAFGXMLVV

SEQ ID NO: 335867 - protein, 44 aa, Zea mays
  unsure (1)..(44): unsure at all Xaa locations
  Clone ID: MRT4577_69419C.1.pep
VALTLERRAXXCCGXGMLSVYEWMLVERMLSCERWGGRDLXXLX

SEQ ID NO: 335868 - protein, 118 aa, Zea mays
  Clone ID: MRT4577_6941C.1.pep
LFIFSLPFFFFFLVLFLGHFPTSPGGNNTNSATVYCPLFIPPLQKAKPPGGFKQPGPKSSCKQSRKGKKNKKLKLNPSPQTPQYPKNCPAPETYTKNLASSPKKNGPRPPQKPGKRPK

SEQ ID NO: 335869 - protein, 139 aa, Zea mays
  unsure (1)..(139): unsure at all Xaa locations
  Clone ID: MRT4577_69420C.1.pep
IEFGTRPAEEEAPKPKPKNPLDLLPPSKMVLDDWKRLYSNTKTNFREVAIKXRMDLCRKYAFGKMLVIGSEPPFKLKGLWLFRGQDVPKFVMDEVYDMELYEWTKVDISDEAQKERVNAMIEDQEPFEGEALLDAKCFK

SEQ ID NO: 335870 - protein, 418 aa, Zea mays
  unsure (1)..(418): unsure at all Xaa locations
  Clone ID: MRT4577_69421C.1.pep
MALVLHSGAGNKNAFKALIAAEYSGVKVELTKDFEMGVSNETPEFLKMNPLGKVPVLETPDGPVFESNAIARYVARLKDDNPLFGSSRIEQAHVEQWMDFAATEVDPGVGWYLYPRLGYIPYAHTTEETAIASLKRSLGALNTHLALNTYLVGHSVTLADIVLTCNLYHGNCXRILTKXFTSDFPHVERYFWTMVNQPNFKKVIGEVKQAESVPPVQKKAAPPKEPKAKDVKKEAPKEAPKPKVVEAPAEEEAPKPKPKNPLDLLPPSKMVLDDWKRLYSNTKTNFREVAIKGFWDMYDPEGYSLWFCDYKYNDENTVSFVTLNKVGGFLQRMDLARKYAFGKMLVIGSEAPFKLKGLWLFRGQEVPKFVMDEVYDMELYEWTKVDISDEAQKERVNAMIEDQEPFEGEALLDAKCFK

SEQ ID NO: 335871 - protein, 91 aa, Zea mays
  Clone ID: MRT4577_69422C.1.pep
GVLVRPYPRSLPDGPVVSCSRTISHGLAIPPVRRGHHCAVHAHTRPCQQQWREHFGTLLDSLKTQGHGTHTLTNTRFTRYDDTEDDKSPYN

SEQ ID NO: 335872 - protein, 420 aa, Zea mays
  unsure (1)..(420): unsure at all Xaa locations
  Clone ID: MRT4577_69423C.1.pep
MALVLHSLGWKTKNALQLIAAEYSGIKVELTKDFXXXXMGVSNKTPEFLKMXXXGKXPVLETPDGPXFESNAIXRYVARLKDDNPLFGSSRIEQAHVEQWMDFAATEVDPGVAWYLYPRLGYLPYVSTTEETAISSLKRSLGALNTHLASNTYLVGHAVTLADIVMTCNLYHGIARILTKTFTSDFPHVERYFWTMVNQPNFKKVIGEVKQAESAPLIPKKAAPSKEPKAKDVKKEAPKEAPKPKVVEAPAEEEAPKPKPKNPLDLLPPSKMVLDDWKRLYSNTKTNFREVAIKGFWDMYDPEGYSLWFCDYKYNDENTVSFVTLNKVGGFLQRMDLCRKYAFGKMLVIGSEPPFKLKGLWLFRGQDVPKFVMDEVYDMELYEWTKVDISDEAQKERVNAMIEDQEPFEGEALLDAKCFK

SEQ ID NO: 335873 - protein, 72 aa, Zea mays
  Clone ID: MRT4577_69424C.1.pep
MQGTFNTNAQMHVGRNNQHLINGCNGNPATLPPTELSVLEDSTFKVVRLSPEERKEKIHRFIKKLNERNFLQ

SEQ ID NO: 335874 - protein, 124 aa, Zea mays
  unsure (1)..(124): unsure at all Xaa locations
  Clone ID: MRT4577_69425C.1.pep
PWPPPSRRRPPGWASSACSGSAAAPPPSPPSTRRRTMSSSRSTPSSPTLPPASRRSPRTPPLALAPRRSSPSLSSRSSSTPSSPLTTPSAECSRWPQSPXRSPGPPPTASPATSSTAPSRRSTF

SEQ ID NO: 335875 - protein, 69 aa, Zea mays
  Clone ID: MRT4577_69426C.1.pep
SIPPPRPLLHFLKIQFPPHLSPAPIAPSLFFSPAIKFHGPQRPWVAPFPFKPETNPPPKDPVSNRFVVD

SEQ ID NO: 335876 - protein, 182 aa, Zea mays
  unsure (1)..(182): unsure at all Xaa locations
  Clone ID: MRT4577_69427C.1.pep
MALALHRGAGNKNAFEALIAAQYRAIXKAELTNDFEMGVSNKTPEFLKMNPLGKAPALETPDAPVFESNAIARYVARLKDDNPLFASSRIEQAHAEQWMDFAATEADPGVAWYLYPRVAYLPYATTTEETAISSLKRSLGALNTHLASNTYFAGHAATLADLVLTCHLYHGIARILTKTFTS

SEQ ID NO: 335877 - protein, 81 aa, Zea mays
  Clone ID: MRT4577_69428C.1.pep
GPASRGSWACARLCSRFAPRPACCAMSPSAPVGRPRLVPRGVARLGPCSPWRPGRSSCRGAGSRASQSLTPFLHVLAGRVG

SEQ ID NO: 335878 - protein, 51 aa, Zea mays
  Clone ID: MRT4577_69429C.1.pep
HIVMDEVYDMELYEWTKVDISDEAQKERVNAMIEDQEPFEGEALLDAKCFK

SEQ ID NO: 335879 - protein, 94 aa, Zea mays
  Clone ID: MRT4577_6942C.1.pep
EILAIMRLSSLLLAEAGLWALSFVQQVPHFFCSTLIPYYYIQSFPLAELIIFKLIHTNHMANPTTVMYILHIFFHYCLFTGCDSSVLIASHPFT

SEQ ID NO: 335880 - protein, 400 aa, Zea mays
  Clone ID: MRT4577_69430C.1.pep
MALVLHSGAGNKNAFKALIAAEYSGIKVELTKDFEMGVSNKTPEFLKMNPLGKVPVLETPDGPVFESNAIARYVARLKDDNPLFGSSRIEQAHVEQWMDFAATEVDPGVAWYLYPRLGYLPYVSTTEETAISSLKRSLGALNTHLASNTYLVGHAVTLADIVMTCNLYHGIARILTKTFTSDFPHVERYFWTMVNQPNFKKVIGEVKQAESAPPIPKKAAPSKEPKAKDVKKEAPKEAPKPKVVEAPAEEEAPKPKPKNPLDLLPPSKMVLDDWKRLYSNTKTNFREVAIKGFWDMYDPEGYSLWFCDYKYNDENTVSFVTLNKVGGFLQRMDLCRKYAFGKMLVIGSEPPFKLKGLWLFRGQDVPKFVMDEVYDMELYEWTKVDISDEAQKERVNGPSA

SEQ ID NO: 335881 - protein, 420 aa, Zea mays
  unsure (1)..(420): unsure at all Xaa locations
  Clone ID: MRT4577_69431C.1.pep
MALVLHSGAGNKNAFKALIAAEYSGVKVELTKDFEMGVSNKTPEFLKMNPLGKVPVLETPDGPVFESNAIARYVARLKDDNPLLXKNGSSRIEQAHVEQWMDFAATEVDPGVGWYLYPRLGYIPYAHTTEETAIASLKRSLGALNTHLALNTYLVGHSVTLADIVLTCNLYHGIARILTKSFTSDFPHVERYFWTMVNQPNFKKVIGEVKQAESVPPVLKKGVPPKESKAKDVKKETPKEAPKPKVVEVPAEEEAPKPKPKNPLDLLPPSKMVLDDWKRLYSNTKTNFREVAIKGFWDMYDPEGYSLWFCDYKYNDENTVSFVTLNKVGGFLQRMDLCRKYAFGKMLVVGSEPPFKLKGLWLFRGQEVPKFVMDEVYDMELYEWTKVDISDEAQKERVNAMIEDQEPFEGEALLDAKCFK

SEQ ID NO: 335882 - protein, 417 aa, Zea mays
  Clone ID: MRT4577_69432C.1.pep
MALVLHSGAGNKNAFKALIAAEYSGIKVELTKDFEMGVSNKTPEFLKMNPLGKVPVLETPDGPVFESNAIARYVARLKDDNPLFGSSRIEQAHVEQWMDFAATEVDPGVAWYLYPRLGYLPYVSTTEETAISSLKRSLGALNTHLASNTYLVGHAVTLADIVMTCNLYHGIARILTKTFTSDFPHVERYFWTMVNQPNFKKVIGEVKQAESAPPIPKKAAPSKEPKAKDVKKEAPKEAPKPKVVEAPAEEEAPKPKPKNPLDLLPPSKMVLDDWKRLYSNTKTNFREVAIKGFWDMYDPEGYSLWFCDYKYNDENTVSFVTLNKVGGFLQRMDLCRKYAFGKMLVIGSEPPFKLKGLWLFRGQDVPKFVMDEVYDMELYEWTKVDISDEAQKERVNAMIEDQEPFEGEALLDAKCFK

SEQ ID NO: 335883 - protein, 105 aa, Zea mays
  unsure (1)..(105): unsure at all Xaa locations
  Clone ID: MRT4577_69433C.1.pep
WLIHPWQGCALVRYWAVGVSQGMVFAGHVVPRRETAAAAEGSVGRAWGRIPVRRRRGXXGFPSFXLWGGAVGGGGGXGGGRRRMQXTLARSLWAYTYGFLVXKEP

SEQ ID NO: 335884 - protein, 130 aa, Zea mays
  unsure (1)..(130): unsure at all Xaa locations
  Clone ID: MRT4577_69434C.1.pep
KTNPPPWSTQKPGQKGPGGKKKQKGQKGGDPKNRGPPPKXQAPGKPRGGGNNQRQTPQGEDPQRGKKPGTPPGWENPPQGGPPRGGPEXPIFTKDNKAGGPPKETRTTPVNRKKEEGGPPPPSHPEKWGA

SEQ ID NO: 335885 - protein, 140 aa, Zea mays
  Clone ID: MRT4577_69435C.1.pep
PALLAALYRPRPGIQGGVPCSPRGAPQPPCVHDLILCPRRYTQPRAANMSSKRATMTRPNSEKYAVNEMILIELGTTKSCASVMQEKNQKDIENAAMEITTPLAHDKTLKGGKTCSNSCSPPGRNQYCQYFLCKKNGKPL

SEQ ID NO: 335886 - protein, 75 aa, Zea mays
  Clone ID: MRT4577_69436C.1.pep
ASSSQARHSSHRSTCTISRGSYNVTMCHIFIMKLMQLKIVEFHIPCLVTILELLNITLSTTQLVVLMQIYKGQTV

SEQ ID NO: 335887 - protein, 54 aa, Zea mays
  unsure (1)..(54): unsure at all Xaa locations
  Clone ID: MRT4577_69437C.1.pep
XCCFRPSXLXXVXPXPXAPPXXXXXARSPPGRACAARCRVLCLCKVXRXRGRPG

SEQ ID NO: 335888 - protein, 50 aa, Zea mays
  Clone ID: MRT4577_69438C.1.pep
KEESFGYKIKETTLLTDIFTSREWLGWHAITRHIYIYIVGQLKLLLTLRK

SEQ ID NO: 335889 - protein, 55 aa, Zea mays
  Clone ID: MRT4577_69439C.1.pep
LHGFQQALTTFFSTFQFPHIFFFKLLAVYTGVPGPQRFERVRVEKEENYLLEVCY

SEQ ID NO: 335890 - protein, 71 aa, Zea mays
  Clone ID: MRT4577_6943C.1.pep
HLFQFLKQYMAFRNLQLHHLGIAWHTNCHSSGYSQNTIVSPQNIVVSSIQNTIQSTCKSRTDLHHKNFHHD

SEQ ID NO: 335891 - protein, 58 aa, Zea mays
  Clone ID: MRT4577_69440C.1.pep
ILGDFIYRRTYFLWPHASTENKGGLKKSNSKENGNQLFEEMPMSTTYGSPSNSLCSML

SEQ ID NO: 335892 - protein, 68 aa, Zea mays
  Clone ID: MRT4577_69441C.1.pep
GDAELKDSNDVPKGMQSLVCSSVGVCVCVFGVTIILYHIIASFHITLCNTLKFTLVKMRKILQSNTFP

SEQ ID NO: 335893 - protein, 81 aa, Zea mays
  unsure (1)..(81): unsure at all Xaa locations
  Clone ID: MRT4577_69442C.1.pep
VGVMTVLIPTIIIIATKKXHVCGTYSDKQPVVLIQVYEGXRTRTRVNNLLCKFELSGIPAAPRGVPHIIVCLYIDAYGILN

SEQ ID NO: 335894 - protein, 229 aa, Zea mays
  unsure (1)..(229): unsure at all Xaa locations
  Clone ID: MRT4577_69443C.1.pep
REKKKKKKKKKKKKKKKKKKKKKKKKKKKKKKKKKKTLPPFGNVGKGGKIWGPVLKGGGVXKLKFRXERRVFFGKTLKFAIFKNFGRGRGPKIXKLGGGLKLGGGXKFQRGFLFSPPKKKKKLGGSLGKKGFPPFFWGGKGKFGHGKFFGKGNRWGIFGETKEKFXKIXKERGFKLKGAPKKKGLKIGKKGRAPFLRGKFDQVPGNLPKGDRVGPPGEFGAPGCVLKGF

SEQ ID NO: 335895 - protein, 34 aa, Zea mays
  Clone ID: MRT4577_69444C.1.pep
LVRCSIMVLANASLSSRSTPSLLASSSLASSLST

SEQ ID NO: 335896 - protein, 210 aa, Zea mays
  Clone ID: MRT4577_69445C.1.pep
MHHDPNPFDEGSAEDNPFSDIKRREEALKNAGVPMEEKNWPPFFPIIHHDIANEIPANVQKLQYLAFASWLGIVLCLSWNFVAVIVCWIKEGDSKLFFLATIYALLGIPLSYLIWYRPLYRAMRTNSAFSFGWFFLCYLIHIGFCIIAAIAPPIVFHGKSLTGILAAIDTFSEHVIIGIFYFVGFALFCLETLLSIGVLQKVYMYFRGNK

SEQ ID NO: 335897 - protein, 267 aa, Zea mays
  unsure (1)..(267): unsure at all Xaa locations
  Clone ID: MRT4577_69446C.1.pep
DPSPFDEGSAEDNPFSNGGGXRRAAVRLPAXTEPVGFGGTGRGDAVVDVPLENMGASELSSWESDLKRXEADIKRRXEALKNAGVPMEEMIWPPFFPIIHHDIANEIPANVQKLQYLAFASWLXCCHGPFCCKCDLVIASHFLIXWWCVRPXHAIRGTSLLDMVYLKGGXSDCSCFLVVLIXIAGIVLCLSWNFIAVIVCWIKEGDSKLFFLATIYAVLGIPLSYLIWYRPLYRAMRKCTCTSEGTSEASHDGVLHLLRKWRVTCGY

SEQ ID NO: 335898 - protein, 270 aa, Zea mays
  unsure (1)..(270): unsure at all Xaa locations
  Clone ID: MRT4577_69447C.1.pep
MHHDPNPFDEGSAEDNPFSNGGAXRQAAVRLPAXTEPVGFGGASRGDAVVDVPLETMGDSRSKVKELSSWESDLKRREADIKRREEALKNAGVPMEEKNWPPFFPIIHHDIANEIPANVQKLQYLAFASWLGIVLCLSWNFVAVIVCWIKEGDSKLFFLATIYALLGIPLSYLIWYRPLYRAMRTNSAFSFGWFFLCYLIHIGFCIIAAIAPPIVFHGKSLTGILAAIDTFSEHVIIGIFYFVGFALFCLETLLSIGVLQKVYMYFRGNK

SEQ ID NO: 335899 - protein, 90 aa, Zea mays
  Clone ID: MRT4577_69448C.1.pep
VNDKIISVSLGSSSNHLLDVSAVFRVINCRASSPWWSPAITNQYQWRYLSLFRPWILSSAHDKLDSLSCFISTSYFRSLTFPSWSRWLMS

SEQ ID NO: 335900 - protein, 273 aa, Zea mays
  unsure (1)..(273): unsure at all Xaa locations
  Clone ID: MRT4577_69449C.1.pep
DDYRDSDGEQENEALDRSNRRRKRSQRYTQDFVEAVSDVDPNFDSDDDIMGEAVYVDEYLRSRKQNKPSSASEEDEEFRLEEDGEDDDEEEYSLSTSEDLEEPQRHKKLETRGRRGTKLRSVGEIQAGLRRSKRSSRPRINYHQYDFSDSDTGPGKAKKSDASDSDAGSDAENDMELSTSSQEQEEEEDDSHDEENGNNVNDKMEEDHTVAENKIEXRGGEKEQPQQQPVXRWMLPAGKXSVGRTFLDLNELAPGGGFDDGPSLTVRDDMDNI

SEQ ID NO: 335901 - protein, 75 aa, Zea mays
  Clone ID: MRT4577_6944C.1.pep
MMAAMGGAVRVLCGAEKERVVGTRKAPGACPRCGGAVVAVDVESERRFLGLPLCLQSKRKYSCTRCLRRLVTLYS

SEQ ID NO: 335902 - protein, 109 aa, Zea mays
  unsure (1)..(109): unsure at all Xaa locations
  Clone ID: MRT4577_69450C.1.pep
LTEEFTLEYHWDTAGLYQVPYVXARNKALYGIHMLWSMLGALECLIPDVLQKITRLDLNDPEGVNVFAHIFXGGRPEYLRNPNLVAAHGILGGLRLQVILMALGDDFRI

SEQ ID NO: 335903 - protein, 115 aa, Zea mays
  unsure (1)..(115): unsure at all Xaa locations
  Clone ID: MRT4577_69451C.1.pep
MHQILKLALMPRMIWSSRHRVKSKRKKRMIVMMXENGNNVNDKMDEDHTVAENKVEPEEEEQKEQPQQPPIEKMDVPSTESRRVGRTFLDLNELAPGGGFDESPSLTVKDDIDNI

SEQ ID NO: 335904 - protein, 86 aa, Zea mays
  unsure (1)..(86): unsure at all Xaa locations
  Clone ID: MRT4577_69452C.1.pep
MVFPKDLYLVHPPAELEKVQPQKKRLVPLPHSFFMDVKGPGGFSKTPVFNPSPTVFVCPGCPTVLFPPPGGKARLPXGCSFPRKGD

SEQ ID NO: 335905 - protein, 57 aa, Zea mays
  Clone ID: MRT4577_69453C.1.pep
AIKAIITTISRDVVEASEKLVRSEKTTRMSMHHDCHIIVVSCASTCFSHLYSNNNNL

SEQ ID NO: 335906 - protein, 230 aa, Zea mays
  Clone ID: MRT4577_69454C.1.pep
MNDADVAKQIQQMVRFIRQEADEKANEISVSAEEEFNIEKLQLVEAEKKKIRQEYERKEKQVEVRKKIEYSMQLNASRIKVLQAQDDLVNKMKDDAMKELLLVSHNHHEYKNLLKDLIIQGLLRLKEPAVLLRCRKEDHHHVESVLHSAKHEYASKADVHEPEIFVDHDVYLPPAPSHHDAHGQFCSGGIVLASRDGKIVFESTLDARLEVVFRKKLPEIRKLLFGQTAA

SEQ ID NO: 335907 - protein, 99 aa, Zea mays
  Clone ID: MRT4577_69455C.1.pep
DANDCVRGPSPLMSELNRPRFGEEQRRCCGSPRRQGVRYTAGARPSSGAGNGNAARQGRPARFMTGSTHAHSVPCPRENSDVEREMEGKELEASTKDSR

SEQ ID NO: 335908 - protein, 148 aa, Zea mays
  Clone ID: MRT4577_69456C.1.pep
GTAQVGRVSMHLGEIVATARTVGHLSKSTEVMKIVNNLMKAPELATTMQEFSKEMTKAGVMEEMVNEAVDSALDSEDMEEEIEEEVDKVLASVAGETASQLPDAARTQKIHEASTSRVPEERQAVAEGADDDEEDLEEIRARLAKVRS

SEQ ID NO: 335909 - protein, 43 aa, Zea mays
  unsure (1)..(43): unsure at all Xaa locations
  Clone ID: MRT4577_69457C.1.pep
NVDVVTVEDALTTVLSXDLLFCMPLDATRHLVSGYGPGIMSVR

SEQ ID NO: 335910 - protein, 151 aa, Zea mays
  unsure (1)..(151): unsure at all Xaa locations
  Clone ID: MRT4577_69458C.1.pep
SSYVAKLAGGIEKXPRVLRLNEELKARDDAWQFHDRMQRFLKKADDEIIRVQCQESVALSLVKEITEYFHGDSAKEEAHPFRIFMVVRDFLAVLEQVCKEVGRINERTIASSARHFPVPVNPMMPQLFPRLHALRAGFSDDESSAASVSSP

SEQ ID NO: 335911 - protein, 96 aa, Zea mays
  Clone ID: MRT4577_69459C.1.pep
NGPPKGVTGPPKRKTNAPPREKKSQKGPLGRFPGKGKKPPKFYGNFQNFALKGGLGLRFKIFFFFFFFFFFYFFFFFFFFFFFFFFFFQTKNFIIE

SEQ ID NO: 335912 - protein, 46 aa, Zea mays
  Clone ID: MRT4577_6945C.1.pep
MQVFGFVKLAELYYAGSHGMDIKGPANCKASSSRHEKAKVTHHRVA

SEQ ID NO: 335913 - protein, 368 aa, Zea mays
  Clone ID: MRT4577_69460C.1.pep
MAASAAAQRRSAGSRTTYERAELEALRDAPSKEAHARLWADVRATLVASGFSGEYDGLLVAEEDVRSRRGNRGMKAMSVRKWPEEAAAAARFLGVAEIGAHRNGDLAVCHEHRFVSAHDHAGTSGVVEESFHQGEDVECEDDSDDDYNGILKPAFAVDGDPDFESGEPLDGFEYLRRVRWEANQIPRVKVAKIYSSAARNEQTPYMPEIPDIPKCLPDLRASKQWEDRFIVDFEETRMVLSELDSSDEPSVSSGTKISTKPGSGTEPQTDPTLTMIRSMDAVSRAATLRNYIDMIQSLDALSRNNCMWLFALCVAVHTPLDAETCASLRSLLRKCASILATKTEMDDEVVMLNILMTISGRYFGQDES

SEQ ID NO: 335914 - protein, 339 aa, Zea mays
  Clone ID: MRT4577_69461C.1.pep
MELNSIPYIASWSSSSSCFYYSYSRCACRGTRDGKLVTKASAAGRKRAADSVCSQLSEQGTEDSISGPRSSWRIRRRDLASAILLPFLIPRVNISIAAEIYDASIIRSGVRSVLTKGKAAGVLRLVFHDAGTFEIGDGSGGMNGSIIYEVDRPENIGLNRSIKILRKAKEGIDNVQKVSWADLIAVAGAEAVALCGGPEIPVRLGRVDSSSADPSGKLPEETLDAASLKTLFSKKGFSAQELVVLSGAHTIGGKGFGSPVVFDNTYFKVLLDNRPPQTSSKAGNGMAAMVGLRTDWALTEDDECLRWIRIYAEDQARFFDDFRDTYIKLVDSGASWRTA

SEQ ID NO: 335915 - protein, 57 aa, Zea mays
  Clone ID: MRT4577_69462C.1.pep
RVDLNMSGTPCSSRPAFFAAVMDALFLLLLLLFVSGSVNAVAPGCRTSIISYNDEHA

SEQ ID NO: 335916 - protein, 51 aa, Zea mays
  unsure (1)..(51): unsure at all Xaa locations
  Clone ID: MRT4577_69463C.1.pep
ADLGLKEKKMTWNFHKFIPNFIPIVPPPTSTXSHRPVQGGGRATAPNLYRM

SEQ ID NO: 335917 - protein, 44 aa, Zea mays
  Clone ID: MRT4577_69464C.1.pep
MKKAPFFFPKKKKKKKKKKKKKKKKKKKKKKKKTKKKKKKKKKK

SEQ ID NO: 335918 - protein, 65 aa, Zea mays
  Clone ID: MRT4577_69465C.1.pep
HLFLFRLHQHHLEYKIGYRISQSSQSLHHYEFIPNKMLKHKIHMKCLDNMYQTSRFPINLQFHNA

SEQ ID NO: 335919 - protein, 44 aa, Zea mays
  Clone ID: MRT4577_69466C.1.pep
GAQTKNKFGFRRIRWAPVPNIEIPQTGSDLPSLKMPFHFRGTGS

SEQ ID NO: 335920 - protein, 97 aa, Zea mays
  Clone ID: MRT4577_69467C.1.pep
TRLFNLSGGGEKNRPKSTDLKNLLKRAKLQMGGEGRPNPHNLRKFKLPDIYFRGKAFHVGKIPPKKNPSSPPKINFFSKGAPKNLPGNTWPIWPPEA

SEQ ID NO: 335921 - protein, 90 aa, Zea mays
  Clone ID: MRT4577_69468C.1.pep
KGSAEMGFVGKGLPVLPVVEWGGKPIGDGKVGKLMPGLFVLLWGDIKSGPDRIPVPYKQLPEGKGKPKHVCQSGGGGVGVSSRMVIPLPE

SEQ ID NO: 335922 - protein, 108 aa, Zea mays
  Clone ID: MRT4577_69469C.1.pep
MASSRALALFLLCALLPAPPVSATLLFGGGESAKKAGVDAEWRPATATWYGEAEGDGSDGERSQLCSSTPYHGRSYYPSRRLLGSGTLAGGRYVYQQILKGWLDNDTG

SEQ ID NO: 335923 - protein, 182 aa, Zea mays
  Clone ID: MRT4577_6946C.1.pep
MIISKKNRREICKYLFQEGVLYAKKDYNLAKHPQVDASNLEVIKLMQSFKSKEYVRETFSWQHYYWYLTNDGIEFLRTFLNLPSEIVPNTLKKSAKPPSRPFGSGPPGDRPRGPPRFEGDRPRYGDRDGYRGGPRGAPGDFAGEKGGAPAEYQPAFRGAGGAARPFGRGGGGGTFGSGATME

SEQ ID NO: 335924 - protein, 99 aa, Zea mays
  Clone ID: MRT4577_69470C.1.pep
PFLAFFLGIAQALKIPSPASLYKRVKPFRYHPGPTLKNLPLGIPFQNREEIFVCTLGGSKLQHLILFGKILGGQHQGHPQAQQGNGETPFHSPPGTKGF

SEQ ID NO: 335925 - protein, 83 aa, Zea mays
  unsure (1)..(83): unsure at all Xaa locations
  Clone ID: MRT4577_69471C.1.pep
MAPKGEKKPAEKKPAVEKGYKKPTAVKRVSSXVGGEKKGKXMAKKIVETYKIYMIKVLKHVHPVIGILINAMSIMNCFINDIF

SEQ ID NO: 335926 - protein, 80 aa, Zea mays
  unsure (1)..(80): unsure at all Xaa locations
  Clone ID: MRT4577_69472C.1.pep
LGAGKMKLNNFMEKWKRSIPSRMCCPDLEMLEREVLCEKLGAETXVHAFSVTDLPLAPAEMFAALFRDQDIGMVEKIAMD

SEQ ID NO: 335927 - protein, 117 aa, Zea mays
  Clone ID: MRT4577_69473C.1.pep
MARPRSLVSPAQPPLHFPQPRLESSDSFLPCSPHGRRLLYQCSFQRSASSSYARSVFPCRDPVELPARAHNPHHLCVHSSISLMRPLRERVRLGPTSDTSAGSLMLARVSCFSAYRT

SEQ ID NO: 335928 - protein, 103 aa, Zea mays
  Clone ID: MRT4577_69474C.1.pep
IPSSLSLGLGLPRRGAIRKSRRRCQAASGSSRSSPAPTSLWRRRCSDPTTRSPTGCISPPSPRPPRPPSSAAGATPSRPRRRPRWPLLPVLRRQSRLFWRRRR

SEQ ID NO: 335929 - protein, 68 aa, Zea mays
  unsure (1)..(68): unsure at all Xaa locations
  Clone ID: MRT4577_69476C.1.pep
IVALALLALAASAVSSTSGSXGCHTPPFHLPPPIYMPPPIYLPPQHQPQPWQYPTQPPXLSPCQHFRS

SEQ ID NO: 335930 - protein, 51 aa, Zea mays
  Clone ID: MRT4577_69477C.1.pep
MARYRCCRSQSRSRYYRQRQRSRRRRRRSCQTRRRAMRCCRPRYRPRCRRH

SEQ ID NO: 335931 - protein, 185 aa, Zea mays
  Clone ID: MRT4577_69478C.1.pep
LYFLHAPPLCWFSLARLLFPSPPRSREPVPCYSFPHHRMLDPNSPLSMTTLSSGPNRAEDPLRSDEVMDASGSGGEYPTPSPSDLPSNIEELREVGPSVVTIEFSPPPTANKPVVYGTGTVLMVENNDSLVVTIIPKLLSDGKLFIDELTISVWFHNEKEKIPAIVVVDDNIELAILLVKGDSPR

SEQ ID NO: 335932 - protein, 38 aa, Zea mays
  Clone ID: MRT4577_69479C.1.pep
VFEFFLTTNKPVGFHTVITNTSLELTKRDPAYKQETTV

SEQ ID NO: 335933 - protein, 50 aa, Zea mays
  unsure (1)..(50): unsure at all Xaa locations
  Clone ID: MRT4577_6947C.1.pep
SLYSEVFYFFFLFSXKSILITKTYPKKKNILPKLLRDKYKNISKNQLNLT

SEQ ID NO: 335934 - protein, 51 aa, Zea mays
  Clone ID: MRT4577_69480C.1.pep
AILNVLQLHLIFIETLISVRLQGKVLLLSFARLILYGHTHPPSCDGEFYIF

SEQ ID NO: 335935 - protein, 412 aa, Zea mays
  Clone ID: MRT4577_69481C.1.pep
MGGRIWPIVRDGFVVFKQDEPIVSDNENILTNDQAMNVFYDALDINEFNRIKNLTTAHVPNYMCKGKFEKFIMKEDESISDMFNQLNEIVNELKGLGLDVPDVDSTHKFLRSLSEKYDTIVTMLKKDGKAYLVEWDLNTSSDDDDDTSSKLNADIAIKEAPSLFSSPHCLMAKGDVKALFGIAPALENLVELVEQVIRCSRKILELELPTSEPHTTNILSGKCNTSLINDNVVDDESQVIVENEILVGKVNALTHDLDKAYGEKAKLGFILGSQHCSLKREGLGYVPKKGKNAFAKQKTIFVKECDKVCHKCHNKRHIKKDCPKSKNVSSTHFDQCCVLNYNAKGVHAKFVGTSIVGNKNKAIWVPKTLVTNIQGPKQVWVNYKEGGNHWVLDNGCTQHMTGDIRIVGNGDA

SEQ ID NO: 335936 - protein, 196 aa, Zea mays
  Clone ID: MRT4577_69482C.1.pep
LGTSRPAGIHVSIFKPAVSLSLRRRSPGLIFQPPSPPNSRAQHPLHSDPQALASSSCHGIHPLLVPPPGHVLAGGQRRCIALPSVDLGTASPSAPVELAPPLNHGHDDLQPFLVAEPIFLLAPPLFPPLRVSARPAPTPLSFSCSPMTPAPCSAPLLTVRCSLLFWLPCARNCSGRLCLYPRPRSTWPHARPTPDS

SEQ ID NO: 335937 - protein, 261 aa, Zea mays
  unsure (1)..(261): unsure at all Xaa locations
  Clone ID: MRT4577_69483C.1.pep
MGRSPCCEKMGLKRGPWTAEEDRILVAHVERHGHSNWRALPKXQAGLLRCGKSCRLRWINYLRPDIKRGNFSREEEDAIIQLHQMLGNRWSTIAARLPGRTDNEIKNVWHTHLKKRLEPKPASQQAPKRKPTKKQQPQPEPEPVTTLEGPAGAVPPVSPERSLSTTTSTTTSTADYSAASSLENAGDSFTSEEDYYQIDDSFWSETLAMTTTVDSFESGVQQAEGSFGKSAAAPSSTNDDMDFWLKLFMQASDMQNLPQII

SEQ ID NO: 335938 - protein, 85 aa, Zea mays
  Clone ID: MRT4577_69484C.1.pep
ALSLGNSPNQKGYHCLDLLSHRVMVSRNVILDKNVFLLAGSTLPLDLNSPLEYDFDLPPMILRLGPLPTRGAIQAPHHTRRRLRL

SEQ ID NO: 335939 - protein, 51 aa, Zea mays
  Clone ID: MRT4577_69485C.1.pep
GSSCDSGLAFKVFCRLRDLLYLHPAQLHYCKMCLNCKQFVLICSSTFFYQV

SEQ ID NO: 335940 - protein, 69 aa, Zea mays
  Clone ID: MRT4577_69486C.1.pep
QARAPLGFFFAPRLTFGGVPTKIKNVTSQLPPINPVLSSFKRKKSLGPPLFSPVASVGPFFIFFYGRSK

SEQ ID NO: 335941 - protein, 91 aa, Zea mays
  Clone ID: MRT4577_69487C.1.pep
CNCTLNLAHGTSRWNSTNNNPDLEETSTADDQPPPALAVPPRQARPAPARRGPAPSPPRPTTTGNALAPDTATPATADHTHRRPSPCLLPI

SEQ ID NO: 335942 - protein, 92 aa, Zea mays
  Clone ID: MRT4577_69488C.1.pep
MNSPVHRTRMPSLSSWSISSVDPHSSADSSDEVMKYVSSCEAFTGVHSSLWKFTIRACMAPPLTYLRLEHHRARVTSPGIPGRGPQGGQPSL

SEQ ID NO: 335943 - protein, 95 aa, Zea mays
  unsure (1)..(95): unsure at all Xaa locations
  Clone ID: MRT4577_69489C.1.pep
GWPGRRSNNFAXGRSDAFWGNPTRLKKLGIGKDFPVPRVVLEFEEDEGQTQVGFAHVVCRKTLSFEAHEMISMGQKISQTGNLHHMDNLQMLPFK

SEQ ID NO: 335944 - protein, 62 aa, Zea mays
  Clone ID: MRT4577_6948C.1.pep
FREACLPCDLNKPTCLTIQINLPQLEMNLPEFLKLFLPQDFWARPENVAFAEGENIARRPLS

SEQ ID NO: 335945 - protein, 101 aa, Zea mays
  unsure (1)..(101): unsure at all Xaa locations
  Clone ID: MRT4577_69490C.1.pep
SVDREKIXKPKVKFXAKNKNPLKVNNVKLGLANKPNKKRAITPKEVCXGFGLYQLKNRIWHNQGFWAVKGXGLYEGLDWLASPLKEMPGSGRPPFGRTTVF

SEQ ID NO: 335946 - protein, 107 aa, Zea mays
  Clone ID: MRT4577_69491C.1.pep
LQQCEERLEFDCLSPPNMSTTIWIVVPGSALNGLADAEMVSTLMIWMKRTSSSSTFGIPMPGAAVILGLLLLGLRVVPTTGLGWRWRCVGRVFALVRVLVGERGLGC

SEQ ID NO: 335947 - protein, 47 aa, Zea mays
  Clone ID: MRT4577_69492C.1.pep
YSCLFMIYFVFFFFCFFFFFIFFVFLFEVQHSTNLFRTTPRGKSLTS

SEQ ID NO: 335948 - protein, 207 aa, Zea mays
  unsure (1)..(207): unsure at all Xaa locations
  Clone ID: MRT4577_69493C.1.pep
VKGXKQANGGHCLVAWGKVTRPKALGGLGITDLWLLSVALRARWPWLQRTDHSKPWSVLPVQACGTVEALINVAVVSXLGDGQDILFWKDRWLNGRSISEVEPEVLEHVSKCVVSKRLVKDALTNLNWVADIRGALSVRALAQVLDLCDLLEGLVFQPGIPDKHSWKFSASGDYSPXSCYQVPPLGTFEFRPGERIWKNWAPRKCKF

SEQ ID NO: 335949 - protein, 104 aa, Zea mays
  unsure (1)..(104): unsure at all Xaa locations
  Clone ID: MRT4577_69494C.1.pep
MFRRGLWTNPPAKILPLITTPFPGDFLLTLFKNSLFQKKKKPPPPKKKQXVKKKLYPPKTXXPXXXPKKKKKKKKKKKKKKKSKKKKKKKKKKKYSALLPLLKK

SEQ ID NO: 335950 - protein, 139 aa, Zea mays
  unsure (1)..(139): unsure at all Xaa locations
  Clone ID: MRT4577_69495C.1.pep
FIHLMFSSMLFTFQLHLKIAALPVFCWALDHVARFLRRNFARSSFYRRYLEEPCLWVETNNTTLSLLSSNAEIAXGWRRSIVQTFMYWQVLKLMYHAPVTSSYHQSTWAKIGRIVNPYIHRYAPFLQTPISAIQRWWFR

SEQ ID NO: 335951 - protein, 347 aa, Zea mays
  Clone ID: MRT4577_69496C.1.pep
MAGSAADAEQEQKRAAAAAYDYEGDARWAEYWSNVLVPPNLASRPDVVDHLKRKFYQRYIDHDLVVEPRSFTSSTQASRPDVRSSSSSSTENVRERNSGSTARSAPPPPPPTHTDSAVNPLRFDARTIHFSINAWILVVAGLGMLPILPKHLADRACKLSLLGTILSSGYSLYSTYGKPRAWNMPAIQAWLQSILATKDFIHLMFSSMLFTSQLHLKIAALPVFCWALDHVARFLRRNFARSSFYRRYLEEPCLWVETNNTTLSLLSSNAEIALGFLLIISLFSWRRSIVQTFMYWQVLKLMYHAPVTSSYHQSTWAKIGRIVNPYIHRYAPFLQTPISAIQRWWFR

SEQ ID NO: 335952 - protein, 59 aa, Zea mays
  Clone ID: MRT4577_69497C.1.pep
HKKSHHRLQFLNSLPLPYDPVQLLMHKNNLQGVLGFTGTTHQLATTHNALNLILTLVIT

SEQ ID NO: 335953 - protein, 88 aa, Zea mays
  unsure (1)..(88): unsure at all Xaa locations
  Clone ID: MRT4577_69498C.1.pep
KLYANELAAAXKAVALTVCLCQRVXWSILHCYIQSEADDTPVTVPDYGSQVLVCLVVKKQWPYQSFSIISEQDSADLIQDGAQPCIAL

SEQ ID NO: 335954 - protein, 134 aa, Zea mays
  unsure (1)..(134): unsure at all Xaa locations
  Clone ID: MRT4577_6949C.1.pep
FGVLLVEVASGGRPIEAQREIKEGPPPRWALGRFFGGASAHVLGPPLGRTAPPXPALEAGLELPFRGMGPLRQDRAPLNDFFRGLWALRKKVRGMFPPDAPPQFSDWGGPPPNNRAANNGGLWRVWSFQGHESC

SEQ ID NO: 335955 - protein, 118 aa, Zea mays
  Clone ID: MRT4577_694C.1.pep
SLAVIPLKDVQAPLGIVVGLQVVWPFRVSRGADLVLWVFMFSVKTCIWVWSPVMPGSSLLGFPVFLPPSAPGCWWGLAFYRAFFFARPWFLPCPGGSGGFLGLLWPFFVAFLFFGIKV

SEQ ID NO: 335956 - protein, 59 aa, Zea mays
  Clone ID: MRT4577_69500C.1.pep
SSFLFNVFLRICTSVSMLRVHWFLYIASLKVRCLISCAFEVSSSIFVAISVCVSVNMLQ

SEQ ID NO: 335957 - protein, 74 aa, Zea mays
  Clone ID: MRT4577_69501C.1.pep
TKKSAHVTGKLEKGKEGRTLDPPIEEQFGSGRLLACIFSRLGQCGRVDGYILEGKELEFYMKKLQRKKGKSAVV

SEQ ID NO: 335958 - protein, 81 aa, Zea mays
  unsure (1)..(81): unsure at all Xaa locations
  Clone ID: MRT4577_69502C.1.pep
MLDKLWDDVVAGPRPETGLEKLLKATTAXPLVINKDTHRRQLXRPQSMPVNPTXSVTPSSSSSSTTPRGACYVWHRPFHPG

SEQ ID NO: 335959 - protein, 93 aa, Zea mays
  Clone ID: MRT4577_69503C.1.pep
LVCKECCALSQQFKLVVYGKIQCKGKCTEQNGITVLGHEGLPGGVRQSVRGEGGRCHQSLHGHLRQGEEHGPHRELEEVLHPSYFLKPLEMNE

SEQ ID NO: 335960 - protein, 90 aa, Zea mays
  Clone ID: MRT4577_69504C.1.pep
YIDQENDQFRASSVARTSTSRHSMSRASPMPLTPAALKENDSDVHPPAPSFSRLLAMNAPEWRQAVVGSLSALVYGSLQPIYAITIGGMI

SEQ ID NO: 335961 - protein, 72 aa, Zea mays
  Clone ID: MRT4577_69505C.1.pep
PKKSHSPNSELLPPFLNICGPLVHFCNKMRQIKKNEVSSCFGFSSYINSEQHYSVQTHGSLCSNQIIRRFGL

SEQ ID NO: 335962 - protein, 50 aa, Zea mays
  unsure (1)..(50): unsure at all Xaa locations
  Clone ID: MRT4577_69506C.1.pep
AGADXRRXSRXRPPQPGHXWPAAPAXYYFPXRRPRSXGDPERRVWRGXHR

SEQ ID NO: 335963 - protein, 73 aa, Zea mays
  Clone ID: MRT4577_69507C.1.pep
AAMPLPRPWTSPPPSSYRIVQSCTGPGSTSGVPNKKFTRLNGGLFYKSRTLIFLGLLKRFSCHPISYYYRWAK

SEQ ID NO: 335964 - protein, 72 aa, Zea mays
  Clone ID: MRT4577_69508C.1.pep
FASGAWKGACLNLNNLKVGFYDVMFECLDGDPLIARWSRVCCVQSIPRHSGSWFNTDFSRRTQFARPNGWFG

SEQ ID NO: 335965 - protein, 59 aa, Zea mays
  unsure (1)..(59): unsure at all Xaa locations
  Clone ID: MRT4577_69509C.1.pep
NPDKGLLLVPGLGKKLGECTPTVKPLKQTGFAFRSSHIIGTVTCQNQAGXKKTKYKGFF

SEQ ID NO: 335966 - protein, 45 aa, Zea mays
  Clone ID: MRT4577_6950C.1.pep
DDMHYRATTHVNTTPALSNAETTTTTHIHVRTYIRTTSMNFYKIQ

SEQ ID NO: 335967 - protein, 91 aa, Zea mays
  Clone ID: MRT4577_69511C.1.pep
RVVHHHIVILGRDGARGALLRDLRFVLLAFSVQLSCCTSLRARLAFAFSSRVQACRSLHPFARDEKVAFLFLFNSDIVDTSCCANIEAEIY

SEQ ID NO: 335968 - protein, 143 aa, Zea mays
  unsure (1)..(143): unsure at all Xaa locations
  Clone ID: MRT4577_69512C.1.pep
IRLEGRPNILLSTLLISVWQATXRTDSAMSYSITKXRGFTSEFLGSREDSQASVASLVGVALYNSXMKEVVLRKIFLVATIMGSALGMTQVLLVTGLNGQLAISDGWLSMGDSLMSTALGQACFIPHLQLDVTMCPPGLEATL

SEQ ID NO: 335969 - protein, 124 aa, Zea mays
  Clone ID: MRT4577_69513C.1.pep
RTCATHSVLKSFPALNSVDGSPKGAQSRGEIHANSCQLVLAVEPRPRRTAVVCRGRPVGHAPRWDAWLLGPDRARPCAGSEAEAAPLPGGRAVRCSWPRGGRAGLPARAGWRGRTLLTSVYMQS

SEQ ID NO: 335970 - protein, 60 aa, Zea mays
  Clone ID: MRT4577_69514C.1.pep
KWNCHSMKALRRRYTLPSEGTTRASACQGPTLLYLTYQRTRGTLQHTTACMHSGTAMDHG

SEQ ID NO: 335971 - protein, 74 aa, Zea mays
  unsure (1)..(74): unsure at all Xaa locations
  Clone ID: MRT4577_69515C.1.pep
PFLLPTPYHKPPFFLDLTGFFLPYEKNFFFLPCFIFLASYLVGLXGQAHIYQVNIPPLFIIFDPLNPHHYFFLP

SEQ ID NO: 335972 - protein, 75 aa, Zea mays
  Clone ID: MRT4577_69516C.1.pep
KKKKPPFFFGGPTAPIFSGKNILGGEGPLKFGGDKNGLAFLPPGRGLELPALTKILGLFGLKTNQGGDRNPGLNQ

SEQ ID NO: 335973 - protein, 80 aa, Zea mays
  Clone ID: MRT4577_69517C.1.pep
QFLVPSVHLQPSPWVSFALWLPGPGVWLSRLCNIFVLLDTCTMYCIIINYPVCDGEPFDTVFQRVTLVSQEYLYRISVVL

SEQ ID NO: 335974 - protein, 90 aa, Zea mays
  unsure (1)..(90): unsure at all Xaa locations
  Clone ID: MRT4577_69518C.1.pep
MAPKRTPFSVVLLIAVAVASMLSAHATRTLRXEDVNLPVRVASSSSPTSCVTFFDDAPAEEMEADGPSPAAPGPDDAWNYDDDKTPITGP

SEQ ID NO: 335975 - protein, 50 aa, Zea mays
  Clone ID: MRT4577_69519C.1.pep
LGWVLFACVKGCAVAPHLGCCLNPGGKLYMVGRGRSAFRTSFSFWWEHSF

SEQ ID NO: 335976 - protein, 195 aa, Zea mays
  Clone ID: MRT4577_6951C.1.pep
GRDHPSHIRILLLGAFLKCIPFEKQWQVDPEPQNSCLPAITYIQTIYVMAMNTATDFFLMSIPLPMIWKARMPWRKKVVIMFMFSGALLEMVFGILRAVSILTKGNTDPAQSGYWSVRESFVSFVVTNLPMVYPLLKRVVEKTVSASKSGTRTPGLGDSQGYRLGDYKNKANSRSRPDETDLGDTVGIEGSYCAR

SEQ ID NO: 335977 - protein, 77 aa, Zea mays
  Clone ID: MRT4577_69520C.1.pep
YHWQGINLKPKTGAAGTRHPQHHRDHAVNPQPKIFSCQRPARKRTNTAGKKPSPPEKHTRRPKNKKLLPCPLMIWHP

SEQ ID NO: 335978 - protein, 99 aa, Zea mays
  unsure (1)..(99): unsure at all Xaa locations
  Clone ID: MRT4577_69521C.1.pep
FAPPIIQNFGWESVFYIFALLGIVWCLGFESLIVQRFGDXKPIKXVPWGAFFKSKAVWAMIYAHFCGSWGHYTCLSWLPTFFSEELNLNLTEAAWVSVL

SEQ ID NO: 335979 - protein, 512 aa, Zea mays
  unsure (1)..(512): unsure at all Xaa locations
  Clone ID: MRT4577_69522C.1.pep
IGYLEAGRRRSAPRGVRVSPGDGEGAGGFASAVEKRSIPGIVEEEGHGARGEELEGDVAGALEQRWPPWDGLAERYKLIGATSLAFVICNMDKVNLSVAIIPMSHQYGWNSSTAGLVQSSFFWGYALSQLPGGWLAKLFGGRKVLEVGVVTWSLATAIIPVVAGFMPGLVLSRIXGIGEGVSPSAATDLIARSIPWQERSRAVAVVFGGLSFGSVLGLLFAPPIIQNFGWESVFYIFGLLGIVWCLGFESLIVQRFGDKKSLLNLGQSSTGSDGLISYAMSSESSHSSLEDLQNSLKDVPWGAFFKSKAVWAMIYAHFCGSWGHYTCLSWLPTFFSEELNLNLTEAAWVSVLPPLGSMIITSIAAPFADNLISNGVDTTKVRKICQTIAFVSPATFMMLSSVDLGLPPWEIVAFLTSGVALSSFALSGLYCTHQDISSEYASILLGITNTVGAVPGIVGVALTGFLLDSTHSWSISLFAPSIFFYLTGTVVWLAFASSKPQDFSKSGPESEP

SEQ ID NO: 335980 - protein, 223 aa, Zea mays
  unsure (1)..(223): unsure at all Xaa locations
  Clone ID: MRT4577_69523C.1.pep
SEIKDFLLTVRRKDARSVKVKRSKDVVKFKVCXSKYLYTLYVFDAEKTNKLKQSLPLGSLALIHIHRPLSAIHSAPNHPRQVRAKSAKSEPNPPFHLQRLPSLCRDMNRIPYHRETPYASSIHGAINPIYHTSVILLAFVSSGSERIRIRCIRRNKALRCDTIAGVPLLTATPLGITNTVGVVPRIVGVALTGFLLDSTHSWSVRRQSIFIIYIAFYESLWSP

SEQ ID NO: 335981 - protein, 131 aa, Zea mays
  unsure (1)..(131): unsure at all Xaa locations
  Clone ID: MRT4577_69524C.1.pep
GGGGGRPXRXRGACEEHRYYAQPRSAPRRRVSMGKARRGGGGXLLLATXPXPXPPPHEGARRALAYRAEAGGSPDGGGATPPWAVQQLLEGGLPRXEGAHRQGRRVHVQRRPGVLRRGGPGRADPGTRGEG

SEQ ID NO: 335982 - protein, 58 aa, Zea mays
  Clone ID: MRT4577_69525C.1.pep
SLRTMSPGIILLVSDTLDTAKPILLRGLTCNYTYRLEYKTMAYVVLRRKNLFVRCTSN

SEQ ID NO: 335983 - protein, 165 aa, Zea mays
  Clone ID: MRT4577_69526C.1.pep
MRRARLPPVPVPTAPGDAGPEVKYRGVRRRPSGRYAAEIRDPARKTPIWLGTFDSAEAAARAYDAAARTIRGAAARTNFPSAPTSAAVAPPPPLPLPASTAAAAGAATSSLSSAVAVRSERAGPGGRRHGLALRHAAPPLAAAGPQPLLPRLVPPGYSLASCGRR

SEQ ID NO: 335984 - protein, 79 aa, Zea mays
  Clone ID: MRT4577_69527C.1.pep
MRGIVLSLLGHVAVIGFLGSHRGGGRTATSAGGAGTDNGGRLRVEVADADVMECTDQNLTAHALRSHEPPVSTCAPHAT

SEQ ID NO: 335985 - protein, 36 aa, Zea mays
  Clone ID: MRT4577_69528C.1.pep
TQIGRRRRPLTCSSHSSVTMTTAPSRHPRSREGWRS

SEQ ID NO: 335986 - protein, 143 aa, Zea mays
  unsure (1)..(143): unsure at all Xaa locations
  Clone ID: MRT4577_69529C.1.pep
LSFNSHSSKICRHTAFVQPATSMMLSSVDLGLPPWEIVAFLTSGVALSSFALSGHVVKIATKFPFLHGSEVQTXIFVGKXLYCTHQDISSEYASILLGITNTVGAVPGIVGVALTGFLLDSTHSWSVRHQSIFIIYIAFYESL

SEQ ID NO: 335987 - protein, 112 aa, Zea mays
  Clone ID: MRT4577_6952C.1.pep
QPVRRTSCHFTSSTVLASSHAKLGFWPDHNQNYHVDFEEQVLGARHSLLGVKTNGKGDWWNIWRKYLQTRTPTHVGGHAHNYCIRLNSGGKDNMKCSIHDITTVNLTDDERA

SEQ ID NO: 335988 - protein, 111 aa, Zea mays
  Clone ID: MRT4577_69530C.1.pep
YFHDYATFATVVGTKATPVRDLCVTVCSQGVAFCAKAMYDTATRKFTKYSASIGVTKSVYHASFILDDNGDTIKVSCVYHLDDKHNASAVSDLTLKLSTNQNKLTFLVLYT

SEQ ID NO: 335989 - protein, 120 aa, Zea mays
  Clone ID: MRT4577_69531C.1.pep
LIILLTEPYALSISSSAHKSYSSIYFLSYVKLPNCSCLKLRVFLKKKKKKKKKKKKKKKKKKKKKKKKKKKKKKKKKKKKKKKKRGGKKKKKKSFFPGAEPPWGEILEISKKRGGVWTFF

SEQ ID NO: 335990 - protein, 60 aa, Zea mays
  Clone ID: MRT4577_69532C.1.pep
MMSASATVLLNIIDEDDGASPPVVHTIVDTVRVVRQGVLVRSPHCCGMQMSETATSSSGH

SEQ ID NO: 335991 - protein, 167 aa, Zea mays
  unsure (1)..(167): unsure at all Xaa locations
  Clone ID: MRT4577_69533C.1.pep
MMMRRQLSVCVLLLLLLAGQQAAAKKYAAIFNFGDSLVDAGNLVVDGIPEYLATAKLPYGMTYFGYPTGRCSDXPLLPPSKARNATFHHGANFAITGATALDTSYFVAKGLGKTVWNSGSLHTQIKWLQEMKPKICSSPEECRGLFRRSLFIVGEFGGNDYYSPLFA

SEQ ID NO: 335992 - protein, 233 aa, Zea mays
  unsure (1)..(233): unsure at all Xaa locations
  Clone ID: MRT4577_69534C.1.pep
MTMRRRLSACVLLLLVLAGQQAAAKKYAAIFNFGDSLVDAGNLVVDGIPEYLATAKLPYGMTYFGYPTGRCSDGRLVVDFIAQELGLPLLPPSKAHNATFHHGANFAITGATALDTSYFVAKGLGKTVWNSGSLHTQIKWLQEMKPKICSSPEECRXLFRRSLFIVGEFGGNDYNSPLFAFRPLEEVHEFXXGDVVNSIGEGIEKLIAEGAVDLVVPGVLPIGCFPVYLSIFR

SEQ ID NO: 335993 - protein, 89 aa, Zea mays
  unsure (1)..(89): unsure at all Xaa locations
  Clone ID: MRT4577_69535C.1.pep
IHIGQAGIQVGNVCWELYCLEHGIXLDGKMPGDKTIGGGDDAANIGASETGDGKIVPKVVMADAALTATLEHSTGTYRXLFKPEEGIIG

SEQ ID NO: 335994 - protein, 53 aa, Zea mays
  Clone ID: MRT4577_69536C.1.pep
TGGFGYRPAPTKVRGLGPQGPGQPVKPAGRTPQTGRPRSSLPNGRRAESFAGR

SEQ ID NO: 335995 - protein, 93 aa, Zea mays
  Clone ID: MRT4577_69537C.1.pep
VIYTNVPKHCSITLHIFIINAFHYQESVMDTLILTQTVFLEQPLISMTFSNNQFTDYGRSSLSFRLSYTFPVPQGTSSSLDCPLLIPAEQKPQ

SEQ ID NO: 335996 - protein, 97 aa, Zea mays
  Clone ID: MRT4577_69538C.1.pep
HLGLRSRGTIFAKKHPGLLPTESLTIDFHDTSPRGCPMALALLLCRRSAPVRASDSAVTTCNPARKRQAQRGGLRGDHSRDGQTAASSATRSGWHER

SEQ ID NO: 335997 - protein, 171 aa, Zea mays
  unsure (1)..(171): unsure at all Xaa locations
  Clone ID: MRT4577_69539C.1.pep
SPCSLLDLIVFSTYSCNYITSFHFLKHLFLLIPGPDSKAANELIGIDGILNAIARNLEKXDEELATEVAWVVVYLSALSEKXTSLIVRSSVPQLLIGRLLASENLQLLIPXQALSSLIKCLKSDHRVLKKEASWAMSNIAAGSFEHKKLIFASEATPLLMHLLRTAQFDIR

SEQ ID NO: 335998 - protein, 63 aa, Zea mays
  Clone ID: MRT4577_6953C.1.pep
PTENTGLPTPVHPTRESEEIRLCRSRNSHVGGVRLLKQRSASKYDWRSPRLQSKLSRYRSYGC

SEQ ID NO: 335999 - protein, 209 aa, Zea mays
  Clone ID: MRT4577_69540C.1.pep
MPSAAMTVAAGLATGPGSRVTRFAKSTAASVTPVRPGKTHALSPLDNAMERHTVHVVVYLRAAPGLDREQLKESLSEVLSLYPAMTGRLTRGEGSADAEPAHRGWVVKCNDAGVRMVDARAAVTLDEWLATATGDEEMDLLYYEPMGAEPYIWSPFYVQLTEFTDKSYALGLSCIHIHNDPTAAALFFHAWAAAHRRTTSTYPPFGDIY

SEQ ID NO: 336000 - protein, 60 aa, Zea mays
  Clone ID: MRT4577_69541C.1.pep
WAPPEEDKHVSLWISSPARSTVPYLLTKIKAQPVRLISGPQMVANLSPDVRYNIYLYTLS

SEQ ID NO: 336001 - protein, 120 aa, Zea mays
  unsure (1)..(120): unsure at all Xaa locations
  Clone ID: MRT4577_69542C.1.pep
VVAXLAGGCXAGFPAXRGAGXGXRLSPFVPVPFXXLWPGPPCLXVXXXXSLGLXWPAXLXLAGVPPVXLAVXSLVLRXCCXXAGAXXRLWGLRRCXXXXAXGPWGSSSRPRWAGPRPPSR

SEQ ID NO: 336002 - protein, 526 aa, Zea mays
  Clone ID: MRT4577_69543C.1.pep
MADGSASASPPSVSPHQYHRDAIKSSVRNTAANRRREHAIAIGKERREALMRAKRVCRAPLSGSDEAAAEEGDMVVDEEKADLETRTTQAVEELKSALSSQGKGAQNRKTEVLRALRRLLSQSEVPPVDAAIKAGAVPLLVQSLSFGSPDEQLLEAAWCLTNIAAGKPEETKSLLPALPLLIAHLGENSSTLVAEQCAWAIGNVAGEGAELRNTLLAQGALWPLARLMLSNKGSTTRTAAWALSNLIKGPDSKAANELIGIDGILNAIIRNLEKADEELVTEVAWVVVYLSALSEKATSLIVRSSMPQLLIGRLLASENLQLLIPVLRGLGNLVAGDGYMVDSVLIVGNSVTDQALSSLIKCLKSDHRVLKKEASWAMSNIAAGSFEHKKLIFASEATPLLMHLLRTAQFDIRREAAYTLGNLCVVPAGSGNPPSIIVEHLVAIVDGGALPGFINLVRSADIESARLGLQFLELVMRGYPDSQGPKLVETEDGIEAMERFQFHENEMMRNMANGLVDKYFGEDYGL

SEQ ID NO: 336003 - protein, 191 aa, Zea mays
  unsure (1)..(191): unsure at all Xaa locations
  Clone ID: MRT4577_69544C.1.pep
EPLRRRAEIDISERQNLPDNALARTPWRHQRPSVGDLPATTYTRPVTRVSLQTHARTIYGFAPLKQIQPAPCRASPLATRDDMSARRCQQHHFCAHLNEDXRSVLIFHVTDAPAHLVRVHHIRSDTPFLTLPDEEKPVWDTHELHEQDALLLMPDEANVKYTRDLDNVCDTYGNTPRLRVCGPRLRALARS

SEQ ID NO: 336004 - protein, 129 aa, Zea mays
  unsure (1)..(129): unsure at all Xaa locations
  Clone ID: MRT4577_69545C.1.pep
NSTSRSFLTHGVQLHMSDPYTFFQNVKVXRMIRTTNDIMRSLEFQASVPARFWAEALHTATYLLNRLPTMAISAPTPHLALFGTPPSYXHLFAFECACYTNLSATDPHKLAPRXSFCAFLGXSPDHKGY

SEQ ID NO: 336005 - protein, 64 aa, Zea mays
  Clone ID: MRT4577_69546C.1.pep
SPPIIGDDGYPSRWHGDVLLQSCARSEHAPQGTSYMNACSLSAAASAAIETRELLAARPVCCCC

SEQ ID NO: 336006 - protein, 63 aa, Zea mays
  Clone ID: MRT4577_69547C.1.pep
AERPMARFKNPKKKYGPNFPMLLATSFTSIFPSGPPMRQAVTGSLMVHHCQHLELGCMQDPCI

SEQ ID NO: 336007 - protein, 119 aa, Zea mays
  unsure (1)..(119): unsure at all Xaa locations
  Clone ID: MRT4577_69548C.1.pep
MSDLEINIPTAYHPYVDVNGGDIGWEERLKDXHHLRILACHXGARSMTTETAIDRPSSSYXEILTRFSERACXCCRNMRAKDPXLGPVIEVQSDQRKNAWNFVVQTGIVNKEHIETHGS

SEQ ID NO: 336008 - protein, 92 aa, Zea mays
  unsure (1)..(92): unsure at all Xaa locations
  Clone ID: MRT4577_69549C.1.pep
PTRPTPNLTSLKPILXPFISYIIPLVYVIISLSNSSPYLITYLKFISTITSTRNSTTSTPPKINHLFLFQPTLLTQIAFHQITITLDNHTFL

SEQ ID NO: 336009 - protein, 146 aa, Zea mays
  Clone ID: MRT4577_6954C.1.pep
QSLGQCRQVSSEFGSMAQLAARVTQASFGPIFGHAAMALVRPELQLTRPRQQTHGRRVQERRHPLSSAGRKQKITRRSAPSGAACARPPDSRTAASRQPNGKERSLRPCTCTGKSSRHLAFFSVVLSMNPNRFDLFSFSSIKTFPN

SEQ ID NO: 336010 - protein, 243 aa, Zea mays
  Clone ID: MRT4577_69550C.1.pep
MGASASVLSFPTAAAFPAAATAVAGAAGCFALGYLLAFTRLPRHAAGPGSGGTSDDDSEDDSEEDDDENSGRSRAAKRAGGQKRAGLRLLYWARNVVTKSDSAREAERSRSQAAASPLEIENLAEIIEDFKMVLVVRNDLKMGKGKIAAQCSHATLGLFKKLQQRAPKSLRRWERCGQVKVVVKIESEEDMLVLQGRAKSLNLPTHITIDAGRTQIAPNSRTVMAILGPADMVDDVTGGLKLL

SEQ ID NO: 336011 - protein, 32 aa, Zea mays
  Clone ID: MRT4577_69551C.1.pep
QAIRSWGRYAYTVWRQVSLTRCHHLCFSLENP

SEQ ID NO: 336012 - protein, 39 aa, Zea mays
  Clone ID: MRT4577_69552C.1.pep
RSLPFKANFSCVGTLLTNEIPESVALLFQPIDCYQVTSR

SEQ ID NO: 336013 - protein, 128 aa, Zea mays
  unsure (1)..(128): unsure at all Xaa locations
  Clone ID: MRT4577_69553C.1.pep
GSLWWTFPPLVLGWRASGPRGGGGGDPAGPKSDEDSVPDLCTRTAGXHANKYKGVDPVTVLKMQVDAFKKPVKGARRPPKEDFKTAPRPGGRRALNLCKTYYLDPPDNLGACKGAIGFRDAVTIRATM

SEQ ID NO: 336014 - protein, 53 aa, Zea mays
  Clone ID: MRT4577_69554C.1.pep
PRECYTIRVSLESGSLFGRHPDIFLVLSLYEVSMYTMSSLLESTAFFFHQFIS

SEQ ID NO: 336015 - protein, 56 aa, Zea mays
  Clone ID: MRT4577_69555C.1.pep
FPYIQGPLGRTEFWVAQTIFSPNGDGLRRDHALPLGAMTWRSLKYVLHHKSTTACS

SEQ ID NO: 336016 - protein, 256 aa, Zea mays
  unsure (1)..(256): unsure at all Xaa locations
  Clone ID: MRT4577_69556C.1.pep
MMAVILPRTVRRAAEAALSLHSVPPRAACHFARSLGGVSSACSMEFVSWQNGGGILHRAASVDPTAVVEAGAVVHSGAVLGKEVVVGSGAVVGPSVSIGQSTRVGYNVVLSNCSVGEFCIIHNGSSIGQDGFGFFVDEAGQVKKKPQMLCARIGDHVEIGANTCIDRGSWXETTVGNHTKIDNLVQIGHNVVIGKCCIICGQVGIAGSATLGDYVTLGGRVAIRDHVSVASKVLCSQLWFFFFCFAFFVHLVSKLV

SEQ ID NO: 336017 - protein, 73 aa, Zea mays
  Clone ID: MRT4577_69557C.1.pep
QDSTVPAYLQAKRRDRGWSENAIPNGCRKVSMALHHVGREVARMCNADEGEPNIVLVHINLYGCGRRRLHSDI

SEQ ID NO: 336018 - protein, 140 aa, Zea mays
  unsure (1)..(140): unsure at all Xaa locations
  Clone ID: MRT4577_69558C.1.pep
RPGRPGATHATGDNGXGMCIVGXXGDEAPRAGGGSIEGRPRHTAATEGMGQKDAHAGDEAQTKRGILTLKDPKEHGIESNWDDTEKIWQHTSYNELRVAPEEHPVRHTEATKNPKANREKRTQHRGETCNAPAKQEANQA

SEQ ID NO: 336019 - protein, 76 aa, Zea mays
  Clone ID: MRT4577_69559C.1.pep
SFEFIFFLFVGVLVLFLWGGRFFGPSFFAGGVPRLGFSWGPPNLICGGGGFPGRAGKTVGVPHCGRRGHSPFGGGG

SEQ ID NO: 336020 - protein, 397 aa, Zea mays
  Clone ID: MRT4577_6955C.1.pep
MDGGDAPAAGGGKVACAAWIRRREDKSAAAPARVFAAYGRAGAAGSPAALEVLGFDAKECSLSPSPLARAVIGDGGAGDAPRGIAVHPAGDELVCATAKGCRLFKLIFDEFTVRIIPRDAPLLESVGPQKCLAFSTDGAKFAIGGEDGHLRIFHWPSIKVLLDEPKAHKSFRDMDISLDSEFLVSTSIDGSARIWKIDEGAPLVNLTRSSDEKIECCRFSRDGMKPFLFCTVAKGPKVVTVVWNISDWERIGYKRLLGKPISTLSVSLDGKYLALGSHDGDFCAVDVKKMEVSHWSKKVHLGSPVTSIEFCPSERVVISTSHQWGAELTKLNVPADWKEWQVWLVLLALFLASAVLFYVFFERSDTFWNFPMGRHQPAKPWNVLKESPPVPEDQTPW

SEQ ID NO: 336021 - protein, 80 aa, Zea mays
  Clone ID: MRT4577_69560C.1.pep
FLFFPGHFAGYNGVGQGGPTQKVPSLKFYPFPNQPLFFNRPLGIPLPGWPFKACGPILLRKCILGPLLVNPGPVFSHPGL

SEQ ID NO: 336022 - protein, 332 aa, Zea mays
  unsure (1)..(332): unsure at all Xaa locations
  Clone ID: MRT4577_69561C.1.pep
ARFTQCPFCKTANYAVEYRGVKTKEERSIEQFEEQKVIEAQLRMRQKELQDEEAKMKRKQSRCSSSRTVTPTTEVEYRDICSTSFSVPSYQCTEQGNECCSSEPSCSSQANMRPFHSRHNRDDNVDMNLEDMMVMEAIWRSIQQEQGHLVNPVCGXLSCNRATITXRQAFVPAAPLEMPHPGGYSCAVAALAEHQAPSMDFSYMSGSSTYPVFDMIRRPCNMSSGSLCGAENSSLDTWSGIAPSCSREVVRDEGECSADHWSEGAEAGTSYAGSDIMADAGAMQPLPFAENFAMGPSHFRPESVEEQMMFSMAVSLAEAHHGRTQAQGLAWL

SEQ ID NO: 336023 - protein, 45 aa, Zea mays
  Clone ID: MRT4577_69562C.1.pep
AHDPRYADVGGDGHLRCPVDVLVALIFERRFHMLYSFSRTRGRRV

SEQ ID NO: 336024 - protein, 90 aa, Zea mays
  Clone ID: MRT4577_69563C.1.pep
LSAYKASQARVILSDVHSQITQRGGLLLPGPCVMRPIPERVLQPCLSCATSGDDVYEESVLKLGARDTTKLDQFISLKMLYHYHDIVEDQ

SEQ ID NO: 336025 - protein, 352 aa, Zea mays
  unsure (1)..(352): unsure at all Xaa locations
  Clone ID: MRT4577_69564C.1.pep
PLHILFGIFTECFLQMKPTHTARPTQCPFCKTPNYAVEYRGVKTKEERSIEQFEEQKVIEAQLRMRQKELQDEEAKMRRKQGRCSSSRTVTPTTEVEYRDICSTSFSVPSYQCTEQGNECCSSEPSCSSQANRRPXILDNRDDNVDMNLENMMVMEAIWRSIQQEQGHLVNPVCGSYFPVIEPPSRERQAFLPAAPLEMPHPGGYSCVAALAEHQPPSMDFSYMAGSSTYPVFDMIRRPCNMSSGSLCSVENSSLDTWSGMAPNCSRGVVREEGECSTDHWSEGAEAGTSYAGSDIMVDAGAMQPLPFAENFTMAPSPFSPESIEEQMMFSMAVSLAEGHHGRTQAQGLAWL

SEQ ID NO: 336026 - protein, 44 aa, Zea mays
  Clone ID: MRT4577_69565C.1.pep
NLVFPSAPIIISITNLPKLIDFPSYAASSIKFSFLLSLLPLLLF

SEQ ID NO: 336027 - protein, 102 aa, Zea mays
  unsure (1)..(102): unsure at all Xaa locations
  Clone ID: MRT4577_69566C.1.pep
GCPTLATAWAAFGLTGHRQRPPGLLGXLKAAVRALFDLPDDAKRRNADVIPGSGYVAPCXANPLYEAFWLLDAAAPADVDAFCAPLDAPPIVKETVKTYAEK

SEQ ID NO: 336028 - protein, 76 aa, Zea mays
  Clone ID: MRT4577_69567C.1.pep
MATKHLALCLLVLFSIGMGMATAAANRKLGYGPGGGGGGGGSGGGGGGGYGGGGGYGGRREGGGGGYGGGGGGWRD

SEQ ID NO: 336029 - protein, 127 aa, Zea mays
  Clone ID: MRT4577_69568C.1.pep
MYLSFSVYVQNLLEVQVYAMSNSLTSKIGGTNKENYGDVSDMNSDSYYRSFGRAGSMGLIGLENLENTCFMNNSIHKGEMILADDTCRILEILAYEYWSNHLAQNDSVIVDTCHVSLNAPIFILNSS

SEQ ID NO: 336030 - protein, 65 aa, Zea mays
  Clone ID: MRT4577_69569C.1.pep
RAAVKDISSEKTGSVLKLGLEFALGIKETSLSQNFFYLLAYCYTNDVEWHFLFSFSLKYIPYLRL

SEQ ID NO: 336031 - protein, 73 aa, Zea mays
  Clone ID: MRT4577_6956C.1.pep
TLLWKYVRSKPIFVLPRFPMPVKTLPFFCPGKSLCSFNTWIWELLVKNKSPPPNLVGSSGPDEPLKKFVPFPP

SEQ ID NO: 336032 - protein, 75 aa, Zea mays
  unsure (1)..(75): unsure at all Xaa locations
  Clone ID: MRT4577_69570C.1.pep
FVFCFWFVSPPCRCRVVGVPVVSLAVGSLVLRXGRPXXXXLXXRVGXVLXPPLRRLLXGXAXPLRXXRLLLAAAG

SEQ ID NO: 336033 - protein, 39 aa, Zea mays
  Clone ID: MRT4577_69571C.1.pep
AQGGAVFQVNGNHETMNVEGDFRYCDPGGFDECMRFLDY

SEQ ID NO: 336034 - protein, 67 aa, Zea mays
  Clone ID: MRT4577_69572C.1.pep
LCFKVDCLGQKNEILLLKVGQSDMVVGSMGGTDFNHAGQQVWKLHIYWWGLARENNADYTSGLHIQL

SEQ ID NO: 336035 - protein, 251 aa, Zea mays
  Clone ID: MRT4577_69573C.1.pep
MPACTFSLLSFTPDYMVEKLGIDESKIENLGNLLYKNYGTTMAGLRAIGYSFDYDEYHAFVHGRLPYDNIKPDPVLKHILKNLRIRKLIFTNGDKVHAVRALERLGLEDCFEGIICFETLNPPCPPQGDREPEIFDIAGHFARSGAAAELPKTPVLCKPNVDAMEEALRIANVNPHKAIFFDDSVRNIQAGKQIGLHTVLVGKSQRVKGADHALESIHNVREALPGLWEEAEKAEDVLYAERVAMETSVTA

SEQ ID NO: 336036 - protein, 60 aa, Zea mays
  Clone ID: MRT4577_69574C.1.pep
EPKTNLKTLIFNRARGPLIFHIFFYPVKLELAPSHILLGGACESIPPHISHFSTCFAPPF

SEQ ID NO: 336037 - protein, 150 aa, Zea mays
  unsure (1)..(150): unsure at all Xaa locations
  Clone ID: MRT4577_69575C.1.pep
NNQGRVVNTSFQCFQPVCFCDHSSCFHILFFMFLCHLLFFLFFFYFPLYFYLYFFFYFFLFXYFSSFFFSFFIFFSFFSFFFSLFYSFIFFFFXYFILLFSLSLFYFLFSFYLIFLFSFFLSLSFFYFIFXFYFYTLLFISIIFPLFSHF

SEQ ID NO: 336038 - protein, 247 aa, Zea mays
  unsure (1)..(247): unsure at all Xaa locations
  Clone ID: MRT4577_69576C.1.pep
MTGTVIWAGMDSREKSWDCLLISILSLQLSLHHSSQAWSSRIAATRSRSPSSTACSSVSRCSASCRYAAARLVFVSFCCCLLLLLLLPLHGMQGFSDLFSPTDLDDTLYPLSSGIAGHVKKNIEDYMVEKLGIDESKIENLGNLLYKNYGTTMAGLRAIGYSFDYDEYHAFVHGRLPYDNIKPDPVLKHILKNLPIRKLIFTNGDKVHAVRALERLGLENCFXGIICFETLNPPCPPRETGSQRSST

SEQ ID NO: 336039 - protein, 80 aa, Zea mays
  unsure (1)..(80): unsure at all Xaa locations
  Clone ID: MRT4577_69577C.1.pep
WIPLPRAPPXKKGPQVAPVGRRPKXAPLLRLIDPPVSSSLPXCATRACXSHIKRPPCCARVRMYALVSCTNKRVYVIYRM

SEQ ID NO: 336040 - protein, 76 aa, Zea mays
  Clone ID: MRT4577_69578C.1.pep
PPTLHWAQFAGPCRDLGPHPGAPFLFLQILPRLFCQCSVPMVWPFYGQPVSGLFQARVWRSFPAEAAPLMLTTRYI

SEQ ID NO: 336041 - protein, 87 aa, Zea mays
  Clone ID: MRT4577_69579C.1.pep
VPRVESHWPAVLGKLLQKCTLGDPFRSLGSGGGPAPVVGSAPTGGSPSLVGPCAREKKEKPKAVFNFPMGFTLFSLNPPFPSISKVA

SEQ ID NO: 336042 - protein, 103 aa, Zea mays
  Clone ID: MRT4577_6957C.1.pep
AVSTIINIRILCSLLVIYKVNIISVLVEELASRQNPQRQGNTMSQAIHPYISRVRKIPPRAILISLPEHWRYVNSDSPEQIYRIDDEGKQRRRRCSPRHHWRL

SEQ ID NO: 336043 - protein, 116 aa, Zea mays
  unsure (1)..(116): unsure at all Xaa locations
  Clone ID: MRT4577_69580C.1.pep
PACVLPPYLXNDSFRYGENPALQPYRLQQAFAESSIPLSPLFQQXPALSLVQSLAQTIKAQQLPQLALPVINQVAMAKLSAYYEKQQFLPFTQLSTLNLAGILADLLLLLSQVGTA

SEQ ID NO: 336044 - protein, 208 aa, Zea mays
  Clone ID: MRT4577_69581C.1.pep
MPSPSLLLRAPPLCPSPSNPPRRFAPPSLITSSPPAHLRPLRLPSAASRHTPRAGDTRVPDDLIPIARCYEGRLARLELAGAARREQAVAAAAAAGGGASAEDHLAAGSDAMVVEAFLPGPHGGGTTASSTRVILQAKEVKDKARKIEKQFGSDFFFANQPDSDRMMAMAFKQVAIQRLSNFRLKVFPPRPERDFQDLGEPRKGAFGL

SEQ ID NO: 336045 - protein, 146 aa, Zea mays
  Clone ID: MRT4577_69582C.1.pep
AAATCAPSSKLPDGAGSGGVPGLAPCCSRQQSMTAQVARTQKVADKVALSLPSDGRYTSGDSVGVTIFSGGPLLLVPTDRRDFTTMLAGTAPLHAGAGAGAHGYYDYYIGIDVEHAQVGGPGGALVAALHYTVHYTALQPDVYASF

SEQ ID NO: 336046 - protein, 244 aa, Zea mays
  unsure (1)..(244): unsure at all Xaa locations
  Clone ID: MRT4577_69583C.1.pep
MAHQKREGSYADDDSTSKRIKGTDTASETGDSVESSVSQQMDAEARRTCQKESEAPSDKCVSDGECAANSKVLGEQKMVLTVVEADAADDKGCRHTMEDAWVVLPNAGAESPGSLRCVHFAIYDGHGGRLAADYAQKHLHQNVIAAGLPRELMDIKAAKKAVIEGFRRTDESLLQESTKGNWQDGATAVCVWILGQTVVVANVGDAKAVLARSISLRXLKGVVDENQXLKAIVLTREHKAIFSR

SEQ ID NO: 336047 - protein, 62 aa, Zea mays
  Clone ID: MRT4577_69584C.1.pep
NLSTIGFHGLISLLPLSPFQNPTHTLINPQFIHSLTSILPQILISITIISLKQLNIPIYHLK

SEQ ID NO: 336048 - protein, 42 aa, Zea mays
  Clone ID: MRT4577_69585C.1.pep
ITMFGPLLEEVRDDMFSSLEDITNAPYADLLSINSMRKGKGS

SEQ ID NO: 336049 - protein, 124 aa, Zea mays
  unsure (1)..(124): unsure at all Xaa locations
  Clone ID: MRT4577_69586C.1.pep
PEYMMTGHLTASSDVYSYGVVLLELLTXGRRSLDRSRPPREQALTDWALPALPHKKRVQGIVDPRLAGAGWDDPPPARAVQKTAMLAYHCLNRNPKARPLMRDVVASLEPLQQPPEDPNAHAAL

SEQ ID NO: 336050 - protein, 193 aa, Zea mays
  Clone ID: MRT4577_69587C.1.pep
IISTTPAYLLAAGVLYRLPVHHQEPHEYKAPGIPDDGYRCIRHLHLIGRGPQRSLLKLQSTLVGRWRSPLPATAGADTILVAYTADADEDRFEKHYLTFDSRPLSAGGDKLKHECGNESFVPNDENWRHCNKMRDGPTPLCGWSDDLVLTIIDSIGRRARLTDAPRRGGWGGRVVHGAPEWLPQRGGHPARQR

SEQ ID NO: 336051 - protein, 175 aa, Zea mays
  unsure (1)..(175): unsure at all Xaa locations
  Clone ID: MRT4577_69588C.1.pep
SYGDEKLSGSSPACQCQEMLALPAPEDYHGHEREGSPLVSHVEKASTSSLPREEMLALPAPGDEYRNRKEAEDYMRIAIGIRGMFRLAVDSFPVDEKMFSGTACGSGFRLGLRATAPTSXGCISVPPPPDLTVGSAPFLSGIPGLQSLSRGMPLADADLFMQRGIDCTVSNKWML

SEQ ID NO: 336052 - protein, 61 aa, Zea mays
  Clone ID: MRT4577_69589C.1.pep
TSTTKFYSLTILSINTALHRRRLISITQPTHRKTSFHAHHAHPCRRPAPPQLLNPARHSTP

SEQ ID NO: 336053 - protein, 65 aa, Zea mays
  Clone ID: MRT4577_6958C.1.pep
HQHSAGSDQLAMIYNSTGLPSTCEMYCVLQEPCGTLNLTKSRVPSYKADPFASSEFDPQGQHGNT

SEQ ID NO: 336054 - protein, 57 aa, Zea mays
  Clone ID: MRT4577_69590C.1.pep
RYCSNASPPNASCTLKIVPTKKNGAHALSSPRPAKTGPTSGVAIAAPAEVSEVGRVG

SEQ ID NO: 336055 - protein, 67 aa, Zea mays
  Clone ID: MRT4577_69591C.1.pep
RGGQYLKGELGGAFWANKPNVKKGIGVEKRLNWGSHKGFQRLKGGKKRGKKISFGDRKKKENGREGE

SEQ ID NO: 336056 - protein, 60 aa, Zea mays
  Clone ID: MRT4577_69592C.1.pep
RNLNRKQVRVKTTFVQDLMLYPLLGGSSRSVRAPPYIIKLQVGPEPSSKVHSLCGHHASF

SEQ ID NO: 336057 - protein, 299 aa, Zea mays
  Clone ID: MRT4577_69593C.1.pep
MADSPAPDAQLEQASPAAAPADPAENAPVEKSPAAPLTLEPDAAAVSDGAAGEVEDEEYVSDPDDEALPTMRRREASDDEGSEDGRPTARMGPDQDDDGQGAPEAYDDEVDEEDKEYYDEEDMGEGFEEEYEGRVALPMDDGGGSQVSRGEDGVAMEEGLTEGEAKGEGGEKEQEPFAVPTSGAFYMHDDRFQEENRGRRRRMFGVRKLWDVKDNQAWVHDRFEEMNLHDDFYEDQRMSRGRFRGRGGRGKARGGGRGFSRGGKQRNYHEDSNTQNRTPKVVRGRGPRRYEAAARNNRE

SEQ ID NO: 336058 - protein, 52 aa, Zea mays
  Clone ID: MRT4577_69594C.1.pep
WKPLLDDQPGDESKRSAGPPPLLPDESEFPSHFLNNSLKVMYSALPRHHAVM

SEQ ID NO: 336059 - protein, 59 aa, Zea mays
  unsure (1)..(59): unsure at all Xaa locations
  Clone ID: MRT4577_69595C.1.pep
LDSXKGKETRRCSCLTDHSEQNGYTGDYGGPRLLALQSHDHQGPGLSQRGALHRERGVR

SEQ ID NO: 336060 - protein, 171 aa, Zea mays
  unsure (1)..(171): unsure at all Xaa locations
  Clone ID: MRT4577_69596C.1.pep
DVTKIHPXLYTEYIXSCNATIQSSDDTLPHXAHGNSHXGKAISDGPTVQLHINDLQLNITINLGYTNVNVYXCQDDLGTLPLXYDAYAIQKEDQPLCDVAALENTTMXLLRHGSFMXCPGHHILMDXMPNEAAIQHGALLLIAQMIXCPQPQTSKHLAAAEXMRLXHIIFC

SEQ ID NO: 336061 - protein, 217 aa, Zea mays
  unsure (1)..(217): unsure at all Xaa locations
  Clone ID: MRT4577_69597C.1.pep
PLVDTASSGIVDCTLWINFKNIKIKYPTAMPIAATAQVGTEAXRIQLEQELLALQQQAYXSVLSPLQDVPLVSNYARPALWVSNTIRDVAKHFGWSKPTTAEAPHLNKLTGSRFMANADGLDMSHSLGISAINELEVNPALTRTDIDEMTVAHIARTPCFIKRFQWTSNGKAGAVLYATPITPSVFSIAVDDTRVAPSHLAYISSPFTMWRGGINFH

SEQ ID NO: 336062 - protein, 112 aa, Zea mays
  unsure (1)..(112): unsure at all Xaa locations
  Clone ID: MRT4577_69598C.1.pep
MEEDPSEPCHGHITSLAVLRSHRKLGLATKLMSAAQAAMDQVFGAEXQDIEAKYYADGEDAFDMRKLLRQPQPKKHHHHHHGPGGCCSHDAPVAATGSSPQSSSSPDKKATT

SEQ ID NO: 336063 - protein, 135 aa, Zea mays
  Clone ID: MRT4577_69599C.1.pep
KIKKLNKGGKNSYKIKKKWGGRFWGSRFPSPFLPGITFFLVALNFISLALVFHRLVWKTLGFPHFIVFVALPLFAGWCIGKWAVTVPLSQPFALLMGFWPPPLFAPLSPVVLVFPLFLSVSFAGFSRPVFFVFFL

SEQ ID NO: 336064 - protein, 206 aa, Zea mays
  unsure (1)..(206): unsure at all Xaa locations
  Clone ID: MRT4577_6959C.1.pep
MSDSEDSNFSEEEDSERSSEAEEAEVEEDQRSAAGSEKEEEPEEEEEEEEEYDEEEEEEDDDRPPKKPRHGGFILDEADVDDEYEDEDQWEDGAEDILEKASNIDNVVLDEDRSGARRLQNLWRDQREEELGEYYMKKYAKSSVGETVYGGXSDELSDDITQQQLLPGVKDPNLWTVKCKIGXEERATAISLMREFIAYQFTDTPL

SEQ ID NO: 336065 - protein, 164 aa, Zea mays
  Clone ID: MRT4577_695C.1.pep
MGGASDSNLLPPGFHFFPSDEELVVHFLRRKASLLPCQPDIVPTVCMNHHDPWELNGKALEAGSQWYFFSHAKQSRATPNGYWSSVCADETVLSGGGGCSVVVGLKKTLVFSTGEPSDGAETNWIMHEYHLLDGRKGGSSSSSSTSSIHSSSKKSHHPNTVRSS

SEQ ID NO: 336066 - protein, 81 aa, Zea mays
  Clone ID: MRT4577_69600C.1.pep
VHRTSILQTNHHWQCHKVICFADKTLDTRKGINTSTTNNHYMNNNTQLPKHTKSVIKEQFSNRIMHATNQDKTLGLIYKPQ

SEQ ID NO: 336067 - protein, 197 aa, Zea mays
  Clone ID: MRT4577_69601C.1.pep
MVCIRQATIDDLLAMQACNLMCLPENYQMKYYFYHMLSWPQLLFVAEDYGGRIVGYVLAKMEEDPSEPCHGHITSLAVLRSHRKLGLATKLMSAAQAAMDQVFGAEYVSLHVRRSNRAAFNLYTSTLGYQIHDIEAKYYADGEDAYDMRKMLRQPVPKKHHHHHHAGGGCCSHDAPAAAAAGSSPASAAGEVGRLIR

SEQ ID NO: 336068 - protein, 94 aa, Zea mays
  Clone ID: MRT4577_69602C.1.pep
DVIFLFKSDPSESGWFKYKNGSGNTTPIFPVNGKPLPIIAFLKISGYRASISHHIKFKISHLFCLYNYFLYLFLVFIIFNPSSFLNSILYILIL

SEQ ID NO: 336069 - protein, 197 aa, Zea mays
  Clone ID: MRT4577_69603C.1.pep
MVCIRQATIEDLLAMQACNLMCLPENYQMKYYFYHMLSWPQLLFVAEDYGGSIVGYVLAKMEEDPSEPCHGHITSLAVLRSHRKLGLATKLMSAAQAAMDQVFGAEYVSLHVRRSNRAAFNLYTSTLGYQIQDIEAKYYADGEDAFDMRKLLRQPQPKKHHHHHHHGPGGCCSHDAPVAATGSSPQSSGSPDKKAIT

SEQ ID NO: 336070 - protein, 61 aa, Zea mays
  Clone ID: MRT4577_69604C.1.pep
RFSSAPQIFQAPSLSGGAGYCSLYVDQFSLFSSVFIEDFSCEVFTQFPLSSFDLRWLILRN

SEQ ID NO: 336071 - protein, 117 aa, Zea mays
  Clone ID: MRT4577_69605C.1.pep
GSPRRRLGVQAVFQRFGRLTALKTMITNQMNCENSHMSQGNTGIKYEAYLVAILADSVRRFEPSAKYTNTHCTGLSPFYYGKTARYNYYIVYPVRGKMSTIGLVIPLCRYESARFRS

SEQ ID NO: 336072 - protein, 197 aa, Zea mays; identical to SEQ ID NO: 336069
  Clone ID: MRT4577_69606C.1.pep

SEQ ID NO: 336073 - protein, 196 aa, Zea mays
  unsure (1)..(196): unsure at all Xaa locations
  Clone ID: MRT4577_69607C.1.pep
MVCIRQATIEDLLAMQACNLMCLPENYQMKYYFYHMLSWPQLLFVAEDYGGSIVGYVLAKMEEDPSEPCHGHITSLAVLRSHRKLGLATKLMSAAQAAMDQVFGAEYVSLHVRRSNRAAFNLYTSTLGYQIQDIEAKYYADGEDAFDMRKLLRQPQPKKHHHHHPXPGGCCSHDAPVAATGSSPQSSGSPDKKAIL

SEQ ID NO: 336074 - protein, 76 aa, Zea mays
  Clone ID: MRT4577_69608C.1.pep
EVAIVASVLTVDIHKRWIHVMPRGISSRRSGSWMYCVAIQRRRWIAAVGEAAVETREMELRYWQRRGGRRRSGGTH

SEQ ID NO: 336075 - protein, 69 aa, Zea mays
  Clone ID: MRT4577_69609C.1.pep
HSFGYTRLSSGSGFVLAVLHIHNSGSENTCSHNPLGKHCQIMFLRTFGGRRPPTAADSMQFLRPSKKIL

SEQ ID NO: 336076 - protein, 239 aa, Zea mays
  unsure (1)..(239): unsure at all Xaa locations
  Clone ID: MRT4577_6960C.1.pep
MQTIFQMVIQSARIWLFSQWRARKMQRQHPKSRRVLWKLLLEPVFTFSVVNYRLLWSKAQKYSILSYVSSPLDECLRRLDACATLLHDIAPAVTTHELGIAADNARRRLTLVLMENYADGILGADPHDALLAMFPETHNEVYRDQCRCHPELYXIEGDPPTATLTRIQSAMHDLGYEDQDIDDQLSIRQAEYDLMNAEGAVEFHDYSTNIHARFLDSRNKIASAVNPTRDYVREATMSH

SEQ ID NO: 336077 - protein, 641 aa, Zea mays
  Clone ID: MRT4577_69610C.1.pep
MAASTAAAAARKGALTDQRFSELSPALSPEVVEALDRGGFQRCTPVQAAAIPHLLSHKDVAVDAATGSGKTLAFIVPVVEILRRRSSPPKSHEVLALIISPTRELSSQIFNVAQPFFATLNGVSSMLLVGGLDIKAELKKVEEEGANILVGTPGKLFDIMHTDALEYKNLEILILDEADRLLDMGFQKHINFILSMLPKLRRTGLFSATQTKAVADLSKAGLRNPIRVEVKTEAKSTSKDAGQQELGPSITPLGLRLEYMICEASKKSSQLVDFLVQNSGKKIMVYFATCACVDYWAVVLPLIKSLKGSPIIAYHGKMKQSLREKALASFSALSSGVLVCTDVAARGLDIPSVDLIVQYDPPQDPNVFIHRAGRTARYDQEGDAIVFLLPKEDTYVEFLKLRGVPLTERECLANTDDVIPQIRSAALEDRNVMEKGLRAFVSFVRAYKEHHCSYIFRWKDLEIGKLAMEYGLLQIPSMPEVKHHSLSLEGFISVDDVDITQIKYKDKAREKQRKKALKRKAEEEAQNPKPERKRPPEKPEKPKRKKTGKQRQSIQTKEDLDELAHEYRLLKKLKRGDIDEEEYEKLTGFGDFDGEASDGDGSNLDERKKGNKAQKKPKQRGKCKSGFKKFEGRSKLRSKRR

SEQ ID NO: 336078 - protein, 42 aa, Zea mays
  Clone ID: MRT4577_69611C.1.pep
KRLGGIYRTSSSCQPTTSSASVSRLRSYDVYVGFHGRKASLL

SEQ ID NO: 336079 - protein, 56 aa, Zea mays
  Clone ID: MRT4577_69612C.1.pep
RTRGAMPGFGEPLHRDIVLTIRTLYMISLSAITGVTSRILTLLRGDKVRIHLQAHE

SEQ ID NO: 336080 - protein, 93 aa, Zea mays
  Clone ID: MRT4577_69613C.1.pep
MTAGFDLQALAGQIRDARGVAHKRDIDAVVARLGLTSRRAAVPVGDDCAAIPDGDGHLLFAIEGFLDSFVAADPYFAGYCGVMVNLSDIAAMG

SEQ ID NO: 336081 - protein, 39 aa, Zea mays
  Clone ID: MRT4577_69614C.1.pep
SIYVHNVSNESLSALKNSPILVNLVLPEKVIVLKPLWCN

SEQ ID NO: 336082 - protein, 160 aa, Zea mays
  unsure (1)..(160): unsure at all Xaa locations
  Clone ID: MRT4577_69615C.1.pep
LMLVYDLIQGLSSXLVTIREDVLGAPTFALAVHHGGPXVTTRLRMAEADKWIRLLKQSDETWKMGGLAHTLAPRLCAEKCDTYAVMYDHPLAIRLRRIAFXLMAKDTFDFLALDRPSTTTIDRAIALPKMTGPITLCLGGEGCLNFVGRAFVHPEWLLFS

SEQ ID NO: 336083 - protein, 275 aa, Zea mays
  Clone ID: MRT4577_69616C.1.pep
MASSAVIVPASPRKLEGKVAVITGGASGIGERTARLFVEHGAHVVVADIQDEAGARVCADLGAGAASYVHCDVTSEDDAVAAVDHAVATFGALDIMFNNAGVSGPACYSVRESGKADFERVLAVNLVGPFLGTKHAARVMVPSRRGGCIIGTSSVAAAVTGVSSYAYACAKRAMVTLTENAAAELGQHGIRVNCVSPAGVATPLTMRYMGLEAEALEQAMEGMANLKGVGALRVHDVAAAVLFLASDDARYISGHNLFVDGGISVANPSTGTSKD

SEQ ID NO: 336084 - protein, 416 aa, Zea mays
  Clone ID: MRT4577_69617C.1.pep
MARPAAKARVPKHLVALAVVAILGLVLVADYLWASSSASSSAVWSSRLNLHTGPAGSTPPVAKKIKEDKKSVGSTGINATFADLPAPELKWEEMAEAPVARLDGAAIQIKNLLYVFAGYGTINHVHSHVDIYNFSDNTWGGRFDMPEDMAHSHLGMVTDGRFIYVVTGQYGPQCRGPTTRNFVLDTETKEWRGMPPLPVPRYAPATQLWRGRLHVMGGSKEDRHEPALEHWSLAVKDGKALEKEWRSEKPIPRGGPHRACVVANDKLLVIGGQEGDFMAKPGSPIFKCVRRSEVVYSNVYMLDDGTTWKELPPMPKPDSHIEFAWVNVDNSLVIAGGTTDKHPITKKMVLVGEVFRFNLGTLEWSVIGRLPFRIKTTLVGYWDGWLYFTSGQRDKGPKDPSPKKVVGCMWRTKLHL

SEQ ID NO: 336085 - protein, 179 aa, Zea mays
  Clone ID: MRT4577_69618C.1.pep
MGHEAAAPGSSVLGRAVEEVRSALNEHADVVADLFGRVSSEVRTGFAPAVDSFVGFFHAVDWKEPWLISILSFHAILLLVTIISRRNINFQLILSALTFSGVFLAERLNTFLAQNWKSFSTQNYFDPQGLFISVIWSGPLLLITILILVNTLVTLCTLMVRWKRAELRHRARQARDKQD

SEQ ID NO: 336086 - protein, 134 aa, Zea mays
  Clone ID: MRT4577_6961C.1.pep
RVVFFFFFCCFFVHRFLKKPQRPGEFYFTYTVVRGKILGPARGLTEGRKALNIMPYKFSKRRRIRENLGGTRAGQPDPLFLLAGIQSMGEGGTDSKMGMCLSQAGQRFFFEVTMDLAQTQLCLNHIVGGGLPTW

SEQ ID NO: 336087 - protein, 78 aa, Zea mays
  unsure (1)..(78): unsure at all Xaa locations
  Clone ID: MRT4577_69620C.1.pep
GSTKMYLDLRTRYWWRGXRREXAQYVXARCDTCQXTKAEHQKPAGLLQPLLVPKWKCEEIGMDFVTGLPRTQKGNDSI

SEQ ID NO: 336088 - protein, 113 aa, Zea mays
  Clone ID: MRT4577_69621C.1.pep
FPPQTPRGSRGFLPPQDCPWGLYRRPVPPQGGGFLDQPLCLKTAMSPGPRLGPKRGPLFPFSLGVWGGQPVNTGPGWWLPHMGKNTPRLPPGNMAGFAGCFFCGARPGFFPVW

SEQ ID NO: 336089 - protein, 54 aa, Zea mays
  Clone ID: MRT4577_69622C.1.pep
PARASYRWHLLKPQLFLPYTLLGLAPPAVFYQATLHWWGPLFDFIMSYSSKKKY

SEQ ID NO: 336090 - protein, 117 aa, Zea mays
  unsure (1)..(117): unsure at all Xaa locations
  Clone ID: MRT4577_69623C.1.pep
PPSRPRQKTGGAKSRSRGHCLWFGFGSPCPPSPGIGRPPRGXPRGFPPRGGSPPFSQRPWGGPPPPFRGCPDSWGPFPLFWPKIFPRPLFFFPKMGLLEAPPLGGRFKKKHFWFPGF

SEQ ID NO: 336091 - protein, 56 aa, Zea mays
  unsure (1)..(56): unsure at all Xaa locations
  Clone ID: MRT4577_69624C.1.pep
TTVIVASVWHIRGAGIANNAPPXKNQRHRHCHKRCRLSECLSCPVMSCRKASLTEG

SEQ ID NO: 336092 - protein, 76 aa, Zea mays
  Clone ID: MRT4577_69625C.1.pep
FEIGNIRLHKTKYKPAWSTAIGFRKVPWTTYGMDSNMYVNNGKGVTYYASHGRVWLDGSNLPSRYRLFAKEKGSHV

SEQ ID NO: 336093 - protein, 60 aa, Zea mays
  Clone ID: MRT4577_69626C.1.pep
GWSWPWERTAAFLAAGLDTVDCAGRPSTCRAERTSWAAIDQALVLLLTRASDHVLTCARS

SEQ ID NO: 336094 - protein, 73 aa, Zea mays
  unsure (1)..(73): unsure at all Xaa locations
  Clone ID: MRT4577_69627C.1.pep
LEAAGRGFCDQSSSRHIVRXPGITKTWTGTAICSDTSYLGFFCEKPPNVNERALASVDFNGFKLEAPTVEGFV

SEQ ID NO: 336095 - protein, 46 aa, Zea mays
  Clone ID: MRT4577_69628C.1.pep
NNTILTCSFVFQSFVKRSNKLNNARAQQDKHSLRNEEGTELQAIVR

SEQ ID NO: 336096 - protein, 59 aa, Zea mays
  Clone ID: MRT4577_69629C.1.pep
KAVLNPISLLGTTTPTGPNCHSFWVETILTLNMMFGTFAVATDTKPVVKLAVLQFIPQF

SEQ ID NO: 336097 - protein, 57 aa, Zea mays
  Clone ID: MRT4577_6962C.1.pep
QRHDLFFESVYTHESRRVHSANHYMTHPLRPPKVPKVRGYQHLLLAKRIRGHPKFRA

SEQ ID NO: 336098 - protein, 62 aa, Zea mays
  Clone ID: MRT4577_69630C.1.pep
TVGLTAHQPRYTPRSLRVLRSTERSQFNVAPQVHYLAPTPATLGRRGLPFQDSTILQGIRSR

SEQ ID NO: 336099 - protein, 171 aa, Zea mays
  Clone ID: MRT4577_69632C.1.pep
HLSGPLPPEFAEAPAMKIFQADNNNFSGSSIPTTYNNISTLLKLSLRNCSLQGDIPDLSSIPQLGYLDISWNQLTGSIPTNKLASNITTIDLSHNMLNGTIPQNFSGLPKLQILSLEDNYLNGSVPSTIWNGIELTGNRSLILDFQNNSLKTIPDTFDPPPNTTVIPPFSL

SEQ ID NO: 336100 - protein, 65 aa, Zea mays
  Clone ID: MRT4577_69633C.1.pep
TDELTMSTDRIGTARSRNEAQTWCDIHSWDRRLSDMASNAATTYLVMVSVTYCTAVKTFHKIGLE

SEQ ID NO: 336101 - protein, 51 aa, Zea mays
  Clone ID: MRT4577_69634C.1.pep
GAAECNGHVAGIFFEAVAEGSVRVRVTLAIEAVQVLGRSSGEGLVAIVPAA

SEQ ID NO: 336102 - protein, 69 aa, Zea mays
  Clone ID: MRT4577_69635C.1.pep
HHPQQHKSSTWNNTRLVFVRWLPLGEQPFVLALVQPIHLQVDPTASPCEWLTLSSLLWSTQLWSSGSRD

SEQ ID NO: 336103 - protein, 67 aa, Zea mays
  Clone ID: MRT4577_69636C.1.pep
MLGNVEKFFFPSVFGRIFSTLGQMFWWNPVLVFPQTKKKKKKKKKKKKKKKKKKKKKKKKKKKKDRP

SEQ ID NO: 336104 - protein, 61 aa, Zea mays
  Clone ID: MRT4577_69637C.1.pep
FPMCPLFFQNFCSPKNLLLFSCFPLFSLPLPLKVDNGCLFLPLLIFFSPPKCNCTGPPVLV

SEQ ID NO: 336105 - protein, 83 aa, Zea mays
  Clone ID: MRT4577_69638C.1.pep
MGFVLVVSLPFIFLSILLGFGCYFLGKHMGREEMRTEINGGDRVEQQWDYGTNFGKEKEEDNREQSRPADGSTFLTQQFRRLL

SEQ ID NO: 336106 - protein, 145 aa, Zea mays
  Clone ID: MRT4577_69639C.1.pep
MVVYSKITKDALFECVNYVVEKSQEKKRNFVETVELQVGLKNYDPQRDKRFSGTVKLRNIPRPRFTVCILGDQQHCDEAAANNLPFKSAEDLKKLNKNKKLIKKLAKKYDAFLASESLIKQIPRLLGPGFDKAGKFPTLLTHSET

SEQ ID NO: 336107 - protein, 128 aa, Zea mays
  Clone ID: MRT4577_6963C.1.pep
MGSSSVLLFPSSSSAAPSAPPFLSPLSCHRHRLLPLLIAAAALLQPPASSFLARPRPHPLHPPARRFEVIFVSPTGEEIKSKRQLTQYLKAHPGGPASSEFDWGTSDTPRRSARLSEKVKATESPEGE

SEQ ID NO: 336108 - protein, 54 aa, Zea mays
  Clone ID: MRT4577_69640C.1.pep
FLFFFFFFFFFFFFLNPGILIAAKQNGPVQTVVCSISLESQADQGKAKPIVAAP

SEQ ID NO: 336109 - protein, 194 aa, Zea mays
  unsure (1)..(194): unsure at all Xaa locations
  Clone ID: MRT4577_69641C.1.pep
MIQMQMAVNFLNSVMGFTTMTLYKALAQKDMPLHFWCLKDANVSQLKNMCKLLGEKDAXPGTISDLTKGDIPRLHVTNQSLQQQHTIHHMXSMMEQEAWHPQHXVGLPERMHGICLVIVICAQVGILDVKLVIALTGPAGYGGGAWWALTGPPGGACGSAMAAGSWCLGQSTAMAHVGDEVLGPEKSLVPRFDA

SEQ ID NO: 336110 - protein, 204 aa, Zea mays
  unsure (1)..(204): unsure at all Xaa locations
  Clone ID: MRT4577_69642C.1.pep
QFLCLERTLNVQNDDNHPNLSQHLGEKPNRRPSYMKSLKAQENVKDNISMKYYDXDPTKAVIYNRSNYLNLRSDIVSARTXNSAKSAGLPFGSGPLGDRLKGLGRFDCNRPKIDDMNEYHGSPRDLPVDYGGDKSATPAEVQTSFIMTGFKRNGGRIFGLXSTSSIMERSSTWLRHGVSLRMRLVKDRYYEPVLLLGSDSADIC

SEQ ID NO: 336111 - protein, 892 aa, Zea mays
  unsure (1)..(892): unsure at all Xaa locations
  Clone ID: MRT4577_69643C.1.pep
SIWLADAWATRCERGKELRRAIRHEGATQETDVAFDGLLLNKSPRLPPFPSPSRKNRPGARCAAQGGRDGFRASACEIRWWRLQRRPAAAPTRDAEAEAEAEXKDALFVELWKACAGPLSSVPLLGEKVYYFPQGHIEQVEASTNHLAEHQGTPLYNLPWKIPCKLMNMELKAEPDTDEVYAQLTLLPDKKQDENTSARVENEEAEEEVVPHVPPATSEGLRIHSFCKTLTASDTSTHGGFSVLRRHADECLPPLDMSQHPPNQELVAKDLHGVEWRFRHIFRGQPRRHLLQSGWSVFVSAKRLVAGDAFIFLRGENGELRVGVRRALRHQTTIPSSVISSHSMHLGVLATAWHAVNTGSMFTVYYKPRTSPAEFVVSRARYCESLKRNYSIGMRFRMRFEGEEAAEQRFTGTIVGICVSDPSGWADSKWRSLKVRWDEASSVPRPERVSPWQIEPAVSPSPVNPLPVRFKRSRSSVNASPSDVSTVNREVASKVMVDSQQNNLPRALHNQGRTQLTGRYRDSTDVKTAQDLTMWSSGTEQQRNNIAAQTKRCLEGWTQSRTPEGYNQLFSAFQPLKDAHNPLRPFPNKISGTRSSTWVTADARYPAQQANHNMLHGTLSFMPHSSGFRMIQQNNLVMPEAANFTGKSAFTSLQGHVTDQCSTGWFGPIESNSHTDHASSSLIRSQPLVIGNDVQKTKGTSFKLFGIPLGSPEKSEPLVSPPSVAYDGKLQTSPTDNNEPCSEATQNIQNKVPSSSTRSCKKVHKQGSALGRSIDLTKFACYDELIAELDQMFDFDGELKSPCRNWLVVYTDNEGDMMLVGDDPWNEFCDMVHKIFIYTREEVERMNPGALNSRLEDCLSDSLGRGLASKEPRSGPSTSAVDSENRANLSSQ

SEQ ID NO: 336112 - protein, 200 aa, Zea mays
  unsure (1)..(200): unsure at all Xaa locations
  Clone ID: MRT4577_69644C.1.pep
APSPQIARVPARCAAQGGRDGFRASACEIRWWRLSSVPLLGEKVYYFPQGHIEQVEASTNHLAEHQGTPLYNLPWKIPCKLMNMELKAEPDTDEVYAQLTLLPDKKQDENTSARVENEXQRRRVVPHVPPATSEEGLRIHSFCKTLTASDTSTHXGGFSVLRRHADECLPPLDMGQHPPNQEXLVAKDLHGXRWRFRHIF

SEQ ID NO: 336113 - protein, 78 aa, Zea mays
  Clone ID: MRT4577_69645C.1.pep
RRIMLAGDDPWNEFCHMVHKILIYTREEVERMNPGALNSRLEDCLSDSLGRGVASKEPRSGPSTSAVDSENRANLSSQ

SEQ ID NO: 336114 - protein, 59 aa, Zea mays
  Clone ID: MRT4577_69646C.1.pep
KKKKKKKKKKKKKKKKKKKKKKKKKKKKKNLLFTTTMARIQYKWKKKGAELVLGGRKNE

SEQ ID NO: 336115 - protein, 716 aa, Zea mays
  unsure (1)..(716): unsure at all Xaa locations
  Clone ID: MRT4577_69647C.1.pep
MAAAACAGAEAGRGCGGKDALFVELWKACAGPLSCVPPLGEKVYYLPQGHIEQVEASTNQLAEQQGTPLYNLPWKIPCKLMNIELKVEPDTDEVYAQLTLLPDKKQDENTSTTVEEEEVVVPPXRYQXNEGPHIHSFCKTLTASDTSTHGGFSVLRRHADECLPPLDMSQHPPNQELVAKDLHGAEWRFRHIFRGQPRRHLLQSGWSVFVSAKRLVAGDAFIFLRGENGELRVGVRRALRHQTTIPSSVISSHNMHLGVLATAWHAVNTDSMFTVYYKPRTSPAEFVVSRDRYYESLKRNYSIGMRFKMRFEGEEAAEQRFTGTIVGIGASDPSGWADSKWRSLKVRWDEPSSISRPERVSPWQIEPSVSPCHVNPLPVRFKRSRSSVNALPSDVSTVTREVTSKVMADSQQNSLTRALHNQGRTQLTVRYHDNSDVKTTQDLTVWSSGTEQQRNNIAAQTKLCLEGWTPTRSPEGYNQIFSAFKPLKDIHNPLGPFPSQISGTHSNSWDTADARYPVQQANYSMLPGTWSLRPHNSGFRMNQQNYLVMPEGANFTGKSAFTSLQDHGTDKCSTGCFGHIESSSHTDHASSSLIRPQPLVLGNGVQKSKGTSFKLFGIPLGSPEKSEPLVSPPSVAYDGKLQTSPSEKGNQLDVVEVDNCSHPSKTVKPLDGPQSDSITENNQPSPEATLNIQNKVQSSSTRSCKKVHHMLHLFPC

SEQ ID NO: 336116 - protein, 298 aa, Zea mays
  Clone ID: MRT4577_69648C.1.pep
VLGGRTALRLRPGGARRALDAVVVARASSEAETAEAGGGGGGAEEERPYEEYEVTIEKPYGLKFTKGRDGGTYVEAIQPGAAADLTGQFEVGDKVLATSSVFGEEIWPAAGYGQTMYCIRQRIGPLYMKMERRFGKWDGAGDLTEKEIIRFERNSGVVSGRVREIQLQNYQRKMEQKMQREEDLRMGLKLYKDGKYEEALEKFESVLGSKPEPSEAAIASYNVACSYSKLGRVEAALSALEDALKSGYEDFKAVRTDPDLANLRKSEEFEPLLKNYDESFINENAINAIKSLFGLGNK

SEQ ID NO: 336117 - protein, 66 aa, Zea mays
  Clone ID: MRT4577_69649C.1.pep
GPKLFANGCAKEEYPLGKGPLATNGVTSGGQKAPNLAPPRQRGQARFIKAIPWTRGPPLLNKPHRV

SEQ ID NO: 336118 - protein, 112 aa, Zea mays
  Clone ID: MRT4577_6964C.1.pep
PAFASPPPSNRFRSSTPSPPTRLSGERAALLAGANHHHACPLRGQKAQHKGLLLGGEEGKVATFSLSRSIGAVLFRRALLLQSRPPLTLLQRRLPRGERGSSLRSGKVLRRP

SEQ ID NO: 336119 - protein, 131 aa, Zea mays
  Clone ID: MRT4577_69650C.1.pep
WIIPQLVSEGGRAEPMGYLNLRQVILRLQRYAPLSQRCGGVEGAGACTGGAFTLRWQEWLDLVDPGVLVIWVLVKLQGIVSLVIPRAMLRARLRWERAAVSCGEVGASCHQSMYVHLSVQPSLFSHLYVHL

SEQ ID NO: 336120 - protein, 124 aa, Zea mays
  unsure (1)..(124): unsure at all Xaa locations
  Clone ID: MRT4577_69651C.1.pep
MAAGGADQRGNNAATTTFVVPAVALSLGKPMPRVGFGTATATLGQAEGRAGVTEAILRALDAGYRHFDTAAVYNTEASLGDAVVEAVRXAGTVASRDDLYVTSKLWITDAHPGRVLPAFHRTLE

SEQ ID NO: 336121 - protein, 126 aa, Zea mays
  Clone ID: MRT4577_69652C.1.pep
KGCKKEAANVSPTPQAPNHRKARSCDAGAGTGPGPARLDGSVAVAVVKQSDDPLSDFRRSMVNMIVENRIATCDELRDLLRHFLALNAPHHHDAILRAFTEIWDEAFSAKTARGPPESVATRKTTP

SEQ ID NO: 336122 - protein, 76 aa, Zea mays
  Clone ID: MRT4577_69653C.1.pep
KGQSWWSFPVVPPTRFSLKGFPLRTLPHFRAPAFSMAMFFWVAPPPFFAFFTHCCVGSLIKTPPLLPWGNGVYVMF

SEQ ID NO: 336123 - protein, 58 aa, Zea mays
  Clone ID: MRT4577_69654C.1.pep
NLLLRMGRDTGLTMLAIHRKFLALRKIIFHVSLYGMAFHEYSMSNIDCQDKSPLLIII

SEQ ID NO: 336124 - protein, 35 aa, Zea mays
  Clone ID: MRT4577_69655C.1.pep
VSAASSRLASSRALRKAAQRELSSQCVLHPLFQIG

SEQ ID NO: 336125 - protein, 78 aa, Zea mays
  Clone ID: MRT4577_69656C.1.pep
DNGTGDYYDVESKRTVGLTDPYYVVRCYVRKFVMPGNVANNGYPKVYITLITLTRETEETGGTDVLTTVTIISLLPEM

SEQ ID NO: 336126 - protein, 68 aa, Zea mays
  unsure (1)..(68): unsure at all Xaa locations
  Clone ID: MRT4577_69657C.1.pep
MEXFVKNLTGKSIILXVRSTDNIDHVKDMIQEKEGIPPDXKDLIFXGKXVEDGRILDDYNLHKESILH

SEQ ID NO: 336127 - protein, 110 aa, Zea mays
  Clone ID: MRT4577_69658C.1.pep
GSGNKSRRSGPSSSCPPSPSKFKAGFRGPSSPSKQKMRVLSQGTNRECWPCPLQSDLGVNGGGPKSPILLQMTGPFFGGFCCREPGGFFPLFSLGLPAPAPVICFLNTPT

SEQ ID NO: 336128 - protein, 146 aa, Zea mays
  unsure (1)..(146): unsure at all Xaa locations
  Clone ID: MRT4577_69659C.1.pep
MAPSKAVVAHLVVLLVPLLSLLPFSSHALTQDLCVANMLLPDTPSGYPCKPKGLVSSDDFYSDALARPGPLIAPFNTSLASATVKQLPGLNGLGIAAXRVDVQPGGVVPMHTHPEASELICVLEGTLSAGFISAETNKAYVKSLKK

SEQ ID NO: 336129 - protein, 74 aa, Zea mays
  Clone ID: MRT4577_6965C.1.pep
KKPRNSTPPLSMGSSPSPLGFPPISLVNFPSYYKTVASPKLGSMSKVVHSFSCGFPPNGHISINFGCIVLGTGN

SEQ ID NO: 336130 - protein, 33 aa, Zea mays
  Clone ID: MRT4577_69660C.1.pep
YWIHMIFTSRSQSTILSNVRTPKVETNPIIIVR

SEQ ID NO: 336131 - protein, 108 aa, Zea mays
  unsure (1)..(108): unsure at all Xaa locations
  Clone ID: MRT4577_69661C.1.pep
QNSKVCVLCNLNAVAMHGITSHALVWIAXEIRTKVXEVAYPLESCGVGXRVSLVGGSGEALPSCSGQSMAWDXLPVELHRXGEGVAYKRDVPFLAWGVVCKVNTILNG

SEQ ID NO: 336132 - protein, 104 aa, Zea mays
  Clone ID: MRT4577_69662C.1.pep
ELALFVEHVDRDDDGIITFEEWIDHLSLYPDDATMENICHHWERVCLVNIGVLADAPDGIINPGGAIQCKPAGSIASATSTTVSAPIERHNLNMLALTDWLDSF

SEQ ID NO: 336133 - protein, 253 aa, Zea mays
  Clone ID: MRT4577_69663C.1.pep
MDAAGGDQLSLAAVRDALVRLEDSVVFALIERARHPRNAPAYAPAATAGEHSLVEFFVREAEALNAKAGHYQKPEDVPFFPQDLPSPLFPTKPSPKVLHPFASLVTVNDAIWKMYFDELLPLFTVDGDDGSYAQTVALDLACLQVLSQRIHIGKYVAEVKFKDAPQEYSRLIKEKDSNSLMDMLTFKAVEEKVKKRVEKKARTFGQNVTLDDNATAGDSECKVDPKVLSKLYDQWVMPLTKDVEVEYLLRRLD

SEQ ID NO: 336134 - protein, 79 aa, Zea mays
  unsure (1)..(79): unsure at all Xaa locations
  Clone ID: MRT4577_69664C.1.pep
GPRTTPASTRSLVIRLPCQLSLIHLLRQPRXLLVFNTNKPIHLYPTTHHLPSNAHTNKRAQRTYYQLQADAPSKNIEVT

SEQ ID NO: 336135 - protein, 158 aa, Zea mays
  unsure (1)..(158): unsure at all Xaa locations
  Clone ID: MRT4577_69665C.1.pep
RGGKGLYLLGPVLHRPPNFCFPSPTPPRLFFPRFFYFPRCVAPKGGDAPQCFKFPKSFRSLCPGXWVFPWTDPPENGPFPGPFFSPNAKKVFPPVVVPAFLPWERAPSSLFWGPPQNKNPLLALRIPCCSSPRSFFAPPPPQGPRFPFFFSRSEIFSF

SEQ ID NO: 336136 - protein, 188 aa, Zea mays
  unsure (1)..(188): unsure at all Xaa locations
  Clone ID: MRT4577_69666C.1.pep
MAGSEEHELESEGDAGGANSDPQEGGTVRKNGFIXIDNRPCKGGEVSTSETGSGGHGRCHFVGIDIFKRRKLGHIVPSAHNWDIPHGDRTGDQVSGRSGDGFVERLTSDGNTKDELALPSERRLGGHIEEGVERGKDRAVSGEAXWGEEQICALKDVGAQVTSLPWNSVSAKRWVRKKKGIKDCYGDV

SEQ ID NO: 336137 - protein, 96 aa, Zea mays
  unsure (1)..(96): unsure at all Xaa locations
  Clone ID: MRT4577_69667C.1.pep
AASLWVFFFCGGRWGLPPPRGAPXVXXWXINEKKVPFFSSSPLRRKEGXVGWRGARCARGARVAASVPCLVPAGGAVARRAAPACGVRVLSLATRK

SEQ ID NO: 336138 - protein, 38 aa, Zea mays
  Clone ID: MRT4577_69668C.1.pep
PYLTNHLYSLSRFFAWCKKVKKKKIKKVLATRACIFIF

SEQ ID NO: 336139 - protein, 116 aa, Zea mays
  Clone ID: MRT4577_69669C.1.pep
CHDEHSCKGIFRPFLHNPDVSVTSGGCTQGCLSPAPVNCPVTDTEAFACRCCARFQQSEGMLPAASELGSNVGWGPTDAGRAARFPEDLTYVCMYVCVYIYLYVCVCVCVSLSLMN

SEQ ID NO: 336140 - protein, 82 aa, Zea mays
  Clone ID: MRT4577_6966C.1.pep
CWLFCFLHCDIKDHWAHHRTSTNICAQPFPPQKPNPALSSTIHKPRRTWHVQLLFLAKSPPRAPRLNPPPMPIVGPPGAFLP

SEQ ID NO: 336141 - protein, 70 aa, Zea mays
  Clone ID: MRT4577_69670C.1.pep
IQTLAQCSMNSRTMASPMPLAPPVTRIHVPFQSLTQGGEARPGARAGHRLYLGACASSALRWSRNPSAHC

SEQ ID NO: 336142 - protein, 154 aa, Zea mays
  unsure (1)..(154): unsure at all Xaa locations
  Clone ID: MRT4577_69671C.1.pep
RIWEYVQERAERGALIGVVCXPAGITNCESNELTXTEGMRTDNQGACDLTRTGQDKNATPHQSMRAHYTANKLDLHGLDVIGVDKANTNACLLGEYFRSRNMTTRDIACAKTIDRDLKCKEVPTSLGFETXCKIYSAMIGNVMTDARSTGKYYH

SEQ ID NO: 336143 - protein, 60 aa, Zea mays
  Clone ID: MRT4577_69672C.1.pep
VPPSARTFIKLLVGGVHQTAHQQHPPDQAHEPHLGNAGEATTGRGRGGASAAAMGTCPVQ

SEQ ID NO: 336144 - protein, 48 aa, Zea mays
  Clone ID: MRT4577_69673C.1.pep
LVKNGINSCCGGPKKKSIYILHKSGGNMLCSTYNISVNNEKYICTFKL

SEQ ID NO: 336145 - protein, 121 aa, Zea mays
  unsure (1)..(121): unsure at all Xaa locations
  Clone ID: MRT4577_69674C.1.pep
HTEETRGADGXHATIDRWYRARVEAEIFRICTAILTVVXRGSRRGGRPATRTARTLNRNGYYHSYISVFKTGDKRKDSEDSRLTGYQVRQDMEVKXELPPTHHIRLRLVLXYYVVYYQQLS

SEQ ID NO: 336146 - protein, 74 aa, Zea mays
  Clone ID: MRT4577_69675C.1.pep
NLINQNLREGVFYSTGYPFTIYTYPYPLGILIFVYLYKHITNPIHSLSLYSCYLQIILLQNNVFPQVLNLNIHH

SEQ ID NO: 336147 - protein, 99 aa, Zea mays
  unsure (1)..(99): unsure at all Xaa locations
  Clone ID: MRT4577_69676C.1.pep
LAGAPTMRDPLLILXALARYKAILYPIKMKQHKGXRRLRVPPYHEGLLELTHLLQSITYRHHIDKLLEEGLEHDNTHAHRSYRQTLNVGLTETTEHVQS

SEQ ID NO: 336148 - protein, 98 aa, Zea mays
  unsure (1)..(98): unsure at all Xaa locations
  Clone ID: MRT4577_69677C.1.pep
MGVLGKGFKVLNKGSSKHHRKVLLDNIQVITKPAIRKLAMRDVVKRIFELIYKETXAVLKIFLENVILDSVTYTDHSLSKTCTFIDFVYSLKPQGLTL

SEQ ID NO: 336149 - protein, 226 aa, Zea mays
  unsure (1)..(226): unsure at all Xaa locations
  Clone ID: MRT4577_69678C.1.pep
MGSSRNVPHKVMQDEITPLLPIKAEEDAVHEFDGASFSGAVFNLSTTIVGAGIMALPASIKMLGLIPGILMIILVALLTETSIDMLVRCSHQGKITSYGWLMGDTFGQWGRIALQASVVINNVGVLIVYMIIIGDVLSGTSSTGVHHSGVLEGWFGPHMWNSRPIVLLATTLLVFAPLVSFKRLDSLRYTSALSVALAVXVFVVITAGVAIVRLIQXXVEIPXLFL

SEQ ID NO: 336150 - protein, 51 aa, Zea mays
  unsure (1)..(51): unsure at all Xaa locations
  Clone ID: MRT4577_69679C.1.pep
RCWLERKPWWQGPWVDGATLVIQSSRSQFTVIVPQXLFSYKESSHLTKVLT

SEQ ID NO: 336151 - protein, 102 aa, Zea mays
  Clone ID: MRT4577_6967C.1.pep
TPPRLPHPGLPLASRLPAPIPPAPHPTLGCSLCGLGLVHGERFASFFGYKECRDVHPPPPSTTPDGMAWGAPGGALPDPLAHASPARTWGLGHEDRPKIPTK

SEQ ID NO: 336152 - protein, 44 aa, Zea mays
  Clone ID: MRT4577_69680C.1.pep
TILTTSCPQSPKALMVTESAFRLSVGPFFLQPMPWFKYRMSSCP

SEQ ID NO: 336153 - protein, 42 aa, Zea mays
  Clone ID: MRT4577_69681C.1.pep
LFSLPDTHHLATKITNAGIVTNFDFPTYFPERRPFHEDPLLH

SEQ ID NO: 336154 - protein, 69 aa, Zea mays
  Clone ID: MRT4577_69682C.1.pep
IRCMCKGRIPSPFRTVNIRYVIISQSLMSPSVKRLYLRVDGACLVRTAFIYEYSMPCAVMNSLIVLPRS

SEQ ID NO: 336155 - protein, 182 aa, Zea mays
  Clone ID: MRT4577_69683C.1.pep
MAGKSKGGKNKGKAQVVGHSASAEPEVLATDGAELVNPDNGEVSEPGEVSDPPATEDGVADVEKGDGDAPEVVQSAKKPAEGELHLYPVPVRTQSGEKLELQLSPGDSVIDVKQFLLDAPETCFYTCYDLILHTEDGSAHQLEDYNEISEIADITSGGCSLEMVASLYDENNYFWHPPQTCF

SEQ ID NO: 336156 - protein, 105 aa, Zea mays
  Clone ID: MRT4577_69684C.1.pep
HRPETDNAVHRGRQTRPDQPEQKCALSAWLYGAIVERLHRWMKHDHNPTRDVVAAYDIRAFPRRHVHATNDVHGDHTCGSTKQRAPDYHAIDWSAFSNSTSDCVY

SEQ ID NO: 336157 - protein, 62 aa, Zea mays
  Clone ID: MRT4577_69685C.1.pep
KNLGEQIKEVADLLGTLPCSLNRNHVTLISLHRNHGWQPPKSCFISALNMSCSPQYKTYLVS

SEQ ID NO: 336158 - protein, 201 aa, Zea mays
  Clone ID: MRT4577_69686C.1.pep
AEASAAAEYGGENQGGKNKGKAQGAGQSASAEPEVPATDGAEVVNPENGEVNEPPVTEDGVKNVEKGDGDALEVVQPARKPAEGELHLYAVPVRTQSGEKLELQLSPGDSVIDVKQFLLDAPETCFYTCYNLILHTEDGSAHQLEDYNEISEIADITSSGCSLEMVAAIYDERSIRSHLRRVRELLSLSSLYVSLSTSLAL

SEQ ID NO: 336159 - protein, 104 aa, Zea mays
  unsure (1)..(104): unsure at all Xaa locations
  Clone ID: MRT4577_69687C.1.pep
ILXQSKLQELFGCESVPISXLSXMRGHHFIKKTXQILINXSMGGVWXXXPNITTWGALQNGQRRLCVSSIXXIMNGVPGISXYLRGACTXLSVXXTAGWCWVXX

SEQ ID NO: 336160 - protein, 231 aa, Zea mays
  unsure (1)..(231): unsure at all Xaa locations
  Clone ID: MRT4577_69688C.1.pep
MSYAYLFKYIIIGDTGVGKSCLLLQFTDKRFQPVHDLTIGVEFGARMITIDNKPIKLQIWDTAGQESFRSITRSYYRGAAGALLVYDITRRETFNHLASWLEDARQHANANMTIMLVGNKCDLSHRRAVSFEEGEQFAKENGLIFMEASAKTAQNVEEGFVKTAGAIYKKIQDGVFDVSNESYGIKXLCSSYPSCGVFDVSNESYGIKVGYVVPGQSGGAGSSSQGGGXCS

SEQ ID NO: 336161 - protein, 90 aa, Zea mays
  Clone ID: MRT4577_69689C.1.pep
TTASTAQMETMLSKASHLFRMSSQFTLSVSTWSLVLCPISYHHMPQLLEFSREDGDGVALGGELASHPLAQRGIRADPDGDSPRGVGAGY

SEQ ID NO: 336162 - protein, 72 aa, Zea mays
  Clone ID: MRT4577_6968C.1.pep
ILIISPIAILISHLFCLSRVRHRFYLSGLFLDFRDVRNIVVPKIGASGDYLKFIARANTNSEARPTLMILFR

SEQ ID NO: 336163 - protein, 72 aa, Zea mays
  Clone ID: MRT4577_69690C.1.pep
AVVTTQSTFFFFFFFFFVTIQLFFNTLQQLFVPLTHHGNYNQTAYDAKGPLIRSRVPLHLVPKKERERKKNR

SEQ ID NO: 336164 - protein, 128 aa, Zea mays
  unsure (1)..(128): unsure at all Xaa locations
  Clone ID: MRT4577_69691C.1.pep
MESFSDADRYIPQEIIGRGSYGVVCSAIDRRTGEKVAIKKIGGVFDDLSDAARTLREIKLLRLLRHPCIVEIKHGMLPSARRDYKDIYVXFELMEGDLHQVIKANXLTTEHHQYFLYQMLRALKYMPA

SEQ ID NO: 336165 - protein, 194 aa, Zea mays
  Clone ID: MRT4577_69692C.1.pep
MAIKKVFARSVYDSRGNPTVEVDVVTETGLHRAIVPSGASTGQHEACELRDGDKSKWNGKGVTKAVENVNTVIAPALIEKNLDVKDQSAVDAFLKSCNALLLKVNQIGTLTESIQAAKDSYADGWGVMVSHRSGETEDVTIADIAVGLRAGEIKTGAPARSERLAKLNQILRIEEELGDQAIYPGKDFRKSVNL

SEQ ID NO: 336166 - protein, 90 aa, Zea mays
  Clone ID: MRT4577_69693C.1.pep
CECLCSSACFALIRVGYVILNSLHLRSLFYGHPSHFLGEYSLVSIDSDFQQWRVVCRSLWPRILCVNVLQRLFSFVVLCLSEHSPRALSM

SEQ ID NO: 336167 - protein, 54 aa, Zea mays
  Clone ID: MRT4577_69694C.1.pep
YHLSQYKIPTILPCNVSPYKKYHACSCIESREPNFLRRYLRDKRVESSEILVRF

SEQ ID NO: 336168 - protein, 82 aa, Zea mays
  unsure (1)..(82): unsure at all Xaa locations
  Clone ID: MRT4577_69695C.1.pep
VYMPCLCCYNDVNKYLPGPHHXSSSKEKLRSMMEDYNGNLTRLLDREAFERFILKLTGNSLRLIRAKILITLVAATWLTIAS

SEQ ID NO: 336169 - protein, 200 aa, Zea mays
  Clone ID: MRT4577_69696C.1.pep
QRMKQAAAAAAAAQQALLLQQQSQPPLFPVHHPHPGLLAAPQIEPIVSGNLPPGFDSSTCRSVYVGNIHLQVTDAVLQEVFQSIGPVEGCKLIRKEKSSFGFIDYHDRRYAALAILSLNGRQLYGQPIKVNWAYTSTPREGTSGHFNIFVGDLCPEVTDATLFAFFSGYSTCSDASVMWDQKTGRSRGFGFVSFRNQQIR

SEQ ID NO: 336170 - protein, 146 aa, Zea mays
  Clone ID: MRT4577_69697C.1.pep
MEQKARRRRVPAFGEWNYNYYGSSAELATPAAPAELEARSDVWFKYSPPPRKPPPPPAASRKVRRPAADRSACGGSGKRPRAATPARASDAVVPSSSSVPRTPAKSAAGAARARVVRRVDADLYQVPPPDLLHDEDLPPRRKKASN

SEQ ID NO: 336171 - protein, 450 aa, Zea mays
  Clone ID: MRT4577_69698C.1.pep
MHHQQRMKQAAAAAAAAQQQQLMQQALLLQQQQQSQAQPPLFPGHHPHPGLLAAPQIEPIVSGNLPPGFDSSTCRSVYVGNIHLQVTDTVLQEVFQSIGPVEGCKLIRKEKSSFGFIDYYDRRYAALAILSLNGRQLYGQPIKVNWAYTSTPREDTSGHFNIFVGDLCPEVTDATLFAFFSGYSTCSDARVMWDQKTGRSRGFGFVSFRNQQDAQSAINDLNGKWLGNRQIRCNWATKGANAGEEKQILDTKVDLSNGSSESGKENPNEDGPENNPQFTTVYVGNLPHEATMNDVHLFFHSLGAGSIEEVRVTRDKGFGFVRYSTHEEAALAIQMGNGQLIGGRQIKCSWGSKPTPQGTASLPLPPPALAPFSTGVSATDLLAYQRLALSKMASNHPALMGQHALKQVAALGIGGGASQSIYDGGFQGINTATGTTSVQQQQQQQQLMYY

SEQ ID NO: 336172 - protein, 135 aa, Zea mays
  Clone ID: MRT4577_69699C.1.pep
QEDVGTWQWCWCTSIPSSAACIWPAAGERGVARRGYTAITFDIRGAPRGVRRSRAPPRPDVVAVYRCVAENIRPRDILLVGSSSGAPIAGPAVDIQCVWLEASNGPESSEPKTAFGYRHGFISSIIHSFRSKTKI

SEQ ID NO: 336173 - protein, 70 aa, Zea mays
  Clone ID: MRT4577_6969C.1.pep
LGVLNSSQCNIKFNLSLQKWSNQILSDCQFFDQWKYQIMFLFNLNICFIVSQTCIMIVEKYSVYLFCENI

SEQ ID NO: 336174 - protein, 218 aa, Zea mays
  Clone ID: MRT4577_696C.1.pep
KKTGHSPKKSPLLDRTEQRITWHPPFRFSSRPRACSTATAHPASSASRIGGSSSPPPTTRPLVGSWPPDRLVAAVAYLYPFLDGAHHGRFLLTQFPFFGALLRPLAPAARLFHSSPLTPFLLFLTLYFAVVRNQQAFSRFVRFNAMQAVVLDVLLIFPDLLAQSFAPSGGVGFEIFQSMESTVFLFLLVSLVYGGGACLLGKTPRLPIVADAAERQVM

SEQ ID NO: 336175 - protein, 63 aa, Zea mays
  Clone ID: MRT4577_69700C.1.pep
SKKSAVGTRSHAAGTADTLVDSCAFPVRFNVRKQSIIVRCAQYPGNGHLVACLVFRDKMLFLP

SEQ ID NO: 336176 - protein, 124 aa, Zea mays
  Clone ID: MRT4577_69701C.1.pep
DQNRLACLERMADKLNPSLEPRGASSTGCRELPAVVPAPPRRPGVYTTHARTDEVPFVVVVVAAAARSKTRKRMPLQGRAAPFHTSLARADSDVSVRLLLLLLLLLLFLLARAHTHLTERVGQP

SEQ ID NO: 336177 - protein, 27 aa, Zea mays
  Clone ID: MRT4577_69702C.1.pep
LNKAQLFISPARTSVTVTRERNAWTDE

SEQ ID NO: 336178 - protein, 90 aa, Zea mays
  Clone ID: MRT4577_69703C.1.pep
VLGFFFLLGKKNTPLLINSKPTKFNSSNNFPTILNFHITISYPFYSKTLSKAPFLLWPLGGKTNNSFHSTTPPRFIKNAHPFFFPPPNFF

SEQ ID NO: 336179 - protein, 71 aa, Zea mays
  Clone ID: MRT4577_69704C.1.pep
LCHMQDLLRFVTILKLHQAQCTMGDHQILHQGIVQAGLGRLGYLITILPQDILWSLQFPMQLELEVCNMLC

SEQ ID NO: 336180 - protein, 101 aa, Zea mays
  Clone ID: MRT4577_69705C.1.pep
FSRASQHISLTESASYSSTTNRRYSVLYVRAGISLYICSPNFVRTLDRKAIFLTVSNIWTLTSSSAQNPNIQRIQRRSSRAAFFFFFLFFFFFFYFFSGRP

SEQ ID NO: 336181 - protein, 77 aa, Zea mays
  unsure (1)..(77): unsure at all Xaa locations
  Clone ID: MRT4577_69706C.1.pep
LAFSMTSLADPLSVILRVIRTTSATIXPFTLYLFLTLMDIDWMLYGLITKDPYITLQNVGIFLFGCMQMVLYCCYRK

SEQ ID NO: 336182 - protein, 48 aa, Zea mays
  unsure (1)..(48): unsure at all Xaa locations
  Clone ID: MRT4577_69707C.1.pep
LKFTGNTLSSPLRTTLICGHSYEVSPHVQREYXIAEPSRQWVYSSLAQ

SEQ ID NO: 336183 - protein, 70 aa, Zea mays
  Clone ID: MRT4577_69708C.1.pep
GSCGHNCTQRQYILKYFAKTIHTNLCAVAFFLDLCFLVCPVCFNKKVVDAPDFTFNPRAVAFKIQKVLSK

SEQ ID NO: 336184 - protein, 154 aa, Zea mays
  unsure (1)..(154): unsure at all Xaa locations
  Clone ID: MRT4577_69709C.1.pep
RIPGSAGVSAPYYPTPAPARAPVSKMSLTVRASLRKATRTVVVAMAGSALLAGRAMAYEVLMGARDGGLVFKPTLFTLKGGDTITFKNNAGLPHNLLLHQEXVSSGVDSTKIWQVEYLNAPCETYSLTLTVPXTYRLYCEPNKGSRMVRKITFN

SEQ ID NO: 336185 - protein, 46 aa, Zea mays
  Clone ID: MRT4577_6970C.1.pep
RGFKQKPTVSPITITMFRDPVSMECTFSSVPRQSNSLSRTSWLKGV

SEQ ID NO: 336186 - protein, 148 aa, Zea mays
  Clone ID: MRT4577_69710C.1.pep
RGSTQASTHTSATRPGKLQLNNGLSGLAAQKTSGKPDLFAYYKEKELSFAGSDKVANSEENKPNGAVKHMQNLDLPAQQKNDKNDCDRKAEEFSSALEDESSKSPTHTVPKPPRYPLLPVTSHDRSMLRKVPTLVQPSSKLADEKNTL

SEQ ID NO: 336187 - protein, 59 aa, Zea mays
  Clone ID: MRT4577_69711C.1.pep
QPTIANSGETTRNAADGSPAWTIYNSNSFFPSTNLRIAKPALPGCGPTGRRTSRCSGGS

SEQ ID NO: 336188 - protein, 84 aa, Zea mays
  unsure (1)..(84): unsure at all Xaa locations
  Clone ID: MRT4577_69712C.1.pep
ICDVLGNRTSVSCSALGISWGAPNSAGDLLRRRPLILLRTAACFGLLSATAAPAPQTEPRGRLSDPIIHPLSPPCAYRNSIXIH

SEQ ID NO: 336189 - protein, 64 aa, Zea mays
  Clone ID: MRT4577_69713C.1.pep
PRVRKKKIKKKKKKKKKKKKEKKKKKEKKKIKKKKKKKKKKKKKGLPFQRFKLYFPFLPTFKFF

SEQ ID NO: 336190 - protein, 197 aa, Zea mays
  Clone ID: MRT4577_69714C.1.pep
MGVKCGVVVWCLLLAGLLLLAVASAAERDTEKEKEEEIRLCKKVCDCKAGEDTGKARECKEQCERRRHGHELLQEDGDSFDSCVSQCRGHGGWWGKERWDRCRRICRQSQEGEGGDDDFDEGHNADDDFDEGHNADDRCERMCQRYHDRREKKQCLKGCRYGESGLLVFYDGHEHGDRCPTQCKRFRPVSYDQHYCI

SEQ ID NO: 336191 - protein, 79 aa, Zea mays
  unsure (1)..(79): unsure at all Xaa locations
  Clone ID: MRT4577_69715C.1.pep
MRIISFSSALLSSRKSEVLDGRPRAEKXPAVEEGVRRKKPSEKAAPAEKAPAGKKPKAEKRLPAGKSAGKEGGDKKGRK

SEQ ID NO: 336192 - protein, 143 aa, Zea mays
  Clone ID: MRT4577_69716C.1.pep
MTNGYLFREYLGAQSTGVRFSDVPVNPGVSFHYILAFAIDYTPVAQQPTPAPTNGVFSAFWDTANLSRADVAAIKAAHPNVSVMAGLGGDSVLDIVKVSFAPASVDSWVANAVASLSRLINEYGLDGVDVDYERFAAGVSVDT

SEQ ID NO: 336193 - protein, 215 aa, Zea mays
  unsure (1)..(215): unsure at all Xaa locations
  Clone ID: MRT4577_69717C.1.pep
LAGARRSCTGTSSGRSGGRPRPXRSISQLVKTNGRRAFLVDTLALVRKLESQGVPTKQAEAITSAITEVLNDSLESISESFVSKAEMQKSEMLQESNISKFKSQVQSSQENHFSLLQRETEKLRGDIDKMRSELKYEIDKVTAGQRLDLNLERGRIRDELAKQNEETTELTTKLDKEIHSLKAQLEAAKYDVIKYCIGTIVSISAVGLAVLRIVM

SEQ ID NO: 336194 - protein, 256 aa, Zea mays
  unsure (1)..(256): unsure at all Xaa locations
  Clone ID: MRT4577_69718C.1.pep
WVPRGRPGTTLFSTICPAQIPTSFPSPVSMDSMDSPRDSSCQPETPPSSFEASPEFDSTQYSAAVLCDLQCQSNSAASLRTIWTYLSLFNLLHQSMRSLSSWKTSSTSTSSQSAAQPPAHQWNPLLAWWILLQSMSLGQPSSTTALPQALMAFLTALMQSSMTCRVPLAQLRLATRPSQRDHFSIDAIMRPIKSASGQAGSADGCRGSRLMKSPTSIQTGRRNGVQIGRIERSVLERQNLGRGFTWRXTGSVACGA

SEQ ID NO: 336195 - protein, 79 aa, Zea mays
  Clone ID: MRT4577_69719C.1.pep
TKTIPWFLLPPPQKYNIKWGPRAWQMFIFCQQKGGYPLFTFGGGGCKLVGVTYRGHVYGLKYSLVNPMPGTLGATFYRA

SEQ ID NO: 336196 - protein, 415 aa, Zea mays
  unsure (1)..(415): unsure at all Xaa locations
  Clone ID: MRT4577_6971C.1.pep
MNESSAAASSYLLLTLIIHLLPFVSAHDFLSAGSSLSVEHSSDVLHSQDGTFTCGFYRISPNASTFSIWFSGSSERTVVWSANPPHPVYTWGSKVELDADGSMVLKDYNGQIVWTNNASVSDAGHVQARLLGTGNLAVEGRGGAILWRSFDSPTDTLLPTQRITASTKLVSTNRLLVPGHYSFRFDDQYLLSLFDDEKNISFIYWPNPRMTIWAKGRVQFNSTMXGALDTLGHFLASDNATFTAADWGPGIMRRLTLDYDGNLRLYSLNVADRTWSVTWMAFPQLCNVHGLCGENGTCVYTPVPACACAPGFEVIDPSERSKGCRPKTNISCDVEKVDFAKLPHTDFLGYDMTAHHSVSLDFCKKECLHDCNCKGFAYWEGIGDCYPKSVLVGGVTLQNFASTGTMYIKIPNGLQ

SEQ ID NO: 336197 - protein, 200 aa, Zea mays
  Clone ID: MRT4577_69720C.1.pep
MPKPWRPVLASATKCCAAEDAAVAPDGLARCRPQQSELSRRLASFRRLSSLANSPVSATATTVADKDGGSVKQAACGEMAGPLQLHSFGLGELRGVTHDFSSNFLLGEGGFGAVYKGFVDAGMRPGLDAQPVAVKQLNAAGFQGHREWLAEVILLGQFRHPHLVRLLGYCCEDEERLLVYEFMPRGSLENHLFRSSRCPS

SEQ ID NO: 336198 - protein, 322 aa, Zea mays
  Clone ID: MRT4577_69721C.1.pep
PEPRSSRLSRRTTATSSAPSWSSRPDHDIPVQWRWAVSSSLLQSASLSVAVHFWDLHARRASQSFIAFGDILELHKKFLELSGGINRIFELEEFTRFAQRNTVVSPNAINAASEETISFHEVDIVTPSQKLLARKLSCDVVQGKSLLLTGPNGSGKSSIFRVLRDLWPTFSGRVTKPSEGMFHVPQRPYTSLGTLRDQIIYPLSREEAKIKVLSLHRSGNNSSASMLLDDHLKTILENVRLMYLLEREGWDSTPNWEDVLSLGEQQRLGMARLFFHHPKFGILDECPNATSVDAVRPFLPRYCSLLRPGSLFIFGICIKDEI

SEQ ID NO: 336199 - protein, 231 aa, Zea mays
  Clone ID: MRT4577_69722C.1.pep
MALRPHPAPHSPSARRDVELEERLARIRGEISHPAKHLNDTVIVSQFKIFCKSDFERIFKEVFEDLSDKNTGILDINSRHVATLMVYNVGSMTCFNVEKVQYKNVMFTVWDVGGQEKLRPLWRHYFNNTDGLIYVVDSLDRERIGKAKAEFHVCRLSAIINDPLMLNSVILVFANKQDMVRQQYVVWETSCLLSNKLAYMGRILISVISKTSDADEMLMRCEWLTSASGGA

SEQ ID NO: 336200 - protein, 181 aa, Zea mays
  Clone ID: MRT4577_69723C.1.pep
MTKAWRPMLASATKCCAAEDAAVAPDGLARCRPQQSELSRRLASFRRLSSLANSPASAAGTDKDGGSVKQAGEMAGPLQLHSFGLGELRGVTHDFASSFLLGEGGFGAVYKGFVDAGMRPGLAAQPVAVKQLNAAGFQGHREWLAEVIFLGQFRHSHLVRLLGYCCEDEERLLVYEFMPRG

SEQ ID NO: 336201 - protein, 67 aa, Zea mays
  Clone ID: MRT4577_69724C.1.pep
GSEQYFLIINLSDAISVSRTFVGSISAACERWRTDRSPTLQQTVAPGFTSSPQNSSASTRWRPAEPY

SEQ ID NO: 336202 - protein, 101 aa, Zea mays
  Clone ID: MRT4577_69725C.1.pep
MTINPTYLAQRTRTSVNWADAKARVRKSYREWLRASPEIQTMYSLNVPVSAIRTKIRQQFEKHRYVSQINVVDVLLYKSHAEFQETLNYWKQLSHVMKYFR

SEQ ID NO: 336203 - protein, 157 aa, Zea mays
  Clone ID: MRT4577_69726C.1.pep
NCTKTACQFTLSCNLGSIGKYSLQSILWNRSAYDIDPISVTQSCLVSIPPKSSEDLFFSSTISAVACVLVIICKNKAAISCSGILLGSRLAQKLQVLLHDVAGKPVKPVSHPLSRCRSSALNASVRLWQGMQTQLVMLFPAAFIAWEDIVCLPIQAG

SEQ ID NO: 336204 - protein, 130 aa, Zea mays
  unsure (1)..(130): unsure at all Xaa locations
  Clone ID: MRT4577_69727C.1.pep
CLTWIASSIGVIPDFTKSWIMFQEISTXMLLDPKVFRDTIDLFVXRHKDTMITAVAGDKLXGFIFETPITLDIVAKIVSLRKSKKMPXEEISEKYALXYVTDQIQMHVGAVQVNYRALVVXELIATGATL

SEQ ID NO: 336205 - protein, 38 aa, Zea mays
  Clone ID: MRT4577_69728C.1.pep
REPHPSTTRENKVAANEKSGLAARCRSPNLSYELSTGA

SEQ ID NO: 336206 - protein, 84 aa, Zea mays
  Clone ID: MRT4577_69729C.1.pep
FSFFLSLFFLPKQNSLFISKHAKANPGGFTSRNYKTSFTGEGGTKPNTTLFLTLQLDHPPELRPVIPKFKGVFTFFWDHHPWVF

SEQ ID NO: 336207 - protein, 46 aa, Zea mays
  Clone ID: MRT4577_6972C.1.pep
NRELFKRRGANHQRPMSDPRGRQQGFNINWFGRRSSRGAALILKGV

SEQ ID NO: 336208 - protein, 308 aa, Zea mays
  Clone ID: MRT4577_69731C.1.pep
MSVRPSERADARRNRYKVTVDADEGRRRREDNMVEIRKNRREESLLKKRREGLQAQAPIPAAGVEKKLESLPAMVGGVYSEDNNLQLEATTQFRKLLSIERSPPIEEVIQSGVVPRFVQFLTREDFPQLQFEAAWALTNIASGTSENTKVVIDHGAVPIFVKLLASGSDDVREQAVWALGNVAGDSPKCRDLVLANGALMPLLAQLNEHAKLSMLRNATWTLSNFCRGKPQPAFDQTKPALPALARLIHSNDEEVLTDACWALSYLSDGTNDKIQSVIDAGVCPRLVELLLHPSPSVLIPALRTVGNI

SEQ ID NO: 336209 - protein, 227 aa, Zea mays
  Clone ID: MRT4577_69732C.1.pep
MDEENVVELLQRYRRDRQVLLNYILSGNLIKKVAMPPGAISLDDVDIDQVSVDYVLNCAKKGEPLDLGDAIRLFHDSLDYPYVNNTGAVDEFYLLTKPEYSGPAPTREPPPIPATAPSSVVVPPPDVEPAPIIVSSPVTATNLPKSQPFDSPTEKELTIDDIEDFEDDEDEFDGRRASRRHQTDASDLSLLLPLFETGITDNDLRETAYEILVAAAGASGGLIVPQK

SEQ ID NO: 336210 - protein, 72 aa, Zea mays
  Clone ID: MRT4577_69733C.1.pep
VCVHRAVNPGIHVLCATRFVSVRLLDEYDVPCKHWVRFGCSATWVNNKPRRRWSAGRRKQSSSARESVPGPG

SEQ ID NO: 336211 - protein, 97 aa, Zea mays
  Clone ID: MRT4577_69734C.1.pep
QQFTQARYRRTGAEHRLTKRHCQWLTTTTWTTALRRRSRRSQTVMDLTEAVYRSTYSMRNSQRSTLPDAPGSTTTTSTMVNTTVTGSYSARTRSLRT

SEQ ID NO: 336212 - protein, 43 aa, Zea mays
  Clone ID: MRT4577_69735C.1.pep
LEKTNLNLPFNISPTNMTEIQMTLPAGGLSTGRNLLEESLWTH

SEQ ID NO: 336213 - protein, 132 aa, Zea mays
  unsure (1)..(132): unsure at all Xaa locations
  Clone ID: MRT4577_69736C.1.pep
MHPPIERDSIQDTRVRSPRLPMDKESVTPSPAPAAAAAKKAYCFNIHNCNAVSLCAWYIVXNNCAFXRNHIMDLCVDCHRDTRPSATXSEESTVAWAICNHAFHFHXIMRWIXTPSVCPHDNSEWXLPKYGH

SEQ ID NO: 336214 - protein, 96 aa, Zea mays
  Clone ID: MRT4577_69737C.1.pep
QSHTGTCYGHDSLQLGLEPESNSIVRQCYDSSPKRGIVRGSQFQIKFLYIEIFVSVYPHIELSRHFLFLVSYNQVRGMTNIHSVYHYDNKTSLSNR

SEQ ID NO: 336215 - protein, 89 aa, Zea mays
  Clone ID: MRT4577_69738C.1.pep
APAVSLRVADSAGPAVAVRSGGSKPVAPLRLRAKKSSGGHENSHNSVDEALLLKRKSEEVLFYLNGRCIYLVGPSSSSYVTIAIENSDF

SEQ ID NO: 336216 - protein, 88 aa, Zea mays
  unsure (1)..(88): unsure at all Xaa locations
  Clone ID: MRT4577_69739C.1.pep
PKGGVKKWWHHLRTQAAARAATMKSWEXADEEHQXASNMITPXEVYTSGHKRSETNTDRMKXEXAKRERHTLKENGRQAVRNEQNVDK

SEQ ID NO: 336217 - protein, 68 aa, Zea mays
  Clone ID: MRT4577_6973C.1.pep
VMCHFRVATRGILGVLGTSPPTITNLWYTLEELHHLRPYLPSLTVTNKNPDMYYDAWPPITHALYHQS

SEQ ID NO: 336218 - protein, 101 aa, Zea mays
  unsure (1)..(101): unsure at all Xaa locations
  Clone ID: MRT4577_69740C.1.pep
GVRTGAPHPGARRGIXRXGPRSSRGRGTRSPSVRRAAGRRDTGSSSFSCGGTVAGNRGAALPLSSTPARSGRAASAAWASTPTGSELAKELMAEDGGELER

SEQ ID NO: 336219 - protein, 71 aa, Zea mays
  Clone ID: MRT4577_69741C.1.pep
FRPQNILIDDCPGLIEWCDEQELYYHAPKTANISDIIRAKPCGMAYFQSFEQICLDICPEQGSELVLSPDT

SEQ ID NO: 336220 - protein, 107 aa, Zea mays
  unsure (1)..(107): unsure at all Xaa locations
  Clone ID: MRT4577_69742C.1.pep
QPARAPATRRDPPPPPRRTRRNRARPTRHAASAPGGKGDRRGPPQKKNSPPPPQARRGEKEGTRQGAPRHDEEKRRPGEETKETRKKSKDAARTRTKAXTPPTARPR

SEQ ID NO: 336221 - protein, 66 aa, Zea mays
  Clone ID: MRT4577_69743C.1.pep
KKKEPPSTNKGPARFHTKPSFRYERTCSGPAPGGPLLSPSPIARLVGVSPTLAVGHRPKRLVTRRG

SEQ ID NO: 336222 - protein, 127 aa, Zea mays
  unsure (1)..(127): unsure at all Xaa locations
  Clone ID: MRT4577_69744C.1.pep
HSAKQSRRXAYGGKAPNKELXTKACRKXAPTRGXGRQKPERVRHXTXVPLHQIPNDQKKTEPITRKLSFHRLAXRIXQDLKTXDVYLQSHARLXYSRVAEXYFVCLLEDTKLLAIHAKRXVTIMPKD

SEQ ID NO: 336223 - protein, 104 aa, Zea mays
  unsure (1)..(104): unsure at all Xaa locations
  Clone ID: MRT4577_69745C.1.pep
PSAIVPQFLPPVTSMGFXEHPTVQAYRRQLALAASAVQQPIAQLRQQSLAHLTLQTIATQQQQLFLPPLSHLAVVNRVAXGHKQXRAXXPLALKENPPPTTPPL

SEQ ID NO: 336224 - protein, 133 aa, Zea mays
  Clone ID: MRT4577_69746C.1.pep
YGIGITFLFLFYHCLWQIRASNRNNHSPKPPQKPGKRLRTGGANSPLATRGNSPQRRKPGAQPPPLYFTGEKPPKTTRTPGLCIAPTRPATGAGAEHTLLERGGDQSQGPHGAKRTTGRKKHPDGGKKPPGAR

SEQ ID NO: 336225 - protein, 89 aa, Zea mays
  Clone ID: MRT4577_69747C.1.pep
MKGLAAALLVLVCTMALCSCAQVGTNKELCCLVYTSWQIPQKFIVDYSETSPQCPKPGVILLTKRGRQICADPNKKWVQKYISDLKLNA

SEQ ID NO: 336226 - protein, 91 aa, Zea mays
  Clone ID: MRT4577_69748C.1.pep
RMNNYHRGSWGFFNANALFTATGHKQRIENHIVSRRLYLAYLLHEQDSSLLVGGFLRSFNSQHWTLRPQLLPHAPLFGRRQQAQRALSQRL

SEQ ID NO: 336227 - protein, 89 aa, Zea mays
  Clone ID: MRT4577_69749C.1.pep
RRDPSGYPTSQAAASQALDAHTTNHMVYESIPSISLFPMWLLPLEAYGLYCSCIAPAHNKHTWPGQAIYFSSVATLLAALPVGKELVFS

SEQ ID NO: 336228 - protein, 139 aa, Zea mays
  unsure (1)..(139): unsure at all Xaa locations
  Clone ID: MRT4577_6974C.1.pep
MVTSTTAAAVLSPPCVDELRLVPSPRERVEFRAERPQRSXATRAXLNPSLAISLSTGVXFFLGRFIFFNFHXENEVNHENDQNENTDFDVVYKRNKEFSSLLXHNDLGSFNIAYVLGWGSLFHIVVYDMLVTSSIDTSP

SEQ ID NO: 336229 - protein, 89 aa, Zea mays
  Clone ID: MRT4577_69750C.1.pep
HGTGSHLFSHILLIVCSSVNSKDLWCIFYLMADRQPMAGYANNVDLDPIFMSRVPIQVLVEPSSLMLSDMSARNITVYILITSILSSRL

SEQ ID NO: 336230 - protein, 101 aa, Zea mays
  Clone ID: MRT4577_69751C.1.pep
MNSMHFPVGRIHRHLKDSAQAGERVGATAAVYAAAVLEYLTAEIMELAGNACRDLKVKRITPRHLQLAVRGDEELDTLIKATIAGGGVIPHIHRELIDKAA

SEQ ID NO: 336231 - protein, 50 aa, Zea mays
  unsure (1)..(50): unsure at all Xaa locations
  Clone ID: MRT4577_69752C.1.pep
SETDKFLCILNYSFPXXSSTSDYIQSPVRFTLLSEQVASFPSVPLKTAYF

SEQ ID NO: 336232 - protein, 212 aa, Zea mays
  unsure (1)..(212): unsure at all Xaa locations
  Clone ID: MRT4577_69753C.1.pep
MSVVGFDLGNXESCIVAVARQRGIDVVLNEESKRETPAIVCFGDKQRFIGTAGAASSTMNPRNSISQIKRLLGRKFSDPEVQSDIASFPFRVSEGPDGFPLVHVRFLGEERTFTPTQLLAMVLSNLKSIAEGNLKTAVVDCCIGIPVYFTDLQRRAVLDAATIAGLRTMRLFHETTATALAYAIYNTDLPENDHLNXAFVDVGHATMQVTFV

SEQ ID NO: 336233 - protein, 108 aa, Zea mays
  Clone ID: MRT4577_69754C.1.pep
ALKLVCSEGDDGIASGRFSQELPMQTTAVYDATGMEAERVLISEIFGSTPLFTRGADSDSFRKQSSSGPLMTGKNRKFWQRLRSLSRGSMSEHGISPDYETRSQYSGR

SEQ ID NO: 336234 - protein, 136 aa, Zea mays
  unsure (1)..(136): unsure at all Xaa locations
  Clone ID: MRT4577_69755C.1.pep
FMKDHLDRPRRYFRFVYCNDVXPRVPYEGAALLFKQFGLCLYLDSFYRAAAMAEEPNKNFFSPLFLAPKYANAAWELLRGFLIGHVCGAVYAEGWVMRAARAVGLLIPGLPPHSPQDYVNATRLGAASLEPLLRDQ

SEQ ID NO: 336235 - protein, 258 aa, Zea mays
  unsure (1)..(258): unsure at all Xaa locations
  Clone ID: MRT4577_69756C.1.pep
MSLAPDPADGGAGTGTGDDWFLDCGILDDLPAAACGAFPWDASPSSSNPSVEVGSYVNTNDVFKEPNDVFKEPGSNKRLRSGCNDVHVPTSKASREKMRRNKLNDRFLELGSTLEPGKPVKADKAAILSDATRMVIQLRSEAQQLKETNGSLEEKIKELKAEKDELRDEKQKLKLEKESLEHQMKLMTSTPTYMPHPTLMPAPFPQAPLAPFHAQGQAAGQKLMMPFVSYPGYPMWQFXMPPSEVDTSKNSEACPPVA

SEQ ID NO: 336236 - protein, 346 aa, Zea mays
  unsure (1)..(346): unsure at all Xaa locations
  Clone ID: MRT4577_69757C.1.pep
MDNDETFSPVVKFATYIRFATYLASIGFVEAKSDTSFFIYQRGKDIVCLLLYVDDIVLTAFTVDLLQRTITTLQRKFTMKDLGPLHHFLGITAERQPQGLFLHQRQYAIKILKWAGMSDCKPCSTPVDTKTKLSEDDGLPITDTVSYWSLTGALQYLAFSRSDIAYVVQQILLYLRGSLDYDLLLRPSSTSELVVYTDVDWAGCPDTCRSTSGYVVFLSANLVSWAAKRQPVVYHPSAEVKYRAGSNGVVEASSMRQLLNELYSPLQRATLVYYDNVNAVYLSTNPVQHPRMKHVEINLHFARERVXTDDVRVLSVPTTLQFADXFTKGLSSSVFLDFQFSLNTCT

SEQ ID NO: 336237 - protein, 114 aa, Zea mays
  Clone ID: MRT4577_69758C.1.pep
TGGTKRGPRRAKRKNGAPGQEPKKCPRGKGKAPKTALGNPAPKYNPGHHGRTRHFKKPRKNKNPLKSLLPGHLQKTQASGTRGRVKTFGALGKVSGVLKGSSRALLGLGNPPHP

SEQ ID NO: 336238 - protein, 83 aa, Zea mays
  unsure (1)..(83): unsure at all Xaa locations
  Clone ID: MRT4577_69759C.1.pep
FTFRTDLLLWAVIISIVGWVINKLYQXLYLTSKYFFTVSILRCFHNLFFFYHHFAXKDIATIFFFLFSMGHPNFLSTLHYNKL

SEQ ID NO: 336239 - protein, 60 aa, Zea mays
  Clone ID: MRT4577_6975C.1.pep
VPLSRFLGFFGGQGLKTQKKKGKKKGNFFGSQKKKKKKKKKKKKKKKKKKKKKKKKNIKN

SEQ ID NO: 336240 - protein, 175 aa, Zea mays
  unsure (1)..(175): unsure at all Xaa locations
  Clone ID: MRT4577_69760C.1.pep
HTRLYFRSRPAITKTFSLPITIYPHHFLRQITDIMRIFAKTLTDKTITLEVESSDTIDNVKSKIQDKEGIPPPQHRLIFAGKQLEDGRTLSDYNIQKESTLHLDLRLRGGMQIFVKTLTGKTITLEVESSDTIDNLKXKIQDKEVIPPDQHRLIFAGKQLEDGRTLADYNIQKES

SEQ ID NO: 336241 - protein, 62 aa, Zea mays
  unsure (1)..(62): unsure at all Xaa locations
  Clone ID: MRT4577_69761C.1.pep
FDSTRGNINAFLQQQQLXPFYPQNAANIVAFLQQQQLLPFSQHGLTNPTPLLQPPPIGGAFF

SEQ ID NO: 336242 - protein, 69 aa, Zea mays
  Clone ID: MRT4577_69762C.1.pep
RRWVAPKWIPSSLKCSSCRNRVGHRLPSSRVSSPGSLDCAIGQVTAPPQGKILKFIWSQLVKVQSALLR

SEQ ID NO: 336243 - protein, 137 aa, Zea mays
  Clone ID: MRT4577_69763C.1.pep
GGNQKKGGPLQKEPTPEPTLGKKRQKLFPEEKGSPIKNPKKKKPGSQKGKTRGAKRGGPPKLIGWPKPPAFQLEKRAPHPHKKNGQPPGKGGFGIGPFSPSQVNKSVGPEIRVERGEKIYPKGGKRVSTKKGATREK

SEQ ID NO: 336244 - protein, 73 aa, Zea mays
  unsure (1)..(73): unsure at all Xaa locations
  Clone ID: MRT4577_69764C.1.pep
MGLVKEGIHMEEGTLESGMEYRTVSGDAGPLVIXDKAKGPKVQEIVNIPLGDGTNRRGQVLEADGDKADVQVF

SEQ ID NO: 336245 - protein, 77 aa, Zea mays
  unsure (1)..(77): unsure at all Xaa locations
  Clone ID: MRT4577_69765C.1.pep
FFYSKKCMVTGTXFLGGAFPLFYFLTGSFMRSSFPFCGGFHSFVLFFVISVFCVDSFFPFSISSSTFLFSVGLYMCF

SEQ ID NO: 336246 - protein, 37 aa, Zea mays
  Clone ID: MRT4577_69766C.1.pep
PRVRPLILIHVDRHILTLIMEHYMSEDLTSFISHDLR

SEQ ID NO: 336247 - protein, 49 aa, Zea mays
  Clone ID: MRT4577_69767C.1.pep
TKSSCSNKNESFLIKLQSLLVITNSGIQLKHVKSIKYHGLDGICPCIKE

SEQ ID NO: 336248 - protein, 85 aa, Zea mays
  Clone ID: MRT4577_69768C.1.pep
GEWGQLEGQPRLKTGKMAHITGPSLRRRKTPLTPMGPRTGWAAEQAARTKTPPPPPTSSAKITGALPPGAGRPHGSANGRRKCLR

SEQ ID NO: 336249 - protein, 60 aa, Zea mays
  Clone ID: MRT4577_69769C.1.pep
DGGLSYLTKNCPSSVGGIAARRPDPSLVLRSELRRLDQQVPVAPGRRVHSSHLGEYGADS

SEQ ID NO: 336250 - protein, 52 aa, Zea mays
  Clone ID: MRT4577_6976C.1.pep
ILRDFLQSRRALVITWFPSVQSSQAKYYNNHFRMVITPQWHLFRQPEKLKMR

SEQ ID NO: 336251 - protein, 82 aa, Zea mays
  Clone ID: MRT4577_69770C.1.pep
AENADGRRSESEAAPALARGASPGRTCRTPSASSPSQALCRRPSNRHRRHQTARATTWVPSPSPPLNRTKANRHRMRLSWLR

SEQ ID NO: 336252 - protein, 47 aa, Zea mays
  unsure (1)..(47): unsure at all Xaa locations
  Clone ID: MRT4577_69771C.1.pep
FFFXYSSVLVGYPYLTIFKTLRTLQFTGQNSALSDHMSEVLDTVFRL

SEQ ID NO: 336253 - protein, 53 aa, Zea mays
  Clone ID: MRT4577_69772C.1.pep
QCFVSQYIRIRITCHPCNSSLRGRSQNPHEVLSGGSWCIILDSSGPTVISHNI

SEQ ID NO: 336254 - protein, 55 aa, Zea mays
  unsure (1)..(55): unsure at all Xaa locations
  Clone ID: MRT4577_69773C.1.pep
MFDLGIQIPTVFDPFPEANARDSVAKAWSKDNLHVRIHKRFGRKTLSTSXGLKKE

SEQ ID NO: 336255 - protein, 37 aa, Zea mays
  Clone ID: MRT4577_69774C.1.pep
SRSRAASRELELVSRSRAGALYYQMLAALAFHLLARL

SEQ ID NO: 336256 - protein, 72 aa, Zea mays
  unsure (1)..(72): unsure at all Xaa locations
  Clone ID: MRT4577_69775C.1.pep
NPKXRAGKAVCXDGATEPPAKHTNGTXQCRSKKLEWTPGGTTKAREWLHTAQRRDRRSQVPCEPNPAYAXKR

SEQ ID NO: 336257 - protein, 48 aa, Zea mays
  Clone ID: MRT4577_69776C.1.pep
LIQIVFIYFIKKDIILDCSSNFNQKYNKGFHVTVHLAENSAHELFYSK

SEQ ID NO: 336258 - protein, 101 aa, Zea mays
  Clone ID: MRT4577_69777C.1.pep
QAKGGSNSRKNRGGFIGGGGGTNFGAPQPNGGGGFPFNQKDFPRGNSFLKRGFFGGGAPIGGAGGGGPKAFRATGQCPPGGGGENPKARRPFGENPKFPWS

SEQ ID NO: 336259 - protein, 165 aa, Zea mays
  unsure (1)..(165): unsure at all Xaa locations
  Clone ID: MRT4577_69778C.1.pep
DHDVLSDALWSDNVGLNEKNGAGKDLQRGLVASNSKGEPGKEADKFTSPGILMKHPGXIGNGYGPEVDCHTSHIGVKSAVLITKIYTGSGKEIEKEPKALKNAEAGMGKMLPTKPMVGRTFSQYPPLGKGAVGDMRQTDAVAGITRVEKKEPPXAKVTKAAAKKK

SEQ ID NO: 336260 - protein, 81 aa, Zea mays
  Clone ID: MRT4577_69779C.1.pep
HHNKCFMTSLCDKKGEPKSFKGEFCRQVISPRMLLGVECWLPKRRQCPSIKCSRDTYVVLVLWAQEGIESERRIFRCDTRI

SEQ ID NO: 336261 - protein, 200 aa, Zea mays
  Clone ID: MRT4577_6977C.1.pep
MMFQGTKGITLLQPSLRGQSERQQGFFTRPPAQGFFTTAARRGRTTAGFPTPCSRPGNGSFRGSAAWTWSWRRDEGALHKTWPLQTLWAGAGGLARPVVDASSGGGQTSCFQFQFQPGEREPIPVFPKPAAFVAVQEVEDGRAAPADAASDCSICLERCGAGGGLTQLRCGHVFHSACLQRWLRSRADCPYCRATVRARS

SEQ ID NO: 336262 - protein, 113 aa, Zea mays
  Clone ID: MRT4577_69780C.1.pep
ILTGRQRARTRRETMACRLRHQREQRRAATTCCDGDRHRACIAATSPPTAASSARTTTRASTTPTISMAGTRSTMRTSDRSDLLIEMPRMKLRPTQLSHTLLPTRPIIGGDGY

SEQ ID NO: 336263 - protein, 102 aa, Zea mays
  Clone ID: MRT4577_69781C.1.pep
VRFADSPCTTSTNGKAQATEDYLVDRGLIWGMEDSSTKLKEVPTWERVLKSTDPNRDQESDRDESDDEDDDCKVLIQQIVERTKQGSPVLVNAQKLLFSVDQ

SEQ ID NO: 336264 - protein, 53 aa, Zea mays
  Clone ID: MRT4577_69782C.1.pep
YISGRQFICNKLIQRKFALTKMVSSAKRNWRGTFRRLQDFLVIVNRHEIQSMW

SEQ ID NO: 336265 - protein, 138 aa, Zea mays
  Clone ID: MRT4577_69783C.1.pep
RTSARTDPVPDRPTGRVNSVLSKLDHARVDCDEGASSTISLSTGTEAASASVSRRASEAVGPPNPASTTTSAATVVALPPMLFVKVVATVALSVSTAARVDCDEGASSTISSSTGSVVDVRVSPCPGRSARAEFLQPG

SEQ ID NO: 336266 - protein, 47 aa, Zea mays
  Clone ID: MRT4577_69784C.1.pep
TKLELGSARYNLLFGLMGRSKDGLSFLARPGHSRGERQADYDMSSVI

SEQ ID NO: 336267 - protein, 58 aa, Zea mays
  Clone ID: MRT4577_69785C.1.pep
FYLRRLCCLSTIRELPQTERVAAMRPLRRRITRQTPMSHVQSAGLATPTSTADARRKR

SEQ ID NO: 336268 - protein, 78 aa, Zea mays
  Clone ID: MRT4577_69786C.1.pep
CFISEFALIHLLLGYTFYFGIQSNVLFASASSAVVIWIQAVKGRQRFLCNMQFFSVILDILTVCYTIKQIRSCLIYIN

SEQ ID NO: 336269 - protein, 78 aa, Zea mays
  Clone ID: MRT4577_69787C.1.pep
SPCLAMRPARPQLSMELALASAPCSAWLLCAPSPRSSLRALSRGTRARPPARRNSSPLLDPARAPLMTDAARLPVGTS

SEQ ID NO: 336270 - protein, 74 aa, Zea mays
  Clone ID: MRT4577_69788C.1.pep
FELPPGLPGQINTPFFQINFGGNPLGPGNIGGWQKKTKPRLDGRRDKDVLAQIFFAPVTKRGRDGVHPFQIFYW

SEQ ID NO: 336271 - protein, 254 aa, Zea mays
  Clone ID: MRT4577_69789C.1.pep
RKLGIRLEREPSAFPKQIISRTGGSKTNVNATKDGTTQDRAKLNGDARLFVDIQPVSAAQVKESARHVKNESREQIPFSGPLSVSSSSGFAWARRPQEDRSFARSRTRSSSRGQFPADAVQGCNTQAKENAGLRELHSRDIPVSVSHVGSRVRDRGPHDAAKRAVLKKWSQLERPDSFDSCDTYHSHNFSNAMFLGGTLSSKNGFKLQGGHNQEEKVEYSGPLLSQSHKVDELLQKNERHIRQAVRTSWFRRAV

SEQ ID NO: 336272 - protein, 181 aa, Zea mays
  Clone ID: MRT4577_6978C.1.pep
FPSIHLHLRTKLGSSLATESSCRSMMFQGTKGITLLQPSLRGQSERQQGFFTRPPAQGFFTTAARRTTAGFPTPCSRPGNGSFRGSAAWTWSWRDEGPCALTKLLLAARNLATHSSIYIYACCVCSRPLLAGTRHGRRRHSGLELEDSLAPSLTPLRAAVKPAASSSSSSPVNVNPSLCSP

SEQ ID NO: 336273 - protein, 130 aa, Zea mays
  Clone ID: MRT4577_69790C.1.pep
KKKKKKKKKKKKKKKKKKKKKKKKKKKKKKKFFLKKKKKKKFFSLPGGPFKGAFFEIFLPLGGLLTFLLGAPFPLLGGVFPFPGPGFSTFGLGKPLGFPILFPLKPFPFSPFGFFPKGPPPFPFPKISPP

SEQ ID NO: 336274 - protein, 38 aa, Zea mays
  Clone ID: MRT4577_69791C.1.pep
TLIFDYHTQHGIEIRIATIFNTYGPTMNIDNCRVASNF

SEQ ID NO: 336275 - protein, 112 aa, Zea mays
  Clone ID: MRT4577_69792C.1.pep
FLIFFFFFFFFRVVFFFFGFFFFFDFKFSTGFEIIMWAGHAIRPAFCLSKILGSKKRGIHTTGGAHPVLNRGGGPHFFLGFSGHVKQLPPGAEKPSLKVGCKKGAGLWKGER

SEQ ID NO: 336276 - protein, 52 aa, Zea mays
  Clone ID: MRT4577_69793C.1.pep
MAVTGTSVAAAATMLAAAAAIFITFVICFYLFLCAKRYRGARPTIGGDRARP

SEQ ID NO: 336277 - protein, 70 aa, Zea mays
  Clone ID: MRT4577_69794C.1.pep
NLLQKIDAALEDLSVESAVDLQKVLKTSTFTSRKDAFNTLLANIHLFQSRLGAMLFLISALLSRELVCVR

SEQ ID NO: 336278 - protein, 132 aa, Zea mays
  Clone ID: MRT4577_69795C.1.pep
NGTKEPLKWKVKFKIALGIAEGLLYLHEGCHRRIIHRDVKASNILLTEDYQPQISDFGLAKWLPDKLTHHVVYPIEGTFGEHLCVRVTRTWDFYDPGDDKKLLHSDLVLLDEEVHKAWLPPWLAAQYAHYVD

SEQ ID NO: 336279 - protein, 50 aa, Zea mays
  Clone ID: MRT4577_69796C.1.pep
DHELCVSVGSHESVAHVHLSHVTGVFGLVSGVALICMYLSLALHCVPAVV

SEQ ID NO: 336280 - protein, 98 aa, Zea mays
  unsure (1)..(98): unsure at all Xaa locations
  Clone ID: MRT4577_69797C.1.pep
DRKIIGAKWYIKGYEAEYGKMNTTDIYEFMSARDAVGHGTHTXSTXAGALVAGAXASRGLAGGVAGGGAPRARLAVYKVCWATGDCTSEIPRCFTTRY

SEQ ID NO: 336281 - protein, 65 aa, Zea mays
  Clone ID: MRT4577_69798C.1.pep
GCTYRRGHLKRYQVILLWIWLLRSFLGAAYLLLWRISSCPDHQGYDHPHLTLFSRHMVFLQGRLH

SEQ ID NO: 336282 - protein, 131 aa, Zea mays
  unsure (1)..(131): unsure at all Xaa locations
  Clone ID: MRT4577_69799C.1.pep
YVSXNSFRANCSPKNNKPGGAFQGVFVMINXAXIKKSTKLHLIKLLQLWRYPFPFCLQVTNLIINQMTPHHSYFIKSNNLLTLNFLSMYLLKLIESSIAHGQINSTSHNTKPQIILCLKYPMILKSKPILQ

SEQ ID NO: 336283 - protein, 60 aa, Zea mays
  Clone ID: MRT4577_6979C.1.pep
MAKFFLVVPPLLPPNVNPLEDLWEKRWDLWAKKKKKKKKKKKKKKKKKKKKKKKKKKKGP

SEQ ID NO: 336284 - protein, 76 aa, Zea mays
  Clone ID: MRT4577_697C.1.pep
MSCNCGSSCGCGSSCKCGKKYPDLEETSTAAQATVVLGVAPEKKAAPEFVEAAAESGEAAHACGCGSSCKCDPCNC

SEQ ID NO: 336285 - protein, 76 aa, Zea mays
  unsure (1)..(76): unsure at all Xaa locations
  Clone ID: MRT4577_69800C.1.pep
PXQXTLMPXTLDNNXXVTCRGLNSXSXXSRFTSCCTPKXSXSHXRRCTNLRXILVYCDADXSSKIPCXMQRCGQRL

SEQ ID NO: 336286 - protein, 62 aa, Zea mays
  Clone ID: MRT4577_69801C.1.pep
GGAVFAFGWLAGWFQFTIPFNPPTTRHKRKGRHTRHGTVALALKKVVALRARADFEHLAELT

SEQ ID NO: 336287 - protein, 124 aa, Zea mays
  Clone ID: MRT4577_69802C.1.pep
KRDTDLPSHHSGRSELRAGNAARGASTGCWRTMTSSAQQALVTPRSKQHRMSPAPRRRPARLQDRPRLTPAAATASPWKPPAGSSVPVLRGAEPADVAVPVPSSWSGRADRFGLAALGGARWPA

SEQ ID NO: 336288 - protein, 71 aa, Zea mays
  Clone ID: MRT4577_69803C.1.pep
MALKRFSRLGWTFDRAEANRMIDALSHCLNTFRNYKESWRGLEARGMAQDLSWDHAAVLYEDVLVKAKYQW

SEQ ID NO: 336289 - protein, 186 aa, Zea mays
  unsure (1)..(186): unsure at all Xaa locations
  Clone ID: MRT4577_69804C.1.pep
SNDRAGAAEGPRDRNKDGATXPXETHQGXRXTGGGXAXXXXXAAXXNXGXGPKTGRENEKXAXXKXXXXXKNXHRGKHGSXXGXXETNGRKXXEKXEEKXKKXAQTRXXAXTGKERQEKXKANREPKDXKGRXXGXTEXKXXXXXXKDKDGXXHKDTXRAXNXGSXXERGEQERNPKKEAKKKRRE

SEQ ID NO: 336290 - protein, 58 aa, Zea mays
  unsure (1)..(58): unsure at all Xaa locations
  Clone ID: MRT4577_69805C.1.pep
PPKAQGVFHXEXIMLGHXNPGGKKRYKPKFPEFPKGAGFSGFKAPYIYANAWAIEFFK

SEQ ID NO: 336291 - protein, 101 aa, Zea mays
  Clone ID: MRT4577_69806C.1.pep
WSGTTKWGPRSSSSTKRPDPFKRPGAPDSRTHYDGVGKEGYPLCRSDPYPAHVLARTFSLQGLYTTLRVVLCPLFVRKKGEKKGRPLRLHFSSRTTGDSGD

SEQ ID NO: 336292 - protein, 140 aa, Zea mays
  unsure (1)..(140): unsure at all Xaa locations
  Clone ID: MRT4577_69807C.1.pep
RASTARTGTDVNHRTRVNGLLRQFKRSENMELTQRRHSLLDCEGKEAPRYDRYSCHYINTACRIHKKLLXSQGVDSCLFQIIYTRRQRNGLRSPNXARARGAIKRNMLQHLQEMLIIDVDPNGGRLXITYHRRCDLDQDG

SEQ ID NO: 336293 - protein, 110 aa, Zea mays
  unsure (1)..(110): unsure at all Xaa locations
  Clone ID: MRT4577_69808C.1.pep
CDELIPEYLNFIRGVVDSEDLPLNISRDIVXQSKILKVIRKNIVKKCLELFSELSEDKENYKIFYEAFSKNLKLGIHEDSTNRRRLSELLRYHTSQSGDEMTSLSXYVSR

SEQ ID NO: 336294 - protein, 96 aa, Zea mays
  Clone ID: MRT4577_69809C.1.pep
GASLTIGVPPALEVIRQEAHSHSKYPQCTLASKNLVDGKIRKIPIIADLTGSIKNAHLKGNLALMRKIVLGFNGTRMGASLMDGLCEFLRRGCTCQ

SEQ ID NO: 336295 - protein, 135 aa, Zea mays
  unsure (1)..(135): unsure at all Xaa locations
  Clone ID: MRT4577_6980C.1.pep
GTLDVRPGIFPHQYPPLQVAITMGDQSGSRNGPQQKYVSGAQNAWDMFSDELSQKHITTGSGDLNDILGGGIHCKEVTEIGXQLAINVQIPVECGGLGGKAVYIDTEGSFMVERVYQIAEGCIRDILEHFPHSHE

SEQ ID NO: 336296 - protein, 161 aa, Zea mays
  Clone ID: MRT4577_69810C.1.pep
MAGAHLQRRVPTVVERLRTIFPYGRGGRTLISEGEGRRFGWDGASHNSRARMPRARGRGWHVRNVRRLLRQAGGMDGRGKGQGRDGAAAVARGRWRGRRRGWHVRRLLREARGPGRRGTIDKYHSCSILIGLRARFKGFGYIPSTGIQGWYACMHMYSIQM

SEQ ID NO: 336297 - protein, 122 aa, Zea mays
  Clone ID: MRT4577_69811C.1.pep
TDEWVLNYTLSFQYHSLLQILNCVAGLREYFSQTDEIHIIPRIHVMETMFDVDSKPKFHKLQEVETKENKNMGIIDEESDDDDDYQVPEANIETLTKTNIQEDPNTSDNDNKHTDEPPEKID

SEQ ID NO: 336298 - protein, 91 aa, Zea mays
  Clone ID: MRT4577_69812C.1.pep
LIVHVLGIGVSVGVTKPTESVLTGAKDGGGKADADVGMEQVKQALDMLMDGGADGEARKTKAKELKAKSKTALEHGGSSYMNLEKLIQFGA

SEQ ID NO: 336299 - protein, 104 aa, Zea mays
  Clone ID: MRT4577_69813C.1.pep
AGRAGNLPSSCHPPSPNRRLPVVRLESFDGRRRRFASGSFRTRCLRSTGRGSPSQARCGNLMGFRRYISLSAYPRPFFLHLRCLHISVFTLGLSTLFACCSLPR

SEQ ID NO: 336300 - protein, 100 aa, Zea mays
  Clone ID: MRT4577_69814C.1.pep
GGHPSGPVSRRCQWRWWCPTVPTAWSLSSSGQNPQYMSGSGTVPWGSGHCARSISRRTCKVRREGFITCRRVGHEEAHSHVILGNPWVQVARNRKSNVGD

SEQ ID NO: 336301 - protein, 45 aa, Zea mays
  Clone ID: MRT4577_69815C.1.pep
GPSGMLIRSSLGASCKWLVHPRLQQRDVSISMDYVYMDAVIPASI

SEQ ID NO: 336302 - protein, 271 aa, Zea mays
  unsure (1)..(271): unsure at all Xaa locations
  Clone ID: MRT4577_69816C.1.pep
TPTPSRHFLFLPVFFSHTAAAHAVLPLVLHGDQQGAQLLLAMALGTHVAGTAPFLPAPPLRRPASAESPSSWHSAAGRLSSHGCSKQLCSPPPHGASTSLHALCPFCLGELKLSHGVAEQQLPLPSPLLSSGRTDPQFERVSCRRPWRLAQGAPSLSNVAARELAPFLLFPSAAAGSPCLDSSHGIQVLCAAMPVQKQQPRIPSASRASLDLRSLDPRRRVGVWGTAHAASSICADRPSTRLTSPDLRSPIRDXVETRASRQLPFVAHACS

SEQ ID NO: 336303 - protein, 125 aa, Zea mays
  Clone ID: MRT4577_69817C.1.pep
ISFSSSMEVGIVPDNMATTDMPSSGILLTPAGAISLFSSGPPLQMPLHLASMDREARVLRYREKKKSRKFEKTIRYATRKTYAEARPRIKGRFAKRSSDMDVEVDQMFSAAALSSDGSYGTVPWF

SEQ ID NO: 336304 - protein, 72 aa, Zea mays
  Clone ID: MRT4577_69818C.1.pep
MALPAPSAPPQVTARRRCGVPGVRTGCFGDPEMKRRRRVAGYKAYAVGGKVKASLRRGLRWFKRKCSRILNI

SEQ ID NO: 336305 - protein, 49 aa, Zea mays
  Clone ID: MRT4577_69819C.1.pep
SCDEKPKVHMDAFGRSAHGHLIPPGGREVHTHSRGCSGAMVRTNTACLV

SEQ ID NO: 336306 - protein, 127 aa, Zea mays
  Clone ID: MRT4577_6981C.1.pep
EPGPPSIFFFFFFFFFFFCFFLFLFLFGGCFFFIFPWFAGASSCFMLNFFLAFYFFLFWETPHAHPHFLRPKKAKNTRKQGGGAFFSAPPPHQGGAGNPKQTPGETPAEGAKKKRPTPKGGGKQPPT

SEQ ID NO: 336307 - protein, 312 aa, Zea mays
  Clone ID: MRT4577_69820C.1.pep
MPKMDTGSTEWVEENRAMLTSRTVAYLNVDSAVAGHGFYASATPQLDELLKEASKQVRNPDNGTQSLYDLWMSSNSSPLIGRLGGGSSDYSAFVQHIGIPSVDMAIGSDYPVYHSLYDDFIWMEKFGDPLFQRHVAAASMWGLVALRLSDEEILPFNYSNYATELENGALGISERVQGMPVSLSPLHKSIKEFRKAVAKVDSELKALQTWKIWSPWRNNPLKVRDINDRLMMTERAFTDREGLSGRPWYKHLIYAPSLHNDYGAEVYPGIGDAIERVKKTNTSESLQSIQHEIYRVSRVINQAALVLSGGLT

SEQ ID NO: 336308 - protein, 71 aa, Zea mays
  unsure (1)..(71): unsure at all Xaa locations
  Clone ID: MRT4577_69821C.1.pep
FVXSAXXGSPXXAXGGGXGXXXASXLXXSXXXALXXAASXPXAAPPLPXPLAPSPXXXXLLPFXPGRASFX

SEQ ID NO: 336309 - protein, 127 aa, Zea mays
  Clone ID: MRT4577_69822C.1.pep
EHKGSILPYFGTKHYLKITFSSEVWWDRAISLSVYCCLDWFHVRWSDSKNEKICSFPKSSGQSRFRGRICCIPSDYGSKRYLNRWGTRCGFLFQFGPCKLCGAATRFSGRNDTYISSSCKFNLVISQ

SEQ ID NO: 336310 - protein, 364 aa, Zea mays
  Clone ID: MRT4577_69823C.1.pep
MASEPVARAVAEEVGRWGSMKQTGVTLRYMMEFGSRPTQRNLLLSAQFLHKELPIRFARRALELDSLPFGLSNKPAILKVRDWYLDSFRDIRYFPEVRSRNDELAFTQMINMVKVRHNNVVPTMALGVQQLKKELGRSRKVPFEFDEIDEFLDRPYMSRIGIRMLIGQHVALHDPKPEPGVIGLINTRLSPIQVAQAACEDARSVCLREYGSAPDINIYGDPNFTFPYVTLHLHLMLFELVKNSLRAVQERYMNSDKDVPPVRIIVADGEEDVTIKVSDEGGGIPRSGLPRIFTYLYSTAKNPPELDRPNTEGVTMAGYGFGLPISRLYARYFGGDLQIISMEGYGTDAYLHLSRLGDSEEPLP

SEQ ID NO: 336311 - protein, 364 aa, Zea mays
  Clone ID: MRT4577_69824C.1.pep
MASEPVARAVAEEVGRWGSMKQTGVTLRYMMEFGSRPTQRNLLLSAQFLHKELPIRFARRALELDSLPFGLSNKPAILKVRDWYMDSFRDIRYFPEVRSRNDELAFTQMINMVKVRHNNVVPTMALGVQQLKKELGRSRKVPFEFDEIDEFLDRFYMSRIGIRMLIGQHVALHDPKPEPGVIGLINTRLSPIQVAQAACEDARSVCLREYGSAPDINIYGDPNFTFPYVTLHLHLMLFELVKNSLRAVQERYMNSDKDVPPVRIIVADGEEDVTIKVSDEGGGIPRSGLPRIFTYLYSTAKNPPELDRPNTEGVTMAGYGFGLPISRLYARYFGGDLQIISMEGYGTDAYLHLSRLGDSEEPLP

SEQ ID NO: 336312 - protein, 49 aa, Zea mays
  Clone ID: MRT4577_69825C.1.pep
KKKKKKKKTLKIQKIKQLIKQYKIQQVSKITKRPPPIGLTNNCTTMNCK

SEQ ID NO: 336313 - protein, 88 aa, Zea mays
  Clone ID: MRT4577_69826C.1.pep
VPALPSSFFFFFFFFFFFFFFFFFFLFLEKGLVPLSDLKKEMGLPLRETKKGGPSFGKILSLKLMPNLFFTNQIPFRRGCGDRGPPAY

SEQ ID NO: 336314 - protein, 57 aa, Zea mays
  Clone ID: MRT4577_69827C.1.pep
VPYLDKLLADTPMGDFFVSRERIINHTYGRRRPVNCTNAFTILSHIRVSSVYHSSLM

SEQ ID NO: 336315 - protein, 223 aa, Zea mays
  Clone ID: MRT4577_69828C.1.pep
MAAALPDWMMLERFVFCRESLLDSEAAPFIKADGTSSHGGSFSVAFLVLQPPGISRLYLQWPGGPKGGSQCVLVAAHRNLVLFRLTPDPVITRKAPFVDYRQDHFICGAQFSPSQRSLLLRKIPECDQPALVDWRDGEKVTMPRSFDLNPVSILCRGDEEFALAQLNLRRSNDEWGKIEAELCVLRSKVSNRLHEWKSEKWLPIQYEGHERSDLDWRTDRVVP

SEQ ID NO: 336316 - protein, 55 aa, Zea mays
  Clone ID: MRT4577_69829C.1.pep
RELSIYTLQWTSARPCKTRREQMLSSGALGSLPSVLVTLRVPLRLPRFMSAPGGV

SEQ ID NO: 336317 - protein, 101 aa, Zea mays
  Clone ID: MRT4577_6982C.1.pep
ADPSAVALRFAHQTSCDRNNESFALVVGHRIVCSSSHSCALLSVSELLHPHFQMLALVADAAAHKQRHLQGPARCTISLIAWVPPFITFYLEDIAGCRLSR

SEQ ID NO: 336318 - protein, 35 aa, Zea mays
  Clone ID: MRT4577_69831C.1.pep
RLLATLQVGSTLCGLYTDTPADAIVTIYRHVFCYQ

SEQ ID NO: 336319 - protein, 82 aa, Zea mays
  Clone ID: MRT4577_69832C.1.pep
VDSKIQTARDRYLAREGKESQSTRLTGRSASFWSASSYSEDQTRGTISVIVDGVCNNVHKQEDFLCNLLFEDSNLFFYLALK

SEQ ID NO: 336320 - protein, 130 aa, Zea mays
  unsure (1)..(130): unsure at all Xaa locations
  Clone ID: MRT4577_69833C.1.pep
PATARTQRVETGREEERWIPPPRRRRQGRRPCRRRTTSAPSATTASGSRARRTAPIGSVRLQDLPFFIRRLFRELMDPQRTLPLVFRARMLXDGMLGLFGFVDDLLILLIVFLHLAAVYRSLLLYRHGGQ

SEQ ID NO: 336321 - protein, 86 aa, Zea mays
  Clone ID: MRT4577_69834C.1.pep
ARTPAAAPLLARPCSPWLPSLSTHLPDLAPARCHPTALVCMVAGARLFSLKLRVFRSGATGPPAQCYLSPFPREAGRSVIFWAISS

SEQ ID NO: 336322 - protein, 214 aa, Zea mays
  Clone ID: MRT4577_69835C.1.pep
MLARPSAPPLVTAQTPEVGIFITARNVSGALVAKLPGNKNKCGGRSNVRQRNIQPGKRGCRREWRALSAADQAQASTLDVDEECKRVLTPLGFSSEDAEKMLKKAFGWTHSPYWSEEREKEVPTAEAVAGVLDYIRSLGLSDEDLGRLLKKFPEVLGCDLDGEVRPNVGKLDSDWGINGKTLRSLLLRNPKVLGYNVDCRGDCMAQCTRCWVRF

SEQ ID NO: 336323 - protein, 226 aa, Zea mays
  unsure (1)..(226): unsure at all Xaa locations
  Clone ID: MRT4577_69836C.1.pep
GFDPRRPAHDRFRXPXCEANCSHWFXCGECIXXXWNYXTSXRXCKCPICXAALXNLLXXLLHXIRAGRDGPQSSXXILGEIQHYXXYXGGAPRSLTQRLQDLPFFIRRLFRELMDPQRTLPLVFRARMLMXCAVSDLSFIPSPSAMDVRDETVYESSDKTTTYSKTXVALSAIYVLSPVDILPESMLGLXGFVDDLLILLIVFLHLAAVYRSLLLYRXXASRSRCA

SEQ ID NO: 336324 - protein, 214 aa, Zea mays; identical to SEQ ID NO: 336322
  Clone ID: MRT4577_69837C.1.pep

SEQ ID NO: 336325 - protein, 83 aa, Zea mays
  Clone ID: MRT4577_69838C.1.pep
MSGAQGAHPVGQTTPTTYESVGGGENRTRTDLRSREDQGAIQIEKVQDKVDDAAGRGVDHSTFGANKEGRDDKADAGATGTGA

SEQ ID NO: 336326 - protein, 66 aa, Zea mays
  Clone ID: MRT4577_69839C.1.pep
NDGGKGLSSSTVEKGGEKSVTGPVSGPDFIDNVDGPAAPTGVHAASGASAGAAVLLSDSGALAALP

SEQ ID NO: 336327 - protein, 231 aa, Zea mays
  unsure (1)..(231): unsure at all Xaa locations
  Clone ID: MRT4577_6983C.1.pep
MGDQSGSRNGPQQKYVSGAQNAWDMFSDELSQKHITTGSGDLNDILGGGIHCKEVTEIGGVPGVGKTQLGIQLAINVQIPVECGGLGGKAVYIDXAEGCIRDILEHFPHSHEKSSSVQKQLQPERFLADIYYFRICSYTEQIAVINYMEKFLREHKDVRIVIIDSVTFHFRQDFEDLALRTRVLSGLSLKLMKIAKTYNLAVVLLNQVTTKFTEGSFQLTLALGQFCVIQV

SEQ ID NO: 336328 - protein, 62 aa, Zea mays
  Clone ID: MRT4577_69840C.1.pep
RITLAGKKNQLYHPLEEEDYNGIEPKTSPPLVWLTFQLDWLKDELKFWLPNAIQWNILIWAP

SEQ ID NO: 336329 - protein, 44 aa, Zea mays
  unsure (1)..(44): unsure at all Xaa locations
  Clone ID: MRT4577_69841C.1.pep
FQKKGYPXRCDGVWHYPYGRMGRTAAAHGVRREKVPWVTAMTIQ

SEQ ID NO: 336330 - protein, 137 aa, Zea mays
  Clone ID: MRT4577_69842C.1.pep
MEVNKMRIRMRPYPKCVSDWATTSFLVLAIPITYWFELWIVVPALFSKNSFFYKFNFVLGTFIFISILSNLFILMVCNTSIVGERIIRPSKANSSLWKFCSVCESITPPRSWHCSICGVCILKRDHHCMSTGCCIGH

SEQ ID NO: 336331 - protein, 45 aa, Zea mays
  Clone ID: MRT4577_69843C.1.pep
GLAAAAASAADAPFVVAHKKISLSRPKPGVERVAVSVDLYNQGSA

SEQ ID NO: 336332 - protein, 94 aa, Zea mays
  Clone ID: MRT4577_69844C.1.pep
CFQWAKLPATKKGMVLVKSGMVDPVLVVGGAHIRVQGVYLAPKVKFVGVLPLYLAPHPMSPVLSQLVDPPPANEGPPVLPDDCLTDEYPCFNMF

SEQ ID NO: 336333 - protein, 52 aa, Zea mays
  Clone ID: MRT4577_69845C.1.pep
FSLYSIVFFYYFFFCFSVFNEKKYWSLQTISVIYLYQGVAHHPYYCLGTNVF

SEQ ID NO: 336334 - protein, 49 aa, Zea mays
  Clone ID: MRT4577_69846C.1.pep
IPGSTHASVVFFFFFFFFFFFFFFFFMGLFSLLFIFLYLNISKKTTNPF

SEQ ID NO: 336335 - protein, 73 aa, Zea mays
  Clone ID: MRT4577_69847C.1.pep
LSKLLVLCEDKSSSRIQRSMLRRRPSFGQWLGREGFPCMPLLGYLQQFTIRIPIFKFHSTNSVCKPGRPRGTQ

SEQ ID NO: 336336 - protein, 237 aa, Zea mays
  unsure (1)..(237): unsure at all Xaa locations
  Clone ID: MRT4577_69848C.1.pep
MASGGQPQFRYTQPPSKVLHLRNLPWDCTPEELVELGTPFGKVVNTKCGVGANRNQAFIEFGDQNQAIAMISYYASSTEPAQVRGKNVYLQYSNRQEIVNNKATGEGSGNVLLVGMEGVAPDSVSIDVLHVXRCHGVSWQEASGTHVFSAFGFVHKIATFEKASGYQALIQFSDAETATSAKAALDGRCIPSYLLPELDVACTLRITYSAHSVLKRQYQSHRSRDFTNPYLPFLDSA

SEQ ID NO: 336337 - protein, 176 aa, Zea mays
  unsure (1)..(176): unsure at all Xaa locations
  Clone ID: MRT4577_69849C.1.pep
MASGGQPQFRYTQPPSKVLHLRNLPWDCTPEELVELGTPFGKVVNTKCGVGANRNQAFIEFGDQNQAIAMISYYASSTEPAXGNVLLVGMEGVAPDSVSIDVLHVVFSAFGFVHKIATFEKASGYQALIQFSDAETATSAKAALDGRCIPSYLLPELDVACTLRITYSAHSVLNVK

SEQ ID NO: 336338 - protein, 317 aa, Zea mays
  Clone ID: MRT4577_6984C.1.pep
DTEIRTAVLFFPQSVPPLQVAITMGDQSGSRNGPQQKYVSGAQNAWDMFSDELSQKHITTGSGDLNDILGGGIHCKEVTEIGGVPGVGKTQLGIQLAINVQIPVECGGLGGKAVYIDTEGSFMVERVYQIAEGCIRDILEHFPHSHEKSSSVQKQLQPERFLADIYYFRICSYTEQIAVINYMEKFLREHKDVRIVIIDSVTFHFRQDFEDLALRTRVLSGLSLKLMKIAKTYNLAVVLLNQVTTKFTEGSFQLTLALGDSWSHSCTNRLILHWNGNERYAHLDKSPSLPVASAPYAVTGKGIRDAVSSNHKRARVT

SEQ ID NO: 336339 - protein, 244 aa, Zea mays
  Clone ID: MRT4577_69850C.1.pep
MASGGQPQFRYTQPPSKVLHLRNLPWDCTPEELVELGTPFGKVVNTKCGVGANRNQAFIEFGDQNQAIAMISYYASSTEPAQVRGKNVYLQYSNRQEIVNNKATGEGSGNVLLVGMEGVAPDSVSIDVLHVVFSAFGFVHKIATFEKASGYQALIQFSDAETATSAKAALDGRCIPSYLLPELDVACTLRITYSAHSVLNVKYQSHRSRDFTNPYLPFLDSAKDGSGPDGKKQEAESNILLASI

SEQ ID NO: 336340 - protein, 40 aa, Zea mays
  Clone ID: MRT4577_69851C.1.pep
TQSCQASARVPAAQSAIVGWPMFWSPHTPFRHVPGTSLEG

SEQ ID NO: 336341 - protein, 433 aa, Zea mays
  Clone ID: MRT4577_69853C.1.pep
MCAQVFSAFGFVHKIATFEKASGYQALIQFSDAETATSAKAALDGRCIPSYLLPELDVACTLRITYSAHSVLNVKYQSHRSRDFTNPYLPFLDSAKDGSGPDGKKQEAESNILLASIENMQYVVTIDVLHEVFSAFGFVQKIAIFEKNGFQALIQYPDIQTAYAAKEALEGHSIYEGGYCKLHLTFSRHTELNVKVNNERGRDYTKGNATPSSDQPSILGPQPIPSVGAAIPPAQGSVPSAATNSVMPPGDPSVALPSNPSSEPLLQAPVVSSGGPPHYPNQAILQGPLGVVARFPGYGALQFAQGSAQAQMVQPSGQGSQHMSGHVNYQLPPGSAQFMQYLSNGSHPLPNAPGPQTMPYPALSGQQLPPGLQMMQAQGFGGLPFSQGPGQPMPQFPMYGTQQFPPGMEPQMMRFSEQGGQQFTFAPRGPNSR

SEQ ID NO: 336342 - protein, 107 aa, Zea mays
  unsure (1)..(107): unsure at all Xaa locations
  Clone ID: MRT4577_69854C.1.pep
MPFRLLALVLIEDFESLVSYLVLRHYKASFYLQDLQLANAHLAGGTCSLXDDLGXRMVFRNHYDSMSIFYNQLYMIVIYRDEAVTMHVYLSNHYXGHRDFTVCDPVL

SEQ ID NO: 336343 - protein, 108 aa, Zea mays
  unsure (1)..(108): unsure at all Xaa locations
  Clone ID: MRT4577_69856C.1.pep
SSATEASTGAFLKQIAVESEEEIEMLXENYLQRCESCHGQAARLVNSAREMEDSISVNLRARRLEXSRVELLLQAGTSCAAIGALTAGILGMNLKSDRETNARALRVT

SEQ ID NO: 336344 - protein, 86 aa, Zea mays
  Clone ID: MRT4577_69857C.1.pep
CLRQLGLRLNKDLCQLGGANFLFVKPTVGELVDGMHIDWRTYGRCTRRIDVTFLLVGLTKAFADEVAENMWHEDPCTPRSAEYGLP

SEQ ID NO: 336345 - protein, 240 aa, Zea mays
  unsure (1)..(240): unsure at all Xaa locations
  Clone ID: MRT4577_69858C.1.pep
RTSPSLPQSDPLLLLPPQPSSLPGLAPARRLFVLLNVRRRACRSSSASEMEASSSTALYPQRRCKNIYLVRHAQGIHNVEGDKDHSAYKSPALVDAHITPLGWSQVDYLRDHVTKCGLAKKIELVVVSPLMRTLQTAVGVFGSGNCTDGESAPPLMVKGAEHSGRQAISSLDCAPFLAVEACRERLGVHPCDKRSSITRYRTLFPAIDFSLIENDEDVLXEPDVREAIDVVAARGMKFLD

SEQ ID NO: 336346 - protein, 41 aa, Zea mays
  Clone ID: MRT4577_69859C.1.pep
FSFYNISKRMMGHIVVLFAFRGVWKLTNNICSSAIRVFIGG

SEQ ID NO: 336347 - protein, 160 aa, Zea mays
  unsure (1)..(160): unsure at all Xaa locations
  Clone ID: MRT4577_6985C.1.pep
SRSFLSAAVYKKHQRLSNSAKLKHSSGEIMNYVTVDAYRIGEFPYWFHQTWTTSVQLCIALAILYDAVGLATVAALAVIIATVVCNAPLAKLQHKFQSRLMEAQDVRLKAMSESLVHMKVLKLYAWETHFKKVIEXLREVEIKWLSAFQLREAYNSFLFW

SEQ ID NO: 336348 - protein, 68 aa, Zea mays
  Clone ID: MRT4577_69860C.1.pep
RCCRVNIYFLYVQFVGQILNLFHPKSHCRLARLTFRTSGETDVSNCVIVYYSLSPVELSVDRCRCTLE

SEQ ID NO: 336349 - protein, 149 aa, Zea mays
  unsure (1)..(149): unsure at all Xaa locations
  Clone ID: MRT4577_69861C.1.pep
MENFNLTLRILKDAEGVFIESALGIRVMPTEKNMGYVDDMILAASQDTYEKGIGHLRFYLIGDDVMDALLVKVEKMNHLACPDLLVLIWLNPVKNIXTTVIDTLNMLLIRKRRXAGILLMTLSEDNVDTLEHPLSEDLWRNANTVVAWM

SEQ ID NO: 336350 - protein, 130 aa, Zea mays
  Clone ID: MRT4577_69862C.1.pep
GWGLFLCSSFLGGSGALRRVRGRFWALVRRPRRFFGRPPLGGVPRWFVGVSLGAVVLLFGPLPPVSPVGLSGGAAVVVRLPLGKNSSSPRGRGPRRPSSGRAAALVRCVLSRAWWLCYPGSFSPVWLFGG

SEQ ID NO: 336351 - protein, 49 aa, Zea mays
  Clone ID: MRT4577_69863C.1.pep
SWHARAFGVRPSRPNSARRQRVPSSFSSVNNSPRKRKKKKKKGRPLASR

SEQ ID NO: 336352 - protein, 82 aa, Zea mays
  Clone ID: MRT4577_69864C.1.pep
KTAKGEGPFPPERNPKKQVGGARGAPKKLVSKGEPHFLVKKTGGPPKISTGRGETDPRLKNPPPWSRGNQILPRFPGGKLFF

SEQ ID NO: 336353 - protein, 70 aa, Zea mays
  Clone ID: MRT4577_69865C.1.pep
SIAGTEPQDELLQTTQTLGIARTGHGYLEHQWNGRRVTNVREKRALYSQCRTRLLLPLTTYACAVAVPDG

SEQ ID NO: 336354 - protein, 57 aa, Zea mays
  Clone ID: MRT4577_69866C.1.pep
RVKRVYSSGSSRRDFLKILNIRVLSRQKFKNAPLFSFFFIKNLLLTFFCLTPRLGPD

SEQ ID NO: 336355 - protein, 43 aa, Zea mays
  Clone ID: MRT4577_69867C.1.pep
FPAPYGEKTRPRKLNLGAQKKKVVIPSIVHKLVIYKTAHPNGL

SEQ ID NO: 336356 - protein, 73 aa, Zea mays
  unsure (1)..(73): unsure at all Xaa locations
  Clone ID: MRT4577_69868C.1.pep
FAAAQSLENALPGAEEMRAVGEDRHRPVSTKTTTHDHGASSSSVPRSNTDSDTLPLTQRLHRADICACVXMTQ

SEQ ID NO: 336357 - protein, 93 aa, Zea mays
  Clone ID: MRT4577_69869C.1.pep
PNPKKKHGDPQGYHPFILGQALKALKITFKRGVSTILAFPHHSNSRPKRKPQKTSPRCPMRKPQGTKWGGQKKQLTPQKKGGEDAQNTTSKPP

SEQ ID NO: 336358 - protein, 33 aa, Zea mays
  Clone ID: MRT4577_6986C.1.pep
FHKSKVWNGAVHSFQDSLPSALSPRPRSVTGNP

SEQ ID NO: 336359 - protein, 63 aa, Zea mays
  Clone ID: MRT4577_69870C.1.pep
MAGGRVAHATLKGPSVVKEIFIGLTLGLIAGGMWKMHHWNEQRKTRSFYDMLDKGQIVVVVEE

SEQ ID NO: 336360 - protein, 100 aa, Zea mays
  unsure (1)..(100): unsure at all Xaa locations
  Clone ID: MRT4577_69871C.1.pep
XXXXXXXXXXXXXXXXXXXXXXXXXXXXXXXXXXXXXXXXXXXXXXXXXXXXXATNNIKRPPKKQKIPPKRLEKPQKILNQKKKKQKQXXKNKIIKTIFN

SEQ ID NO: 336361 - protein, 63 aa, Zea mays
  Clone ID: MRT4577_69872C.1.pep
MAGGRVAHATLKGPSVVKEIFIGMTLGLIAGGMWKMHHWNEQRKTRSFYDMLDKGQISVVVEE

SEQ ID NO: 336362 - protein, 104 aa, Zea mays
  unsure (1)..(104): unsure at all Xaa locations
  Clone ID: MRT4577_69873C.1.pep
VKAEIQLKKGIPPHHHRVXFTGNQQEDGSTPPGXQLXKHSPHHVVLRIXGGIIHPYLQAMAPKYNQPKMVCSKCYAXLHLRSVTXSKKKCGHTNHLRAKKKIKN

SEQ ID NO: 336363 - protein, 45 aa, Zea mays
  Clone ID: MRT4577_69874C.1.pep
LARAASFAHRSYETQGMRIHAVEYAPVCEHISSVHGEWDVVRPNE

SEQ ID NO: 336364 - protein, 63 aa, Zea mays; identical to SEQ ID NO: 312667
  Clone ID: MRT4577_69875C.1.pep

SEQ ID NO: 336365 - protein, 140 aa, Zea mays
  Clone ID: MRT4577_69876C.1.pep
MRSCLFSSVALWSVVIVSARRPEPPTSTGHSLANSLGGPLKGRPRPGGARHGSKTNYPRCPPSRRRRRKSPSSPARQMAGGRVAHATLKGPSVVKEIFIGLTLGLIAGGMWKMHHWNEQRKTRSFYDMLDKGQISVVVEE

SEQ ID NO: 336366 - protein, 72 aa, Zea mays
  unsure (1)..(72): unsure at all Xaa locations
  Clone ID: MRT4577_69877C.1.pep
KSEIFANXIIIQNDXXLKNXEVKQKFKVQXTLKXSFFYXIRFFFTIXFFXXLXXYNSXSLSSYYXXLAPSHV

SEQ ID NO: 336367 - protein, 63 aa, Zea mays; identical to SEQ ID NO: 312667
  Clone ID: MRT4577_69878C.1.pep

SEQ ID NO: 336368 - protein, 122 aa, Zea mays
  unsure (1)..(122): unsure at all Xaa locations
  Clone ID: MRT4577_69879C.1.pep
KPHVPWSAISTRAXVFVVWMLXGYIAGAAWSRYDNVKEDCRKMEELKKQAEAADVAKSQFLATVSHEIRTPMNGVLGMLDMLLDTDLTSTQRDFAQTAQVCGKALIXLINEVLDRAKIETRK

SEQ ID NO: 336369 - protein, 422 aa, Zea mays
  Clone ID: MRT4577_6987C.1.pep
MEGSPVTRLPEANSLPDGFVPDSESPGTDATFPFSAPIVDDALNSDIPAATNPGGEETLNDPPLPASSAEDASSAAAAEALGTLSLDAAAEPERALEENGPTGAARGEASLKNCASELVGAPTAQKGSVEPKRKVVKRSKLEKDRELFELAQQYHKVVAERDAAIGVKEKLESLCREFQRQNKMLKEECQRVSTEGQNMRMELSEKFDIAIKGVSVKLEEQRVECIAQLEENNMLRSKLKDIADQYNITQQKYAHQLKEKMMELELADLRLQQHQEKAAHEHTQMQLYAEQVSQLMTTEKNLRLQLASDGERFQHFQDALSKSNEVFETYKQEMEKMILVIKNLKKDNEFLKGKCENSDIALVKLIEERELTKKQIEKLKNQKETLESLCRSLQAERKQGRSASIPDAPSSQEDMPATSQES

SEQ ID NO: 336370 - protein, 77 aa, Zea mays
  unsure (1)..(77): unsure at all Xaa locations
  Clone ID: MRT4577_69880C.1.pep
YSSFYACSYALAASCYXLEVYVCMHYMTFRLASSLXNTFLNFGLLFGFWVCSCAWGLFLCGXLWVFFFFLLFCVFCF

SEQ ID NO: 336371 - protein, 246 aa, Zea mays
  Clone ID: MRT4577_69881C.1.pep
MAAASATRRGLSALLLSPSSRALRRRLGPLAAASSSPHVAPWPLLAPRGARAASSGGSGHSPLNDPSPNWSNRPPKETILLDGCDYEHWLIVMEFPTDPKPSEEEMVAAYVKTLAAVLGSEEEAKKKIYSVCTSTYTGFGALISEELSYKVKGLPGVLWVLPDSYLDVPNKDYGGDLFVDGKVIHRPQFRFNERQQVRSRPRPRYDRRREIAQVEPRETMQRGPSTTQQQRPPCPQEAATHNQEQH

SEQ ID NO: 336372 - protein, 79 aa, Zea mays
  Clone ID: MRT4577_69882C.1.pep
CFAISFPVLSIHAHLSCQSGRTTKLCNLPLFFKSVDRVLSEPFVIPKTLLILIHNSPQLFTITLQNIHNCIQLFTNIYK

SEQ ID NO: 336373 - protein, 70 aa, Zea mays
  unsure (1)..(70): unsure at all Xaa locations
  Clone ID: MRT4577_69883C.1.pep
CVFLRXGCFSEAXLYIXNTRAXXWAAXXMTTXXGTASXMPEXVVSCVCCCXXRRXRWXXVADDXXFFXFA

SEQ ID NO: 336374 - protein, 96 aa, Zea mays
  Clone ID: MRT4577_69884C.1.pep
MVIYTSGTHQVHASKVVVALLHYSLFSPLYRFYQIPSSYSHSLSLFPLFLSFFFFPNTFFPTPPPLHFNGSFRSLLTLPPMVMGDTPLLIAAKRVN

SEQ ID NO: 336375 - protein, 42 aa, Zea mays
  unsure (1)..(42): unsure at all Xaa locations
  Clone ID: MRT4577_69885C.1.pep
LLMTQHQASVLPLSRDLPRVAHAIVLCVSVIKNLSAFXLLMV

SEQ ID NO: 336376 - protein, 76 aa, Zea mays
  Clone ID: MRT4577_69886C.1.pep
KVKTWVPRGTIGMRCFFCLIFSKKIREFLVSNAFKFIILIFFKEGIKNNFNGRPPIKSTCFLRSFRFKRGVGKPGN

SEQ ID NO: 336377 - protein, 109 aa, Zea mays
  Clone ID: MRT4577_69887C.1.pep
RIRSPTRRHASPRVVTFTLYTYSYGVTSRNPSQRVRNGIPHSCFAAGRHEPVAVRWVRLILSSARLPGGGACWTDKPRQALCVPNGPSAGDPGPYWTAVHPRKGGYRLL

SEQ ID NO: 336378 - protein, 102 aa, Zea mays
  Clone ID: MRT4577_69888C.1.pep
TSKKGSSSRLSRRDCHMRCRTWLGQLAAGYDTRTCSSGGWISGVGSVEQTKTSVSRDRTPGRHAPPALGAATPLAYRQQQGGRYKTIQPDRSTRTGPSRGHA

SEQ ID NO: 336379 - protein, 83 aa, Zea mays
  unsure (1)..(83): unsure at all Xaa locations
  Clone ID: MRT4577_69889C.1.pep
THPISLILQRHFKRXPYYADLLDWSKEVESXTAGSQLLDLITTHEGELDLTEFNITXHGRIVXYKSGFYPFXPPEACALQLSG

SEQ ID NO: 336380 - protein, 89 aa, Zea mays
  Clone ID: MRT4577_6988C.1.pep
MEKMILVIKNLKKDNEFLKGKCENSDIALVKLIEERELTKKQIEKLKNQKETLESLCRSLQAERKQGRSASIPDAPSSQEDMPATSQES

SEQ ID NO: 336381 - protein, 80 aa, Zea mays
  Clone ID: MRT4577_69890C.1.pep
MFTQILILRGTSLVTAHRTLSCEQDRDISAPPLWNKKDAWGGNTDHRDEEAHGTHDCGLVSPTTTLCLPEHRHIQVPLPK

SEQ ID NO: 336382 - protein, 132 aa, Zea mays
  Clone ID: MRT4577_69891C.1.pep
MEGTCNNRSHFQTIFLILVAFSSSSFMESASAARPAAGDTNTEFIRTSCKSTTYPNLCFSSLSSRSTAIGVSPQLLAHESLTVSLETAQSTSATMLELAHGQCMTPREIGAMHDCVEELSDAVVDWKKSLGE

SEQ ID NO: 336383 - protein, 236 aa, Zea mays
  unsure (1)..(236): unsure at all Xaa locations
  Clone ID: MRT4577_69892C.1.pep
MGGGNDGHGYPPGGQGGYPPQGYPPQQGGYPPQQGYPPAPGAYPPAPGAYPPAPGAYPPAPGAGGSDGEKGLLSNIMHGVAGAHGGGHGYPSGGHGYPSGGHGYPPQQGYPPQHGYPPQQHGYPPQQHGYPPAGYPGSSGHSGSHGGGGMGMGGMLAGGAAAAAAAYGAHKISHGGHGGGGHMMGGMMGGHGGYGGGYGHHGGKFKHGKHGHGKFKHGKHVKHGMFXGGGKFXKWK

SEQ ID NO: 336384 - protein, 126 aa, Zea mays
  Clone ID: MRT4577_69893C.1.pep
MGGGNDGHGYPPGGQGGYPPQGYPPQQGGYPPQQGYPPAPGAYPPAPGAYPPAPGAYPSGGHGYPPQQHGYPQQGYPPQHGYPPQQHGYPPQQHGYPPAGYPGSSGIYHSLVFQSLILIRICAKPS

SEQ ID NO: 336385 - protein, 123 aa, Zea mays
  unsure (1)..(123): unsure at all Xaa locations
  Clone ID: MRT4577_69894C.1.pep
YTVCLAREQSQWFFIINIGTWRSVCLVIIIDFVXGVFLAGIXKDVQIQERALRAFHLGVKQMFHCCNKMDGIPLKCSKVRYXVIVKEVCSYIKKVGFIPYKMHFVSMFGFEGVYMIERSNSLE

SEQ ID NO: 336386 - protein, 112 aa, Zea mays
  unsure (1)..(112): unsure at all Xaa locations
  Clone ID: MRT4577_69895C.1.pep
MHLTGGVLAAPTKQPSLITSSTTSLSIQMRPQMKYFSRVNAVKELHSNEGGSVISKLQNVDHKVANLDRETLGSQERNVXLXSYHGSPKIVXDGVAETKDVVLEDPVEHIGA

SEQ ID NO: 336387 - protein, 82 aa, Zea mays
  unsure (1)..(82): unsure at all Xaa locations
  Clone ID: MRT4577_69896C.1.pep
GEVLKMGAVQGMKKXSXIRDDDTNISTIREGIPPCLNELDVDGNKLTKVDAGSMKGMTKMGKEGLSPTRMCAIDNGRCESPH

SEQ ID NO: 336388 - protein, 57 aa, Zea mays
  Clone ID: MRT4577_69897C.1.pep
SRWNTFLRQVPGSSLFMCLGGLVGRNLVCILVGGRPAAYNTTLSYYAGDDRRSESRD

SEQ ID NO: 336389 - protein, 83 aa, Zea mays
  Clone ID: MRT4577_69898C.1.pep
GEFGQTKNPPGLIWINHGAIINLKGMKAWRVNQACGRGNLHTLYNLGGKMGFFRGFTGNPPTQFKEGLPPWARTNGGGCFKLP

SEQ ID NO: 336390 - protein, 70 aa, Zea mays
  Clone ID: MRT4577_69899C.1.pep
VAVGTSHAVFVLLTGKHFRRRMLKELILHQGRRDVSEVLYLSLLLKTTQVLMVVSFTYKLRHCDPSRLKY

SEQ ID NO: 336391 - protein, 159 aa, Zea mays
  unsure (1)..(159): unsure at all Xaa locations
  Clone ID: MRT4577_6989C.1.pep
GSVEPKRKVVKRSKLEKDRELFELAQQYHKVVAERDAAIGVKEKLESLCREFQRQNKMLKEECQRVSTEGQNMRMELSEKFDIAIKGVSVKLEEQRVECIAQLEENNMLRSKLKDIADQYNITQQKYAHQLKEXMMELELADLRLXQHQEKAAHEHTQM

SEQ ID NO: 336392 - protein, 358 aa, Zea mays
  Clone ID: MRT4577_698C.1.pep
MNPNFYHGGPRCKARAHAGRHGGPREAHVRLTARRPRARPSSPATPQQHGPHSHCTRQAGRSRHHQPISSSPTRLPTSPGAPQKSPLPGSHPRAWGSSTPIQGRHFLARVPQPPLRRRAVVGPPPTRRLTQKISTPRPHRAEDHMASAVSLLLSPPRLLHRDGTSRLLSIPHRRVLLAAPNNATPRRLLAPAPRASNKNDNSGAVEAPDRLVAAVAYLYPFLDGAHHGRFLLTQFPFFGALLRPLAPAARLFHSSPLTPFLLFLTLYFAVVRNQQAFSRFVRFNAMQAVVLDVLLIFPDLLAQSFAPSGGVGFEIFQSMESTVFLFLLVSLVYGGGACLLGKTPRLPIVADAAERQVM

SEQ ID NO: 336393 - protein, 184 aa, Zea mays
  Clone ID: MRT4577_69900C.1.pep
ERTLIIGQITVNGNGVVNVPVLGQGVSDAQSKGGLGSMLALMTAAYKASDNFGEVWFLPLADAEGSVAASGSLLIAGAPSGTGVVSLYIAGQLLTFAVATAEPATDIATGLAALVNSTGNLPVTAVATDSTVKFTAKNKGATGNDIDLRLNYLGAAGGEVTPAGLTLTITAMAAGATNPVLDAA

SEQ ID NO: 336394 - protein, 81 aa, Zea mays
  Clone ID: MRT4577_69901C.1.pep
ADLANIVNESALLAARRGRNTVSREDIMDAIEREKYGVTGRQESDSERQGLTKLFPWLSKPGNKPSSPDDFRGLMGYHTLS

SEQ ID NO: 336395 - protein, 79 aa, Zea mays
  Clone ID: MRT4577_69902C.1.pep
MRGILPNYFSSQWSFAHVHLPQVTRHIVAFGAHNTVMMAGLHGILFRFSFDHSNGGQMLPHEHLRLLKCDSPPFMTAAD

SEQ ID NO: 336396 - protein, 205 aa, Zea mays
  Clone ID: MRT4577_69903C.1.pep
MREVHLHHALPQVLRPPCHGGAQRTRWRAPQSAPGGWTTEEGTNDTLVSFAFAVLSAPNLAPPLFPVPVIGPQRNDEELGNPVPKEPILFLKPTSSFLHAGVATIAVEILETLESLHHKVELAIVISRRGHDVPEASAMDFVRDTRQGPWKEEAEKKIHTALCERHFGFGCNVDEDTSNKLKDPWCFLDSYVDAECKDYREKEEM

SEQ ID NO: 336397 - protein, 65 aa, Zea mays
  Clone ID: MRT4577_69904C.1.pep
LMREKKNKVCTSGATSLSINQGLLAPVGLSYILIKGNLGGFHKHAKNRYLLSFVLLMLYNFFFYI

SEQ ID NO: 336398 - protein, 67 aa, Zea mays
  Clone ID: MRT4577_69905C.1.pep
SLVEPGLTGYAPTKFRARRTLVSKICALMVNYLTCPPKEKPKSFLFTWKCDAVGHKLCQRETRTGSI

SEQ ID NO: 336399 - protein, 70 aa, Zea mays
  Clone ID: MRT4577_69906C.1.pep
SPNTASLPGISVCLISYSLPFLLNTRIPSGVFFVQSINSQNITVHCRLFISRPHNTSAFLTQGSTTPTTK

SEQ ID NO: 336400 - protein, 52 aa, Zea mays
  Clone ID: MRT4577_69907C.1.pep
SVEAFRPASPFLHHGRLHFSIAATSNKLPRTCAALRIYRREPPPPSPATDFH

SEQ ID NO: 336401 - protein, 162 aa, Zea mays
  Clone ID: MRT4577_69908C.1.pep
NLFLYGYGAIFNFLGILGTALFQGPESFNILRGHSRATMFLICNNAAQGILSSFFFKYADTILKKYSSTVATIFTGLASAAFLGHTLTINFLLGISVVFISMHQFFSPLAKVKDDKPADLIELEDTQNHRSSESSFVNMTAGAAVDASHRIGTDERQPLLPT

SEQ ID NO: 336402 - protein, 388 aa, Zea mays
  Clone ID: MRT4577_69909C.1.pep
MEAGYCNRKKTDGICESVCDSEFGSKSVLSMSRLKCALRGFDLRVLLILLIGVPILIFAIYVHGQKVTYFLRPIWEKPPKPFTILPHYYHENVSMGNLCKLHGWKVRETPRRVFDAVLFSNELDILDIRWHELSPYVSEFVLLESNSTFTGIKKDLHFKENRQRFGFAESRLTYGMIGGRFVKGENPFVEESYQRVALDQLIKIAGITDDDLLIMSDVDEIPSGHTIDLLRWCDDVPEILHLQLRNYLYSFQFLLDDKSWRASVHRYRAGKTRYAHFRQTDDLLADSGWHCSFCFRYINDFIFKMKAYSHVDRIRFKYFLNPKRIQHVICEGADLFDMLPEEYTFQEIIAKLGPIPSTFSAVHLPAYLLEQFDRYRYLLPGNCVRESG

SEQ ID NO: 336403 - protein, 60 aa, Zea mays
  Clone ID: MRT4577_6990C.1.pep
YMVTAVAIVSTNMHVYTLTCAQRLTPNMHREIANLRTLFLSFLHSHHYITYGWESARPSL

SEQ ID NO: 336404 - protein, 253 aa, Zea mays
  unsure (1)..(253): unsure at all Xaa locations
  Clone ID: MRT4577_69910C.1.pep
NLKVLXXIAVLLKFIMRRRFSVIQWEALAXLLIGISINQLRTVPAGNTAFGLPVTAIAYIYTLIFVTVPSMASVYNEYALKSQYDTSIYLQNLFLYGYGAIFNFLGILGTALFQGPESFNILRGHSRATMFLICNNAAQGILSSFFFKYADTILKKYSSTVATIFTGLASAAFLGHTLTINFLLGISVVFISMHQFFSPLAKVKDDKPADLIELEDTQNHRSSESSFVNMTAGAAVDASHRIGTDERQPLLPT

SEQ ID NO: 336405 - protein, 54 aa, Zea mays
  unsure (1)..(54): unsure at all Xaa locations
  Clone ID: MRT4577_69911C.1.pep
LARSMALMGHPIXYVELTDTMKEADTDGDGVISFXEFTAIMAKSAVDFIGLAAM

SEQ ID NO: 336406 - protein, 405 aa, Zea mays
  Clone ID: MRT4577_69912C.1.pep
MQRNGVVECSVCRSRVVVPSPRSVSRAYDKHRSKMSSKFRALNVFLVVGDCILVGLQPILVFMSKVDGKFQFSPISVNFLTEVMKVIFAIVMLIIQSRKQKVGEKPLLARSTFIQAARNNVLLAVPALLYAINNYLKFIMQLYFNPATVKMLSNLKVLVIAFLLKFIMRRRFSVIQWEALALLLIGISINQLRTVPVGNTAFGLPVTAIAYIYTLIFVTVPSVASVYNEYALKSQYDTSIYLQNLFLYGYGAIFNLLGILGTVLFQGPESFNILRGHSRATIFLICNNAAQGILSSFFFKYADTILKKYSSTVATIFTGLASAAFLGHSLTINFLLGISVVFISMHQFFSPLAKVKDDKPADSIELEDTQNDRPSESSFVNMTAGAADDASHRIGTDERQPLLPI

SEQ ID NO: 336407 - protein, 94 aa, Zea mays
  Clone ID: MRT4577_69913C.1.pep
TLSQILVCITKASAGSSTYRRRGIVAGQSPANRRHLRLVFDFHTVPATALHLQKAKCLATVRCVLFMRFLNALDRPPLADFRFLLSPPPLPLRS

SEQ ID NO: 336408 - protein, 111 aa, Zea mays
  Clone ID: MRT4577_69914C.1.pep
TLMDHHTGTASTSIIAPHLLDHRHTGAAHCHQHLPHTLQLVHSPHLPTAFHRRRHADHVTKQPHYPLIHWPPRALAIGRTNDGTVSPRKEYPGIPPDSGHIADTLVTTPTP

SEQ ID NO: 336409 - protein, 131 aa, Zea mays
  unsure (1)..(131): unsure at all Xaa locations
  Clone ID: MRT4577_69915C.1.pep
TELDAVAGFSEIVPDTVVFDDFEXVSSSLLLGITGLPDTKFKSAIDTALADGECNALEKAEDRMSCYLTKALANVGAELAHQVPGRVSTEIDARLAYDTQGIIHRVHELLNLYNQHDVSTDRLLFKIPATW

SEQ ID NO: 336410 - protein, 60 aa, Zea mays
  Clone ID: MRT4577_69916C.1.pep
LPPMPPPSPTFLLNNICPPYLNCVSYTCIRNNQLYTPFYPLINFNNSQSIIITLTPSLIQ

SEQ ID NO: 336411 - protein, 394 aa, Zea mays
  Clone ID: MRT4577_69917C.1.pep
MALSIYTPTSSSLVPPSIQEVRLTSRPPKPATFSLRRPHLAARAAAGNAPTSPVREVVTELDAVAGFSEIVPDTVVFDDFERFAPTAATVSSSLLLGITGLPDTKFKSAIDTALADGECNALEKAEDRMSCYLTKALANVGAELAHQVPGRVSTEIDARLAYDTQGIIHRVHELLNLYNQHDVSTDRLLFKIPATWQGIEASRLLESEGIQTHLTFVYSFAQAAAAAQAGASVVQMFVGRLRDWARHHSGDPEIDEALKNGEDAGLSLAKKVYAYIHRNGYKTKLMAAAIRNKQDVFSLLGIDYIIAPLKILQSLEESVTDPDVKYGYVPKLTPAIGKTYNFTEEELVKWDQLSLSAAMGPAAEELLASGLEGYVNQARRVEELFGKIWPPPNV

SEQ ID NO: 336412 - protein, 382 aa, Zea mays
  unsure (1)..(382): unsure at all Xaa locations
  Clone ID: MRT4577_69918C.1.pep
MALSIYTPTSSSLVPPSIQEVRLTSRPPKPATFSLRRPHLAARAAAGNAPTSPVREVVTELDAVAGFSEIVPDTVVFDDFERFAPTAATVSSSLLLGITGLPDTKFKSAIDTALADGECNALEKAEDRMSCYLTKALANVGAELAHQVPGRVSTEIDARLAYDTQGIIHRVHELLNLYNQHDVSTDRLLFKIPATWQGIEASRLLESEGIQTHLTFVYSFAQAAAAAQAGASVVQMFVGRLRDWARHHSGDPEIDEALKNGEDAGLSLAKKVYAYIHRNGYKTKLMAAAIRNKQDVFSLLGIDYIIAPIXDVKYGYVPKLTPAIGKTYNFTEEELVKWDQLSLSAAMGPAAEELLASGLEGYVNQARRVEELFGKIWPPPNV

SEQ ID NO: 336413 - protein, 85 aa, Zea mays
  Clone ID: MRT4577_69919C.1.pep
WHVGAIQGVPFFACVSGSGVVGHSLFFCFNVIGAVPPGAFFPFRLSWGVGFFINEYGFPGFPFGKGAVGVTPLMFVGWVFGPSRF

SEQ ID NO: 336414 - protein, 104 aa, Zea mays
  Clone ID: MRT4577_69920C.1.pep
LAVCIYSVFFFVIQMICWIHENLSPDLPCNCNRPRTYGWQRLLGSGQVGNVPASVGSIRKSSMQQHHLSCSYMIPFIHTRICLLSEVISTLVSQVHVLRIQSPT

SEQ ID NO: 336415 - protein, 305 aa, Zea mays
  Clone ID: MRT4577_69921C.1.pep
PSSCLILYFFLSCCPIRFGGRVAHCAIVNNHRFAPTAATVSSSLLLGITGLPDTKFKSAIDTALADGECNALEKAEDRMSCYLTKALANVGAELAHQVPGRVSTEIDARLAYDTQGIIHRVHELLNLYNQHDVSTDRLLFKIPATWQGIEASRLLESEGIQTHLTFVYSFAQAAAAAQAGASVVQMFVGRLRDWAKHHSGDPEIDEALKNGEDAGLSLAKKVYAYIHRNGYKTKLMAAAIRNKQDVFSLLGIDYIIAPLKILQSLEESVTDPDVKYGYVPKLTPAIGKTYNFTEEELVKWDQLSL

SEQ ID NO: 336416 - protein, 217 aa, Zea mays
  unsure (1)..(217): unsure at all Xaa locations
  Clone ID: MRT4577_69922C.1.pep
VRFVIMXGNLFCSDHTIHRRFDLKGSSLGRITDKPPAEIDEYTTLKDLDLNFIFRLQKQWYQEFQRQVDKDCEFLEQEKIMDYSLLVGVHFRGAIDIDGDKPATPRVSRWDRDHFRSDPNRWSKIKLGANMLSRAELTIRKNDSDVFGEPTGEYCDVILYFGIIDILQDYDIGKRLEHAYKSFQYDSTSISAVDPKQYSRRFKDFIYKAFQEDKLDS

SEQ ID NO: 336417 - protein, 66 aa, Zea mays
  Clone ID: MRT4577_69923C.1.pep
MNKRLINIMSFTYNTIATKGLENMYSSNPGKKRQIGKVSIEIMRKAPLQVHKLHPLEVKPLSSQSD

SEQ ID NO: 336418 - protein, 39 aa, Zea mays
  Clone ID: MRT4577_69924C.1.pep
ERVPRVFLCQIGVYFPEWGQDRVMSTYDGYKYVEQMLGK

SEQ ID NO: 336419 - protein, 55 aa, Zea mays
  Clone ID: MRT4577_69925C.1.pep
ENTLYFFLKAQSICSFFILRSAIRHWKKACGPFPSIVQTISPLSSDLYHDPCYTS

SEQ ID NO: 336420 - protein, 43 aa, Zea mays
  Clone ID: MRT4577_69926C.1.pep
CRGVGSQSPRFVVHGRRASLAWCSPSWPLGSPRPSFVPGPQKS

SEQ ID NO: 336421 - protein, 77 aa, Zea mays
  unsure (1)..(77): unsure at all Xaa locations
  Clone ID: MRT4577_69927C.1.pep
PVTSVVQLESQDLAQIAQHVQKKTGAHKVRLKKQLGPEVISGFSVQLGPXGSKFIYNKGRKQNQENAVPVXLPPVPL

SEQ ID NO: 336422 - protein, 146 aa, Zea mays
  Clone ID: MRT4577_69928C.1.pep
MATVPGDLIWQIVRKNNSFLVKQFGNGNAKVQFTKEPNNLYNVHSYKYSGLANKKTVTIQPAAGKDSAVVLSTTKTKKQNTPAKLSHKSVMRKEFRKMAKAVKNQVGDNYYRPDLTKSALGRLSSVYRSLQVAKSGVKKKNRQPTH

SEQ ID NO: 336423 - protein, 165 aa, Zea mays
  unsure (1)..(165): unsure at all Xaa locations
  Clone ID: MRT4577_69929C.1.pep
GPRYQASLSLSLSLSFSLTFFFFFFFFFFFPSLFFLFKRPFPPHCRPSQPDPSPDPTLAKPGPKGTPGENHNPPKIPNNKQPEKXRETPGGPKKKPNPHXAGPPPPINQPKTPASQGQKKTAQTPKKGGSPMGXFPFPPKKPPSLGRPPAQTGKRPLKGGTPVLP

SEQ ID NO: 336424 - protein, 59 aa, Zea mays
  Clone ID: MRT4577_6992C.1.pep
NRFLDYKPATPGGVVWQPRDRMGKFRKLGPITPNASVCLGLLVFHSLIHYRIETHRLQS

SEQ ID NO: 336425 - protein, 178 aa, Zea mays
  Clone ID: MRT4577_69930C.1.pep
LPPIALRAASPAFISSSSSCPSWLQSSVRPSSSICAALTRHRLPVRLHPRRRSHPVQAVCSSSSPRYHDFSMVATFSSPACCSLASAPCELLLTRPVCSSGLDGCQRRFFDLALTLNRCSTLCHVCYNIIVRYTHSRQFSLSFLGYYLVSSCASCTSCVRIKHQDFEEKKAPVHRPVK

SEQ ID NO: 336426 - protein, 93 aa, Zea mays
  unsure (1)..(93): unsure at all Xaa locations
  Clone ID: MRT4577_69931C.1.pep
VICQPLTALLKKGALYVWTADHDTAFCTLKQAMSSAPVLALPDFNVIFQIETDASANGVGAVLSQQGHPLAFMSKALGVKSRGLSXYEKEYLA

SEQ ID NO: 336427 - protein, 86 aa, Zea mays
  Clone ID: MRT4577_69932C.1.pep
MFMLGRVVYPMPHVLGVKSPVSGCLLVCRLGISVPCSRGSLRCFLYEGVEEQLDHILAAPCCVDLWICSAIDLKSPFVSFVVKKKN

SEQ ID NO: 336428 - protein, 68 aa, Zea mays
  unsure (1)..(68): unsure at all Xaa locations
  Clone ID: MRT4577_69933C.1.pep
NQQIFSXGGILFYSQRLVYKPTTKVHVFLCVQHNTCSQSSRYSPASKRRISAAVNPATRGDLRISFVA

SEQ ID NO: 336429 - protein, 33 aa, Zea mays
  unsure (1)..(33): unsure at all Xaa locations
  Clone ID: MRT4577_69934C.1.pep
GRRAXAVLIHIDVVLTWTLIGESTTLIPHTRNN

SEQ ID NO: 336430 - protein, 96 aa, Zea mays
  Clone ID: MRT4577_69935C.1.pep
FYPDADGLLTKHPRHEGLRADDPYHTERQRPYWLKHTAWRAPERGVRLGPNKKRQQPIRITEEAQPATASLGNCSGRLLTLVDVGTEGHKDHGDER

SEQ ID NO: 336431 - protein, 198 aa, Zea mays
  Clone ID: MRT4577_69936C.1.pep
RRFRPHKTLSLNSSTNRQHIQKRPQHKPRLQHRQSFGSSCGNQKHSKAVATTRLSDSDDDDFNITDNDFDLPASHSRISRPRRTTSCRRLTSFAIDISEEDEEDLADDDFDYQDPRPPQQRSSGRRFVVGDDDDSDVPVALEEEDGVNWSELEKEDVDEDYNGVRSVHVEEPEGDVVGMALHKCSRISSDLRKELFGS

SEQ ID NO: 336432 - protein, 80 aa, Zea mays
  Clone ID: MRT4577_69937C.1.pep
CISDSGDRTIAMHWRLEPGTITISNLRGPMEEHYFTSSLAQGPAPPSTALLYGLPLSLRCTPSRGTERSACRTWLTCFPG

SEQ ID NO: 336433 - protein, 128 aa, Zea mays
  unsure (1)..(128): unsure at all Xaa locations
  Clone ID: MRT4577_69938C.1.pep
LPTTRSLGHQRAENLLSKDGQNKPFLLSDVLACLDKAASHLSLGADDPVLTQXLGDSLGCFYDTDSLCCHCMXIQICYDYSKALISQLSWGPHYNILNDAKVLQELVKDYDHATAEYALEGKIDAIES

SEQ ID NO: 336434 - protein, 118 aa, Zea mays
  Clone ID: MRT4577_69939C.1.pep
RALLYQMPVFSIHTTPSPLELSPATRKSKAMNKRMMRLKRKLLQITGNHQHPTVFEYTRLQCAVVGCCLMTNTSFFLLRQCAIYQRLLDVARDVHKEYHAARLRGELSCVLSYAGLAD

SEQ ID NO: 336435 - protein, 107 aa, Zea mays
  unsure (1)..(107): unsure at all Xaa locations
  Clone ID: MRT4577_6993C.1.pep
GQAHPPGAQPPPXGYGQPANPGRGGPYYKAPQPQQFGPYPQPPDNAPGGYPPPQSNYFRPQLAIFSFLQLFVWFFSIGFYRCGVCIPEFGWCHIRFIKRYSLYDLDV

SEQ ID NO: 336436 - protein, 98 aa, Zea mays
  Clone ID: MRT4577_69940C.1.pep
VHDVVHKRLIWVLIVEAVVEGISTETSNKALCSKMGSKLSILVLAHGKVHVEVHQVGYHLTCREALQYPMHFDSCVLSSDWSRYCLRCSRCCTPLAPP

SEQ ID NO: 336437 - protein, 66 aa, Zea mays
  Clone ID: MRT4577_69941C.1.pep
NIFFSYILIALHLNGRFMLLITLPTMVTRDTTLTFGRSMNNLPSYVFGQRPHYKIKTGRTPLNGIH

SEQ ID NO: 336438 - protein, 49 aa, Zea mays
  Clone ID: MRT4577_69942C.1.pep
HKKYFISFLYHTIPLRNIISNTQLRRFEFDVLMESKGGKNSTNNPSIMY

SEQ ID NO: 336439 - protein, 95 aa, Zea mays
  Clone ID: MRT4577_69943C.1.pep
AARGAGRACEKKKKKKKKNKKKKKKKKKKKPQKKKKRPSRPRNPPKKKKNPPPWAIPLQEKGGPPAPPEFQLTFFPPVNPEGVAHVRNRQNKGGK

SEQ ID NO: 336440 - protein, 212 aa, Zea mays
  unsure (1)..(212): unsure at all Xaa locations
  Clone ID: MRT4577_69944C.1.pep
MSSRGKKRLVVEVDLDLDPAAEVTAAFDRLCVSVVNKPPPAAAVGKDSASSTLVNSVAFGKDSSSSARSPPTMSTEQPHSWSTPAVTTPLSAASTVPYARYKEVYNGLNDAIEEMQKVAMNLKALSTEYIVPEPSSGKEILVNQLMWRVHELAQSLDEALYRSLLAQAGPSPPLSEYFDNDRSDDEAHMMXGVGIGLLEDVNFEEIRDRMRN

SEQ ID NO: 336441 - protein, 111 aa, Zea mays
  unsure (1)..(111): unsure at all Xaa locations
  Clone ID: MRT4577_69945C.1.pep
KRGIRLEVLICRSLMTGRKGVTNVGNISIRPVLPSMRMVTADISGKKRLARAEPRGVTGHXSXPINLTMLTPQLLLVGAGKACIHTMHTNLLITRXPRXMKTMIAVLCIST

SEQ ID NO: 336442 - protein, 96 aa, Zea mays
  Clone ID: MRT4577_69946C.1.pep
IRHRQYRYANTSTDLRIASILVCPFPLFSSKRPVCFTTRPTRAARASRRRRRSRRNAHRPLPPATTARPAGRGGGRAGRTACSPPPVPVLRRHTPP

SEQ ID NO: 336443 - protein, 31 aa, Zea mays
  Clone ID: MRT4577_69947C.1.pep
PVRRIYLPDGLLDRSEVPEYLTGEVPGEYVT

SEQ ID NO: 336444 - protein, 90 aa, Zea mays
  unsure (1)..(90): unsure at all Xaa locations
  Clone ID: MRT4577_69948C.1.pep
ILNLPLLTLIKNATYTHIITQCLILSILLIIQXFYQPNTXLTFKHLILQTNMQQQTLAPNFIQQPISKFQQQFMPHLKIQTIITQQQQHI

SEQ ID NO: 336445 - protein, 53 aa, Zea mays
  Clone ID: MRT4577_69949C.1.pep
TVLGVRSSPRSASEPCTGSLDIVRPSCASLGRPVGPPGFSTIARRLSSQSGLQ

SEQ ID NO: 336446 - protein, 179 aa, Zea mays
  Clone ID: MRT4577_6994C.1.pep
RVGEGEETRPLAYWFSQIRKDAEQLRAAIDPALDVGDGETMESIGVIAELAGHCTAREPSQRPDMGHAVNVLVPMVEKWRPVKDEAEDYLGIDLPLPLLQMVKSWQDAEAGGLTDGGGSVMSLDDSKGSIPARPAGFAESFTSADGRCGSEMHPSFHPLALKRQYMCLFRTFVAVADKR

SEQ ID NO: 336447 - protein, 42 aa, Zea mays
  Clone ID: MRT4577_69950C.1.pep
SNTLLGPLLLVIFMNVIRFKLNYPSRVRQELLSVLNKFIDVV

SEQ ID NO: 336448 - protein, 243 aa, Zea mays
  Clone ID: MRT4577_69951C.1.pep
MTLAARLVSRSRQLHSVQAAFANGGATQVRSFAKDAAPADRPPVSGDDLLKGIFFEVKKKFETALGVLKREKITIDPDDPAAVSQYAQVMKTVREKADLLSDSQRIKYTIETFTKGIPDARTYLNTLQQLRIKSGLIDHIGIEPLMMEALEKIEKDIKKPLLRSDKKNMATLMAEFDKINAKLGFRKEDLPKIEEELELEIAKSELTELKKECVEAMETQLKREEFQDEEMPDVRKLDIRNFL

SEQ ID NO: 336449 - protein, 186 aa, Zea mays
  unsure (1)..(186): unsure at all Xaa locations
  Clone ID: MRT4577_69952C.1.pep
EEAPKDEADPASAPRPPRVRPRVRAVSRYARSMKTVRXKADLLSDSQRIKYTIDTFTXSIPFSRTYLNTLQQLRIKSGLIDHLGIEPLMMEALEKIEKDIKKPLLRSDKKNMATLLAEFDKINKKLGFRKEDLPKIEKELELEIAKSELTELKKECVEAMETQLKREEFQDEEMPDVRKLDIRNFL

SEQ ID NO: 336450 - protein, 243 aa, Zea mays
  unsure (1)..(243): unsure at all Xaa locations
  Clone ID: MRT4577_69953C.1.pep
MTLAARLVSRSRQLHSVQAAFANGGATQVRSFAKDAAPADRPPVSGDDLLKGIFFEVKKKFETALGVLKREKITIDPDDPAAVSQYAQVMKTVREKADLLSDSQRIKYTIETFTKGIPDARTYLNTLQQLRIKSGLIDHIGIEPLMMEALEKIEKDIKKPLLRSDKKNMXTLMAEFDKINAKLGIRKEDLPKIEKELELEIAKSELTELKKECVEAMETQLKREEFQDEEMPDVRKLDIRNFL

SEQ ID NO: 336451 - protein, 206 aa, Zea mays
  Clone ID: MRT4577_69954C.1.pep
SRSKSSGSFRIGEVKRVTKETNVHVKINLDGTGVAECSTGIPFLDHMLDQLASHGLFDVYVKATGDTHIDDHHSNEDIALAIGTALLEALGDRKGINRFGHFTAPLDEAAVEVILDLSGRPHLSCGLDIPTQRVGTYDTQLVEHFFQSVVNTSGMTLHIRQLAGKNSHHIIEASFKAFARALRQATEYDLRRQGTVPSSKGVLSRS

SEQ ID NO: 336452 - protein, 271 aa, Zea mays
  Clone ID: MRT4577_69955C.1.pep
MTTARLVSTSPTRLPSTSASPIPRTSLCVVGRAPAFSARALGFSLRLKPSPAMAAAGVGGNGPPTAHGDSIGSSRIGEVKRVTKETNVHVKINLDGTGVAECSTGIPFLDHMLDQLASHGLFDVYVKAIGDTHIDDHHSNEDIALAIGTALLEALGDRKGINRFGHFTAPLDEAAVEVILDLSGRPHLSCGLDIPTQRVGTYDTQLVEHFFQSVVNTSGMTLHIRQLAGKNSHHIIEASFKAFARALRQATEYDLRRQGTVPSSKGVLSRS

SEQ ID NO: 336453 - protein, 144 aa, Zea mays
  Clone ID: MRT4577_69956C.1.pep
PFSPGGRQDKEQGDYKLIAKGGDETYRAGECNGGGYPFGAGVVHGGGDNKGVKNNHNSVRKDPHPSAHAEETAIKQACKKLGKTNLAGWENYTSCEPCPMCLGLIRLAKIKKGGYGAKSEVAVAAGLNGVLPKVFKEYYQKSRV

SEQ ID NO: 336454 - protein, 90 aa, Zea mays
  Clone ID: MRT4577_69957C.1.pep
PPSCTTGREDQDLARSPTPRRAATGKMPIVRARLRLALGDPHSSTARHPLPRLRTTMTQPSRRAPRAALRCQPPLPAGVTPATSSSPAPS

SEQ ID NO: 336455 - protein, 76 aa, Zea mays
  Clone ID: MRT4577_69958C.1.pep
PKEWTSHPKGQEGFKRLGGGLTEIEKRVVPMNAAPPLKNIKGPAEFPYTLFYPNPSDKKGDPPGLPPKGILKRISL

SEQ ID NO: 336456 - protein, 62 aa, Zea mays
  Clone ID: MRT4577_69959C.1.pep
DEYAEEDPFHIHLALAVVVVRRRRIALGTGSVGSVRSDDDADSFISFSGWLLLEAAGSPRVR

SEQ ID NO: 336457 - protein, 198 aa, Zea mays
  unsure (1)..(198): unsure at all Xaa locations
  Clone ID: MRT4577_6995C.1.pep
RSVRKKIHERIPAXYSALSVLENSGAYIQVNDLKKASLKLNKSLNLEGIRSMVERATQKNTERGVKDAVSAVKELMQETDKNDQNVRRLEDTSVFEPQNGNSLGNEKEIQKAQKQVEKEIKRQEKEEAQMRKLQKKQQEEALREQKRHEKEEAEAKKQQKKQEDEALKEQKRREKEEAEAKKQQKKQEEEVLKEQKRR

SEQ ID NO: 336458 - protein, 350 aa, Zea mays
  unsure (1)..(350): unsure at all Xaa locations
  Clone ID: MRT4577_69960C.1.pep
GRVGEVALPKLVADFGSLELSPVDGRTLTDFMHTRGLQMRSLGRVVKLSEKLSHVQSLCVHEMIVRAFKHIVRSVIAAISDIRQLALTIAAALNLLLGVPESDVSGSSPNVHPLRWKGLVIFLKKRYEFELTEKHYHDVRKYAVLRGLCHKVGIDFAPRDFIMDCSFPFHKQDIISLVPVHKQVACSSADGRQLLESSKTALDKGKLEDAVNYGTKALSKLITVCGPYHRMTAGAYSLLAVVLYHTGDFNQATIYQQKALDINERELGLDHPDTMKSYGDLAVFYYRLQHTELALKYVKRALYLLHLTCGPSHPNTAATYINVAMMEEGLGNVHVALRYLHKALXCTQKY

SEQ ID NO: 336459 - protein, 108 aa, Zea mays
  unsure (1)..(108): unsure at all Xaa locations
  Clone ID: MRT4577_69961C.1.pep
GLRPPPLLFLFWNRKLVHYFGGYVFVSPLVGSFLGSNGSISLWCLPPLLGCWGNLGPPTCVVLKLIYGLXXXFLRGXPPVFSGLGPPFFWTSFSAPSAFGSPPAXPLF

SEQ ID NO: 336460 - protein, 81 aa, Zea mays
  Clone ID: MRT4577_69962C.1.pep
HDDGCHEFLFNCWLTRLVETPDEFIWTRHPISRQFFYCCPNLFFCYCYVLVHLQKINSLPTGAVLARRRRNRSSTPRSTTL

SEQ ID NO: 336461 - protein, 112 aa, Zea mays
  Clone ID: MRT4577_69963C.1.pep
MAYIWESLSRLVENLGISTIRLASGDARNCQEDILFEDQARADASPSSCDESSGVASLKIQISLLNIRLRALEEDQEFLNQVLSSLQCGSDGLQCIQEISRHLAELRRVVAH

SEQ ID NO: 336462 - protein, 359 aa, Zea mays
  Clone ID: MRT4577_69964C.1.pep
MASSGGDEKAAAVVQNKKVVLRRYVTGLPTEEDMEIVVDTIVLRVPAGQTAVLVKNLYLSCDPWMRDRMSKHDDGDPTVLAPDFVIGEAMVNFGVGKVIDSTHPELTAGDLVWGMSGWEEYTLVTQTEYLSKINHKELPLSYYTGVLGMPGLTAFSCFFELGKPKKGDFVFVSAASGAVGQVVGQLAKIAGCFVVGSAGSDEKVSLLKDKFGYDDAFNYRSETDLGAALRRCLPDGIDVYFDSVGGATLDAALLHMRHGGRVAVCGMISQYGLEEPYGVRNLYCIIGKTVRVEGFNVNGYFHLYTRFEEEMAGYIKDGKVTVVEDVVEGIESAPASLIGLFSGRNVGKQVVAIAHSGTP

SEQ ID NO: 336463 - protein, 97 aa, Zea mays
  Clone ID: MRT4577_69965C.1.pep
FSLAENQFHAPAAGNLQFSIIVLLPLGFQPPPWNPRPPVDPSPAASLDRLSSRSRECLVSGASGRLRRGFELLHVVAPSMRRQLHYLQGSYKIYGSS

SEQ ID NO: 336464 - protein, 146 aa, Zea mays
  Clone ID: MRT4577_69966C.1.pep
WSPMKLTPLRGTRSKSTKRFSERPPPMNNINVDVATTPVSLPISSKNSIRRQHITSRSEIKSSRGFTSPLTGDTPRHHTGTHKSSPPTVTRLARGTTPSSIWTMARDNLHIVTVNMIYPNHGAHRPRFLRDPDQDPVRRSLPQCTP

SEQ ID NO: 336465 - protein, 87 aa, Zea mays
  Clone ID: MRT4577_69967C.1.pep
SILKKRDQKPPVQTEPKGKRRKTASGRSKRCGFLRSQSDPSAQVPFNGEKRQRLPGEKAASGAFAGVRDGGELGLQEAQDRFAWRRC

SEQ ID NO: 336466 - protein, 81 aa, Zea mays
  Clone ID: MRT4577_69968C.1.pep
GWGPPLGGLRGKRVIPAPLCMGAPFAIPPVFFPAPGSQNLSLFFSSPWPKDNFQNLVGPPPCLCIFVQGHVGKYNFPFFPP

SEQ ID NO: 336467 - protein, 71 aa, Zea mays
  unsure (1)..(71): unsure at all Xaa locations
  Clone ID: MRT4577_69969C.1.pep
KIKRARPDKLHYPTXASSPPTHPQLKPTFIRIPRSLYSPHLNVTAMTARPASPPAAAARTRLMLCHRFPSS

SEQ ID NO: 336468 - protein, 168 aa, Zea mays
  unsure (1)..(168): unsure at all Xaa locations
  Clone ID: MRT4577_6996C.1.pep
KREMDDANKVVAVFQEKKGGKGGVVGGGYFGLKRGAALKKKDFEGTRGFPEPGGMPRLLNGDMGVFXGGYYTKKGEKILKGPLAGGFEADAKGDVTAVKLKGGPVLEAYFVVVGVGGKPLTTFLKGKVVEEKGGIKTDAFFKKSVPGVFPNGGGAPFPLKMTKGGGGG

SEQ ID NO: 336469 - protein, 178 aa, Zea mays
  Clone ID: MRT4577_69970C.1.pep
MERAVEPWGPDLQGAEEREQLRSARTGIGSENVEISQPDEFEHTPQEDDLGFKEEEDLAPGHEVGNASLKPEGIQTWDDLWVQREVPGKPQARDGGPRLLGEPRWGQASDRAAVCGECGKSFRQMSDLVKHQRTHTGEKPYKCAVCGKGFGDSSARIKHQRTHSGEKPYRARPPAQGP

SEQ ID NO: 336470 - protein, 75 aa, Zea mays
  Clone ID: MRT4577_69971C.1.pep
MERLAGVSARAGTLAESLAVRAQAWCWRPPSRWRSFRPCRRLRLGQIPPGVETTPRVLLLPLPMSEPDLLFQTRP

SEQ ID NO: 336471 - protein, 185 aa, Zea mays
  Clone ID: MRT4577_69972C.1.pep
MAKNLKTAVFSKYTVQPTGIYAAINRLFAIDPKRSTGIPMNPQFRNPPPGANDPMAYDDPVTVPAADIAENPYWKRDVRRRYPRLSTVTQADAVALLEVGSAAAPKQELIGEAGSKSLIAAQEQGAKGLAVAFEKNTGLAKDVLGPGGMPPLPSGLHSTGVSGHKRYDLEQDQSYGDGYPCRTFA

SEQ ID NO: 336472 - protein, 43 aa, Zea mays
  Clone ID: MRT4577_69973C.1.pep
NLDYIATCILVKPWALKPGARLITQCVTPDRVSRFHDAMVDMN

SEQ ID NO: 336473 - protein, 66 aa, Zea mays
  Clone ID: MRT4577_69974C.1.pep
VHCKPDSLTSQRHRLLIQYVRSTAAIHTSRSSPYIPNLCLPTTLGARTDDLLEWSSATDRLKTTVI

SEQ ID NO: 336474 - protein, 59 aa, Zea mays
  Clone ID: MRT4577_69975C.1.pep
VVSKEMVGNNPSFIFDIKGGISLNPKFVKIVFWYDNEWGYSPRVLDLLEHVSKVDASQK

SEQ ID NO: 336475 - protein, 43 aa, Zea mays
  Clone ID: MRT4577_69976C.1.pep
TSADYPEQWPSLLHWVSHNLDLQNQIFGALHVLRVLARKYEFK

SEQ ID NO: 336476 - protein, 51 aa, Zea mays
  Clone ID: MRT4577_69977C.1.pep
VHVQSHMTIQSNRNSIRFMFSHILRRVRKVKHWSRALPTEVNIDQYPAVNN

SEQ ID NO: 336477 - protein, 87 aa, Zea mays
  Clone ID: MRT4577_69978C.1.pep
HHPSYHINLSVFTSLPDMWAIGQQFPIIPIQRLQERPAVDGVLSDLTCDSDGKVSEFIGGRHSLPLHELPTHATRGYYLGMFLGGAY

SEQ ID NO: 336478 - protein, 97 aa, Zea mays
  unsure (1)..(97): unsure at all Xaa locations
  Clone ID: MRT4577_69979C.1.pep
TNSDPRFSTWHDEXCRVGREDHRMFFELLLLTWAXATLTWSALLNVKDIFWEVMMELXSLIKXKLREKNIIAPGYHSXSIXSIHKLHTVIENTREIL

SEQ ID NO: 336479 - protein, 36 aa, Zea mays
  Clone ID: MRT4577_6997C.1.pep
TRCRLVLNLAYEEVCPFPSVQVVLGFPTNIRLKFAL

SEQ ID NO: 336480 - protein, 70 aa, Zea mays
  Clone ID: MRT4577_69982C.1.pep
FGNHGGVVPRRRVYPVRVVPVAFVLMYSNRAGRRKWGPSAVKCHQAPVGLVGGPLVLAFRDSGKLASWCP

SEQ ID NO: 336481 - protein, 130 aa, Zea mays
  unsure (1)..(130): unsure at all Xaa locations
  Clone ID: MRT4577_69983C.1.pep
NKTGGGATRTNVRDARAMXATPADVKELPGAYAFVVDMPGLGTGDIRVQVEDERVLVVSGERRREEREDDAKYLRMERRMGKFMRKFVLPDNADVDKVAAVCRDGVLTVTVEKLPPPEPKEPKTIEVKVA

SEQ ID NO: 336482 - protein, 98 aa, Zea mays
  Clone ID: MRT4577_69989C.1.pep
DGVLELGVQVMGSFLADDVEAVDYKGRRSRCRSERRAEPSIDQALMLVAAGATDNVIRACTRTSCPGGLVLYAQLGSRVRRRRDTKEMCSPAGLEVPN

SEQ ID NO: 336483 - protein, 137 aa, Zea mays
  Clone ID: MRT4577_6998C.1.pep
VSTLTGITQKKEAKEMPTTNAKKKKIMYLQSRAEQSRRRRRSTRLCTWTTIPCTAFFCTYSNECAKTGKGGTGRRETFERHMDACMHPIRSDHRPSAEVKDSAKPAGRAGMLPLLSSRLMTLPPPSVRPPASASCQL

SEQ ID NO: 336484 - protein, 140 aa, Zea mays
  Clone ID: MRT4577_69990C.1.pep
MFKTGGFFVPQTRKPLGLNVFPPPPEPLKKSPGPGFFTTHGFLFPKLLFFPYGPMGSFWICGMGVLTVGIPGMVSNQVFFPNMVTWPLLGPQKFAFLVCLGPFFFKKKKKKKKKKKKKKKKKKKKKKKKKKKPKKKKKKR

SEQ ID NO: 336485 - protein, 76 aa, Zea mays
  unsure (1)..(76): unsure at all Xaa locations
  Clone ID: MRT4577_69991C.1.pep
QPTLFVPPSFSASSQVFTGHPLGSLGPSSLAAFSPNGSPYXXLCLFVXGXXXXXXXLLLRVTGSSAPSSPRCLRVA

SEQ ID NO: 336486 - protein, 153 aa, Zea mays
  Clone ID: MRT4577_69992C.1.pep
MANSNLPRRIIKETQRLLSEPAPGISASPSEENMRYFNVMILGPAQSPYEGGVFKLELFLPEEYPMAAPKVRFLTKIYHPNIDKLGRICLDILKDKWSPALQIRTVLLSIQALLSAPNPDDPLSDNIAKHWKANEVEAVETAKEWTRLYASGA

SEQ ID NO: 336487 - protein, 43 aa, Zea mays
  Clone ID: MRT4577_69993C.1.pep
QALLSAPNPDDPLSDNIAKHWKANEVEAVETAKEWTRLYASGA

SEQ ID NO: 336488 - protein, 153 aa, Zea mays
  Clone ID: MRT4577_69994C.1.pep
MANSNLPRRIIKETQRLLSEPAPGISASPSEENMRYFNVMILGPAQSPYEGGVFKLELFLPEEYPMAAPKVRFLTKIYHPNIDKLGRICLDIFKDKWSPALQIRTVFLSIQALLSAPNPDDPLSDNIAKPWKSNEVKAVETAKEWTRLYASGA

SEQ ID NO: 336489 - protein, 345 aa, Zea mays
  unsure (1)..(345): unsure at all Xaa locations
  Clone ID: MRT4577_69995C.1.pep
SCIVGALCLLLLVIYNCSDKFLSIRERRKERSRENAIRLARQQLKAQEGWKAAKQFARRHVSGMQGHLSRTFSRRRSFRQQVDADKSSHRVQEAPLMGQVQMQEMSDSAVFASESANEITEAMPSVIVDVSDGEVVATNENPATKGRHRSTHTQVFKYAYGEIEKEKFQQRQDNKNLTFTGVIAMVKDQQKEITRPLLKVEFRDLTLMLGKKKLLRSINGELRPGRVTAVMGPSGAGKTTFLNAVTGKVNGYKMTGSVLVNGKNLNIRSYKKIIGFVPQDDIVHGNLTVEENLWFSAKCRLSASMKHRDKVLLLERVIDSLDLQGIRNSLVGTAXKRGISGGQRK

SEQ ID NO: 336490 - protein, 112 aa, Zea mays
  Clone ID: MRT4577_69996C.1.pep
MLLSLIDWSGGVFKLELFLPEEYPMAAPKVRFLTKIYHPNIDKLGRICLDILKDKWSPALQIRTVLLSIQALLSAPNPDDPLSDNIAKHWKANEVEAVETAKEWTRLYASGA

SEQ ID NO: 336491 - protein, 122 aa, Zea mays
  unsure (1)..(122): unsure at all Xaa locations
  Clone ID: MRT4577_69997C.1.pep
PVEVAGDPGIIGALQSNLSTYGAQDMSRTGILALRRSRIGATARTWRYSAATYPDLIEALPKNPLTSVNRTGNXSSLGQPSNAGGDVHCCGSLXSFSVDHALDAIDGVLDADDASGLXDHTL

SEQ ID NO: 336492 - protein, 99 aa, Zea mays
  Clone ID: MRT4577_69998C.1.pep
WYRCPHVTTWLGSAALLRRALRRLLRRLQFPLLTSSVRQQQLLHWRQAQQQQHRHLLHPFPRDKSHHVADFFTICKPNNRNSRIHMQVYLSCLIYRRFI

SEQ ID NO: 336493 - protein, 158 aa, Zea mays
  unsure (1)..(158): unsure at all Xaa locations
  Clone ID: MRT4577_69999C.1.pep
QASFFLSFSNHYCIYYFVFYFLLPVINQVALANLTPYYQQQRWLPFNQLSTLNPAAYLQQQLWASTQLATAYWDQQQLQTLNQXATLTPLVKGGGGYPKPVGKKGQTGLLSKRKHGLLLPFYQQVEDNPATLXQLQQLRPFGQLAKTNPAASYQQHII

SEQ ID NO: 336494 - protein, 111 aa, Zea mays
  Clone ID: MRT4577_6999C.1.pep
DGETLESIGVIAELAGHCTAREPSQRPDMGHAVNVLVPMVEKWRPVKDEAEDYLGIDLHLPLLQMVKSWQDAEAGGLTDGGGSVMSLDDSKGSIPARPAGFAESFTSADGR

SEQ ID NO: 336495 - protein, 213 aa, Zea mays
  Clone ID: MRT4577_699C.1.pep
MAPAFSVSCAPGSSRPLAASPGPSVVVVASSQLPASSRSSERRRAPGLALAAAPGVGGRDGGGRWRAGISSFPFLPPFFTGNKGEKDAEKAMRLKEELLDAIAPLDRGAEATPEDKERVEQIVQQLEAVNQVKEPLKSDLLNGKWELLYTTSTSILQPQRPKYLRPFGKIYQSINADNLRAQNMETWPYFNQVTANLVPLNSRRVAVKFEPSK

SEQ ID NO: 336496 - protein, 60 aa, Zea mays
  unsure (1)..(60): unsure at all Xaa locations
  Clone ID: MRT4577_69C.1.pep
EVELGLTTMIESLENAFSSYGEILDFKVITDRETGRSRGFGYVTFCXENSMLDAIDNMNR

SEQ ID NO: 336497 - protein, 63 aa, Zea mays
  Clone ID: MRT4577_6C.1.pep
SLPASVTVFPLPTLPPPVVYHTIDRSSSTTFEWITYDTPNNIACGYLLTIKLDTILNILYVVG

SEQ ID NO: 336498 - protein, 68 aa, Zea mays
  unsure (1)..(68): unsure at all Xaa locations
  Clone ID: MRT4577_70000C.1.pep
KKVQRGIPPDFVTYSSVGHALCKARAMDRAEAFLRQMVNKGVLPNNWTYNNLIYGYSSTGQWKEALXW

SEQ ID NO: 336499 - protein, 82 aa, Zea mays
  unsure (1)..(82): unsure at all Xaa locations
  Clone ID: MRT4577_70001C.1.pep
MRKAGALCKLRSCITGATRGVRTQATLDDVEEGLHARTEAAKTWMTMPGPKRGEIVRHIGEALKDXLDPSGRLVSLDMGQSL

SEQ ID NO: 336500 - protein, 49 aa, Zea mays
  Clone ID: MRT4577_70002C.1.pep
LLLYINLKKKGFRGLLNEREISFAHILNFHLAFINDHLLQKPTSLYLAP

SEQ ID NO: 336501 - protein, 87 aa, Zea mays
  Clone ID: MRT4577_70003C.1.pep
VVLMLHLYRRRTCLYQQFCFRNQTDSLTLCYCNCQALTAKKAKSAGAGLTKTRPALIHAAPFTCQLRIVHTRYAYTLSLFQTKFLNA

SEQ ID NO: 336502 - protein, 102 aa, Zea mays
  Clone ID: MRT4577_70004C.1.pep
CMPRVAWQQLGASSRSVSSTTRHGGALIMAAASASASTSSSGYYCRLLLLENSRQRRRRPWTGRAAAPGWGRRRRRGAACRAFFRPSLALIEASMQWTSCGA

SEQ ID NO: 336503 - protein, 147 aa, Zea mays
  unsure (1)..(147): unsure at all Xaa locations
  Clone ID: MRT4577_70005C.1.pep
DHCFYHIEPKYTYPALXLDLKSISHLGVCKASATCGATGCAWLGQTAITGXLLAGSIIGSGRFNYTNRKGQVDTIAYTWCLFXLHALPHAVPTAELQAQPASAALGEVLQIMLHYAALCLCCYTMKKAKQYNVPASDGLTCMMTNNH

SEQ ID NO: 336504 - protein, 43 aa, Zea mays
  Clone ID: MRT4577_70006C.1.pep
RHLVMKLVFTGHGMLKHIVPQLGKPLVSRTSAWTLYNACLRTR

SEQ ID NO: 336505 - protein, 108 aa, Zea mays
  Clone ID: MRT4577_70007C.1.pep
MLTGRESLVRLIGRRRRSPLPASLAAALSLPSPSPSTSLAQADDGGGSGEAAGGEAGSTSGGSRVVGMGAEWVVCPVCGDSIRGSDYCVNTHLGPSTSASLVLNNLRC

SEQ ID NO: 336506 - protein, 83 aa, Zea mays
  Clone ID: MRT4577_70008C.1.pep
PRVRPRVRPRVRSSLLAPRHPPPRRLEAQTAPPPPVPEPVQVGEITEEELRQYDGSDPEKPLLMAIKGQIYDVSESRLLPLNP

SEQ ID NO: 336507 - protein, 795 aa, Zea mays
  Clone ID: MRT4577_70009C.1.pep
MEQDPERACLRSFELHESESSLYVLGTNSDRTLWRLLKIDRSEPSELVIDECSTVYTESEHPDLLKGLDDEHRSTGGVKFVTKFYGIIGFIKFLGPYYMLIITEQKKIGEIFGHPVYQVTRTSMVELANSKTRSTFQNFKDENRYRKILNALDLRKDFFFSYSYHIMRSLQKNLADPQDGWTLYETIFVWNEYLTRRIRNCLRNTLWTVALVHGFFKQDKFSISGKDIMFTLIARRSRHYAGTRYLKRGVNEKGRVANDVETEQIVYEAVPGPTEVSSVVQNRGSIPLFWSQETSKLNLKPDIILHEMQNNYEATELHFENLRARYGNPIIILNLIKTRERRESILRREFDKAIKIINKSLSEENHLRFLHWDLHQNSQGKPTNVLDVLLKVAFRALNLTEFFYCQVAPNSETSAQCPTLLNGLDQYLCDDNNSDDTECTEIVGDVSQEDISGSSDSSGNATTEDKFENSGLPPPKPPKFQKGVLRTNCIDCLDRTNVAQYAHGLAALGHQLHALGFIESPELGLEAPLAHHLMHFYEMMGDTLAVQYSGSAAHNKVFSAKRGHLKLFIQSQEFFRTLQRHYSNTCIDANKQAAINLFLGYFQPQQEKPALWELESSAGKHNNNLFDGHPSTLKRVKSDGTILHESNASISGSGRCHNEQLSASQPDVQNGFQFPTSESDSLHENEISSACGSGVAHLRYTPTASDVLHVPRAKVEYCHDSGDSNFLDLEWLSTSGNSSDERSIATSTPDANLSNENVISGITPDIMENHLAEMQYQKLPRNFVQWVNHGDTFWY

SEQ ID NO: 336508 - protein, 65 aa, Zea mays
  Clone ID: MRT4577_7000C.1.pep
EACSDCCQDYRRLNNDARSTYDRLAGCNCLKNSYTGDRGRNSGSVNRVPFKSGVSILYTVRHYTD

SEQ ID NO: 336509 - protein, 83 aa, Zea mays
  Clone ID: MRT4577_70010C.1.pep
KKTARENNGLFFRWGKKKPRAKKKKTQKISNKHALKGGGGIRVWELGPLGLGENPTSPKEGFFPFQKSKGKAPLCYLEETRKF

SEQ ID NO: 336510 - protein, 72 aa, Zea mays
  Clone ID: MRT4577_70011C.1.pep
PPPQDGISFPRGLGHLSTACPPPWSTNKAGFRGFFFFIFFGPPLGCVELTPPPVVLPPLESNAPSWGRLAFP

SEQ ID NO: 336511 - protein, 104 aa, Zea mays
  unsure (1)..(104): unsure at all Xaa locations
  Clone ID: MRT4577_70012C.1.pep
PLPVANAPTXLRQQLLQQIVPPLTQLVVANRAAYLXQLVPFNRLCMSXSVGSLQPRHQFLNPLAVASPLVAAFLQQRQLLPNSQFSLMNPVVTRQQPIVGGPLF

SEQ ID NO: 336512 - protein, 81 aa, Zea mays
  Clone ID: MRT4577_70013C.1.pep
AGRAKNTGRLIVRRCGDETKAERPKPKPQMRDIGLRHHHGTCYLRSRATFFSLNATRGGRAALWALTRLHPPAHLSGRGEP

SEQ ID NO: 336513 - protein, 85 aa, Zea mays
  Clone ID: MRT4577_70014C.1.pep
KYFSLGFTGGTPKSSTGVELVLMQRGLNLLGQETKGFLGNKEITGHWPHKFYAGHLQAKGLPKNLQPFGQHKGDFVFDTPKLRHQ

SEQ ID NO: 336514 - protein, 280 aa, Zea mays
  unsure (1)..(280): unsure at all Xaa locations
  Clone ID: MRT4577_70015C.1.pep
GPQNHAELNQADLGHHPCGRFAVRRSGLGVPRLGPLPRPSIEIIPRGWADRKWLIDIKGALTVGVFSDLLDLWDELQNIQLXEDKHIFRFATDGIYSAKAAYDGLFIGSTMAQYWELIWKTWSPPKCKFFLWLADLGRCWTADRLQKRGLSHPDKCVVCDQDQETIDHILVGCVFARSFWFQLLRQVNLSAFAPNVGEAKTMEWWSRISEQLQGIAKXGLNSLITLGLWTLXNHRNGCVFDKVKPSLEGAIRRAEEEIIIWKFAGAKHLALITAPIPGVL

SEQ ID NO: 336515 - protein, 109 aa, Zea mays
  Clone ID: MRT4577_70016C.1.pep
PSPFLAFLSPNNIATMAGIIFSIPILLSLSAFFSTLPFFLNTYNSSIASSSTLFLSFLTFSFFYNPFLLPIFFYLSFLINLLIFYYSCFFNILYFYFFFHFIFFSYFFF

SEQ ID NO: 336516 - protein, 96 aa, Zea mays
  Clone ID: MRT4577_70017C.1.pep
PTRPEHLSWNRLPDPATQTTELSLPERRELEVTYTDHVMIPTLRSRKGYLLPIHRPHTLTHETTWLSQSRSLLPTPSGSRPRHQCRPTLYVSLLLT

SEQ ID NO: 336517 - protein, 107 aa, Zea mays
  Clone ID: MRT4577_70018C.1.pep
GDGPQRGSLPNVWLQECSIKQGHLEGTMEVVELSPVRRQGFACTGTFPPTSNDLPSTLPSTQPSTSFPSGGVPPPLFQSWVCMITTPGYSHSKSRFISKARPSFRTI

SEQ ID NO: 336518 - protein, 38 aa, Zea mays
  Clone ID: MRT4577_70019C.1.pep
TTYFLVDIDGADLLSKAIVFDGHTFIGNLQFLLCCNKI

SEQ ID NO: 336519 - protein, 515 aa, Zea mays
  Clone ID: MRT4577_7001C.1.pep
PTRPVTGNLSFNTTAPPTDAQPNGESPRPRPTPGAPAGAGGKNSAGGIPGSGKKASSAVLLGTTIPVAVSVVALVSVGAVFLCKRRASVPPQAASVVVHPRNSSDPDNLAKIVVATNDGGSSSGTSHSGSSSGQAGDVHVVEAGSFVIAVQVLRGATRNFAQDNVLGRGGFGVVYRGELHDGTMIAVKRMEAVAVSNKALDEFQAEIAVLTKVRHRNLVSILGYAIEGNERLLVYEYMPNGALSKHLFHWKQLQLEPLSWKKRLNIALDVARGMEYLHNLGHHRFIHRDLKSANILLGDDFRAKVADFGLMKDAPDGNYSVATRLAGTFGYLAPEYAVTGKISTKADVFSFGVVLLELITGTTAIDDSRVGEGEETRHLAYWFSQIRKDAEQLRAAIDPALDVGDGETMESIGVIAELAGHCTAREPSQRPDMGHAVNVLVPMVEKWRPVKDEAEDYLGIDLHLPLLQMVKSWQDAEAGGLTDGGGSVMSLDDSKGSIPARPAGFAESFTSADGR

SEQ ID NO: 336520 - protein, 87 aa, Zea mays
  unsure (1)..(87): unsure at all Xaa locations
  Clone ID: MRT4577_70020C.1.pep
EERKSTIRKKRQSKRKEKRIRNXRKSKKKRDARKQKEXRKKRKKRKRVKRXKRKKRSDKGDHRRXKKKKRKKKHKKERMKKKSGPRK

SEQ ID NO: 336521 - protein, 106 aa, Zea mays
  Clone ID: MRT4577_70021C.1.pep
FISYKSTCATRFTSLRIPSASSSSSAISSTAENSIPIRPIAVAAFRLCSLTRTNTPFLELGNPETEKRMRSIKSRQLFPQLIARKKANLETEEVQIRIPISLRKSA

SEQ ID NO: 336522 - protein, 102 aa, Zea mays
  Clone ID: MRT4577_70022C.1.pep
TATRYLLTVIGELKRILVQTTGLEPERQRLFFRGKEKSDREFLHTAGVKDGAKLLLLEKPAPANIEQKVEPVIMDESMMKACAAVARVRVEVDKLSAKVCDL

SEQ ID NO: 336523 - protein, 329 aa, Zea mays
  unsure (1)..(329): unsure at all Xaa locations
  Clone ID: MRT4577_70023C.1.pep
MAGETVLVTGASGFIGSTLVRLLIGRGYNVHAGVLNPDDGAETEHLLAMAAGAGAGEGRLRIFRGDLLDGAALTDAARGCSGVFHLASPCTVDPVSDPQKQLIVPAVEGTLNVLRAAKEAGSVRRVVVTSSSSAIMPSPGWPAGELRDERCWTDIDYCXRRNRVWYPVSKTLAEKAAWRFAEENGXHVVVVNPMSVLGQIIPPTINSSMSVLLRLLQGCTEEYKDIWMGAVHVEDVALAHLLVFENPSASGRHICAESISHLSDFAAKLAELYPSYKVPKFPKDTQPGLVRAEAGVASKKLVELGLQFSPLEKIIRDAVESLKSKGYIS

SEQ ID NO: 336524 - protein, 52 aa, Zea mays
  Clone ID: MRT4577_70024C.1.pep
CTNNGSQNILPPYAPWYFSKCCYGDHVFVMLTGPHRFPFSAAPLTIRGGGRY

SEQ ID NO: 336525 - protein, 68 aa, Zea mays
  Clone ID: MRT4577_70025C.1.pep
TDIQCKIFSVIEKRRLVEYDLYFNLPMLLRVNGCLQRQQMPMQTGFFLTTNLNKPRETTIGDVGKKTH

SEQ ID NO: 336526 - protein, 105 aa, Zea mays
  Clone ID: MRT4577_70026C.1.pep
SKPSYDTGARFDFERCCNSSQELFPNWRPGALQYNVLCPPPPVESPRPPLECGDSIVFFRHSTIFVKKLKSSWVRVHVLYKNLGEADQKPSIVFWACVKFLKCGW

SEQ ID NO: 336527 - protein, 87 aa, Zea mays
  Clone ID: MRT4577_70027C.1.pep
SAALLFPGVCTDLFRKSCRTDIQCKIFSVIEKRRLVEYDLYFNLPMLLRVNGCLQRQQMPMQTGFFLTTNLNKPRETTIGDVGKKTH

SEQ ID NO: 336528 - protein, 211 aa, Zea mays
  Clone ID: MRT4577_70028C.1.pep
MAAVEQKDEKRWAHISESIDLLFTRLGDVTRVQEQIQVNQELGAKAMDQVLKDQSLLAQQIAATGKAVAHLSMEREVEADLETYSRDSRDARPPFHRRQPRPFPQPQGMATDSEASKAAEVVVDWHKQDKKRMLHAVYRVGDLDRTIKYYTECFGMKLLRKRDVPDEKYTNAFLGFGPENTNFAVELTNFAEVSRPTCVAPLPGSVLAVPL

SEQ ID NO: 336529 - protein, 92 aa, Zea mays
  Clone ID: MRT4577_70029C.1.pep
ARPIFTTPPSTRRSMHCNRAERRSSQLLTGSSSSLPGSVSSHSDAPCAGAYSGSGLAGSGSGEIHTMGDALMLPCRLLAPLSATFGAFLSAS

SEQ ID NO: 336530 - protein, 169 aa, Zea mays
  unsure (1)..(169): unsure at all Xaa locations
  Clone ID: MRT4577_7002C.1.pep
MRDTSGPPPHPYPSISTRRTTDYQIPRIFPPLLHRPAIFADKIHGKYPRFLSDLTSGAVRRDFLGGGGPSRPDPWGTCPRFNARPAXAKGDQAGELVSAGWTNDTHNMYISSMEASFMQQLRGQQQQHHHAAPDRNIAHVGLLGHGLKSHQEGAXDNARAERNVSCPRD

SEQ ID NO: 336531 - protein, 124 aa, Zea mays
  Clone ID: MRT4577_70030C.1.pep
LCGARGGRFSYHPPDRAFPLFPAPRSRSRSRARARARAAPPPSSCEADSRRGTAHQMILVAIVAELLEEYTALVARVLEQLLHGAPFPRRMRFLMLRSLPFATPPLPPPPPAHALHVGAPSPPL

SEQ ID NO: 336532 - protein, 114 aa, Zea mays
  Clone ID: MRT4577_70031C.1.pep
LGPSSRPGKFPLFPAPRSRSRSRARARTAPPPSSCEADSRRGTAHQMILVAIVAELLEEYTALVARVLEQLLHGAPFPRRMRFLMLRSLPFATPPLPPPPPAHALHVGAPSPPL

SEQ ID NO: 336533 - protein, 68 aa, Zea mays
  Clone ID: MRT4577_70032C.1.pep
MILVAIVAELLEEYTALVARVLEQLLHGAPFPRRMRFLMLRSLPFATPPLPPPPPAHALHVGSRSPRL

SEQ ID NO: 336534 - protein, 94 aa, Zea mays
  unsure (1)..(94): unsure at all Xaa locations
  Clone ID: MRT4577_70033C.1.pep
LLRAPSTSILLNRPTRPRTRGVRLQIWGANISGQTPHIILSRDSFDQDXRVYYAKMTVKIGXQVLIVGDDLLCTNPTRAAKAIKVKTCSALIFK

SEQ ID NO: 336535 - protein, 68 aa, Zea mays
  Clone ID: MRT4577_70034C.1.pep
MILVAIVAELLEEYTALVARVLEQLLHGAPFPRRMRFLMLRSLPFATPPLPPPPPAHALHVSSPSPRL

SEQ ID NO: 336536 - protein, 53 aa, Zea mays
  Clone ID: MRT4577_70035C.1.pep
LIMVLRGCYSKMHQPRDCMVLRLGQHQQIGHPGLAQMPVFMEKGLINSSPTFA

SEQ ID NO: 336537 - protein, 321 aa, Zea mays
  unsure (1)..(321): unsure at all Xaa locations
  Clone ID: MRT4577_70036C.1.pep
MDGEEIGLVLARASDLRTRISACAAAAAGAPGPRRDDEEAAKRLDAAEGDEEGAEEEEDEEEEVESLVGISDALESLERQLAALQDLQHQQRYERETILSQIDRSRRSLLAKLREYKGQDCEVIHEAAAFAGERIERDDSLVLPPYSDHVTNSFALDDLYPLSYMSKPKRLHTQPDSEDDGTAQDDARRNGRESRDTRASKRGSGGGGGGGGGGGIGAFMGWVAKTAVMVVGAVCVMKAAGYESVTWRNGGARLDIAGLFGXVVVSRRWRRAAEXRRAPLRCPPGKAMVVENGRARCVVKERVEVPFDAVLAPPSSRYGLG

SEQ ID NO: 336538 - protein, 86 aa, Zea mays
  unsure (1)..(86): unsure at all Xaa locations
  Clone ID: MRT4577_70037C.1.pep
MAGQGQLYYTDMHGTLITRASSAMAHITIRMTVGKPQVAPCGNPXYDLHRVKYHRHLSSQPPNYLTEQFPDDYGCDTHGLHDYPHT

SEQ ID NO: 336539 - protein, 46 aa, Zea mays
  Clone ID: MRT4577_70038C.1.pep
RADLLNIDLPIERPGSLRRDGRSCGRSYVKTYCTTGASSGRQPGFY

SEQ ID NO: 336540 - protein, 97 aa, Zea mays
  unsure (1)..(97): unsure at all Xaa locations
  Clone ID: MRT4577_70039C.1.pep
LLKLKYLCYMCMFTADELYSVTCVCSRQHPVCMCMRMRLRNLLLRGLLCLTLGGGLRVPSLPPPLSLSLSLSLSXCDRGGGGGGHEGTEARQATGQQ

SEQ ID NO: 336541 - protein, 44 aa, Zea mays
  Clone ID: MRT4577_7003C.1.pep
FFFFFFFFFFFFFFFFFFFFFFFFFFFFLTKTCKNWGPLFRGRA

SEQ ID NO: 336542 - protein, 74 aa, Zea mays
  Clone ID: MRT4577_70040C.1.pep
TCYYDIYCQFHGVHSKTLGDIFGPPQSLRKVGNLHRRIGVYVSCNYALVIAGDNWGRKPNFCDGSGLVGVSGGP

SEQ ID NO: 336543 - protein, 116 aa, Zea mays
  unsure (1)..(116): unsure at all Xaa locations
  Clone ID: MRT4577_70041C.1.pep
VLKDGQWIDVQPLAGAIVINTXHQIEVLSNGRYRSAWHRVLPMRDGNRXRSIASFYNPANEATISPAAVQGSGGGETYPKYVFGDYMDVYVKQKFQAKEPRFEAVKAAAPKSSPAA

SEQ ID NO: 336544 - protein, 61 aa, Zea mays
  Clone ID: MRT4577_70042C.1.pep
HPRFKAHHFFPYKKKKTTGKRGPEKKNLLANVPLLAGWTFLCNTRIRGGGPLCKTKMRGVF

SEQ ID NO: 336545 - protein, 83 aa, Zea mays
  Clone ID: MRT4577_70043C.1.pep
QVTLCLHVRYRGKQLGGDQQYGQARTHCVISCRWCFGPNIRVIAYVVWFLCLILTVHPVPPSGVFLVKITSSAEARGLHAGHS

SEQ ID NO: 336546 - protein, 116 aa, Zea mays
  Clone ID: MRT4577_70044C.1.pep
EGRRHPVLHQPRPARHRGRRRQRRLVRRQRRVVGGVPQGEMEPLVQLRGLTGRRLNESAACSIHQLRGSRAICVCVCVQLYICRSFSLILCSLITVLFLLANEFVHSQTDAIIQFG

SEQ ID NO: 336547 - protein, 118 aa, Zea mays
  Clone ID: MRT4577_70045C.1.pep
MANPRVFFDMTVGGAPAGRIAMEPGSTEGPTDRGGPQALCGGGGGDCFSAPGRPIHHLLLSISCSACATPSGVSGCGAAAEFEFGGPGGPMISADELFHKQSRPVTLRPVPDLVPGSG

SEQ ID NO: 336548 - protein, 48 aa, Zea mays
  Clone ID: MRT4577_70046C.1.pep
LGVVQPKCPYWLAWASSIIGCPGLLIYKLYILNWQFCAQSHFNSYTYY

SEQ ID NO: 336549 - protein, 45 aa, Zea mays
  Clone ID: MRT4577_70047C.1.pep
SRNLIARNSYFILYACSNFKYSILTCLDGICRLIYNHYPHCSDLV

SEQ ID NO: 336550 - protein, 58 aa, Zea mays
  Clone ID: MRT4577_70048C.1.pep
LFGTRLTLAGILGMLEAERHCTKLELKELVLMQLPIDTPGANYRAVCALNTYFPNVNT

SEQ ID NO: 336551 - protein, 98 aa, Zea mays
  Clone ID: MRT4577_70049C.1.pep
KRAYMRKHGIPQIFLNGYKWELQTGGLKLARTSYVKKKQGGGYKKQSGGPNFFCPLGPKKKFLGVHQVTGETKFFPPSKLLLGYSTAKGKMTFFLTRG

SEQ ID NO: 336552 - protein, 72 aa, Zea mays
  unsure (1)..(72): unsure at all Xaa locations
  Clone ID: MRT4577_7004C.1.pep
YLPADSLDQELDITXGDGRSKELDNRRMMTPKLDRTYDSVKHYRNEYLFVKIDMPLWLEPNNXHDTITDYYL

SEQ ID NO: 336553 - protein, 132 aa, Zea mays
  unsure (1)..(132): unsure at all Xaa locations
  Clone ID: MRT4577_70050C.1.pep
RLFQALWLRYTAWVSDYHLYCCDILFLFVVFTGVPLPIALIELRAPDAXVSPYKLQPRVRISRAEFTRCYXDVLRIFFLVMGPLQLVCYPVAKLAGIHPNVXLPSLAEMAAHLLVHFPVEDYLNDWTHRVLH

SEQ ID NO: 336554 - protein, 168 aa, Zea mays
  Clone ID: MRT4577_70051C.1.pep
RHRHSIITVISRHNINNTMNTVRNIRTSNKSNLLNSSISQKLLLPLATRLMHKTRLPPILQPIKTPHHMPMREHHRPTTVQRHSNRKNHNSRRTSRHANKKRRYQHTQVDAHANRRQIPTSSRRQRPNNRPSRLLSNRPRPSTPTPPTLSTHHPRISQAHKSAQRFQA

SEQ ID NO: 336555 - protein, 78 aa, Zea mays
  Clone ID: MRT4577_70052C.1.pep
TNSNDGLAALNSSPIDNSQFFKQAQLKMRGPPSLVSQVFIPGPWTIFVNRQEQPSAPPKMVFQSGLQDFNWWRVLFKT

SEQ ID NO: 336556 - protein, 104 aa, Zea mays
  Clone ID: MRT4577_70053C.1.pep
MALVPPPALPPATLVGAWLPVHRTGDGRAVRRRTGARTSSHVLRRPSSLEDGGKDLFAMAHMLRWSPLLASRAELATTRPYWCGGSSLGGQVVRPDPLDGGSRY

SEQ ID NO: 336557 - protein, 389 aa, Zea mays
  Clone ID: MRT4577_70054C.1.pep
MDSLFQCDKINRHGGDARLEAEPRTTPSCRAGLLHASAAQDRPTSVGTHGAGGMAEHLLSTAVHDTLPGSYVRPEPERPRLAEVVTGARIPVVDLGSPDRGAVVAAVGDACRSHGFFQVVNHGIHAALVAAVMAAGRVFFRLPPEEKAKLYSDDPARKIRLSTSFNVRKETVHNWRDYLRLHCHPLDEFLPDWPSNPPDFKETMGTYCKEVRELGFRLYAAISESLGLEASYMKEALGEQEQHMAVNFYPPCPEPELTYGLPAHTDPNALTILLMDPDVAGLQVLHAGQWVAVNPQPGALIINIGDQLQALSNGQYRSVWHRAVVNSDRERMSVASFLCPCNHVVLGPARKLVTEDTPAVYRNYTYDEYYAKFWSRNLDQEHCLELFRT

SEQ ID NO: 336558 - protein, 39 aa, Zea mays
  Clone ID: MRT4577_70055C.1.pep
LFKSIISLSCLVNLIVIKICKFLLYISAGNLSVLKESLC

SEQ ID NO: 336559 - protein, 101 aa, Zea mays
  unsure (1)..(101): unsure at all Xaa locations
  Clone ID: MRT4577_70056C.1.pep
RLILSVAGIAVAALVGRHRHVASGHGATLTVFPLMPXFVLVGAGEAFMYMGQLAVFLRECAKGMNTMSTGRFLNNCTLRFFFSTLLVTILHNVSAHTGRDC

SEQ ID NO: 336560 - protein, 54 aa, Zea mays
  Clone ID: MRT4577_70057C.1.pep
MEMKKITGPVLVPTAEVTGTHAARSANPSLMTWTAIVTIVVCASLSTDVCYICF

SEQ ID NO: 336561 - protein, 79 aa, Zea mays
  unsure (1)..(79): unsure at all Xaa locations
  Clone ID: MRT4577_70058C.1.pep
MCFFWHGQNERADHAVSVCFXDDLNFDLNHSRSMEELANGDKMFVAMPDCKWKLYTVSGVSNKRDQIELMGMKTFLDMT

SEQ ID NO: 336562 - protein, 61 aa, Zea mays
  unsure (1)..(61): unsure at all Xaa locations
  Clone ID: MRT4577_70059C.1.pep
RYIKTRYNSSEPSLIIDEYRFSDIPKIREIVDGLXLEPHGKMVSRIEGNIDDSLINRNASA

SEQ ID NO: 336563 - protein, 52 aa, Zea mays
  Clone ID: MRT4577_7005C.1.pep
RLPSPRPIVVKWQWYGRLSNPLQFIRSVAAGVSVLHYVWQPLRSQLKVKKPV

SEQ ID NO: 336564 - protein, 61 aa, Zea mays
  Clone ID: MRT4577_70060C.1.pep
AELDGFESQTSQTSSQFFSIPLNPCVLGITDQALSVFVTSFRMVWAFEVKRIIRPCSVNQK

SEQ ID NO: 336565 - protein, 188 aa, Zea mays
  unsure (1)..(188): unsure at all Xaa locations
  Clone ID: MRT4577_70061C.1.pep
LYSYHHLINGFAVHMSSLQAEFLRKAPGVKHVERDMKVQKLTTHTPQFLGLPTGVWPTGGGLDRAGEDVVIGFVDSGIXXXHPSFAAHKTDRYGPVPRYKGKCEKDLVTQRSFCNGKIVGAQHFAKAAMAAXHTAAIAAGNNGIPVRMHGHEFGKASGMAPRAXAVYKVLYRLFGGYVAEDVAAIDQA

SEQ ID NO: 336566 - protein, 57 aa, Zea mays
  Clone ID: MRT4577_70062C.1.pep
TQLWPSSIREAGGIGRDYAKNQIHTHLTRPRHKIPTYKTKQIKSYLWRSNVDFIGLH

SEQ ID NO: 336567 - protein, 124 aa, Zea mays
  unsure (1)..(124): unsure at all Xaa locations
  Clone ID: MRT4577_70063C.1.pep
RALRLLTRRLTGLDRGICLLHRMGVGSCISVVGTLVDGFWERHQKDAAAEGCATDAXHVXPLSGYWLVPQHALDGEADEFTSLGHLEFMYDQGPQSTRNTGTGLPWLAISLGSYSSTHGGGPWA

SEQ ID NO: 336568 - protein, 821 aa, Zea mays
  unsure (1)..(821): unsure at all Xaa locations
  Clone ID: MRT4577_70064C.1.pep
MRRIRLACLLVIFVQVKWAAVGTQDASIATYKGVHGVSSELLNKRKVQGTVHLDGYMDLSSDAVTSYALHLRRHHDKLLDSLLVEGTYEKLYSYHHLIXGFAVHMSSRQAEFLKKAPGVKHVERDMKVQKLTTHTPQFLGLPTGVWSTGGGLDRAGEDVVIGIVDSGIYPEHPSFAAHNTDPYGPVPRYKGKCEMDPLTQRSLCNGKIVGAQHFAKAAMAAGAFNPDVEFASPLDGDGHGSHTAAIAAGNNGIPVRMHGHEFGKASGMAPRARVAVYKVLYRLFGGYVADVVAAIDQAVQDGVDILNLSVGPNSPPTATRTTFLNPFDAALLSAVKAGVFVAQAAGNGGPFPKTLVSFSPWITTVAAGVDDRRYKNHLTLGNGKLISGLGVSPATHGNMSFSLISAADALLGSSASKYSALDCQRPELLNKRKVQGKILLCGYSFNYISGTASIKKVSQTARSLGAAGFVVAVENSYPGTKFDPVPVSIPGILITDVSKTEDLIDYYNSSTVRDWAGRATAFKATAGIADGLAPTLYNSAPQVALFSSRGPDVKDFSFQDADVLKPDILAPGNLIWAAWAPNGTDESNYAGEGFAMVSGTSMAAPHIAGIAALIKQKNPKWSPSAIKSALMTTANTLDKGSHPLRAQQYTASEMMTLSRATPFDCGSGAVNPKGALDPGLVLDASHEDYITFLCSIPDVNQSEVSNIAGSACNSNSKGQRPFDLNIPSIAVSQLRGTVVVKRTVTSVSDETETYTIMTRMPPEVALEVTPPAVTVVPGASREITVTLTARSVTGTYSFGEIAMKGDRGHLVRIPVVAMGFK

SEQ ID NO: 336569 - protein, 129 aa, Zea mays
  Clone ID: MRT4577_70065C.1.pep
KNQIPKGGLCLYIHPVYKGGVGPKLRTPQAQNQFFQHTNNIKHTKTKNPAGGPGFLGGLAKTKHNTRNPGRDFYFLMAWEQKKGATKPPKLFFFFLKLNPEAHRVGEKKPPEPKRGLFGGGESIFFFKV

SEQ ID NO: 336570 - protein, 42 aa, Zea mays
  Clone ID: MRT4577_70066C.1.pep
LLTHPLSHSFIFSFETKYIIVHDSLSYSSRITSKTTTTCIPV

SEQ ID NO: 336571 - protein, 283 aa, Zea mays
  Clone ID: MRT4577_70067C.1.pep
MSAPGETMLNLGSKTDKRLTAFHPEIEELIYSDVENSEHKFVLKDKKKPIIFSMARLDRVKNMTGLVEMYGKNARLRELANLVIVAGDHGKESKDREEQAEFKKMYSLIDEYKLKGHIRWISAQMNRVRNGELYRYICDTKGAFVQPAFYEAFGLTVIESMTCGLPTIATCHGGPAEIIVDGVSGLHIDPYHSDKAADILVNFFDKCKADPSYWDKISQGGLQRIYEKYTWKLYSERLMTLTGVYGFWKYVSNLERRETRRYIEMFYALKYRSLASQVPLSFD

SEQ ID NO: 336572 - protein, 117 aa, Zea mays
  unsure (1)..(117): unsure at all Xaa locations
  Clone ID: MRT4577_70068C.1.pep
XECKTEASATDGSLVTDVGFFSAWYMHDLWLVPLGMAVFILLPYSRARLACCARCHCCQLVIMLHALATFRVLQEMSFLTLSMVIQTNCFDVLFLASIQKLPPFRKENMSCDDHRKK

SEQ ID NO: 336573 - protein, 62 aa, Zea mays
  Clone ID: MRT4577_70069C.1.pep
TGVSAYLTSKCRRKRLGDFLSSSSLCSIRLKESGWDFWAQYIYGRFVLCSQKLKVIRAFSRN

SEQ ID NO: 336574 - protein, 123 aa, Zea mays
  unsure (1)..(123): unsure at all Xaa locations
  Clone ID: MRT4577_7006C.1.pep
MANTKAEMQAQIYQDCQDRQQAPPPPQTAPPRDKHREFMSHKPPTFSSSPEPLQADDWLKAVEQMLNIAXCTDREKVLYTLGRLTSPTADWWDSYCAAHATANTITWEKFSTHFRNYHILAYV

SEQ ID NO: 336575 - protein, 69 aa, Zea mays
  Clone ID: MRT4577_70070C.1.pep
EAIHLRRHVRRRHSCLHHLASAGTTAAPRPLGLWLPSPLPNGDFPPSLRRLLNTIIVGSSRARARAEFR

SEQ ID NO: 336576 - protein, 125 aa, Zea mays
  Clone ID: MRT4577_70071C.1.pep
AVLLLTLLAALHVAGHNNNNENRNPGGGGGDPGAFFAGMPRFSGGGVPGGGGFFGGWGEGGLGYRRGAVVPPSTVCPQDGPCRGKRLTCPPRCFRTFSYGGKNGGGGGGGGGCSFDCTERCAATC

SEQ ID NO: 336577 - protein, 92 aa, Zea mays
  unsure (1)..(92): unsure at all Xaa locations
  Clone ID: MRT4577_70072C.1.pep
HASEEVPRSVPGLTVEVHKLDPLVQRALAAALRSKDLRGLYDRIPPHLESKLMPFQREGIRFVLQHGGRALIADEMGLGKTLQAIXCCFVPS

SEQ ID NO: 336578 - protein, 175 aa, Zea mays
  Clone ID: MRT4577_70073C.1.pep
TPAVPVRTSRVDPRVRAPGRQRRRRLREAPRGGRASPPPPPGCAGRLFTVAVLQAPLLFFFFFSLSLPQSAIKGKLQELGAYVNEELPDYIMVMVANKKSQDQMTEDLSLFLGNNTIRFTVWLHGVLDKLRSVTTDPSSLKSPDANILYSNVPSNKKSFSHSYQRKHQADDPHLA

SEQ ID NO: 336579 - protein, 48 aa, Zea mays
  Clone ID: MRT4577_70074C.1.pep
LGLPRGPVAILGVTDRPYPFYKNLSTLRINDEAYPVVPVGIKLFMLGV

SEQ ID NO: 336580 - protein, 178 aa, Zea mays
  Clone ID: MRT4577_70075C.1.pep
MPLGQRAGDKSDSRYCGVEVLDFPAGDGLPAVLTHSLSSAFDFLLAPLVDPDYRPTPGAVLPVAASDLVLSPSQWSSHIVGKISEWIDLDSEDEQLLLDSELTLKQEIAWATHLSLQACVIPPPKRSTCANYARVVNNILQGLTNMQLWLRIPLEKSESMEEDRDKVNNNNPTSETVD

SEQ ID NO: 336581 - protein, 58 aa, Zea mays
  Clone ID: MRT4577_70076C.1.pep
WHLPFFLCSLSWFATLCSSMSVSSFSASITSLRAIGDELVLCVRWSVLAPSFAAGVSV

SEQ ID NO: 336582 - protein, 93 aa, Zea mays
  unsure (1)..(93): unsure at all Xaa locations
  Clone ID: MRT4577_70078C.1.pep
IQPPLKLKQNWGELNLNKNPKSRGGQQQRRGGXFSHQTGGTKTGELQKKNPFVPPPILGSTSHHSQPSRLYRHTQANVPRGGGNSTKKTRGAW

SEQ ID NO: 336583 - protein, 143 aa, Zea mays
  unsure (1)..(143): unsure at all Xaa locations
  Clone ID: MRT4577_70079C.1.pep
MFTCRCAVVVVVALAVLLLPAAATQLVYCDDSTYADNSTFQANLNLLSAALPANASASPAGFATGAVGTAPEQVNGMALCRGDTNASSCSSWVAAAFRYAQAQQGCLSXKGATVYLDDCTLRFAGIRFLDFLREDQWLVPELV

SEQ ID NO: 336584 - protein, 254 aa, Zea mays
  Clone ID: MRT4577_7007C.1.pep
MLRGRPSCPPISGRHCPPISGRHRPPCSDHRRISQPGFDTVQVDMSKRKISLHSCSTAAAAVEMSKRKISLHNCSTAAAPKPQQHLFLVLDDWDKGYSVRKVDLDALDYANDNCEPDDFSEPPLARFDVVHGHSYAFVAHGTKIVAMKPHEVSPAIPAFDTATSAVGILPWPEFRMSFGRPILVSIDGRLFLFINRIHYLGDPPVCEAVYAPAVQKPWLVVTRLATFAAAVHSSCMLCTPGWRHPRGVIPLNGG

SEQ ID NO: 336585 - protein, 43 aa, Zea mays
  Clone ID: MRT4577_70080C.1.pep
MRERITIHIGQARIQAGNACWELHWLEHEIQAEQQIPGDTRIG

SEQ ID NO: 336586 - protein, 56 aa, Zea mays
  Clone ID: MRT4577_70081C.1.pep
SLVSLTDRRRYGDRLSKDIFNYLFDVLNSSNTFAYGGTSIMDTWYDSNRLVARAPS

SEQ ID NO: 336587 - protein, 314 aa, Zea mays
  Clone ID: MRT4577_70082C.1.pep
MSATGRAPCGLPRIGLGTAVQGPRPDPVRAAVLRAIQLGYRHFDTAAHYATEAPIGEAAAEAVRTGLVASREDLFVTSKVWCADAHRDRVLPALRRTLSNLQMEYVDLYMVHWPVTMKAGRFTAPFTPEDFEPFDMRAVWEAMEECHRLGLAKAIGVCNFSCKKLETLLSFATIPPVVNQVEINPVWQQRKLREFCRAKGIQLCAYSPLGAKGTHWGSDSVMDSGVLHEIAKSKGKTVAQVCLRWVYEQGDCLIVKSFDEGRMKENLDIVDWELSEEERQRISKIPQRKINQGRRYVSEHGPYKSFEELWDGEI

SEQ ID NO: 336588 - protein, 49 aa, Zea mays
  Clone ID: MRT4577_70083C.1.pep
FRLHYKRVINWKVWGGKFGCFRKSGVFKFLHVWLVLIFCIRSRRRAVFV

SEQ ID NO: 336589 - protein, 56 aa, Zea mays
  Clone ID: MRT4577_70084C.1.pep
CYLPSYIFKFLYCVSPWSNNNSNHQPVSVFEKPLFLLMVVLVGPAMSTASVQVMAG

SEQ ID NO: 336590 - protein, 69 aa, Zea mays
  Clone ID: MRT4577_70085C.1.pep
MCYFPSKACCICTLIVLVLVGVGLIFGFGVYTRGFHKLTSNMHLQDYAYGRGGACGFFRAYRHFGPAAD

SEQ ID NO: 336591 - protein, 164 aa, Zea mays
  Clone ID: MRT4577_70086C.1.pep
WWLPLVPPRFFFMFFPPPPGGAAPPFLCSGGGALFLGGWRFFCPPGSLSGGMVFPPGCGENAVFFNSLWFSWADFFFFFSPFCSRGGGIVVFLFWSPSPLSLGVESFLRALFPLCSPPVFAPVVVSLFSFFLPLTLISFSKKPKKKNGLKKKKKKKKKKKKGGP

SEQ ID NO: 336592 - protein, 75 aa, Zea mays
  Clone ID: MRT4577_70087C.1.pep
KLVLWVSYFGDLFSAKKKFNLTVHCLFSPPSNFFIIKKAGSRFQRAKLQHRSILNQNQRIKKITGGLGDFETLKW

SEQ ID NO: 336593 - protein, 53 aa, Zea mays
  Clone ID: MRT4577_70088C.1.pep
FQPWILHICTCSNILIPTNLEDEVACSFLLCCHFERYVHAASNSYSTPFVQCS

SEQ ID NO: 336594 - protein, 88 aa, Zea mays
  Clone ID: MRT4577_70089C.1.pep
KKKKKKKKKKKKKKKKKKKKKKKKNFYLKLFPPWGQILQVSFSLLAPSFLLFWGLFCPGPSPLTMGWPPFFNLVFEKPLGGQTLLSLG

SEQ ID NO: 336595 - protein, 108 aa, Zea mays
  Clone ID: MRT4577_7008C.1.pep
FKKEMMKSFSMSDLGLLTYYLGIQVTQNEGVISLCQSSYTLKILEQTGMKGCNPCHVPMENRLKLSKNDKTPSVDKTKYRSVIGSLRYLVNTRPDIAYSVGIVSRYME

SEQ ID NO: 336596 - protein, 189 aa, Zea mays
  unsure (1)..(189): unsure at all Xaa locations
  Clone ID: MRT4577_70090C.1.pep
KKNKKKKKIKKKNKKKKKKKKKXKKKKKKKKKKKKKKKKVKKEKKKKKNKKKKKKKKKKKKKXKKKKKKIKKKKRKQKKKQKKKKNKKKNYKKKKKKKXKNKKKKKTKKKKKKMRKXKKKEKKKKKKKKGKKKKLKKKKNKKKIKKIKQIKKIEIKKKTKKQYKXKKHKKKKXKNNKIKQHNKNEKKKN

SEQ ID NO: 336597 - protein, 39 aa, Zea mays
  Clone ID: MRT4577_70091C.1.pep
ASELNQGIYKRTIHASMFFLVRKMLKLFFDSTVAIPLHK

SEQ ID NO: 336598 - protein, 58 aa, Zea mays
  Clone ID: MRT4577_70093C.1.pep
LESIAEPFRQPHHALLNRSLFPDDGRDAHALNQALDHGLHPLLHLVILIVRVLVHLQH

SEQ ID NO: 336599 - protein, 394 aa, Zea mays
  Clone ID: MRT4577_70094C.1.pep
MAAAAILPELGTQVLIPVAAAVGIAFSVLQWVLVSKVRLAPERRADGGGAVKSGPSDYLIEEEEGLNDHNVVVKCAEIQNAISEGATSFLFTEYKYVGLFMGIFAILIFLFLGSVEGFSTKSQPCHYSKDKTCKPALANAIFSTIAFVLGAVTSLVSGFLGMKIATYANARTTLEARKGVGKAFITAFRSGAVMGFLLAASGLLVLYIAINLFGIYYGDDWEGLFEAITGYGLGGSSMALFGRVGGGIYTKAADVGADLVGKVERNIPEDDPRNPAGFAIGSAALVSLALFGAFVSRAAISTVDVLTPKVFIGLIVGAMLPYWFSAMTMKSVGSAALKMVEEVRRQFNNIPGLMEGTTPDYAPCVIFTCASLGMIPPGALWFAPPPGRWGFYFG

SEQ ID NO: 336600 - protein, 343 aa, Zea mays
  unsure (1)..(343): unsure at all Xaa locations
  Clone ID: MRT4577_70095C.1.pep
GRSGAVMGFLLAASGLLVLXYIAINLFEIYYGDDWEGLFEAITGYRLGGXLFGRVGGGIYTKAADVGADLVGKVERNIPEDDPRNPAVIADNVGDNVGDIVGMGSYLFGSYAESSCAALVVASISSFGINHQFTPMVYPLLVSSVGIIACLITTLFATDFFEIKAVSEIEPALKKQLIISTVVMTIGIALMXWLGLPYTFTIYNFGAQKTVQSWQLFLCVAVGLWAGLVIGFITEYYTSNAYSPVXDVADSCRTGAATNVIFGLALGYKSVIIPIFAIAFSIFLSFSLAAMYGVVVAALGMLSTIATDLAIDAYGPISDNAGSLSLYGCILSYICISESLSIF

SEQ ID NO: 336601 - protein, 138 aa, Zea mays
  unsure (1)..(138): unsure at all Xaa locations
  Clone ID: MRT4577_70097C.1.pep
QRXNDGXLRFSATRXRXRARGARGPXTATNPNDQXXRXPRDGARDRKRXARXAXGXGHRTTGGXAGKXNXXTDPSDDAADPXTPRKGTPRHAXTRARAPXXTXPRDRXXEXXQEXHXSSDKTXDGRGAHXHNXGAQNT

SEQ ID NO: 336602 - protein, 92 aa, Zea mays
  Clone ID: MRT4577_70098C.1.pep
GGPVVIRYSPVVSLEPSTPPNVRCVLKQPTSLTAPGAATGDRPHGALTLQPGGCRRTYFFFLAQDSCPHYKLHGGGGGLPSFTVACSLAVRR

SEQ ID NO: 336603 - protein, 73 aa, Zea mays
  unsure (1)..(73): unsure at all Xaa locations
  Clone ID: MRT4577_7009C.1.pep
TPLYATCTGSPQLNKHHKIPCPSKSYLQXTFTSSHISPSTQVIVFYSRHSPPPPPLISNFFYQIKTFQCCALA

SEQ ID NO: 336604 - protein, 340 aa, Zea mays
  Clone ID: MRT4577_700C.1.pep
MPAGMAAHVRLTARRPRARPSSPATPQQHGPQSHCTRQVGRSRHPHLGAAGNQSPRLPLGYPHPPELHKNLRSQAPTRAEGASSQQPRGATALPSTPHPNASLWPPPTRPLTQKISTPRPHRAEDHMASAVSLLLSPPRLLHRDGTSRLLSIPHRRVLLAAPNNATPRRLLAPAPRASNKNDNSGAVEAPDRLVAAVAYLYPFLDGAHHGRFLLTQFPFFGALLRPLAPAARLFHSSPLTPFLLFLTLYFAVVRNQQAFSRFVRFNAMQAVVLDVLLIFPDLLAQSFAPSGGVGFEIFQSMESTVFLFLLVSLVYGGGACLLGKTPRLPIVADAAERQVM

SEQ ID NO: 336605 - protein, 126 aa, Zea mays
  unsure (1)..(126): unsure at all Xaa locations
  Clone ID: MRT4577_70101C.1.pep
AGFKPHKFLPXSNLGSXNKLDMLQQHQLPLSQLPCAYPQKFLPFNQLAALNSPAYLQQQQLLPFSQLAGVSLATFLTQPQLLPFYQHVAPNAGTLLQVQQLMPFNQLALTNPTVFYQQPIIGGALF

SEQ ID NO: 336606 - protein, 679 aa, Zea mays
  unsure (1)..(679): unsure at all Xaa locations
  Clone ID: MRT4577_70104C.1.pep
MALRHLVTGQNNCAPDGASSSNPLNALANAFLGQSSKAQSIKELPGSVSVPSTSGFSAPAPLSNIPGSENEFKQDQRPFVQGSDFIHGGPANDWIKSFRPPGVPELGGIEAHFPDFEQIXITMQXTTFQPPLDGPPQRVLSGVLHSFLTSGPAGVPFQPLPVPAALGLSESDKQCIRDRSCIMARHIFSDQPEEYIQAQVNTLLHSLDIDNRMRGPMHGQYPELQEYWNQSQSSMGPALMHNTADKWITEFGKQNNNPENWAKSFEQQYGPNGWASEFEQHQSQMAMGQMGGVNMANLAAMEQSRMLAQTLASNNDPKFQLSQGADKWVSEFSSQHNQGALNESWVDEFSKLNVTDEWAEEFSGGGFGESSADPWVDEFQEHLSSFKQSSGASRGVYVYSENNPYVGHPNPMQEGQELFRKGLLSEAVLALEAEVLKNPDNAEGWRLLGITHAENDDDQQAIAAMMRALEANPTNLEVLLALGVSHTNELEQGEALRYLYRWLQNHPKYGGLVPPQSTDSPYGPDVVRLFNDAAQMSPEDADVHVVLGVLYNLSREYDKAITSFKTAVQLKPQDYSLWNKLGATQANSIQSADAILAYQQALDLKPNYVRAWANMGISYANQGLYEDSIRYYVRAVTMNPKADNAWQYLRISLGNASRADMIAACDARNLDALQKEFPL

SEQ ID NO: 336607 - protein, 128 aa, Zea mays
  unsure (1)..(128): unsure at all Xaa locations
  Clone ID: MRT4577_70105C.1.pep
MAAKRLGLLMLLGLSASAATATIIPQCSQATIASLLPPYLLPVMASVCENPILQPYKIQHAIASCILPLSPLILQQSSPLLQQLPLVHLLAHNIMAQQLELAHLAAYSXQQQLPLVHLIAQNIKAQQL

SEQ ID NO: 336608 - protein, 105 aa, Zea mays
  Clone ID: MRT4577_70106C.1.pep
YSLWNKLGATQANSIQSADAILAYQQALDLKPNYVRAWANMGISYANQGLYEDSIRYYVRAVTMNPKADNAWQYLRISLGNASRADMIAACDARNLDALQKEFPL

SEQ ID NO: 336609 - protein, 734 aa, Zea mays
  Clone ID: MRT4577_70108C.1.pep
MALRHLVTGQNNCVPDGASSSNPLNALANAFLGQSSKAQSIKELPGSVNVPSTSDFSVSAPLSNIPGSENEFKQDQRPLARGADFIRGGPANDWIESFRPPRVPQLGVEAQFPDFEQIYNNAGTTFQPPLDGPPQRVLSGVLHSFLTSGPAGVPFQPLPVPAALGLSESDKQCIRDRSCIMARHIFSDQPEEYIQSQVNTLLHSLDIDNRMRGPMHGQYPELQEYWKQSQSSTRPAPMHNAADKWITEFGKQNNNPENWANSFEQQYGPNGWASEFEQHQSQMAMRQMGGANMANLAAMEQSRVLAQTLASNNDPKFQNSKFFQFVSKMSRGELIIEDNQVKEGSASQSSGWADEFQTPYIANANSWADQFAHEELSQGADKWVSEFSSQPNHGALNENWVDEFSKLNVTDEWAEEFSGGGFGESSADPWVDEFQEHLSSFKQSSGASRGVYVYSENNPYVGHPNPMQEGQELFRKGLLSEAVLALEAEVLKNPDNAEGWRLLGITHAENDDDQQAIAAMMRALEANPTNLEVLLALGVSHTNELEQGEALRYLYRWLQNHPKYGGLVPPQSTDSPYGPDVVRLFNEAAQMSPEDADVHIVLGVLYNLSREYDKAIASFKTALQLKPQDYSLWNKLGATQANSIQSADAILAYQQALDLKPNYVRAWANMGISYANQGLYEDSIRYYVRAVAMNPKADNAWQYLRISLSNASRADMIAACDARNLDALQKEFPL

SEQ ID NO: 336610 - protein, 114 aa, Zea mays
  unsure (1)..(114): unsure at all Xaa locations
  Clone ID: MRT4577_7010C.1.pep
KTKVPDQDQESDPKKEPQPAKKGVPCLAGPKTPPPLTVAPAPEXEDKNFPFGWFAQYPTGPRWALYPPLLPPKKWNRDLQGEDPLFSGLGKLPKCPVVFGPPPELSLAPPAPGS

SEQ ID NO: 336611 - protein, 84 aa, Zea mays
  Clone ID: MRT4577_70110C.1.pep
WNFGLIYVLVDVRVDVRVSDIKVLSKHFSGSCPVAKLGGHCTVDDATFVDPKVGIIHKIISSTQLVLDDEPHPKRVYSASTPVR

SEQ ID NO: 336612 - protein, 53 aa, Zea mays
  unsure (1)..(53): unsure at all Xaa locations
  Clone ID: MRT4577_70111C.1.pep
FFFFFFFFTNPXKRRLWIQLTIIQSLHSWKIMFHFYTSHLGVLNKIHSFLGWD

SEQ ID NO: 336613 - protein, 123 aa, Zea mays
  unsure (1)..(123): unsure at all Xaa locations
  Clone ID: MRT4577_70112C.1.pep
XKKKKKKKKKKKKKKKKKKKKKKKKKKKKKKGRAGSKGIHTLRTPGYANSVKLLFYKGPLTIQYPRGRSLVTNRRVLGNKPLCAYTNLNSLCATTLPFFRQSVRNSKKGPRTVSRLPQQSALA

SEQ ID NO: 336614 - protein, 81 aa, Zea mays
  Clone ID: MRT4577_70113C.1.pep
TMLYGVKCWSTKRQHVQHISVAKMYMLRWICDHTRDRVRNNNICDRLAVLVLSLILDKTIFPFSPLFVCIAFFTILNALLV

SEQ ID NO: 336615 - protein, 87 aa, Zea mays
  Clone ID: MRT4577_70115C.1.pep
CVAAIQAARNAMRSWKLASWCMDLYVTRPATNAVYVTTTIVLRTGKVADRTGSRNTLDARDFGASTNFSTVESEVSELAPASLLFMR

SEQ ID NO: 336616 - protein, 162 aa, Zea mays
  unsure (1)..(162): unsure at all Xaa locations
  Clone ID: MRT4577_70116C.1.pep
HLLHHTPYVXHLLAQNIRAQQLQQLVLANLAAYSQQQQFLPFNQLAALNSASYLQQQQLPFSQLPAAYPQQFLPFNQLAALNSPAYLQQQQLLPFSQLAGVSPATFLIQPQLSPFYQHAAPNAGTLLQLQQLLPFNQLALTNPAAFYQQPIIXGGALFLDFL

SEQ ID NO: 336617 - protein, 151 aa, Zea mays
  unsure (1)..(151): unsure at all Xaa locations
  Clone ID: MRT4577_70117C.1.pep
PASAAVAGAFSLRCHLCSECRPLALLPPRKPRPPHASLFPIRRSRHHPRHRTASPSPPAPAPRHPIHLCFLSRFQSSTMSSSLSPPXRSTPSQAQAPSTSRSDPSIPTSARHSCTCGGRLVSREPFLRSEANPIPLRSIKLSSTGPPRGMV

SEQ ID NO: 336618 - protein, 154 aa, Zea mays
  unsure (1)..(154): unsure at all Xaa locations
  Clone ID: MRT4577_70118C.1.pep
AVAHLDAALAFPSELGVRVDNAHVGAVSSGALLSSXXGTPGGTISSGESNKYSDGAGGHDAEVVSPPXGAAAATVDVYPXASSNSQAQQAAHHAKRKVTDEYPATTTTTSAAPPPAPAPFPLPGGGGGAKRRAATSISFGGGGHVARDPVPRCG

SEQ ID NO: 336619 - protein, 135 aa, Zea mays
  unsure (1)..(135): unsure at all Xaa locations
  Clone ID: MRT4577_70119C.1.pep
RPVANQHQQQLGGGLPQLMPLVHVXTPCGYLQHXYSFNIMLLSRAIAAAYVPKELXQQIVPGVGGVVTENPVAYPEHLFPYKLLSMQNSVANLQQRLQQLKPLLKANPLVNALLHDLLQLPYKLLYMMNSVLNTQ

SEQ ID NO: 336620 - protein, 91 aa, Zea mays
  Clone ID: MRT4577_7011C.1.pep
RRKWKRCGTKVQTELNRRKPNECKVAYQLPEEIAVAVGADVCCDCGGTVGYNYARCEGEGNRKLLEAHSRGTPTLVQSAALEAPDLGGAHA

SEQ ID NO: 336621 - protein, 58 aa, Zea mays
  Clone ID: MRT4577_70120C.1.pep
NFLDTNTTCFCGCQTTTTVNKPDWCLVLAALLCLPACCSCLPASCAVSLPGARCLPCP

SEQ ID NO: 336622 - protein, 89 aa, Zea mays
  Clone ID: MRT4577_70121C.1.pep
ATVQFFKHRCNKSICAHSLMQPCCVITILWRACKFHNLGTRERRWRSALLIHDLMQSEFYLQMSKYWQHVPRNHAQEGYACSVPPSCRI

SEQ ID NO: 336623 - protein, 56 aa, Zea mays
  Clone ID: MRT4577_70122C.1.pep
FNPLLEMNALIIEHAGLQRERGGRPTMTLAYSRPAFLFPFMGLALAKLVQISLNTS

SEQ ID NO: 336624 - protein, 57 aa, Zea mays
  Clone ID: MRT4577_70123C.1.pep
VLGASCSSSSAIILGLGDFVGLYITSTHQLRKLLGQSRIVTFTDRVQALFSQRSWNM

SEQ ID NO: 336625 - protein, 74 aa, Zea mays
  Clone ID: MRT4577_70124C.1.pep
LETIIMWAKIVSEITVCAKIVFPSNQVLYVIAKPWSNKFHHISHSVSAKLDLMQYVRTSVVYSDNLVHASLCHH

SEQ ID NO: 336626 - protein, 70 aa, Zea mays
  Clone ID: MRT4577_70125C.1.pep
VSTCTVVAYILRRRWLSSAAPACMRAGGAPSETQESEVNEQHPHGVDRVLLRSGVDKANVYRPSGGIPAR

SEQ ID NO: 336627 - protein, 252 aa, Zea mays
  unsure (1)..(252): unsure at all Xaa locations
  Clone ID: MRT4577_70126C.1.pep
GVPSGSAGAPAPTMASGRESXSSSPPCSISSHAPSSSXSSSARAKSSAPHPEAPCSAPEIPPMAGVRSLRSSDRTPWPSXACRFPTRRNSPVFGPRATSLPAQPPISMARAPSSPSSXSSPCSRSAPPMAGIPFLPSSHGXPSPAPSSSPYHAHRRSMRARSAPMPRAPXSCFSARSGACSXTPDHGAXSPAARGARSLPSSFSAPPWAATSSICTNPVRQSGPSPSNSYSPSRRASHTAPTCRYFIVSSWL

SEQ ID NO: 336628 - protein, 185 aa, Zea mays
  unsure (1)..(185): unsure at all Xaa locations
  Clone ID: MRT4577_70127C.1.pep
MLGKAGSVVWMFCAIWVAADALTVETTQDILRAARGRSVTLPCTYNTYVSDREGFIQWDKLLRSQTERVVTWNFVTKKYIYGNRYENRVRVSNDAELSNASITIDQLTMDDNGTYECSVSLMSDQDVNAKSRVRLLVLVPPSKPDCSIQGEMXVSGNNIQLTCHSXARGSPSPTYSXWKSYNGQN

SEQ ID NO: 336629 - protein, 942 aa, Zea mays
  Clone ID: MRT4577_70128C.1.pep
MEHEKFDHALKGCRDPLIADDIYSTGENVAIEGKTTKGSCAPLNGGDRHEEIKHLNEGCHNAGVPETSNMEKDGKSTDVSDKRQTSQNTSQVKKRKKSKVGSVDMPSVDASGEKDHRYSENATKQDTASTKREIVHEPSMQQMSNIVHQGDSNVIENPSGDGKKKKKRRHHSESLKGMNPSQDLTKSSGFVTNESSIQCTDAAPIDAKQTTQGIIEGETVNEHMKLSRSLDVAATNIVDGVLADLRPKDSLSKDLDEDLLPGQTHLGSNQNGLEVPESIAVKVGSATAALPPKYPATVHSASPVNSPRQRKSKGKKLKVLSTMADSSHQSSGVPEEDANRKLKESDSLRFADKTSDHEDIVTANVVAQADEKRKATKRQRKKGSVKQVLDTLDLKEVNDTEENLVQGGSVVDTPLSTAGNVEQKDWSSETLSPKEQETNCSTHGLDSHTAKDSQDEYVTDTIGTHDNENAAGTPALHVVQKDAMALKSASPNSQKEQETSLNSELQSQDCPLEHGFSADLVNSRTEKGVRTTSSASAVKSDYNTMFHPANGRINVLDHFSRSNLNDGSSIVAESKQNNEDGSLREVKNKKKKRKQGTGSVEPNDVIESLPSEIASLTGHFGTSKAVVSSVATENMNGGNENVNKGKEKKRKGKSNMEVPTAGKDHPNCDTQFIDIGTQESLISIVQKERTGQDNGKESNSKATQNASIMQHEPEDATWNRSPEKNHHQSVDDDQNKLLTEKDHAHINKEVRKFTPQTKAHAKIRKPDGSTIKEKVAPNPKPVTNLVKDFSMSPRASSDSTEGMPQSANRYRVAVRKVPSKRYEETSGNSNKASRKVGSGAIFNDSISEGSGDELDTKTVMERSPNKSSTSADSGISSAASGESEVPDDDGTVSLSQKSFKGLHISSILRGSRSYKKALKRQMELLDDDTIVPDSQPADGLWG

SEQ ID NO: 336630 - protein, 230 aa, Zea mays
  unsure (1)..(230): unsure at all Xaa locations
  Clone ID: MRT4577_70129C.1.pep
DAWADAWAGLMSLFLRLINPVVVSPTVAAVGLSFFSYGFTKIGTCIEMGILQLLMVVIFALXYLRKIKLFGYRVFLIYAVPLGLGITWAVAFVLTATGVYSYKGCDANIPASNNVSAFCRKHVLRMRSCRVDTSHALRSSPWFRFPYPLQWGTPVFSWKMGLVMCVVSVIASVDSVGSYHASSLFVATRPPTSGVVSRGIGVEGVSTVLAGLWGTGVGSATITENVHTIA

SEQ ID NO: 336631 - protein, 89 aa, Zea mays
  unsure (1)..(89): unsure at all Xaa locations
  Clone ID: MRT4577_7012C.1.pep
TTTVSNNNGTGTLTVNVRVTVRGTVKHPGTDPANATGDLGGDRGIKRGLXCIKKKKKKKKGRGGKKKKKKKKKKKKKKKKRKKKGGGPF

SEQ ID NO: 336632 - protein, 140 aa, Zea mays
  Clone ID: MRT4577_70130C.1.pep
RNCTLDRLSDIVECTVSLEKQIAEEEEEEIEMLLENYLQRCESCHGQAERLLNSAREMEDSISVNLSSRRLEVSRVELLLQVGTFCVAIGALIAGIFGMNLKSYLETNAWAFWVTTGGIVVGAVAGFFVVYSYLRARKIL

SEQ ID NO: 336633 - protein, 133 aa, Zea mays
  unsure (1)..(133): unsure at all Xaa locations
  Clone ID: MRT4577_70131C.1.pep
PRVRFGPTGLTTEVKSGEMHXHEALQEALPGDNVGFNVKNVAVKDLKRGFVAFNSKDDPAKEAASFTSQVIIMNHSGQIGNGYSPVLDCHTFHIVVEGADLIFNFYIFFILFFVFVFLFFFFIFFFYFLFFFF

SEQ ID NO: 336634 - protein, 148 aa, Zea mays
  unsure (1)..(148): unsure at all Xaa locations
  Clone ID: MRT4577_70132C.1.pep
ICDLIFVQVLLPPTIIPKCSQAPIATLIDAYLSAEVSSICENAIVQPYRIQQAITAGILRXSPLFLQRSSVLLHQLPLMHLLSQNIRAHHLQQLVLANLADYSQHQPFVPFNQLAGLNSASYLQHLQLPFSQLPRAYPQQFVPFNQLA

SEQ ID NO: 336635 - protein, 117 aa, Zea mays
  unsure (1)..(117): unsure at all Xaa locations
  Clone ID: MRT4577_70134C.1.pep
PLNQLGSLNSAFYLKQQQLPFSQLLAAYPQQFFPFNQLEALNSPAYLKQQQLLPFSQLVGVSPVTFLTQPQLLRFYQQVAPNAGPLLQRQQWRPFNHLVLTNPAVFXXPRQHGGALF

SEQ ID NO: 336636 - protein, 61 aa, Zea mays
  Clone ID: MRT4577_70135C.1.pep
HNMALPTSDESAYQEDGEQDDKESEYHIYIMHACAMATLRSVSRRITDTWLTYSREKGEEN

SEQ ID NO: 336637 - protein, 174 aa, Zea mays
  unsure (1)..(174): unsure at all Xaa locations
  Clone ID: MRT4577_70136C.1.pep
LNPRGKHEVRSQWHTTYHHACIYSKDRAYYKSDLTEHKWAQLIWAHQLQQPXLANLAVYSHQQQXCPFSQLGALNFASYLHQRPLPFSQLPADYPHQLLPFNQLAALNSPAYLQQQQLLPFSQLAGVSPATFLTQPQLLPFYQHVAPNAGTLLQLQQLLSFNQLALTNPAVVYQ

SEQ ID NO: 336638 - protein, 142 aa, Zea mays
  Clone ID: MRT4577_70139C.1.pep
FLLAGVCFVYTSCGDVLLQSLWNHRRFLSHLWIQHLLTVEGNWPATTSQMDMFVIQEIQLLSECLHDPVDEFEESRVQAELSALYIMWITKQVPDVKGKLEERLHFASMGRLKDVLAGACRPEKKRFWMNLLNLADQSSDVQ

SEQ ID NO: 336639 - protein, 73 aa, Zea mays
  Clone ID: MRT4577_7013C.1.pep
HTLGRVHLLTDANPNQVVVYSIINSGPLEDATRIGFSCFVRRQAVDFLPLRRVNHAIYLLTTCAMDSAFRNIK

SEQ ID NO: 336640 - protein, 68 aa, Zea mays
  Clone ID: MRT4577_70143C.1.pep
GKFKDLAVQNRILNYYYYYSPPHKIYFFYFSLVFLGGKIPFLWKESDLGKWVLPRHDFWFNVKTGLFL

SEQ ID NO: 336641 - protein, 170 aa, Zea mays
  Clone ID: MRT4577_70144C.1.pep
LLSPVTCLSGSSSFVYIYVQYGACTVGSLEPFCGYLAEISFGTNPKGTNASYADIIQVVKKGFSVGFPKDEYDYSYHNTSWIFKTCLNNFTRYFHEQLSSGGIVGITRAFFWSDVFLLKCAESYNATTVILDFDVISVVTGVKITTLLVLFRFVFTALAVQMFLPQYWKT

SEQ ID NO: 336642 - protein, 78 aa, Zea mays
  Clone ID: MRT4577_70146C.1.pep
CIGISSSEMGTKTRRQKMALGTFDIIRPGYPLYLLSSGSTLARRAVEHLQALNAGGFRQRGRSRTFGCGGQLRTWYCS

SEQ ID NO: 336643 - protein, 96 aa, Zea mays
  unsure (1)..(96): unsure at all Xaa locations
  Clone ID: MRT4577_70147C.1.pep
MSNNRTTKATKRGTHRAQLAQSASATKAVKRPQCTHATSSRITQHLPPGTSRGCEHPGGQAYRRQQARAAREGQQPKAQXQQQSGAHLTKQTRGAQ

SEQ ID NO: 336644 - protein, 62 aa, Zea mays
  unsure (1)..(62): unsure at all Xaa locations
  Clone ID: MRT4577_70148C.1.pep
LSRANLHIRTNTSGLHDHNDRMLGLGTPKKHMMIEPILDXGTQSAHGXTTYGCGIHLSSTTG

SEQ ID NO: 336645 - protein, 57 aa, Zea mays
  Clone ID: MRT4577_70149C.1.pep
GVCHGGKVGKNVTCLGPGKGIWGSGPQQPKATRWTKSWAPPQGNKLQAGGPCRTRGR

SEQ ID NO: 336646 - protein, 143 aa, Zea mays
  unsure (1)..(143): unsure at all Xaa locations
  Clone ID: MRT4577_7014C.1.pep
SDAGEHTDRGEGQEETHRPHKTHGGTGKTGPAAKQETVQQDEEKARTRKPDREEGRDPDQGEEGKQNEPKERKERQQQKEGPGAARRTPNQEEDEQXPERGPPPKKTARQPATPSTEPDHRRRKEPGPTRKESRTRAAVTKKQ

SEQ ID NO: 336647 - protein, 1358 aa, Zea mays
  Clone ID: MRT4577_70150C.1.pep
MGKGAGAAEPSTVVLAVNGKRYEAAGVAPSTSLLEFLRTQTPVRGPKLGCGEGGCGACVVLVSKYDPATDEVTEFSASSCLTLLHSVDRCSVTTSEGIGNTRDGYHPVQQRLSGFHASQCGFCTPGMCMSIFSALVKADNKSDRPDPPAGFSKITTSEAEKAVSGNLCRCTGYRPIVDTCKSFASDVDLEDLGLNCFWKKGEEPAEVSRLPGYNSGAVCTFPEFLKSEIKSTMKQVNDVPIAASGDGWYHPKSIEELHRLFDSSWFDDSSVKIVASNTGSGVYKDQDLYDKYIDIKGIPELSVINKNDKAIELGSVVSISKAIEVLSDGNLVFRKIADHLNKVASPFVRNTATIGGNIMMAQRLPFESDVATVLLAAGSTVTVQVASKRLCFTLEEFLEQPPCDSRTLLLSIFIPEWGSDYVTFETFRAAPRPFGNAVSYVNSAFLARTSGSLLIEDICLAFGAYGVDHAIRAKKVEDFLKGKSLSSFVILEAIKLLKDTVSPSEGTTHHEYRVSLAVSFLFSFLSSLANSSSAPSNIDTPNGSYTHETGSNVDSPERHIKVDSNDLPIRSRQEMVFSDEYKPVGKPIKKVGAEIQASGEAVYVDDIPAPKDCLYGAFIYSTHPHAHVRSINFKSSLASQKVITVITAKDIPSGGENIGSSFLMQGEALFADPIAEFAGQNIGVVIAETQRYANMAAKQAVVEYSTENLQPPILTIEDAIQRNSYIQIPPFLAPKPVGDYNKGMAEADHKILSAEVKLESQYYFYMETQAALAIPDEDNCITIYSSTQMPELTQNLIARCLGIPFHNVRVISRRVGGGFGGKAMKATHTACACALAAFKLRRPVRMYLDRKTDMIMAGGRHPMKAKYSVGFKSDGKITALHLDLGINAGISPDVSPLMPRAIIGALKKYNWGTLEFDTKVCKTNVSSKSAMRAPGDVQGSFIAEAIIEHVASALALDTNTVRRKNLHDFESLEVFYGESAGEASTYSLVSMFDKLALSPEYQHRAAMIEQFNSSNKWKKRGISCVPATYEVNLRPTPGKVSIMNDGSIAVEVGGIEIGQGLWTKVKQMTAFGLGQLCPDGGECLLDKVRVIQADTLSLIQGGMTAGSTTSETSCETVRQSCVALVEKLNPIKESLEAKSNTVEWSALIAQASMASVNLSAQPYWTPDPSFKSYLNYGAGTSEVEVDILTGATTILRSDLVYDCGQSLNPAVDLGQIEGCFVQGIGFFTNEDYKTNSDGLVIHDGTWTYKIPTVDNIPKEFNVEMFNSAPDKKRVLSSKASGEPPLVLATSVHCAMREAIRAARKEFSVSTSPAKSAVTFQMDVPATMPVVKELCGLDVVERYLENVSAASAGPNTAKA

SEQ ID NO: 336648 - protein, 192 aa, Zea mays
  unsure (1)..(192): unsure at all Xaa locations
  Clone ID: MRT4577_70151C.1.pep
HCSSFIQIEGCXVQGIGFFTNEDYKTNSDGLVIHDGTWTYKIPTVDNIPKEFNVEMFNSAPDKKRVLSSKXSISSQCFIPSPHSQHSCGHHQILVTAYEKKTKILTYRGLVXASGEPPLVLAASVHCAMREAIRAARKEFSVSTSPAKSAVTFQMDVPATMPVVKELCGLDVVERYLENVSAASAGPNTAKA

SEQ ID NO: 336649 - protein, 60 aa, Zea mays
  Clone ID: MRT4577_70152C.1.pep
SLNEALIIRYDKTIDGRGVHVHITNGNHIKVHFVNNYIHPQHSHHQQWAPPTRMSTTSAT

SEQ ID NO: 336650 - protein, 41 aa, Zea mays
  unsure (1)..(41): unsure at all Xaa locations
  Clone ID: MRT4577_70153C.1.pep
GPTPRXXRSVPSILAQSYSMIGEXPRHHERVLXIVXXLLSP

SEQ ID NO: 336651 - protein, 56 aa, Zea mays
  Clone ID: MRT4577_70154C.1.pep
FNYYMYVPCHCSFVCLLLATTTTINTCCFIFHSKTCTEKQNHQFSLPSHCAIKFLP

SEQ ID NO: 336652 - protein, 82 aa, Zea mays
  Clone ID: MRT4577_70155C.1.pep
ASVHYRQGWRQSIFHASLSWVLQMVLSIRVVSTYLGLVCIYQRLLFGFNRRPPRYASFLVAFLWIHIPAYGVIFFRPRQTTG

SEQ ID NO: 336653 - protein, 313 aa, Zea mays
  unsure (1)..(313): unsure at all Xaa locations
  Clone ID: MRT4577_70156C.1.pep
MDFKGKDIVVDEKKTVNNNEPKGEKAIDSGSNNEKKDEKKKRCIKKIVYYDNDASSSSPKEDGDDSSSNKKGMNITRLVDWTMLRRYVDTLKIAHERNDDTIITKMELVEGELGRFVMKRSEEPTDMYNMLKTLVNKIRSYESTRWTDHDVIPFMLRSFTVIDPRLVNLIRENPKYTKMSFKEILSMTNKEVLPDKVSQVEAADLNEDETTLVLKRFKTALXGTQGLPSKNKSRGKCSCFKCGDXDQENKGKKFYRKXKGEVHIDKEWDSNCSSSDSNDEGLTASVFNKSSLFPNEXHTCLMAKEKKICQCDR

SEQ ID NO: 336654 - protein, 86 aa, Zea mays
  Clone ID: MRT4577_70157C.1.pep
LLVDVVIPYTTIENSFFTNEKVFTNNFKGIYPSEEESATIWVLVKITIFASRELRTVCKDHHLHVASLIRPLEKIIVGGLSLSKVP

SEQ ID NO: 336655 - protein, 267 aa, Zea mays
  Clone ID: MRT4577_70158C.1.pep
MYSNYGNPSGMQMPPQNSQPVQFDNPLYGASSGLIRSGIGVYGEKFLGSSSEFMQSNINRYFSNPQYYFHVNDQYVRNKLKVILFPFFHRGHWTRISEPVGGRLSYKPPIYDINAPDLYIPFMAFGSFIILSGFTLGFMGKFTPAAINLQFTRALIGWGFQLMVLKGLLYSMGGGEVPLLDLVAYGGYLFAGLSLAVVARLMWAYSYYVMMPWMSLCMGVFLVRTMKRVLFTEMRSSERHSSRQHYFLLFMAIAQFPLFFWLGSIGA

SEQ ID NO: 336656 - protein, 267 aa, Zea mays
  Clone ID: MRT4577_70159C.1.pep
MYNNYRNPPGTHMPPQNSQPVQFDNPLYGASSGLIRSGIGVYGEKFLGSSSEFMQSNINRYFSNPQYYFHVNDQYVRNKLKVILFPFFHRGHWTRISEPVGGRLSYKPPIYDINAPDLYIPFMAFGSFIILSGFTLGFMGKFTPEAINLQFTRALIGWGFQLTVLKGLLYSMGGGEVPLLDLVAYGGYLFAGLSLAVVARLVWAYSYYVMMPWMSLCMGVFLVRTMKRVLFTEMRSSERHSSRQHYFLLFMAIVQFPLFFWLGSIGV

SEQ ID NO: 336657 - protein, 154 aa, Zea mays
  Clone ID: MRT4577_7015C.1.pep
DAGDTGNAFGSKVTLVDARALPGLNSLGVAMARLDIAPGGVNPPHTHPRATEVLTVVEGQMYAGFLATDGKLFARVLNRGDAFVFPRGLVHFEFNCGAGPAVGLAGLSSQNPGLVRVADSLFGAAPAVTDEVLAKAFRIDAATVQRIKAQFAKK

SEQ ID NO: 336658 - protein, 222 aa, Zea mays
  unsure (1)..(222): unsure at all Xaa locations
  Clone ID: MRT4577_70160C.1.pep
XLLRLLXXXAXAATATIFPQCSQAPIASLLPPYLSPAVSSVCENGGGQPYRIQQAIAXGILPLSPLFLQQSXALLQQLPLVHXLAQNIRAQQLQQLELANLAAYSQQQQLLPLNQLAALNSACYLQQQQLPFRQLPAGYHQQCVPLNQLAALNCAAYLQEEQLLPFKQVAGVXSPATCLIQPQXVPFYQYAWPNXGSLLQLQQLLTFXNQLGLTKPAADYQQ

SEQ ID NO: 336659 - protein, 183 aa, Zea mays
  Clone ID: MRT4577_70161C.1.pep
SVHLHASMREARSVNFTALPRLDHEVVIDARSEGNKSMAGSSSHGREVCIFLVRCYQRRSPSFVDSWVHAHSRRLYARVSTATMALFAAIGGPASSALMASVELIEGLRGLTLDGSAATRASPGSTILLSSSRRAALSKSASQEVDLYIDWHSVLPFSCPRSGEATAATSWWRWSCCGGRRRG

SEQ ID NO: 336660 - protein, 58 aa, Zea mays
  Clone ID: MRT4577_70163C.1.pep
GGAPSPISLVKVFFPQTLYIICAGFFAPLYAPYGFTLGVPRDNIQNGKKTLIKSEIGI

SEQ ID NO: 336661 - protein, 243 aa, Zea mays
  Clone ID: MRT4577_70164C.1.pep
AGKWSQAPIASLLPPYLSPALSSVCENPILQPYRIQQAITAGILPLSPLFLQQSSALLHQLPLVHLLAQNIRAQQLQQLVLANLAAYAQQQQLPLVQLLAQNIRAQQLQQLVLANLAAYSQQQQFLPFNQLAALNSAAYLQQQQLLPFSQLAAAYHQQFLPFNQLAALNSPAYVQQQLLPFSQLAAVSPAAFLTQQQLLPFYLHAAPNVGTLLQLQQLLPFNQHALTNPTAFYQQPIIGGALF

SEQ ID NO: 336662 - protein, 62 aa, Zea mays
  Clone ID: MRT4577_70165C.1.pep
LCCAASGDRRILNRRRREDLPHLQGGYIMMPQLLSRRRSACALSPTHHRYQDPHDGDGVLRC

SEQ ID NO: 336663 - protein, 57 aa, Zea mays
  unsure (1)..(57): unsure at all Xaa locations
  Clone ID: MRT4577_70167C.1.pep
DVVGLAQPXCRDGAPQQSSRSAVDVMDVSGMEDETVSGDVREQDDDDDKRAQLSAAA

SEQ ID NO: 336664 - protein, 132 aa, Zea mays
  unsure (1)..(132): unsure at all Xaa locations
  Clone ID: MRT4577_70168C.1.pep
ASNLAAYSXQQQLLPXNQLGSLNSXAYYLQQHXLPFXQLPAAYPQQYLSFNQLAALNSPAYLQKQQLLPFRQLAGESPATFLTQXQLLPLYQHVAPNAGTLLQLQQLLPFNQLAWTNPAGCYXQPIIGGALF

SEQ ID NO: 336665 - protein, 101 aa, Zea mays
  Clone ID: MRT4577_70169C.1.pep
APPRGHGGPEQTRPMQINPRVWPSRCHFYLRGWMPAPKFSPLGGGRICYPASVFCSLKTNGARHPLKIGLVVLGLFPPLYVNTWACLFEEIHVMINLDCHR

SEQ ID NO: 336666 - protein, 59 aa, Zea mays
  Clone ID: MRT4577_7016C.1.pep
MATALMVAAKLDEGRSRVEAELVEALANLEAQKEEAVKALDAQIASLSDEIVKKVLPSA

SEQ ID NO: 336667 - protein, 126 aa, Zea mays
  unsure (1)..(126): unsure at all Xaa locations
  Clone ID: MRT4577_70170C.1.pep
SAQNITAQQLLQLVLANLAAYSQQQQILPFNQLSALNSASYLQQQQLPCTHLSAAYPQQFLPFNQLTTLNSPAYLQEQQLLPFSQLAGASPATFLTQPQXLPFYQHAAPTAGTLLQLQQLLPFNQL

SEQ ID NO: 336668 - protein, 86 aa, Zea mays
  unsure (1)..(86): unsure at all Xaa locations
  Clone ID: MRT4577_70171C.1.pep
PTGSSACYNPMAXPYRSQQGTAFGMLPXISAWFLQQALDLLQKLPWRDLLAQNIRAQQLQHLVLANLAAXYSQQQQFLPFYQLAAL

SEQ ID NO: 336669 - protein, 82 aa, Zea mays
  Clone ID: MRT4577_70172C.1.pep
RFGIPGWTHASGLRIGLRRNVTVRLQKEMMRQMMLIGSRRPWECSVVSGSSACSSICPWSSVAWRTGREIWLTSNNLTSCGS

SEQ ID NO: 336670 - protein, 49 aa, Zea mays
  Clone ID: MRT4577_70173C.1.pep
GIVREDAVCTLLRAFRISWDWKTPDFYLGSTTPGEMADHPNPESCFRRS

SEQ ID NO: 336671 - protein, 116 aa, Zea mays
  unsure (1)..(116): unsure at all Xaa locations
  Clone ID: MRT4577_70174C.1.pep
MAAKIFCLLMLLGLSASAATATIFPQCSQAPIASLLPPYLSPAVSSVCENPILQPYRIQQAIPTCILTLXPWFLHHSXSLIPAVPLGALMAPNIKGPPPPPPGLTNLXAYFKNQKF

SEQ ID NO: 336672 - protein, 200 aa, Zea mays
  unsure (1)..(200): unsure at all Xaa locations
  Clone ID: MRT4577_70176C.1.pep
MCSLMLLALLACAXTDTMLPXSSQATMTSLLPPYLSPELPSAWGNTVLXTYRNQRXAFARRILPLSPLILQQXTLLLQQLPLEHSVAQKIMAQQLQQLALGNLAAYSQQHQLLPFNQLAALNSAAYLQQQLPFIQLAAAYPQQFLAFNQLAALNSAAYLQQQQLPPFSQLADVSPAAFLTQQQLLPFYLHAVPNAGTCPG

SEQ ID NO: 336673 - protein, 96 aa, Zea mays
  unsure (1)..(96): unsure at all Xaa locations
  Clone ID: MRT4577_70177C.1.pep
GRGWGGGRVRPTRRRRQAESQERRQQCRPQLRQAETKHRYQANYGTGLQPIPQQQPQSGXQVARQSAARRAQQWMRMRGLQQPTPCPYAADGAAPH

SEQ ID NO: 336674 - protein, 52 aa, Zea mays
  Clone ID: MRT4577_70178C.1.pep
IHPTSNWLNLKPDKEHWPNNLNPYILVKFFFPFSSLNKRGSRLKITPFKGYQ

SEQ ID NO: 336675 - protein, 50 aa, Zea mays
  Clone ID: MRT4577_70179C.1.pep
IIPGKLYIRNQTNMKYIIYPKKHRKHLTTQRQPRTIQHQLTFLPRPNWIG

SEQ ID NO: 336676 - protein, 51 aa, Zea mays
  unsure (1)..(51): unsure at all Xaa locations
  Clone ID: MRT4577_7017C.1.pep
EHITFGIMGDLFTLHVREKMVSAILRYEIGXFGDASDTSAMLYSRLESDAT

SEQ ID NO: 336677 - protein, 56 aa, Zea mays
  Clone ID: MRT4577_70180C.1.pep
MHGVVHCNATSEVCDRFATAGFGANLITYLTQQLHLPLVEASNTLTNFSGTSSLTP

SEQ ID NO: 336678 - protein, 73 aa, Zea mays
  Clone ID: MRT4577_70181C.1.pep
NTLGLGPPREPSFSLGITHNKMGKGLHHTGFHKTWLTRHGCCWPQAKPKSYNLSRGALTSKARRGIYRRAQPC

SEQ ID NO: 336679 - protein, 116 aa, Zea mays
  unsure (1)..(116): unsure at all Xaa locations
  Clone ID: MRT4577_70182C.1.pep
VKKRGNPXPFSPVATMGHTHIEGRSIHSMCGASTSCSHGQLGLRQAWSTAAPRKDPLLLPRHHVPRRYRTMTRRTXTEEDLDHHLQRHPHRGQDLPRERDPRQVHLDRARIPQDLH

SEQ ID NO: 336680 - protein, 35 aa, Zea mays
  Clone ID: MRT4577_70183C.1.pep
IEHRPAALRSPISLAYLFGAVPLADALIRRQYRVL

SEQ ID NO: 336681 - protein, 59 aa, Zea mays
  Clone ID: MRT4577_70184C.1.pep
LLKLRTWNGCNEKPKVEVYLFFADLVNALVAAKTGSSKSFSGGILFLPRDKLHTVGKLI

SEQ ID NO: 336682 - protein, 84 aa, Zea mays
  Clone ID: MRT4577_70185C.1.pep
SVTRPETVRSCDMMDTQGALLAPGSRHLEARQGTSSWPQPDAFQHSTCTLCQVYTGVQQKRNPVRYFGQVKEIQNASNLSGYHI

SEQ ID NO: 336683 - protein, 64 aa, Zea mays
  Clone ID: MRT4577_70186C.1.pep
LQLALLPVISHLCLKLMSAETSANIKLSSKTLTAEIWKHRIGCIFRGFLLILLTPCGTLKMRQH

SEQ ID NO: 336684 - protein, 120 aa, Zea mays
  Clone ID: MRT4577_70187C.1.pep
GSAGLMGGAVSGGAAVGDAAGAATYPVVLNVYDLTPVNNYLHWGGLGISHSAVEGAFCNCLLPEGLRLESTETKHLGDCRFSDGSNTTSNDNSDEDELEDKHLLPTTSVGEDTIVKEIHR

SEQ ID NO: 336685 - protein, 211 aa, Zea mays
  Clone ID: MRT4577_70188C.1.pep
MGGAVSGGAAVGDAAGAATYPVVLNVYDLTPVNNYLHWGGLGIFHSAVEVHGSEYSFGAHDHPSSGVFEVEPKSCPGFIYRCTVFIGHTTLNPLEFREFIQRMASEYHGDTYHLISKNCNHFTDDLSTRLTGKSIPGWVNRLARLGAFCNCLLPEGLRLESTETKHLGDCRFSDGSNTTSNDNSDEDELEDKHLLPTTSVGEDTIVKEIHR

SEQ ID NO: 336686 - protein, 60 aa, Zea mays
  Clone ID: MRT4577_70189C.1.pep
MEFSVIIMNASLFCVDEKKKKNYLYWRALGIFHSAVEDHGSEYSFGAHDHPSSGVLEVEP

SEQ ID NO: 336687 - protein, 50 aa, Zea mays
  Clone ID: MRT4577_7018C.1.pep
MAGMAPEGSQFDAKHYGSKMQELLIIGETDEFFTSCGEVLESLTDMGLQE

SEQ ID NO: 336688 - protein, 134 aa, Zea mays
  unsure (1)..(134): unsure at all Xaa locations
  Clone ID: MRT4577_70191C.1.pep
QLVLAILVAXCQQQQFLPFNRLAALNCACYLQQQQLPFSQLPVAYPQQFLPFNRLAALNSPAYLQQHQLPPFSQLAGVSPATFLTQPQLLPFFQHAAPNAGTLFHLLQFPPPNQLVLANPTAFSQQPVSVGAFF

SEQ ID NO: 336689 - protein, 747 aa, Zea mays
  Clone ID: MRT4577_70192C.1.pep
MWLHRCHLSLSAGMSRYPAPYPMIRPGFVPRPMPPPGVVPIQRPTIISGIRAIPPLVAPTARPPAPAVKLADKPPTAVYVGKIAPTVDSDFLLSLLRLCGSVKSWKRAQDPSNGKPKGFGFCEFESAEGILRATRLLNKLSIDGQELVININDATKEYLKKHVEGKKRAQEKEKETEDASGDGTTAVAENESSKPVPDELDETGDAGDKYREDNTDKFGIVTDEDSQTDKDVAEKISNMIEEWLKTRPPPPPSPVQPSADSSGVDKAKNDSDDKNAADADKRAANETERSETASPDKRKDREHDKDKRDKDLERHDRERERVRRDREKDHKHREADRLYRDRLKEWESREREREYQRYSEKEKERDRDHNRRREILKQEDESDDEDNRKRKRRSISSLEDRKRRRQREKEEDLADKIREEEEIAEARRLAVELQRQADEAAAAAAAAAEESASLMEIDGDDEKETDAQNKSAVVEADNISSFANGVGAGRLSKGNNGEETCMTPGQTADTKQNNNVPAKKLGFGLIGLGKRTSVPSVFAVEDDENNVDKSIRPLVPIDYSTEELQAVHANSSTGANVTAAAEFAKRISVSNSKEEKAEAEKDRNRRSSEARPNDERREKLHDREKDKPKSENKKILDAKQLIDMIPRTKEELFAYDINWAIYDKHELQERMRPWISKKIIEFLGEEESTLVDYIVSCTKDHVQAEKMLDLLQSIFDVEAEMFVLKMWRMLIFEIKKVESGLSGRAKS

SEQ ID NO: 336690 - protein, 110 aa, Zea mays
  Clone ID: MRT4577_70193C.1.pep
HSNSASWVKGERAEGKNSDDTREAATSMMTTIKTMTSAITRDYYKGDDDDDVDAQEDMTTTRMTRKIMIKTRCSPQTTGRYKILRWSTYRPLSSARFCALCSHLNSPIQS

SEQ ID NO: 336691 - protein, 90 aa, Zea mays
  unsure (1)..(90): unsure at all Xaa locations
  Clone ID: MRT4577_70194C.1.pep
MAAQQKIRWGELEEDDGGDLDFLLPPRVVVGPDXNGSTKVIEYRFYDDGHTVWVTTTTCVRILARALLYRIAILRLLWSKFVVALKEVVF

SEQ ID NO: 336692 - protein, 94 aa, Zea mays
  Clone ID: MRT4577_70197C.1.pep
VRFCYRYSSITRWHSATAPKMGTVISGVGRKSTVSVLCFSIWFLGNLLLLTFPFVVSVPLNYQGIGYLRACSDKASLETKIPFGIGEKISSFTP

SEQ ID NO: 336693 - protein, 38 aa, Zea mays
  Clone ID: MRT4577_70198C.1.pep
TPSTSTSPFTIPYSLCDKVHKLLYFAQGSSSSPDGPRV

SEQ ID NO: 336694 - protein, 186 aa, Zea mays
  Clone ID: MRT4577_70199C.1.pep
MAAKIFCLIMLLGLSASAATASIFPQCSQAPIASLLPPYLSPAMSSVCENPILLPYRIQQAIAAGILPLSPLFLQQSSALLQQLPLVHLLAQNIRAQQLQQLVLANLAAYSQQQQLPLVHLLAQNIRAQQLQQLVLANLAAYSQQQQFLPFNQQLAAAYPRQFLPFNQLAALNSHAYVQQQQLLPF

SEQ ID NO: 336695 - protein, 128 aa, Zea mays
  Clone ID: MRT4577_7019C.1.pep
RPLAQQLPRLLATAAAAAAVAAAPLPALAEQMEKAALFDFNLTLPAIATEFLLLMVALDKLYFTPLGKFMDERDAKIRGELGDVSRVEAELVEALANLEAQKEEAVKALDAQIASLSDEIVKKVLPSA

SEQ ID NO: 336696 - protein, 76 aa, Zea mays; identical to SEQ ID NO: 331508
  Clone ID: MRT4577_701C.1.pep

SEQ ID NO: 336697 - protein, 264 aa, Zea mays
  Clone ID: MRT4577_70200C.1.pep
MAAKIFCLLMLLGLSASAATATIFPQCSQAPIASLLPPYLSPVLSSVCENPILQPYRIQHAIASGILPLSPLFLQQSSALLQQLPLVHLLAQNIRAQQLVLANLAAYSQQQQLPLVHLLAQNIRAQQLQQLVLANLAAYSQQQQFLPFNQLAALNSAAYLQQQLVLPFSQPAAAYPQQFLPFNQLAALNSPAYVQQQQLLPFSQLAAVSPAAFLTQQQLLSFYLHAAPNVGTLLQLQQLLPFNQLALTNPAAFYQQPIIGGALF

SEQ ID NO: 336698 - protein, 114 aa, Zea mays
  Clone ID: MRT4577_70201C.1.pep
LYVCIVGVHSSKCSAIARSAPAVPSTRQHSPPRARIPRRRPRSRSTPGPQIGCGRAQISRAPSAQSCNVRKAAPPRQQRPQSPPRGRSRAQLQRPQNRAALPSTRIRRRRSLGH

SEQ ID NO: 336699 - protein, 44 aa, Zea mays
  Clone ID: MRT4577_70205C.1.pep
VEPRKQRVKDTVKIQKESTNQNYHEMIWRLQATNGRIPLSKPFC

SEQ ID NO: 336700 - protein, 165 aa, Zea mays
  unsure (1)..(165): unsure at all Xaa locations
  Clone ID: MRT4577_70206C.1.pep
PGVPTRVRHHKTHITPPSLPPNIFCLLIVHVQSARGSLLTIYPQCSQAPIAFLPTPHLSPTASTVXCENPILQPYRIQQAIAAGILPLSPLILQQSSALSQLLHFVHLLAQNITAQQLQQLVLAHLGDYSQQQQLLPFNQLTALNXSAYYLQQQQLPFSQLSAAY

SEQ ID NO: 336701 - protein, 154 aa, Zea mays
  unsure (1)..(154): unsure at all Xaa locations
  Clone ID: MRT4577_70207C.1.pep
GYIRMERNVNAPTXKCGIAMMASYPTKKGANPPKPSPTPPTPPPPPVAPDNVCDENFSCAAGSTCCCAFGFRNVCLVWGCCPIEGATCCKDHASCCPPGYPVCNVRAGTCSVSKNSPLSVKALKRTLAKLNXHELVQTSGIIDLERNGTARSFS

SEQ ID NO: 336702 - protein, 49 aa, Zea mays
  Clone ID: MRT4577_70208C.1.pep
KKKKKKKKKKKKKKKKKKKKKKKKKKKKKKKKKKKKKKKKKVPLPGGPV

SEQ ID NO: 336703 - protein, 66 aa, Zea mays
  Clone ID: MRT4577_70209C.1.pep
RGLTRDKQPQNGAPGAPFPKKSQTFGGEAQPLGQPSVFKVYQGQKKTPPIFLPPKKSFLHFNKGPG

SEQ ID NO: 336704 - protein, 192 aa, Zea mays
  Clone ID: MRT4577_7020C.1.pep
LTNNALPPTSPRPRTHGHGFDACSHHLLLPGPRRAAPEAGGLLLLQQMEKAALFDFNLTLPAIATEFLLLMVALDKLYFTPLGKFMDERDAKIRGELGDVKGASEEVKQLEDQAAAIMKAARAEIAAALNKMKKETTAELEAKLDEGRSRVEAELVEALANLEAQKEEAVKALDAQIASLSDEIVKKVLPSA

SEQ ID NO: 336705 - protein, 543 aa, Zea mays
  unsure (1)..(543): unsure at all Xaa locations
  Clone ID: MRT4577_70210C.1.pep
WVPRGRPGDTPTEPKKTENPKERNREVGKSAGTRKRKGTPVSSRPPPPPAAMAALGLLLLLLAVVGAANAAAPGGRMSIISYNEEHAARGLERTEPEARTLYELWLAEHGRAYNALGERDRRFRVFWDNLRFVDAHNERAAEHGFRLGMNQFADLTNDEFRAAYLGARIPAARRRGTAVGERYRHGGGAEELPESVDWXREKGAVAPVKNQGQCGSCWAFSAVSSVESVNQIVTGXEMVTLSEQELVECSTDGGNSGCNGGLMDAAFDFIIKNGGIDTERDYPYKAVDGKCDINRENAKVVSIDGFEDVPENDEKSLQKAVAHQPVSVAIEAGGREFQLYKAGVFSGTCTTNLDHGVVAVGYGTENGKDYWIVRNSWGAKWGEDGYIRMESGVNATTGKCGIAMMASYPTKKGANPPKPSPTPPTPPPPPVAPDNVCDENFSCAAGSTCCCAFGFRNVCLVWGCCPMEGATCCKDHASCCPPGYPVCNVRAGTCSVSKNSPLSVKALKRTLAKLNXHELVQTSGIIDLERNGTTARSFSDSAS

SEQ ID NO: 336706 - protein, 73 aa, Zea mays
  Clone ID: MRT4577_70211C.1.pep
LNFFYIILIFLKRRRQFNVCNARTRGYLVTFSRNNLSLEGWICRTMEVIFLHLHTAAATPSTCHSTPVDAKMQ

SEQ ID NO: 336707 - protein, 64 aa, Zea mays
  Clone ID: MRT4577_70212C.1.pep
FWPGKDPPNLRGEPPSNNKPNSLGAPPQKGPIIPGKTTAWLKPFLARKIFVQRRGNHLTPVGGS

SEQ ID NO: 336708 - protein, 50 aa, Zea mays
  Clone ID: MRT4577_70213C.1.pep
CYLNCSVKSIRTCYPQDISPTAANRTSRIEMIFANKLHSIVEYSAVEDAE

SEQ ID NO: 336709 - protein, 128 aa, Zea mays
  Clone ID: MRT4577_70214C.1.pep
MAASMISSSALAVAPQGLSPLGRRASCLVVECSKKKIKTDKPYGIGGGLTADVDANGRKVMGKGVYQFDDKHGANVDGYSPIYNEDDWSPTGDVYVGGTTGRLIWAVTLAEILGGGALLVYNTSALCG

SEQ ID NO: 336710 - protein, 62 aa, Zea mays
  Clone ID: MRT4577_70215C.1.pep
QFVDTYGANVDGYSPIYNEDDWTLTGDVYVGGTTGLIIWAVTLDGILSGGALLVYNTSALSG

SEQ ID NO: 336711 - protein, 120 aa, Zea mays
  Clone ID: MRT4577_70216C.1.pep
MADSMISSSALAVAPQGLPPLGRRASSFAVVCSKKKIKTDKPYGIGGGLTVYVDANARKGKGKAVCQVVNEYGAIGHGYSPIYNEDDWAPTGDVYLGETTVLLIWAGSLDEILFGGAILT

SEQ ID NO: 336712 - protein, 132 aa, Zea mays
  Clone ID: MRT4577_70217C.1.pep
MAASMISPSALVAPPSRAQGLPSLGRRASSFAVVCGTGKKIKTDKPFGIGGGLTVDKDASGRKVKGKGVYQFVDKYGANVDGYSPIYNENEWSPSGNVYVGGTTGLLIWAITLAGLLGGGALLVYNTSALSG

SEQ ID NO: 336713 - protein, 75 aa, Zea mays
  unsure (1)..(75): unsure at all Xaa locations
  Clone ID: MRT4577_70218C.1.pep
MAQAIASMTGLXKGVLPRRRASNRARTGDVIRACAEAQAHAVRRAALWLWDTVIVGGALXQAVHALTVKTIKIGA

SEQ ID NO: 336714 - protein, 106 aa, Zea mays
  unsure (1)..(106): unsure at all Xaa locations
  Clone ID: MRT4577_70219C.1.pep
PGRPVQSGIRLKGTLNSQMDLIAXYGRLDGMTYLHLRMYYIPCTHIILKLTHIAHILYNKLPLVMDTDPQTHGVMAEPTVFLPKTHICMPTAMKPHVIHKKPTYLL

SEQ ID NO: 336715 - protein, 107 aa, Zea mays
  Clone ID: MRT4577_7021C.1.pep
QAAAALPPTSPRPRTHGHGFDGCSHHLLLPRPRRAAPEAGGLLLLLQQQQLGAELEAKLDEGRSRVEAELVEALANLEAQKEEAVKALDAQIASPSDEIVKKVLPSA

SEQ ID NO: 336716 - protein, 124 aa, Zea mays
  unsure (1)..(124): unsure at all Xaa locations
  Clone ID: MRT4577_70220C.1.pep
MISXSALAVAPQGLPPLGRRASSFAVVCSKKKIKTDKPYGIGGGLTVDVDANGRKGKGKGVYQFVDKYGANVDGYSPIYNEDDWSXTGDVYVGGTTGLLIWADTLAGILGGGALLVYNTYALFR

SEQ ID NO: 336717 - protein, 202 aa, Zea mays
  Clone ID: MRT4577_70221C.1.pep
NSARGANSPHATAATAPRISPRIPPHDAATALCTPASHAAPYARNSLLPTRAGTARTARRDPHARGRPYARRETPTATAPRIPRANPAARCRYSTPTSHAGPRDAATAHPPAMPDRQWKVRVRRFFGRFAAIYADLPLPHQPPSMEVRVHRFYGRFATLSADPPPPPPPNSRYVSAVRCEVLGTQSEPGTDAHHVVVGLRTR

SEQ ID NO: 336718 - protein, 125 aa, Zea mays
  unsure (1)..(125): unsure at all Xaa locations
  Clone ID: MRT4577_70222C.1.pep
MISSPALAMAPHGLSPLRRRASSFAVGCIHXKKIKTDEPYVIGRGLTVDVNVDGRKGKGKGVYXLVDKYGANVDGYCPIYNEDDWSPTGDVYVGGTTGLLIWAVTLAGILGGGALLVYNTSALSG

SEQ ID NO: 336719 - protein, 122 aa, Zea mays
  Clone ID: MRT4577_70223C.1.pep
SPRRSGDGPQGLPPLGRRASSFAVVCSKNKIKTDKPYEIEGGLNVDVDGNDRKGKGKGENQFVDKYGANVDGYSPIYNEDDWSPTGDVYVGGTTGLLIWNDSLAEMLGDGALLVYNTSALSG

SEQ ID NO: 336720 - protein, 128 aa, Zea mays
  Clone ID: MRT4577_70224C.1.pep
MAASMISSSALAVAPHGLPPLGRRASSFAVVCSKKKIKTDKPYGIGGGLTVDVNANGRKGKGKGVYQFVDKYGADVDGYSPIYNEDDWSPTGDVYVGGTTGLLIWAGTLAVILGGGALLVYNTSALSG

SEQ ID NO: 336721 - protein, 111 aa, Zea mays
  unsure (1)..(111): unsure at all Xaa locations
  Clone ID: MRT4577_70225C.1.pep
MAASMISSTALAVAPQVLSPLGRRASSFAVVCSKKKIKTDKPYGIGGGLTVDAYANERKGKGXIVYQIVNKYGANVDGYRPIYNEDDWSPTGXDVYVXGSTXVLIWDVHHP

SEQ ID NO: 336722 - protein, 58 aa, Zea mays
  Clone ID: MRT4577_70226C.1.pep
CLVRSPFIAWEGLWGLLSFGFVRLCWLGRGLCFGGSCLCLAGLFKAAPLLGVAVARVP

SEQ ID NO: 336723 - protein, 176 aa, Zea mays
  Clone ID: MRT4577_70227C.1.pep
AAFFFFFFFGFFFFFFFFFFFFFFFFFIFILYNYFFTNCLLLSCQRGRNKKTKRNTNHETRGGGAKQGGLPNTLANQKKKPPAHKNPKGGGHKQDIRPPNPQNPKHQAAAGPPKPLTGADLTFIATPLVPGKRVSRMSGRPELDPQRGQNHFPARHPKHKTHRVLKHRDAQQPAAG

SEQ ID NO: 336724 - protein, 58 aa, Zea mays
  Clone ID: MRT4577_70228C.1.pep
LGAPGVSWNPRTKSQLHPVKCLPPAQKKFFVLGGRRFPFNPYTPPKLLEVFWTCFFSP

SEQ ID NO: 336725 - protein, 33 aa, Zea mays
  Clone ID: MRT4577_7022C.1.pep
LNLQLQLSSQLERLNLAEFEHPSYRYNCGMKKR

SEQ ID NO: 336726 - protein, 110 aa, Zea mays
  Clone ID: MRT4577_70231C.1.pep
EELAQTSMQATNKRPQTRYPVAPIVMCLVLAWASCLHGDDTKLLAAAVPLPRRPAATSSVAAAGGMPVVVGYRPRPQAGAAAGRSAPRSTAWIGDDKRQIPSCPDALHNR

SEQ ID NO: 336727 - protein, 206 aa, Zea mays
  unsure (1)..(206): unsure at all Xaa locations
  Clone ID: MRT4577_70232C.1.pep
DAAIASLLPTGLMTAIXVGCETPCAPYRIQQAVLLVNVPLSPLYLQQSSALSQQIPLVHXLAQNIRAQQLLQLALTNLAAYSQQQQFLPFNQLGTSNSASYLQXQQLPFSQLPAAYPQQFLPFNQLAALNSPAYLQQQQLLPFSQLAGVSPATFLTQPQLLTFYQHVAPNAGTLLQLQQLPXFNQLALTNPAVFYQQPIIGXGALF

SEQ ID NO: 336728 - protein, 87 aa, Zea mays
  Clone ID: MRT4577_70233C.1.pep
GSRSPVRNAKKGISARQVIRSLGRDFGSCCKEGGFESHRAGSPGYPRKRSRRCGRARREGCRRRRWSPGTPRRRSEEVGWGRDGGGG

SEQ ID NO: 336729 - protein, 143 aa, Zea mays
  unsure (1)..(143): unsure at all Xaa locations
  Clone ID: MRT4577_70235C.1.pep
LHRIISLKLNTXNIISNRPNNRRHRPIRILITNLLTTQINTRQHRTIIMNRTNIHLKHTTTHLLRTRQNHTLLEQLTVIRHHTDDNNNSVVVDERRLRCHLHGAGRGRRTRARRCRHRAPTTTATTNANRFQPGCLTQVSTRY

SEQ ID NO: 336730 - protein, 168 aa, Zea mays
  unsure (1)..(168): unsure at all Xaa locations
  Clone ID: MRT4577_70236C.1.pep
AQQRQQPGPANPARQXQQQQXTPSNQXTEXNXASDRLXQQQLPFQTVXTAYPQQFLPFXNQLAALNSXPAYLQQQQLLPFIQLAXVSPATFLIQPQLLXFYQHAAPNAGTLLQLQQLLPFNQLXLTNPAEFYQQPIIGGALLRFLMSYRSIIKDRYLWLPEIRKYILD

SEQ ID NO: 336731 - protein, 183 aa, Zea mays
  unsure (1)..(183): unsure at all Xaa locations
  Clone ID: MRT4577_70237C.1.pep
YLSPAVSSVYENPIVQPYRIQQAIATGILPLSPLFLQQPSAILQQLPLVHLVAQNIRAQQLQQLVLANLAAYFQQHQFLPFNQLAALNSAAYLQQQLPFSQLADAYPQQFLPFNQLAALKSAVYLQQQQLLPFSQLTDVSPAAFLTQQQLLPFYLHAMPNAGTXLYNLQQLLPFXQLVLSNPA

SEQ ID NO: 336732 - protein, 196 aa, Zea mays
  unsure (1)..(196): unsure at all Xaa locations
  Clone ID: MRT4577_70238C.1.pep
PAVSSVCENPILQPYXRIQQAIAAGILPLSPLFXLQQSSTLXLQQLPLVHLLAQNITAQQLQQLVLANLAAYSHYQLLLSFNKLCALXALLIMDRQQLPXHLEEMPVLPASEKFSSSQRACLHSTAYLQQRQLLPFRPLARVSPAPFLTQPQLLPFYQHSAPNAGTLLPLQHWLPFTPLALSNLAVFYQQPVVAGA

SEQ ID NO: 336733 - protein, 87 aa, Zea mays
  Clone ID: MRT4577_7023C.1.pep
MATALMVAATTSCSPGRAEIAAALNKMKKETTAELEAKLDEGRSRVEAELVEALANLEAQKEEAVKALDAQIASLSDEIVKKVLPSA

SEQ ID NO: 336734 - protein, 64 aa, Zea mays
  unsure (1)..(64): unsure at all Xaa locations
  Clone ID: MRT4577_70240C.1.pep
MAPEEGVAIACHTKDDFDAHMAKAKEAGXLVIIDLTASWCGPCRYIVPLICGHSKKFTHAVFLK

SEQ ID NO: 336735 - protein, 143 aa, Zea mays
  unsure (1)..(143): unsure at all Xaa locations
  Clone ID: MRT4577_70241C.1.pep
GILTLITLVLQQPASLIPEWPFXHWWAKNIKGQHYNXLVLRNLAAYSQQQQFLPFNQLAALNSAAYLQQQLPFSQLAAAYPQQFLPFNQLAALNSAAYLQQQQLPPFSQLADVSPVAFLTQQQLLPFYLHAAPNAGTLLQLQQ

SEQ ID NO: 336736 - protein, 115 aa, Zea mays
  unsure (1)..(115): unsure at all Xaa locations
  Clone ID: MRT4577_70243C.1.pep
LGGGGRPXGVXWVGAVGVFGGAWAVALLVVVRLRAGLXGXXXRPPSPPXRVXXCVXCXPXSXLXXXFSPXPAXXGGXXXAAVVPXALPAXXXGXAPLCRAXXCCGCSCXRGWXVL

SEQ ID NO: 336737 - protein, 28 aa, Zea mays
  Clone ID: MRT4577_70244C.1.pep
KKKLDKDMYNTYSLQSLNSLVKYMIKPW

SEQ ID NO: 336738 - protein, 82 aa, Zea mays
  Clone ID: MRT4577_70246C.1.pep
EPTIPFSVSSHFGNFFSVILQSLRNLNFFFFFFFFFFFFFFFFLKPKNGTFLAIIYSVTVPNNWHNPLQLFSHVLSPYQIEP

SEQ ID NO: 336739 - protein, 144 aa, Zea mays
  Clone ID: MRT4577_70247C.1.pep
MTMTTPPPRQQHGLAAVASEVRAQRGIALPLIGMNLTWFAKQAVTTAFLGRLGDLELAAGTLGYSFANVTGFAVLSGLCGAMEPICGQAHGAGNVALLRGTLLRATLMLLARYVPIALLWTRVDAVLLRFGQQPDIAATARTYV

SEQ ID NO: 336740 - protein, 139 aa, Zea mays
  Clone ID: MRT4577_70248C.1.pep
MARRSGGGRSSRPAPRAAPVRNPPAPARPAPPPATTQSSGGGIMSGIGSTIAQGMAFGTGSAMAHRAVDAVMGPRTIQHETVVGEAAASMTPMDNAADDKCGNPSKAFQDCINHYGSDISKCQFYLDMLNECRRGGATL

SEQ ID NO: 336741 - protein, 45 aa, Zea mays
  Clone ID: MRT4577_70249C.1.pep
MQVLMDIIAELKLRSATRNTEGTLMLRHTVSSKLQNSQRKKLMNI

SEQ ID NO: 336742 - protein, 216 aa, Zea mays
  Clone ID: MRT4577_7024C.1.pep
MATALMVAATTSCSPGRAAPRLKPVASSSSSSSSSSARPRRPLAQQLPRLLATAAAAAAVAAAPLPALAEQMEKAALFDFNLTLPAIATEFLLLMVALDKLYFTPLGKFMDERDAKIRGELGDVKGASEEVKQLEDQAAAIMKAARAEIAAALNKMKKETTAELEAKLDEGRSRVEAELVEALANLEAQKEEAVKALDAQIASLSDEIVKKVLPSA

SEQ ID NO: 336743 - protein, 109 aa, Zea mays
  Clone ID: MRT4577_70250C.1.pep
GNQPPDPRQNDGENRAYTRGIPENKNNRENRAPLSSRKLFAGPGGKPLTGGKPQTGAKIYLIIGNWGKTTGTRSLTPPPLFVFAGGFPQGGDLSLGPKKLGLLGAQTGL

SEQ ID NO: 336744 - protein, 391 aa, Zea mays
  unsure (1)..(391): unsure at all Xaa locations
  Clone ID: MRT4577_70251C.1.pep
MKLRLHLFVLCVIIIFLVYNMANFQHKQTTLEAKSHPFDTVTVSDRDAVKVPQKAEARIGYLPHGIVESNSDMDLKPLWLTTSARSKKPKQNDNFLIAIAAGINQKKTVDAIMKKFLPXNFTAILFHYDGNVNGWNDLPWSKSVIHIAASNQTKWWFAKRFLHPAVVSIYQYIFLWDEDLEVDNFSPRRYLNIVRSEGLEISQPGLDSKLSEIHHRITVRKKAGTFHRVSRANKKCSREGPPCSGWVEGMAPVFSKSAWQCVWHLIQNDLIHGWGIDYKFGYCAQGDRTKNIGVVDSEFIVHRGVQTLGGSTITKDGIRGKNAKPLGQKAAQIQRSRGRAPGLDMRTKIRRKSRSELRDFQKRWDRAAREDRTWVDPFARSRRKRKNRNPQ

SEQ ID NO: 336745 - protein, 176 aa, Zea mays
  unsure (1)..(176): unsure at all Xaa locations
  Clone ID: MRT4577_70252C.1.pep
MKLRLHLFVLCVIIIFLVYNMANFQHKQTTLEAKSHPFDTVTVSDRDAVKLPQKAEARIGYLPHGIVESNSDMNLKPLWLTTSARSKKPKHNDNFLIAIAAGIKKKKTXVDAIMKKFLPENFTAILFHYDGNVNGWNDLPWSKSVIHIAASNQTXWWFAKKFLHPAVVSIYQYIFL

SEQ ID NO: 336746 - protein, 100 aa, Zea mays
  unsure (1)..(100): unsure at all Xaa locations
  Clone ID: MRT4577_70253C.1.pep
WSVSSAPGRSPTPPLPLLPPPPPPPPPPPLPSPSPPPPPPPPPPPXGRELVLPPPEGXAPPWAAVPGPPXNGPSSXPCPACSPRXSPDXSRPPSPPPRYD

SEQ ID NO: 336747 - protein, 378 aa, Zea mays
  unsure (1)..(378): unsure at all Xaa locations
  Clone ID: MRT4577_70254C.1.pep
MSTDSSLFSASSPSTMTTNAPAFQSACIPIPLHHVVTIRLTKSNYLLWHAQLVPFLRSAKLMGYLDGTLPAPAQLIASSTATGAAQVANPAYIRWYDQDQQLLSGLLSSMTEDVLWDVVAATSSKEVWDSLXEEVLLHXRARTVQICVELATTKKRDSTAADYYRKITGLANELAAAGAPLQDDEVLSYLLAGLSAEYDLFVTSITTKTDPLSLDDVFAHLMVFEARQLQHQAEIQLNTGMSANYVGRGGRGHRGRGRNTCGCGHFAPRGGAPPRASGGHGSSSRPTCQICEKEGHTAIKCWXRMDESYTETPSSSALVATTSYKIDPNWYLDTGATDHITSDLDRLAIRERYNDDEQVHVGNGAGLAHQEKPAGREV

SEQ ID NO: 336748 - protein, 92 aa, Zea mays
  Clone ID: MRT4577_70255C.1.pep
TLRKLKYKSTKQVTEVESLWKYPTVHNMPKVEAYVPKWNTNYFQVVSAGMCMQGVFGGSREPLTYKVDQEPFAQNEPKNPKQENKQTNKKEH

SEQ ID NO: 336749 - protein, 218 aa, Zea mays
  Clone ID: MRT4577_70256C.1.pep
MASRTASKDIIALRGSAAIVSEFFGYAANSILYNRAVYPGESFAKVKKYGLTMPLTQDEWVNFITSATSKNSGKLQGIVMVIMSKATSEVIERWNFNIDTYPEVVEKGSIKEKSDKKIMREIRAIKRQIDSCITDLPCLDEPCVFDMLAYTDTDVDAPDTWIESDTKLIHNTQMVKLHSFDTKVHKVDTVVSYKKNEDDTSSSSSSVIREARIVLLRR

SEQ ID NO: 336750 - protein, 62 aa, Zea mays
  Clone ID: MRT4577_70257C.1.pep
GLENKTIILYCSQTEQSRSIFILTNSTVEQTPLFLLLDGLRSLLDWKALSMYIGRERSHSFV

SEQ ID NO: 336751 - protein, 208 aa, Zea mays
  Clone ID: MRT4577_70258C.1.pep
MASRSASKDIITLRGSAAIVSEFFGYAANSILYNRAVYPEESFSKVKKYGLTMLLTQDEGVKNFIASLTSQLSEWLEAGKLQRIVLVIMSKATSEVLERWNFNIVTDAEVVEKGAIKEKSDKEIMREIQAIMRQIASCITYLPCLDEPCVFDVLAYTDTDVDAPGTWVESDAKLIDNPQMVKLHSFDTKIHKVDTLVSYKKDEWDEEE

SEQ ID NO: 336752 - protein, 101 aa, Zea mays
  unsure (1)..(101): unsure at all Xaa locations
  Clone ID: MRT4577_70259C.1.pep
SVDILTNDLGAAVASNDAGEPIGSNIYVAGGMXRTHRVETTFYQLPDPLSYVPXDDIVYAIKAIAVTHRENGPTDYRMYSMIKYXIDRRGIDRYRTEVEKY

SEQ ID NO: 336753 - protein, 42 aa, Zea mays
  Clone ID: MRT4577_7025C.1.pep
GKNLLHGSDGPKPPKDEFPLWFEPKELVFFPTNGEKGIYGVN

SEQ ID NO: 336754 - protein, 161 aa, Zea mays
  Clone ID: MRT4577_70260C.1.pep
MGPTSACLLRSCLVSAPAIADRRSLLPHEDIHLEAKKEKRKRVDDLIDSRRGAIDKFFKSNTSASTNPNDVYALAIVPVGAEESTNGNSINEEERVDINIDDNNVSDHENISNSSDAHAQFGSVDEQPDIYDLRNWDNLNNKARDILIEKGPIREEGLEFP

SEQ ID NO: 336755 - protein, 258 aa, Zea mays
  unsure (1)..(258): unsure at all Xaa locations
  Clone ID: MRT4577_70262C.1.pep
QYHWPTYHHRKHHIEETKQVDPIRQLWEACCLPVALFCLVSCFGRPYLPQCKQAPVAALLXPRLIPTRRCICQNPILXPYRIQQHIRAGILPLSPLHLQQXTXLLQKLPLVHSLTQNNRAQQLQQLELTNLAAYSQQQQLVPFNQLAALNSASYLQQQQLPFRQLSAAYPQQFLPFNQLTALNSPAYLQQQQLLPFSQLAGVSPATFLTQPQLLPFYQHAAPNAGTLLQLQQLLPFNQLAXTNPAAFYQQPIIGGALF

SEQ ID NO: 336756 - protein, 125 aa, Zea mays
  Clone ID: MRT4577_70263C.1.pep
RPRQIAHLLYKGWPVGGEKFKVTVGLCLSDYGATDLISGKLIDQRVTLDASSTADLHGAKLNGLAVLQLLPVNSLSWKQIERRSCISLEAFIRDYFLWESPGILSGCIDHWPARKKWKDIKYLKS

SEQ ID NO: 336757 - protein, 57 aa, Zea mays
  Clone ID: MRT4577_70264C.1.pep
LTVEVSVICQMSSNCSLECILGCGYHHKWGRGLSMRVSINEHSKGHQSKQQTSFDLL

SEQ ID NO: 336758 - protein, 400 aa, Zea mays
  Clone ID: MRT4577_70265C.1.pep
MVDIDHRMAGLAPSVAHTAALRRLSTRAAAGPSSASASPRHGLHSFHAVAAGVLSHLRESGVAVLPGLSDAELVRAEAEFGFTFPPDLRAVLALGVPSGPGFPDWRGRAGLRAAFDLPAAAASLQVARGALWPRCWGRRPADPGRALRLARSAVRRAPPLVPLFDRCYLPCRPCLAGNPVFFVADDRVLCCGLDLLYFFTRDSSFQPADRAVVSSSSPLSAGASRPSCTRRSLDAVQAPRWIEFWSDAASDRRRRDSSSSEASTASSSSSSSSSSGCPSPPRRPTPRWVDSYLDELGSMLKKGGWRDREVDEMVEVTASGFLDDGEEAPTPDSEAILDALVLKTDRCSDSLRRAGWTAEDVSDALGLDFRRGEERSRSAVRIPPEIAAKVQRLAQALARP

SEQ ID NO: 336759 - protein, 57 aa, Zea mays
  Clone ID: MRT4577_70266C.1.pep
SFILFLYPLDHAHYYRKAQGQLYKTRPDSANHQVDCGLIIQSLGGSYENVFATGYRK

SEQ ID NO: 336760 - protein, 60 aa, Zea mays
  Clone ID: MRT4577_70269C.1.pep
LFLKAGLFYRFCVHIRGVTSEQQKSDSIASNLNLKKLKALTIKPYTFCIPVSNNTYIVYL

SEQ ID NO: 336761 - protein, 165 aa, Zea mays
  Clone ID: MRT4577_7026C.1.pep
SRWPPPPRPAAAPLPALAEQMEKAALFDFNLTLPAIATEFLLLMVALDKLYFTPLGKFMDERDAKIRGELGDVKGASEEVKQLEDQAAAIMKAARAEIAAALNKMKKETTAELEAKLDEGRSRVEAELVEALANLEAQKEEAVKALDAQIASLSDEIVKKVLPSA

SEQ ID NO: 336762 - protein, 58 aa, Zea mays
  Clone ID: MRT4577_70271C.1.pep
YPQNMLKKFGMKKAKLAKTPMSSNVHPALNEEGKHVALTIYRSMIGSLLDLCASRVGL

SEQ ID NO: 336763 - protein, 93 aa, Zea mays
  Clone ID: MRT4577_70272C.1.pep
PVQERVARGATQQYQLPRIGSPWLSLLHHGREEVREHVRPHSRPQQEAFVQERQGPTLHNKVLHHRPKWPRARPLQALANWVRFRFVLSWALV

SEQ ID NO: 336764 - protein, 107 aa, Zea mays
  Clone ID: MRT4577_70273C.1.pep
HRLPYNQKPAAYPQQLLPFNQLATLNSTAYLQQQQLLPFSQLAEVSPATLLIQPQLMPFYQHAAPNAVTILQLQQLLPFNQLALTNTAAIYQQPIIGGALFEMSHEL

SEQ ID NO: 336765 - protein, 34 aa, Zea mays
  Clone ID: MRT4577_70274C.1.pep
VAVWSWQHHADQCTTEHGTKKAPNSIERIRRFFR

SEQ ID NO: 336766 - protein, 180 aa, Zea mays
  unsure (1)..(180): unsure at all Xaa locations
  Clone ID: MRT4577_70276C.1.pep
GTQKILCENQLILVKHNIGGGGGRQKFCLIMLLGLSASAGTXSILPKCSQAAIASILPPYLXPAMSLLCERGGGLPYRIQQAIAAGMLPLSPLFLQQSSALLQXLPLVHLLAQNMRAQQLQQLVLANLADYSEQQKLPLXHLPAQNIRAQQLQQXLVLANLVCYSQQQQFLPFNQPTLLN

SEQ ID NO: 336767 - protein, 143 aa, Zea mays
  unsure (1)..(143): unsure at all Xaa locations
  Clone ID: MRT4577_70278C.1.pep
MAAKIWCLVMLLGLSASAPTASIFPQCSQAPIASLLPPYLSPAMSSVCENPILLPYRIQQAIAARILPLSPLFLQQSSALLQHAPLVHLLSQNIRAQQLQQLLLTNLAAYSXQQPLPLVQFVAQNIMAQQLQQLLLTNLAAYF

SEQ ID NO: 336768 - protein, 42 aa, Zea mays
  Clone ID: MRT4577_70279C.1.pep
CLWTVGHVPLELPPFHLTYVMESVKCVRSLIVYSSDSLVRIM

SEQ ID NO: 336769 - protein, 171 aa, Zea mays
  unsure (1)..(171): unsure at all Xaa locations
  Clone ID: MRT4577_70280C.1.pep
TTRPEGLTKELTVHEEIRERRIAGDMDGVHVTXRDTLYHMLMHCLASXEDRSGERKGEPSALSSRVLPWHAEVHAALFVHLDSGLHRGMYYLERNDEHFDAMQRAMRQDYAWGHPEGCPVCLPLYRLMKGDCQKISMHISCFXEIGSNGCISLGMIARFHPEMHEKGEWMY

SEQ ID NO: 336770 - protein, 56 aa, Zea mays
  Clone ID: MRT4577_70281C.1.pep
KGLFFSGFRGGGRGLLFLGSFAPLFFGGSVFFLSFQFGVFCTRGLKQDLLLVVAVR

SEQ ID NO: 336771 - protein, 50 aa, Zea mays
  Clone ID: MRT4577_70282C.1.pep
YPPCAFLLLHIPARRGLYVYRRLHRTSMACFFIRTCLTKPYFGTQKQHTP

SEQ ID NO: 336772 - protein, 58 aa, Zea mays
  Clone ID: MRT4577_70283C.1.pep
YVCTGALHNTILIAGGIIYQWCHHMLGMAGVVFILLLLVIHLYLSFRTYRDGGGGYLW

SEQ ID NO: 336773 - protein, 97 aa, Zea mays
  unsure (1)..(97): unsure at all Xaa locations
  Clone ID: MRT4577_70284C.1.pep
SVGAVGVSXGPRVLRALGLRALFARLVRGAPSRAAASVWVGRLRRRRRRRGRLSRRLGPLGAAPVPVCVPAAWAGARRLAGLLVARLGGRPGSSRRP

SEQ ID NO: 336774 - protein, 41 aa, Zea mays
  Clone ID: MRT4577_70285C.1.pep
GDGQGLPPQAIDQFKDIILPGLLQRQGMSHNASACGKATPE

SEQ ID NO: 336775 - protein, 93 aa, Zea mays
  Clone ID: MRT4577_70286C.1.pep
SPEIRFYCLFLYSNCFFKLHSWVEPFNNFGFWFLSFHNFRTGAAFFYFSYLFSIFLNDLGHYLIGNPNPFLLPRTFFSCFFTSLIINTPLCPP

SEQ ID NO: 336776 - protein, 108 aa, Zea mays
  Clone ID: MRT4577_70287C.1.pep
LAPVQCNVMFCLDDLSRRPGVFFCRRGRQGRFSLVFGWGLRFYFWLGSSGSKKKTTSSSRSRPRSPVWVWAKMRAPVAPPPKYNCFFPCFFFPFSPLLNNYYNINKIL

SEQ ID NO: 336777 - protein, 94 aa, Zea mays
  Clone ID: MRT4577_70288C.1.pep
GGAHTMARTKQTARKSTGGKAPRKQLATKAARKSAPSTGGVKKPHRYRPGTVALREIRRYQKSTVLLIRKLPFQRLVREIAQDFKTDLRFQSAV

SEQ ID NO: 336778 - protein, 118 aa, Zea mays
  Clone ID: MRT4577_70289C.1.pep
MLGPAMSELVCGGCFTMLVHSRSATNVRCPHCGRLGSTRSGNQMGHLSCGQCRTTLAYPPGATTVGCPTCRNVNPVPTRVRMDARPQQTMVLVENPKTLDEKGKLVSSVAVGVPSWKR

SEQ ID NO: 336779 - protein, 78 aa, Zea mays
  Clone ID: MRT4577_70290C.1.pep
RPAFFSALLSFFGGFAFAPTTYFLPCIMWLTICKPKTFSISWFTNWICIVLGVLLMVLSPIGGLRQIILRAKTYHFYQ

SEQ ID NO: 336780 - protein, 640 aa, Zea mays
  unsure (1)..(640): unsure at all Xaa locations
  Clone ID: MRT4577_70291C.1.pep
YNLGVRMSADASAAMEKIRAAGLLKTQGLIAGQWVDAYDGKTIEVQNPATGEVLANVSFMGSRETSDAIASAHSTFYSWSKLTASERGKALRKWYDLIISHKEELALLMTLEQGKPMKEALGEVNYGASFIEYFAEEAKRIYGDIIPPTLSDRRLLVLKQPVGVVGAITPWNFPLAMITRKVGPALACGCTVVVKPSELTPLTSLAAADLALQAGIPAGALNVVMGNAPEIGDALLQSTQVRKITFTGSTAVGKKLMAESANTVKKVSLELGGNAPCIVFDDADIDVAVKGSLAAKFRNSGQTCVCANRILVQEGIYEKFASAFIKAVQSLKVGNGLEESTSQGPLINEAAVQKVXFWPLICSNYLVSRPPSSIPKVSNYSCFISLFVGLFPPPLXEKFINDATSKVISNHLRMCIFPSTMGGFTKGKKELDXFLLLGRVGLSAVHSGQTSFLNFFWLRSDQPELVNMWVXLEYLVLAYFIETLNMVFGVLLPLFVMHVKYPLIXXGANVMLGGKRHSLGMSFYEPTVVGNVSNDMLLFREEVFGPVAPLIPFKTEEEAVHMANDTNAGLAAYIFTKSIPRSWRVSESLEYGLVGVNEGIISTEVAPFGGVKQSGLGREGSKYGVDEYLELKYICMGNLG

SEQ ID NO: 336781 - protein, 527 aa, Zea mays
  Clone ID: MRT4577_70293C.1.pep
MAMAMMAMRRAVALGARHIPAAAASSFRVVSLRHMSADAGAAMEKIRAAGLLRTQGLIAGQWVDAYDGKTIEVQNPATGEVLANVSCMGSRETSDAIASAHSTFYSWSKFTASERSKALRKWYDLIISHKEELALLMTLEQGKPMKEALGEVNYGASFIEYFAEEAKRIYGDIIPPTLSDRRLLVLKQPVGVVGAITPWNFPLAMITRKVGPALACGCTVVVKPSEFTPLTALAAADLALQAGIPAGALNVVMGNAAEIGDALLQSTQVRKITFTGSTAVGKKLMAGSANTVKKVSLELGGNAPCIVFDDADIDVAVKGSLAAKFRNSGQTCVCANRILVQEGIYEKFAKAFIQAVQSLKVGNGLEESTSQGPLINEAAVQKVEKFINDATSKGANVMLGGKRHSLGMSFYEPTVVGNVSNDMLLFREEVFGPVAPLIPFKTEEEAVHMANDTNAGLAAYIFTKSIPRSWRVSESLEYGLVGVNEGIISTEVAPFGGVKQSGLGREGSKYGIDEYLELKYICMGNLG

SEQ ID NO: 336782 - protein, 65 aa, Zea mays
  Clone ID: MRT4577_70295C.1.pep
MTSRICSCMRDLMLLECYGMECAYDDGYLKRLAGFSCLTWEPDGVAGMCTDCSLVCDDGHEIVEL

SEQ ID NO: 336783 - protein, 60 aa, Zea mays
  Clone ID: MRT4577_70297C.1.pep
MAAISREGWAWGGSLHGLLGWAPWDMDEQEAVQSKEPKIEDAVGREASRSRASQQGRRQH

SEQ ID NO: 336784 - protein, 95 aa, Zea mays
  Clone ID: MRT4577_70298C.1.pep
PSLNACPKYMLSTQASKAKVRSQRAPKQRPKFPFFGGGPRETGPLNKVVFLESSPPTLSPVLGIQRGWGPRAQEAFSFRTPVFGPMAPPLEVPAS

SEQ ID NO: 336785 - protein, 212 aa, Zea mays
  Clone ID: MRT4577_7029C.1.pep
SDDEGSLCCGRSGRGGGRGLPRRAAGRGRGGRVRGDAEGHGGAEAGAPRRRRRTVVPFRRLLSHSHFVQDVVLSSDGQFACSFSCDRELRLWDLSTGLTTRRFVGHEKDVISVAFSVDNRQIVSASRDKTIKLWNTLGECKYTIGGDLGGGEGHNGWVSCVRFSPHTFQPTIVSGSWDRTVKVWNLTNCKLPCTLDVNGGYAKGVTGSPQGN

SEQ ID NO: 336786 - protein, 118 aa, Zea mays
  unsure (1)..(118): unsure at all Xaa locations
  Clone ID: MRT4577_702C.1.pep
HNGSSRYRSCASSVLASSTDASICXQCSLAASAVTPQFLXPVSTTGSEHATVQAYTLQLALAASALQQPIAQLQHQYLAHLTLQTIVTQQLQQQQLLPLLIHLAEANPVTYLQQQLFA

SEQ ID NO: 336787 - protein, 138 aa, Zea mays
  Clone ID: MRT4577_70300C.1.pep
WDPRGRPGFHGRTSPCCLSALSPSLITSASTSFSACPQSSSPAALCPPPSSPSRVFPWCPECQPLYSMPLLGSMAVAVPAISLVADLAPATSPRWISSGRRDAASYTSCGSLVLALALGYGTATAIEPLRVAPSTCST

SEQ ID NO: 336788 - protein, 122 aa, Zea mays
  unsure (1)..(122): unsure at all Xaa locations
  Clone ID: MRT4577_70301C.1.pep
QQQQFLPFNQLAALSFAAILQQQLPFSQLAAANRQQFLPFNQLSALNCAAFLLQGKQPAXKQLAYVSPNALLTQLQLFPFHVHFVSNAGGILHLQQMMPFNQLAVANPSAFYQQPIIGGALF

SEQ ID NO: 336789 - protein, 155 aa, Zea mays
  Clone ID: MRT4577_70302C.1.pep
PYLIVVSGFSLIRPGVSQNLYKENPAAVGFFCSVYLLHVTSSPSRFSSTQVELALLCLPVLVGHLPGGRPRPCPSHSFPFGPAAASTQPLLWHTVLVQPLSIGVCAISLVLDEMTMRSFVLCAAPPATPSTPGEVLFSPCRFSARRRLLCVNCVC

SEQ ID NO: 336790 - protein, 148 aa, Zea mays
  Clone ID: MRT4577_70304C.1.pep
RFVFCVALCSDTSFSQELVLFLVPVRYSGAHSRVGWFSFRCGPHFPWFYPASVWFFPMGPSLRSHHSLRVFFFSPLEKRSIFPGRVLILFLHCCHFSGVSPFLFAPCSFILFFLHPRSSFCWCLFPTLWFCPSLWFCFVDRVFHFLGV

SEQ ID NO: 336791 - protein, 79 aa, Zea mays
  Clone ID: MRT4577_70305C.1.pep
VQAPPLPPPGNNSAAATATSAMGACATKPKTLEGQAPADAAVSKPRVAPDATLIYVKVAAVHNLPRLSAYRNSCQAICT

SEQ ID NO: 336792 - protein, 82 aa, Zea mays
  Clone ID: MRT4577_70309C.1.pep
SMWHKAPEKVQNVAARASKVHEGCSHSCRLQPIKIMTEHSSRCQLKGSDGIPGTNFLSRYLNPVDVAFKKLLQRINKSCVYL

SEQ ID NO: 336793 - protein, 391 aa, Zea mays
  Clone ID: MRT4577_70310C.1.pep
MAEPAAHPPASVLRAQLQPPPSDTVPWSRASRAERRFFRLEFHEGHRDLVLNEYLPYVRRQGRAVMAKNRQRRLYTNILREGFDDGFYRDVWTHVPFEHPKTFDKLAMDPAKKKDVIDDLDMFKQSKDYYNRVGKPWKRGYLLYGPPGTGKSTMVAAMANHLGYDVYDFELTSVKTNTDLRKLLIETKSKSIMVFEDIDCSLQVTGKRKSKEEEEGSKDGNGDDPSAAKQKEEEEDAKSSSKVTLSGLLNFIDGIWSACGEERLVVFTTNHVDKLDPALIRTGRMDKKIEMSYCDFESFKFLARMHLRDDVVEAHGEQCDRVRALLQEVNMVPVDVGEHLTPRSPDEFEDAGPCLARLVTALEKAKKEADILPRPQAQPDVSGIVVDAGSK

SEQ ID NO: 336794 - protein, 159 aa, Zea mays
  Clone ID: MRT4577_70312C.1.pep
RAAARAGTSFFFFFFFFFLFFFFFFFFKILFSQYYYPPSKKWIKEIVDTTAATTPRGTNNKPGAATSGGAMRANQGGVIGETASCGKKVLADKNPQQNTNQNKREKRRGRKRGETKNNSGGAKAGRSPRKKAVPPAAIKKPKNRERRRAERGALLLLQD

SEQ ID NO: 336795 - protein, 238 aa, Zea mays
  Clone ID: MRT4577_70313C.1.pep
MDVVSWFSQVSVVVSVLAVCWTVLWQNLQHIHLQQFFARSFNRRARRLAAVVDPYLSVTFEEYEGGRIKSSDAFDEIKSYLTTASTRDVRHLRAATDRDKFVFSMAKGEEVTDTFRGAMVWWSAAGVPPPSDTVPWSRASRAERRFFRLEFHEGHRDLVLNEYLPYVRRQGRAVMAKNRQRRLYTNILREGFDDGFYRDVWTHVPFEHPKTFDKLAMDPAKKKDVIDDLDMFKQSKDY

SEQ ID NO: 336796 - protein, 419 aa, Zea mays
  Clone ID: MRT4577_70314C.1.pep
IQSFIDRVADRLPSWKADLMTRAGRKIMVQHVLSSMIIYLAMAIDFPQWALEAIDKIRKGFLWKGRKEVRGGHCLVAWGRVCRPLHLGGLGISSLKELCWALRMRWLWLHKTDPEKPWANLPIQVPKKAEAFFSTVLVSKVGNGAHTLFWTNKWILGQNVCSLAPRLFAIIPKRIANRRTVLEALANRKWISDIKGALSVGVLVDYLNLWELLSEIVLQPEVEDKHIFSIAADGKYSAKSAYEGLFAGSTSFGLYHLIWKTWAPLKCRFFLWLVANKRCWTADRLAKRGLDHPARCLFCDQEAETIDHILVSCVFTRVFWFTLLKPFGFQRLAPQPGHSSFMAWWEQISGLASGIRGKGLNSLVALGAWITWKHRNSCVFDGCTPSLDLSINLAREERQSWEMAGAKGLSYLAALIPGD

SEQ ID NO: 336797 - protein, 87 aa, Zea mays
  unsure (1)..(87): unsure at all Xaa locations
  Clone ID: MRT4577_70315C.1.pep
PYILALNFSFFVPQNFFPWGPGLNFGWWQYLSLFPSKNFLKNNILFFLSQGAGFGLNFWGPVAPXFTLFSDFSPLLIATGWVFPRFF

SEQ ID NO: 336798 - protein, 76 aa, Zea mays
  Clone ID: MRT4577_70316C.1.pep
KGPRAPPGPYPLFCPPPVPLDPLAPYAPENFYVDRIFDAKVAPLEKIIGFNPKGFFPLNPQEGPTLRIVSSEPPIS

SEQ ID NO: 336799 - protein, 92 aa, Zea mays
  Clone ID: MRT4577_70317C.1.pep
GGVQGMGWQVQAPPGQGGVLLRGPGVHVKALNQDEGPPRVFQGRGKGLALLAQEGPKIKNDDADDCCFCSTGALKFCGMGVIKVGCPPPRVQ

SEQ ID NO: 336800 - protein, 411 aa, Zea mays
  unsure (1)..(411): unsure at all Xaa locations
  Clone ID: MRT4577_70318C.1.pep
MGLGAVAATREDEEAKMEAGGDTAGQKLDAGALFVLQSKGSWLHCGYHLTTSIVAPALLSLPFAFASLGWAAGTICLVIAAAVTFYSYNLISLVLEHHARQGRRQLRFRDMITDILGPGWGKYYIGPIQFLVCFGAVVGCTLLAGQSMKAIYLLANPGGTIKLYVFVAIFGVFMMILAQLPSFHSLRHVNLVSLLLCLAYSFCAVAGSIYLGNSDKAPPKDYSISGDAQNRVFGVFNAIAIIATTYGNGIIPEIQATVAAPVTGKMFRGLCLCYAVVVTTFFSVAISGYWAVGNQAQGILLSNFMVDGAAVIPKGLLLVTQLFTLLQLSAVGVVYLQPTNEVLEGLFSDAKQGQYAARNVVPRLVSRTVAVALATTVAAMLPFFGDMNSLIGAFXFLPLDFAVPALFYTSP

SEQ ID NO: 336801 - protein, 119 aa, Zea mays
  unsure (1)..(119): unsure at all Xaa locations
  Clone ID: MRT4577_70319C.1.pep
ICRSGFSLGHXYLVIPRLLGLPVFLALVPHSDVLPXTLHHLPESPSPFAPWQGSGCPLPILPPQSTSSPAHPLQTRDTSTMAFSLRDRLLETIIPLILSTTDYPSFDLPLLAHELQPET

SEQ ID NO: 336802 - protein, 50 aa, Zea mays
  Clone ID: MRT4577_70320C.1.pep
MLTFLHPHIHELLCNRTTNTEHKFVLNYTNKPIIFSISRLDHFNNLTFLF

SEQ ID NO: 336803 - protein, 108 aa, Zea mays
  Clone ID: MRT4577_70321C.1.pep
MSCDGSIPEVPSPKYWTTQHRPPCLKNTKCALNILSATFLQLDLHVGGVRRIRRWLGVHYGRALDGRDGAEGHLKPSQRRRPTRRGGGETQGSEAASPGQACGGVSRP

SEQ ID NO: 336804 - protein, 48 aa, Zea mays
  Clone ID: MRT4577_70322C.1.pep
VGEPGVFSQKNRKRATPPPKKKKKKKKKKKKKKKKKKKKKKNKKKTQN

SEQ ID NO: 336805 - protein, 70 aa, Zea mays
  unsure (1)..(70): unsure at all Xaa locations
  Clone ID: MRT4577_70323C.1.pep
DIGQLIRLTSDYSVKEAQLLNEKHVLENXIAYIYMQHNSVDDASKALNYRXEIIEKIIHLTYALILSIWV

SEQ ID NO: 336806 - protein, 56 aa, Zea mays
  Clone ID: MRT4577_70324C.1.pep
ALLVVSPYRKMGTFNLFDGFEATGRIPRGPFHSLGGGGGLTRSLLGPWHGALEKLG

SEQ ID NO: 336807 - protein, 118 aa, Zea mays
  unsure (1)..(118): unsure at all Xaa locations
  Clone ID: MRT4577_70325C.1.pep
TTSSIYSTFKLSTLAHTILCLLILVGLYACTGTATTSPQRSKAPIAXSSLPRSLSPPVSSXVCEXPIIQPYIIHHTIAACILPLXPSLYNNNXALLQQLPLAHLLAQNIMAQQLLQLV

SEQ ID NO: 336808 - protein, 67 aa, Zea mays
  Clone ID: MRT4577_70326C.1.pep
SLSSHGCHSLEISMYISKHLKGRNEFSSEGGWYQGCKLRNTYMRRPNCCIVLPTPDFIPTTSQSQAW

SEQ ID NO: 336809 - protein, 108 aa, Zea mays
  Clone ID: MRT4577_70327C.1.pep
DLGDERRDNEPAMDPHSSIHPPGKHLPRIHISSSGRGEMSASASGAIRLILIRRSPSWISRFPSTRNHYYFVHRVSHLVCSLQLSLTIWEIFPLVGVVFNPIMNELFT

SEQ ID NO: 336810 - protein, 58 aa, Zea mays
  unsure (1)..(58): unsure at all Xaa locations
  Clone ID: MRT4577_70328C.1.pep
HQTTHKLGKTFRPKCKIFEIEWPLKVSPLHHQHTKLGGMHCTSYAFQFHFTTMYXSGC

SEQ ID NO: 336811 - protein, 75 aa, Zea mays
  Clone ID: MRT4577_70329C.1.pep
LLLSLVTRDRTPRRPARPGLGAARPPVHSPRTEGDDKPMGPARARRTGPRGGQARSSDPRPPSPAHLLLPRARFS

SEQ ID NO: 336812 - protein, 42 aa, Zea mays
  Clone ID: MRT4577_7032C.1.pep
SGLKVPLFFLGFLLLKQTRKKNFTHCSLISNAFLNFPKFWAK

SEQ ID NO: 336813 - protein, 68 aa, Zea mays
  unsure (1)..(68): unsure at all Xaa locations
  Clone ID: MRT4577_70331C.1.pep
PSSXPFPILPLYLQTFPIYRALPQNRHTAPRTATSMNPRWXALQTTAAGAKRCRHHGVRSWNRRGEAL

SEQ ID NO: 336814 - protein, 143 aa, Zea mays
  unsure (1)..(143): unsure at all Xaa locations
  Clone ID: MRT4577_70332C.1.pep
HIIHKSLLMHHDLYASENTAPTMIHCSQDHYISPGGAYLERQESSMWENAASQPYRMQQELAPRMLPXITXLMLQQPXSPIXQQLPLVHLXVAQNIRAQQLQQLVLANLAAYSQQHQFLPFNQLAALNSAAYWQQQLPFSQLD

SEQ ID NO: 336815 - protein, 165 aa, Zea mays
  unsure (1)..(165): unsure at all Xaa locations
  Clone ID: MRT4577_70333C.1.pep
LIMLLGLSASAATASILPQCSQAAMADLLPPYXSPAMTXVWENPILLPYRIQQAIAAGIXPLSPLFLQQSLALLQQIPLVHSLGQNIRAQQLQQLVLANLAGYSNQQQLPLVHLLAQNIRAQQLQQLALANLAAYSQQHQXVPSKQLDEMNSAAQGQNQRPNLQL

SEQ ID NO: 336816 - protein, 141 aa, Zea mays
  unsure (1)..(141): unsure at all Xaa locations
  Clone ID: MRT4577_70335C.1.pep
IMVQRLQLCVLPNRMTXSQQQQFFPLVHLAAVNYPYSSQQPHVPFSQLPAANPQQFLPFNQLAALNSPAYLQQQHLLPFSQLAGVSPATFLIQPQLLPFYQHAAPNPGTLLQLQLLLPFNQLALPNPSAFYHQPIIGGALL

SEQ ID NO: 336817 - protein, 267 aa, Zea mays
  Clone ID: MRT4577_70336C.1.pep
MSPNTDTYTRTLIVALKSPSVGKSTSQISELTGVHPRTINRIYSRAIEAGFEPNVLPLKILPEHVHDAPRSGRPSKQTDEAKEQIIQQVRCDRYGREKSCADVAGALSLQGVNISRTTVWRVLRAAGYRKTKPTRKPGLTQEMRSARLKWAMDHKDWTLEDWKNVIWTDETSVVINHRRGGYRIWRKADERVVKSCIRERWKGYSEFMFWGCFSYDKKGPCHIYQPETKAEKEDAARRIEQLNAELEPLKREEWELSSAMARTGLRN

SEQ ID NO: 336818 - protein, 91 aa, Zea mays
  unsure (1)..(91): unsure at all Xaa locations
  Clone ID: MRT4577_70338C.1.pep
PQNFFLFSRVEALSFGVYLQQQQIXLPFTQLVNVSQVAFLKQQTVVPXFYLPSMPNAGTFLQLQQLLPFTQLALANSTVFYKQPIIGGALF

SEQ ID NO: 336819 - protein, 96 aa, Zea mays
  Clone ID: MRT4577_70339C.1.pep
YFCVKELNKRNEPKVPRGNKSYKKTSMRQSEQRPKHREGRNILTKEPAETICGSNVQALTQRSVKKGKQTGAIDKRHVWMAGMGNQNLNRWGRAPL

SEQ ID NO: 336820 - protein, 369 aa, Zea mays
  unsure (1)..(369): unsure at all Xaa locations
  Clone ID: MRT4577_70340C.1.pep
MEDAAESRKLFVGGIPAGAQEADLRAHFARFGEVRSVVVMRDRETGHGRGFGFVEFEDKAAAAAAAALGDADRPRHFLCGRAVDVKRARARAPRNQREQHSXSSGRTXLDQGNQDNQYPMGNGTADSGDNVNYGSKKVFVGGLQDDTTEEEFRAYFETFGTVTDVAVIYDSATNRSRGFGFVTFDSEEAVGKVMRQSFHDLNGTKVEAKIAIPKDEQYYRNRGRGARSSGGRVPAGYEGSMYQPPYNAGYGSYNGYMPQPVHVQPYFPAPYFPVAGYPYGSGYPSQVVMANAPDMMSRWVPPAYGNYPQMYPWYILYRAGYGGPATSFQHGINGGGADNKKDQTNVDMQQADNTSSVTTMLEHMKLGSQ

SEQ ID NO: 336821 - protein, 49 aa, Zea mays
  Clone ID: MRT4577_70341C.1.pep
LLSFNNCKPYPRHIYLASLLTAAENDRNNRGNSQAHTTISSCSPRGAVT

SEQ ID NO: 336822 - protein, 153 aa, Zea mays
  unsure (1)..(153): unsure at all Xaa locations
  Clone ID: MRT4577_70344C.1.pep
PGSNSHHNQFLPFYQLGSLYFASNFQQQQLPFSQLPAAYPQQFLPFNQLAALNSPAYLQQXQLLPFSQLAGVSPATFLTQPQLLPFYXHVAPNAGTLLQLQQLLPFNQLALTNPTAFYQQPIIGGASFSFYEYSHNKFFVSLGSKISNARPDS

SEQ ID NO: 336823 - protein, 95 aa, Zea mays
  Clone ID: MRT4577_70346C.1.pep
PKGWADAWGPLSTWGSPPRGVSKPWVIKKAAVPGDLGSLGPSGGPQNGGGGLKKNCGLGVKKRGGGFVGLKDPLGPLGVGPKTFLHQKGWNPYEV

SEQ ID NO: 336824 - protein, 36 aa, Zea mays
  Clone ID: MRT4577_70347C.1.pep
FVFIGQHPPETPRCSQVTPGGYARLGHCACPTQMRS

SEQ ID NO: 336825 - protein, 40 aa, Zea mays
  Clone ID: MRT4577_70348C.1.pep
ARLSSECFVMLLYNKFISYLDLFWFIGGFCFLLLNVCSFY

SEQ ID NO: 336826 - protein, 124 aa, Zea mays
  Clone ID: MRT4577_70349C.1.pep
RVEHVDHSRKSAEQAVKAIKAAEGGTAVEEYDYLPFFYSRSFDLSWQFYGDNVGDSVLFGDSNPSNPKPRFGAYWVQGGKVVGAFMEGGSGDENKALAKVAKARPSAESLDELVKQGISFAAKI

SEQ ID NO: 336827 - protein, 57 aa, Zea mays
  Clone ID: MRT4577_7034C.1.pep
LHDGHINVESLWDAPRIEFFVFFLKIYFFTFYVYLSFYLICSSFFFFFFFFFFFFFF

SEQ ID NO: 336828 - protein, 39 aa, Zea mays
  Clone ID: MRT4577_70350C.1.pep
PKTVKLPGKADYAEPLPSKTSKRPDLIQTEFVTALPSMA

SEQ ID NO: 336829 - protein, 479 aa, Zea mays
  unsure (1)..(479): unsure at all Xaa locations
  Clone ID: MRT4577_70351C.1.pep
MTDAAAAAARRLRAFKRWMRAHGVVCSDALSLDVSDPLGVHVRAATPLRDGDLVATIPRGACLTPRTTGAAAAIEAAELGGCLALTVAVMYERAQGADSPWDAYLQLLPDCESVPLVWPAGEAECLLAGTELDKIVKQDKEFLCEDWKECIEPLMLSGELDVDPDDFSLEKYLSAKTLVSSRSFQIDSYHGSGMVPLADLYXSDSDDEEEEDDRSDASADDKPATKNPTSSPPGSRANDEDLEIIIVRDVNEGEEVYNTYGTMGNAALLHRYGFTELDNQYDIVNIDLALVTKWCTSIFSGRHTRARVSLWRNLGYSGCTSQDTEYFEIAYDGEPQLELSILLYIINMKPDVYGKLICVAHGFVSDEEHETICNVFKFVKATSSNQNSEVNGLEKLPDVKKLLHSESVCSALLSLADMRESLYGSNTLEDDEEELHACCVVNERKLYHSLVLRVSERRILRRLREFASSGSKGRKRKHP

SEQ ID NO: 336830 - protein, 81 aa, Zea mays
  Clone ID: MRT4577_70352C.1.pep
GPAYLHVDLATGLVLDGTEPSRSSVRSSAPRPYLAASPGILCLVKCAAGAPVQQPDPTESRSTTYVVPSSFSGDEQLYRPQ

SEQ ID NO: 336831 - protein, 68 aa, Zea mays
  Clone ID: MRT4577_70353C.1.pep
RLSAVGPGWPSYPVPGFFVCPRSQGFIFVRFVFGVALMCCLLHGLSVSVVTAVFFLGLSRSLRPPAFF

SEQ ID NO: 336832 - protein, 49 aa, Zea mays
  Clone ID: MRT4577_70354C.1.pep
AVDSRRICHVVARMRLEANFARQDWLASPGYLTTKANMNMKGPSLMLVS

SEQ ID NO: 336833 - protein, 221 aa, Zea mays
  unsure (1)..(221): unsure at all Xaa locations
  Clone ID: MRT4577_70355C.1.pep
MATTTAAARWSFPARLQLLTSRRFCFPASSAAPPSSVAGFSWADALRVAGDGGRGDESDLSGYFRKVKSCNRGMDKKGQFVKFSVEDQVVGYIHKGFIEHIRDFHDVFTIVMDDNGSNTVEHVSLQSSLRTPEDRTHAIGSVIKSLGELIPGIRNELYPVTSSYGMPVYFSLERAAAPYFGIKAYGVHMNGYXVEKDGQKFLWIGNRSDVKQTYPGMLDHL

SEQ ID NO: 336834 - protein, 236 aa, Zea mays
  Clone ID: MRT4577_70356C.1.pep
WIRLEGNSAFGLREDLGAIIAWFLCVFRPDRVPALVNTSVAFMRHIFVRAAAAAVTPIDYFHRTYGPTYYICRFQEPGVAEKEFSPANAGYLMKRILCNRFTSSAAGDDKRPPADAAEEEPLPPWLTEEDVGHFASEFERTGFTGPINYYRNMDRNWELAAPWADAKVRVPTRFIVGDGDLTYHYPGIQDYIHKGGFEADVPGLESVVVIPGAGHFVQQEKADEVSQHIYDFISKF

SEQ ID NO: 336835 - protein, 322 aa, Zea mays
  Clone ID: MRT4577_70357C.1.pep
LEAGREVVLANLLALAILLLSTTPAPTAGEQTICSDATYERNSTYKSSLRSVAGALTGDAARLHSSTGAAGEGPDKVYGAVLCRADTAGADCARRLRDALAAITDGDGRSRCALHRDVAVYSELYQLRFSDRDFLADFSNAPEWVDVTNPGPVPLAMAARFDQRVTELLSALADAAAGRPGRWAVGEAPWSSSGGRDRAVYALAQCTLDMPPDHCRACLDGAMAERRRKVGGGKMGAAVFGARCTLRYEMDLQFFNVTGNSKMLSLPGKKKDRAFVIVATAYASAILCTRLLFWLLSVWRKQKRKMDLTEEPQMWMKTQVME

SEQ ID NO: 336836 - protein, 71 aa, Zea mays
  Clone ID: MRT4577_70358C.1.pep
TSQFIRARRALAAVYLHGVQCIGQPEPALYNGGILKFGSIGSDPDWYRTTETGFFFPAFVVYNLNKTTMYT

SEQ ID NO: 336837 - protein, 26 aa, Zea mays
  Clone ID: MRT4577_70359C.1.pep
FCLGNCAYLWSTGRLLGFVPTSFFEF

SEQ ID NO: 336838 - protein, 145 aa, Zea mays
  Clone ID: MRT4577_70360C.1.pep
MAYNKIPPRWLNCPRRGQPVAGRFLPLKTMLGPRYDSQVAEENRFHPSMLSNYLKSLKVKMSLLVDLTNTSRFYDRNDIEKEGIKYIKLQCKGHGECPTTENTETFIRLCERFNERSPPELIGVHCTHGLNRTGLLICAFLVRKM

SEQ ID NO: 336839 - protein, 98 aa, Zea mays
  Clone ID: MRT4577_70361C.1.pep
KSLKNSSYLFFISKESIGQNNFLHCDVYAPCMHKLKKAMTNDMVTISLCISTKVGTTHNALYTTHLQLTRHHHMFLPPSLVKTASIGNKYKRIRLAQT

SEQ ID NO: 336840 - protein, 89 aa, Zea mays
  Clone ID: MRT4577_70362C.1.pep
HMRQLTDPGSHRRKLDTEKGGDMTGLSKQERRSTTTAMKLMPCFVDASSGSHFNSWAVDITTGAKHAIAMSILVHDRCCIDQRICCLRC

SEQ ID NO: 336841 - protein, 142 aa, Zea mays
  unsure (1)..(142): unsure at all Xaa locations
  Clone ID: MRT4577_70363C.1.pep
TRSRAHHLFFFFVPTLAGKMGSFLNLLGLTPNXATATIFPPCSQTPIASLLPPYLSPSVTSMCENPIDQPYSIQQAITTSILPLXPLLLQQPSALLHAVPLRHLVAQNIRAQQLQQLVLSNLAAYSQKHQFLPFNQLAALNS

SEQ ID NO: 336842 - protein, 94 aa, Zea mays
  unsure (1)..(94): unsure at all Xaa locations
  Clone ID: MRT4577_70365C.1.pep
MLLRAPKKSDNTWYYWILGVSPDASQDDLEKAYRIVVMKNHPDKGGDSNKDKELDXDYEALNDPDKNHIHDSYDDHVFKDGMXHAEGNDHPYDI

SEQ ID NO: 336843 - protein, 58 aa, Zea mays
  Clone ID: MRT4577_70366C.1.pep
GELAPPIASIIGCQYRRHALIADALIVTGAPNISQKSATDEQERTPKQDCEKPAQSHI

SEQ ID NO: 336844 - protein, 140 aa, Zea mays
  unsure (1)..(140): unsure at all Xaa locations
  Clone ID: MRT4577_70367C.1.pep
MEVHADVDGSGVPLAVLLKRELCNQKVERPDILFGEANKSKKGEDFTLLLPRCHRTTGEGGGSGGGENAGDDDDDTISVFAIFDGHNGSLAAIYTRENLINXVLAAIPXNLXSEEWTAALPGHXVAGFVKRDKTSNKAAR

SEQ ID NO: 336845 - protein, 186 aa, Zea mays
  Clone ID: MRT4577_70369C.1.pep
MAAKIFCLIMLLGLSASAATASIFPQCSQAPIASLLPPYLSPAMSSVCENPILLPYRIQQAIAAGILPLSPLFLQQSSALLQQLPLVHLLAQNIRAQQLQQLVLANLAAYSQQQQLPLVHLLAQNIRAQQQQQLLPFSQHLLPFYLHTAPNVGTLLQLQQLLPFDQLALTNPAVFYQQPIIGGALF

SEQ ID NO: 336846 - protein, 148 aa, Zea mays
  unsure (1)..(148): unsure at all Xaa locations
  Clone ID: MRT4577_7036C.1.pep
RASLIHTQNLPRPTGPARGELIGNXKGYRINGXTTQRGSNTHLYPGHSIDPLCLDDNPKAFTDLNVKEGKNKRLSMFSMYGYFGHTIHTXKGPSQXNLADHICYQDKHNAXAYATNSLPRHRHGGSLPKPINILMLVSSHMMPKEPIN

SEQ ID NO: 336847 - protein, 57 aa, Zea mays
  Clone ID: MRT4577_70370C.1.pep
ARQQMSQARGFYDRGSSISFIIRKGAPDSCSAGRRAHTVEGAFSSALEPGKPFSVLP

SEQ ID NO: 336848 - protein, 194 aa, Zea mays
  Clone ID: MRT4577_70371C.1.pep
PTTPGSGGGYYGPPSPSSDTSPTTPGGGGYYGPPSPSSDTSPTTPDVPLPPISTSPPFSPLTPTPTTPTPYDPNTPPFTGPCTYWMMHPGVIWGLFGFWCPLVRLFGPSAAVPFGHDLTVPEALANTREDGMGALYREGTASLLNSMVNNRFPFTTQEVKDAFGAALNSGDDGAAAAQARLFKKANEGHVIRQN

SEQ ID NO: 336849 - protein, 566 aa, Zea mays
  unsure (1)..(566): unsure at all Xaa locations
  Clone ID: MRT4577_70373C.1.pep
MATRPALVFVCCCLLLAYAAAARVLDEAEPFGRLKNAARRLRDGEPFGGRKDPADPDHSPGSHGTPPCPPSIGTSPTTPTTPGGGSYYPPSPDIGTSPTTPTAPGGSGGYDAPPSPSSDTSPTTPGGGYYGPPSPSSDTSPVTPPGGGGGGYSAPPSPSSDTSPSTPGGGGGCSVPPSPSSDTSPPTPGGGGGYYGPPSPSSDTSPTTPGGGGTGGCSAPPSPSSGSSPSTPXGGGGGYXTDPPSPSSDTSPTSPPGGDGGGYSAPPSPSSDTSPSTPGGSDGGCSATPPPSSGTSPSTPGGGGGGCSAPPSPSSDTSPSTPGGGGGYYGPPSPSSDTSPTTPSAPSGGYYGPPSPSSDTSPTTPGGGYYGPPSPSSDTSPTTPGGSGGGGYYGPPSPSSETSPTTPGGGGGYTPTPQVPLPPISTSPPFSPLTPTPTTPTPYDPNTPPFTGPCTYWMMHPGVIWGLFGFWCPLVRLFGPSAAVPFGHDLTVPEALANTREDGMGALFREGTASLLNSMVNNRFPFTTQEVKDAFGAALNSGDDGAAAAQAHLFKKANEGHVIRQN

SEQ ID NO: 336850 - protein, 116 aa, Zea mays
  unsure (1)..(116): unsure at all Xaa locations
  Clone ID: MRT4577_70377C.1.pep
MHNIVPIMAAKIFCLIMLLGLSASAATASIFPQCSQAPISSLLPPYLSPTMSSACENPILLPYTIQQAIAXGILPLSPLFLQQSSGLLQQLPFVHLLAQNNQAQQLPKPVPTKLYC

SEQ ID NO: 336851 - protein, 59 aa, Zea mays
  Clone ID: MRT4577_70379C.1.pep
NSLYCIMLHVQPVVPSVVLHVRVYVVLSAHWRARLVSIGLSCRDRSHFGSICGDAHMNL

SEQ ID NO: 336852 - protein, 42 aa, Zea mays
  Clone ID: MRT4577_7037C.1.pep
HPLKDDLLVPHVLPVELVAVNAAVDHAVLTARRMVARGADPD

SEQ ID NO: 336853 - protein, 235 aa, Zea mays
  unsure (1)..(235): unsure at all Xaa locations
  Clone ID: MRT4577_70380C.1.pep
MYTLIPRCHLQPVHRSPPPCQAATTTSSAPPSPSPSLSIRFRPDQDELRSTWPQRAWTLAGTAAILSSLSTSASLAASGSGSPAEPIAAALAAYSLADLATGVCHWFVDNYGDAATPVFGSQIAAFQGHHRYPSTITLRETCNNLHALARGAALALAPVDAALSATGAPAAAHAFVGAFTACVVLSQQFHAWAHXKRRRLPPGVEALXXXAGVLVSRAQXAAHHRQXYXTNYCIV

SEQ ID NO: 336854 - protein, 113 aa, Zea mays
  Clone ID: MRT4577_70381C.1.pep
GRGSYNENHRTLSSACLSLCGLVTSSDPLRSPPLPKRRAVHGSSSWLQGGGDRWKLRQPRPRRQGRLGEEGRARLGVQQELWRTRATRRSRADHCVRQRPKPRKVTEAPTPIP

SEQ ID NO: 336855 - protein, 41 aa, Zea mays
  Clone ID: MRT4577_70382C.1.pep
EERLFPRSETLGGPKSLSLGTFICRLPCSLCCCQLNHNECL

SEQ ID NO: 336856 - protein, 61 aa, Zea mays
  Clone ID: MRT4577_70383C.1.pep
ASYSPITSCTVMPSYSSEHRARPVTNVVQLVRQHSLAISMPKVLPVDDHSDAVDGCKLQLA

SEQ ID NO: 336857 - protein, 95 aa, Zea mays
  unsure (1)..(95): unsure at all Xaa locations
  Clone ID: MRT4577_70384C.1.pep
GPLQFAFPVVCLFLGFSLVWLFFVTMLWEPFQWFWFLLYIYLVFCFLYPICGVLCGSCLLVFRHKVHFCLPKGLPCVTRGXSFKXXRXXXXXXQK

SEQ ID NO: 336858 - protein, 143 aa, Zea mays
  Clone ID: MRT4577_70385C.1.pep
GRGPDGRQQHRSRLGFGAAPVHRSPQLLEARRAAQSSLPSCGQSPSPLKPRPLAPHPLTESPSVVAECLSRCRRRGPAPSGLAPAIGARPPPPRRRLRVPSTLAPSSQHASREMQAQGIKPNSVTICYSLSWYCLQIAKRWNP

SEQ ID NO: 336859 - protein, 69 aa, Zea mays
  Clone ID: MRT4577_70386C.1.pep
NRGEFKPPFFWLGPKVFKQWFNVVRGLWGGAPFYEKVRGGETKGLKNPGGGFMPPQRGGKIPGEMELRA

SEQ ID NO: 336860 - protein, 73 aa, Zea mays
  unsure (1)..(73): unsure at all Xaa locations
  Clone ID: MRT4577_70387C.1.pep
HFEEAMRFAQRSVSDNDIXRKYEMFAQTLQQSRGFGSFRFPSGNQGGAGPSQGSGGGTGGRVYTEDTDDDLYK

SEQ ID NO: 336861 - protein, 63 aa, Zea mays
  Clone ID: MRT4577_70388C.1.pep
VLITTGMILALPPAPLRKNRRDLQGVPTYGQRRRHPLADSDGQLHFAVYIVIWPELGRNKRSK

SEQ ID NO: 336862 - protein, 174 aa, Zea mays
  unsure (1)..(174): unsure at all Xaa locations
  Clone ID: MRT4577_70389C.1.pep
YCYFILHIYQTXSTHXCXPLXLXSXXKSDRHHASLYPRPFAITNVQXIXXLNXFXPXSGQXXKXVNGNKKKKKKHQQTKHKNTSPXTXNXXTKDXXLLYTSHTNIIXYNPTTPTHADXXASSAXXXPHRPMXATNSTYPHXXHIPXGAPYCPLQPXNLLAXXWGSFTAWXXPPX

SEQ ID NO: 336863 - protein, 99 aa, Zea mays
  Clone ID: MRT4577_7038C.1.pep
DSRYQLALQVTRNLAVIGVVLNQRGVGRKRSVLQALMTNPTSSTGEPRSPSEVRTTGTPAAGAVLSSSLSFNAAATTSLPLLLCLALISWRWWCFVLPR

SEQ ID NO: 336864 - protein, 62 aa, Zea mays
  Clone ID: MRT4577_70390C.1.pep
QAYDAHDIPRVLLSRASQRVLGGHIGWGSILATFKLRPPACLHSLDPLERRYNTLGLDMLRT

SEQ ID NO: 336865 - protein, 47 aa, Zea mays
  Clone ID: MRT4577_70391C.1.pep
LGTGICISILIHQQFILLMPLDLITIISCCPIVVRTIVPRTRGRTRG

SEQ ID NO: 336866 - protein, 43 aa, Zea mays
  Clone ID: MRT4577_70392C.1.pep
HIKAILIRYGNLSRGPLTKTCDQVQSGMARWMFLSNHITTWCS

SEQ ID NO: 336867 - protein, 75 aa, Zea mays
  Clone ID: MRT4577_70393C.1.pep
YGKKTNITESVSSVFNDQTYAREFLKNPSKKPIDRQIDREAYFKIMFYMHKPKYVFIVVALQLESYVLFCTLFFK

SEQ ID NO: 336868 - protein, 82 aa, Zea mays
  Clone ID: MRT4577_70394C.1.pep
VWFFFFFFFFFFFLSHQHTHWGAHETGQFIQGKQKGVDNNSARIQHITSIGGAQGHYLGVTKHGILQQQNGGSGLGETNNMG

SEQ ID NO: 336869 - protein, 243 aa, Zea mays
  unsure (1)..(243): unsure at all Xaa locations
  Clone ID: MRT4577_70395C.1.pep
MEGATSAPNSPGKAWSTLHGLPQSTVSHPTTTTLPWLPMEGHGRCDRAPAQHGRRDPLSSPHHRRPLSIKESRLPSPPSPQMVGEPIATVPTGPESVAEADRLLALAESELSAGRLRATRRHALHAARLYPTSPRAPVVATTANVLLADASSHHAALLLPEPDDPDASPLFASELRRHFKSLVKSLRXASTPPXAAYPSVAAAAEEALGHATEAYEALTTPTPGTFWTACAGCRLLHEFERKY

SEQ ID NO: 336870 - protein, 121 aa, Zea mays
  Clone ID: MRT4577_70396C.1.pep
MSPVTALLAGTVVPPASAPSPARHARHYSVGFSPLHGGGRAALAVECSSRPQKKGTKHHMKTRPKKTQPWDIKRRPTQYPPLPPLPPDWTLVASGATVDVEEAEAPAPAATLVLDVAAATD

SEQ ID NO: 336871 - protein, 143 aa, Zea mays
  unsure (1)..(143): unsure at all Xaa locations
  Clone ID: MRT4577_70397C.1.pep
AGTRAGTGRASHGRPIAIRSVLRGRRDPTGRQGCIQAHPEWWVSTCTFWSTSFGAPXWERSTHALTEGHXGPMIREDHHLMEKLAQFDRXRILERDAHERGGRVKGFCEDTHDVCHLTCADFIRAPGVQTPGIVRFCTEVHER

SEQ ID NO: 336872 - protein, 63 aa, Zea mays
  Clone ID: MRT4577_70398C.1.pep
RLSQKIIDIHQKRQGSPRKRKGPVSGTKGKDRFRSEEAFYENPFPDCLCQPGPPAPLSASKSH

SEQ ID NO: 336873 - protein, 64 aa, Zea mays
  Clone ID: MRT4577_70399C.1.pep
SGMSSLGPSSAGKKEGMATLNMRSGHWLCVLIGVPPCPGLLPTTRTVCYVVLKLVCPARDNIGQ

SEQ ID NO: 336874 - protein, 126 aa, Zea mays
  unsure (1)..(126): unsure at all Xaa locations
  Clone ID: MRT4577_7039C.1.pep
MATGNLASVVVAVDGSEESMNALQWALDNLRLRPDGELVVLHVQPLPNIAAGLNPAPIPFGGPSGXVKTEVVVGDPKDKICEIAANRKADLLVMGCRAIGPLKRVFLGSVSNYCINHVGCPVVVIR

SEQ ID NO: 336875 - protein, 155 aa, Zea mays
  unsure (1)..(155): unsure at all Xaa locations
  Clone ID: MRT4577_703C.1.pep
MVNSNLPRRIIKETHRLLSXEPAPGISCXSPREENMRYFNVMILGPEQSPYEGGVFKLELFLPEEYPMAAPKDKILTKIYHPNIDKLVMIXLDILLDKWSPALQILADLVSIQALLSVAYPYDPLSVNIAKHWRANVEQPVETAIEWTHLYVSGA

SEQ ID NO: 336876 - protein, 84 aa, Zea mays
  Clone ID: MRT4577_70400C.1.pep
RDEISVVRWWQRSAATVESWRDAHPCLVSLCIRRHLPCGRTDRWSAVGAPRFPGPRCPQCPLVANKNKTTAWSILIVPDAGGRT

SEQ ID NO: 336877 - protein, 236 aa, Zea mays
  Clone ID: MRT4577_70401C.1.pep
MVSDLLLLLFLSLSLSFSHSRAYLLGKKSTYYSLATVLINYTHMDSSQQQQKQDDVDVDVMEVPEVHGDLLMELLDASLAAENAAHHHHHHHQQLGLAPDGDGDGDCWIDDNQENYDNMHAHQGCEDCRGLLDGILSDFDDYDGGPSRPRSPPAPYRVVFGHDDDTLLELEWAEEAAMDPFATSESAGGWYMDGLVMAMAWDEQQDGGGFPFEPCYGYEGEAGAAGQLYDASPLWE

SEQ ID NO: 336878 - protein, 235 aa, Zea mays
  Clone ID: MRT4577_70402C.1.pep
MPCHAWSVISSLSLSLTHSLPRVPVGKKNTNYSLATVLINYTHIHMDSSQQQQKQDDVDVGVMEVPEVHGDLLMELLDASLAAENAAHHHQQLGLAPDGDGDCWIDDNQDNYDNMHAHQGCEDCRGLLDGILSDFDDYDGSPARPRSPPAPYRVVFGHDDDTLLELEWAEEAAMDPFATTESAGGWYMDGLVMAMAWDEQQDGGGGFPFEPCNGYEGEAGATGQLYDADASPLWE

SEQ ID NO: 336879 - protein, 74 aa, Zea mays; identical to SEQ ID NO: 282033
  Clone ID: MRT4577_70403C.1.pep

SEQ ID NO: 336880 - protein, 148 aa, Zea mays
  Clone ID: MRT4577_70404C.1.pep
VESPRACRTFGTDDRKGNRNDARNPRTPTEAPPSQTVLGRPRHPLKTPTGPLGPSPPFLARGSCRRHPLNRSWLQGKVPRPSLLPARASWPFPASQTAPKDHFGFSLIVNPLERRPHLCLAWWRNLPYTQKENGVPFTLRKALNLLPL

SEQ ID NO: 336881 - protein, 116 aa, Zea mays
  unsure (1)..(116): unsure at all Xaa locations
  Clone ID: MRT4577_70405C.1.pep
GTTKMYLDLKTRYWWRGMMNEIAQYVARCDTCQXTKAEHXNPACLLQLLLVPKWXCEEIVMDFVTGLXRSQKGNYSIXVIIDRFTKEAYFISVKITFXELSLARLYHKXIVCLHVI

SEQ ID NO: 336882 - protein, 75 aa, Zea mays; identical to SEQ ID NO: 305639
  Clone ID: MRT4577_70406C.1.pep

SEQ ID NO: 336883 - protein, 74 aa, Zea mays; identical to SEQ ID NO: 282025
  Clone ID: MRT4577_70407C.1.pep

SEQ ID NO: 336884 - protein, 74 aa, Zea mays; identical to SEQ ID NO: 282025
  Clone ID: MRT4577_70408C.1.pep

SEQ ID NO: 336885 - protein, 74 aa, Zea mays; identical to SEQ ID NO: 282025
  Clone ID: MRT4577_70409C.1.pep

SEQ ID NO: 336886 - protein, 173 aa, Zea mays
  Clone ID: MRT4577_7040C.1.pep
MEMASPTPVDGGDTRFSFDYLSREGFLSILCEILYAARYPTPPLYTVQQYEEHRVPRCRVWLTLEPHPLQPRWHSLDSETVGFRADDTIEVAALKALTTFYGYHPLEMMMHPLGLFPTENRDDPMWCDRVRHAKDVRAMHLDHVGRITVQCMSALYRLQALQNDVMTHLTGLA

SEQ ID NO: 336887 - protein, 79 aa, Zea mays
  Clone ID: MRT4577_70410C.1.pep
RIEFIVRVLIAVTTPTQTASDSRLTRRLRSIYYPLRTQTSPRMSIQMCSAICSPPSRTEESWSRTMLADLNRLPIYSCL

SEQ ID NO: 336888 - protein, 88 aa, Zea mays
  unsure (1)..(88): unsure at all Xaa locations
  Clone ID: MRT4577_70411C.1.pep
MVKXCCIGAGYVGGGGXGVIAXKCPDIEVVVVDISKPRIEACNSDTLLIYEPGLYAVVTHXLGSNFFFITDVEKHVVXADIIFASANT

SEQ ID NO: 336889 - protein, 109 aa, Zea mays
  unsure (1)..(109): unsure at all Xaa locations
  Clone ID: MRT4577_70412C.1.pep
NAELDREKRLYAEVSYFDPLGLAADPQKKECLQLSEIXHARLAMVAFFGFPVEPPAAGKGPLTEWTSLMSPLAQPFPYLQRSVGSCKHRHCRVWPCRRAACDEGPYVSE

SEQ ID NO: 336890 - protein, 113 aa, Zea mays
  unsure (1)..(113): unsure at all Xaa locations
  Clone ID: MRT4577_70413C.1.pep
EGSPSGGSGVGDSSSPTRVIMAANDSSLKVYPHPCIRCRTAFDWTISKIDWSNXRGFHFLFVHVQSRDEDGFYDMDRIYSSPEXFXQIKQRDKIRRLHLCKYFVNQCHQLGIK

SEQ ID NO: 336891 - protein, 104 aa, Zea mays
  Clone ID: MRT4577_70414C.1.pep
MVRKAKVEFDEQPPDNFDPKNPYADPVAMLEYREHLVREKWIQIETAKIIRERLRWCYRIEGINHHQKCRHLVDQYLEATRGVGWGKDARPPELHEPKKTVKAE

SEQ ID NO: 336892 - protein, 57 aa, Zea mays
  Clone ID: MRT4577_70415C.1.pep
AYTENQPCIIYGADMYQIEGIATFMDYGLPEILSTKLWDPHTTVNYGLEAKLAGNHI

SEQ ID NO: 336893 - protein, 105 aa, Zea mays
  Clone ID: MRT4577_70416C.1.pep
RKVPNRPNTRKPDTSPEKTQGLGGWKTLYIYIRDMGGLIGLGGEQLPIWVGWGTDTKTGDTLTGPWDFFPEHLPWVQGAAGALGPVEHLLAGLEEHVLTGGEFPR

SEQ ID NO: 336894 - protein, 66 aa, Zea mays
  Clone ID: MRT4577_70417C.1.pep
NACSWRFMAFPAATPTSLVLRPSTGSLLFVNSLATSLSPSYIPTGPSSEPFRDPGLLDSVHGQTWC

SEQ ID NO: 336895 - protein, 117 aa, Zea mays
  unsure (1)..(117): unsure at all Xaa locations
  Clone ID: MRT4577_70418C.1.pep
SVSXGARVVAVXXVLAXXXLXAPVCPXXXXGGCSAPSRXXXLAPPRXGXXXGXXXLGXXACPVXXVXLRRXLXLGAXXXXXLLFVLSLRXCXSXVPPPPPFXLFRSXLXAVCLXXPV

SEQ ID NO: 336896 - protein, 130 aa, Zea mays
  unsure (1)..(130): unsure at all Xaa locations
  Clone ID: MRT4577_70419C.1.pep
MPHLDDHQLESKVDTQASKTYSQNAGSARMNSLIVIKNRPCKVEEVSTSITGNHGHAKCHFAVIHIFNAKKIEYIVPSSHNXDITHVKRTQYRLIDISEDGFASLLTSDGNTKDDLRLPTDETLVAQIKE

SEQ ID NO: 336897 - protein, 93 aa, Zea mays
  Clone ID: MRT4577_7041C.1.pep
TYGNGLVLYNSCTYSIIPLSKMVPSLTQSELTFQNCPTIWLLKPWHHQTYSPCSTYSFLNKSSYRPVLTRSPYLPVTHFCMVIVTSPSYCSLK

SEQ ID NO: 336898 - protein, 380 aa, Zea mays
  unsure (1)..(380): unsure at all Xaa locations
  Clone ID: MRT4577_70420C.1.pep
MEGYDREFYQFSDQLRLQTAAFSGLSLGDSIWSPADNTAPRARNADLFSPSPAPDNNSAGFAAAKMNGNGLNGPGLIGSGKLAFGATTTSKADRYNNVSLPDAKPYANANANGMYGAKPNNTNMNNGFGLNKMAAGGGGYGNFNGGNEGVKSYFNKSIGRPASNNSSSNNFNGYGGKKGAADGEQQQQQERARGQQPRRRVGRSGSRRXAKSEGPAPGASPSAANIFVWFTTLPASEALPRGQAIGGYIFVCNNDTMDENLKXRELSGLPSRYRDSVRAIRPGLPLFLYNYSTHQLHGIFEAASFGGTNIDPTAWEDKKCPGESRFPAQVRVATRKIYDPLEEDAFRPILHHYDGPKFRLELSVTEALALLDIFADKDDA

SEQ ID NO: 336899 - protein, 225 aa, Zea mays
  Clone ID: MRT4577_70421C.1.pep
ISRVPKPAIISSVQLRKVDMGTLPPFITNPKLKELTVDGDLVVEADVSYKGNFSIEVSATVRIDLGTRFKAREVTLILATVLKRLDGHILIRIKPPPSNRLWMTFETPPKMEFSLEPIVSSRQITYGVVLRAIESRIREVVNETLVLPNWDDMPFTDTIAQVIRGGIWEDTCKTKGEDADKASQKDATLDAAISDMQKLDEKGDSASAHFSISSSAESEEVATGI

SEQ ID NO: 336900 - protein, 81 aa, Zea mays
  Clone ID: MRT4577_70422C.1.pep
SKVLAEANVLLKLQDSPIGKLSRTRIPPLPFLLSSLLQSRAPLKLPEEQFGGDDDDLEDDLADDSDSDDGSDYDDLPPFKR

SEQ ID NO: 336901 - protein, 95 aa, Zea mays
  unsure (1)..(95): unsure at all Xaa locations
  Clone ID: MRT4577_70423C.1.pep
YVFEIFVDSASSSIXCLSQNMXQLDEQKKTERLKSGSCSYSGPQTRQXCCSPKSLRSPCGLNGDIWLIGPTWSLSWVPKNGFPRPIXLFDYXSRA

SEQ ID NO: 336902 - protein, 168 aa, Zea mays
  unsure (1)..(168): unsure at all Xaa locations
  Clone ID: MRT4577_70424C.1.pep
TKQKKKKKKKKKKKKKKKKKKKKKKKKPKKKKRGGPFKRTKFNYPFFQREGFFNRDPKLNKMARLLKRRERKNPGFTQFNSLGKNSPFAKWGKNKKAPPERPFQKLPNLKGKWNPPLNGPLNPGGGGVPPKGTXNLPSXLTPRPLGFFPSXFFANLAGFPPKTLNWGL

SEQ ID NO: 336903 - protein, 55 aa, Zea mays
  Clone ID: MRT4577_70425C.1.pep
VRPSKFFDARLVVLPVPLVLGAHHHSSVAGRRRRVRGGKCWRPHLRVFSPDGHAG

SEQ ID NO: 336904 - protein, 111 aa, Zea mays
  Clone ID: MRT4577_70426C.1.pep
LKVYDQTVEVLDVHAVLRAMTYRGTAVWKVTKLKPREYRICGPSIISDTSTGPYVYKKLRRMGPRWRSRDRQRKHGGQLWALAIVPLATEADLKYASIARAHARTHVRTRG

SEQ ID NO: 336905 - protein, 96 aa, Zea mays
  unsure (1)..(96): unsure at all Xaa locations
  Clone ID: MRT4577_70427C.1.pep
LMGTHCNVFTDRPSLKYXGTHCNVFTDRPSLXMIKDYDLEVHYHPRKANVVADALSRKLQCNCILMDSRINTLCDELSKMQIELIPSGSLSHVSVE

SEQ ID NO: 336906 - protein, 142 aa, Zea mays
  Clone ID: MRT4577_70428C.1.pep
MGKSKSKGAKFAAVKKIISKKTIKKYKDEVLDPRKKHTEKEKLGRNVPQVSSALFFSYNMALGPPYRVIVDTNFINSSIQNKLDLEKGMMDCLYAKCTPCITDCVMAELEKLGQKYRVALRIAKDPRFQRLACTHKGTYADD

SEQ ID NO: 336907 - protein, 71 aa, Zea mays
  Clone ID: MRT4577_70429C.1.pep
MWLCPLALTLILMAASGAACEVKDVCVGSPGIPGTPGSHGLPGRDGRDGVTGDPGPPGPMGPPGETPCPPG

SEQ ID NO: 336908 - protein, 162 aa, Zea mays
  Clone ID: MRT4577_7042C.1.pep
MATGNLASVVVAVDGSEESMNALQWALDNLRLRPDGELVVLHVQPLPNIAAGLNPAPIPFGGPSGLEVPAFTQAIEAHQRRITQAILEHALKICSDKNVEVKTEVVVGDPKDKICEIAANRKADLLVMGCRAIGPLKRVFLGSVSNYCINHVGCPVVVIKGT

SEQ ID NO: 336909 - protein, 85 aa, Zea mays
  Clone ID: MRT4577_70430C.1.pep
GNHSTTGSEAMTAGGHANRVLVRDDFTSASPLIALDILPDGSTRPAPLLFRLTVSNTSMERDHLSGCFPVVTRNTTTTYICSKNT

SEQ ID NO: 336910 - protein, 72 aa, Zea mays
  unsure (1)..(72): unsure at all Xaa locations
  Clone ID: MRT4577_70431C.1.pep
MAWXTSLKSKPKGTGGKKANADDEDATAAATTVRLMKEWTTWTMKKAKVVAHXGFIPLVIVIGMXSEPSPRL

SEQ ID NO: 336911 - protein, 46 aa, Zea mays
  Clone ID: MRT4577_70432C.1.pep
YILIFIFNANIGKIKINNHHTKIQNNRTARITRTSSRPENCTILNR

SEQ ID NO: 336912 - protein, 60 aa, Zea mays
  Clone ID: MRT4577_70433C.1.pep
GLQRFFLGYSRGLRYGPRGPFGLEPSCFLHLVRYSSLTRICRPGARLSILNAPLRSRGWC

SEQ ID NO: 336913 - protein, 57 aa, Zea mays
  unsure (1)..(57): unsure at all Xaa locations
  Clone ID: MRT4577_70434C.1.pep
ALILXTGRPFFVFKTSTNCXLLFFNDLKIFLLELHRRVISLFFFFHVQSTLLMLLXL

SEQ ID NO: 336914 - protein, 55 aa, Zea mays
  Clone ID: MRT4577_70435C.1.pep
MLGIGGRAPTTNAPGCALEGMCVCSRDEHCAPEQGYVCRAGKVYKDARVCTRVSS

SEQ ID NO: 336915 - protein, 250 aa, Zea mays
  unsure (1)..(250): unsure at all Xaa locations
  Clone ID: MRT4577_70436C.1.pep
GRGLPGGSGTTPPSAPPRAAPXQPPPRMGTSXGRPGRVVPKRLLPRPAISKPYPXATXPAXPPXPWTPSGPDLTFKHGRTSDXGSPEGSPPXGSPRKKGPXPGKGNRAYPGGGGPNPPKWRPGXDHGPPPEPNPPGFKAXPPRGGGPPGEKKGVPPKRGGFFEKKGEXPPGGGPSPPQKKNPCGAPKGGGQKKEGGGGPPPRGXGGKKKKTPPQKPPPRGGGKKKPPFFFSRGEKKGGGGPPFLGCPPPP

SEQ ID NO: 336916 - protein, 93 aa, Zea mays
  Clone ID: MRT4577_70437C.1.pep
MVNACTVLGSYDLVNVTIFFTQEGDGPTTVTVSVYGLKPGLHGFHVHALGDTTNGCMSTGPHYNPASKEHRAPEDENRHARDPGNVTSAAYGV

SEQ ID NO: 336917 - protein, 194 aa, Zea mays
  unsure (1)..(194): unsure at all Xaa locations
  Clone ID: MRT4577_70438C.1.pep
AVRSGVPPDDDVLGNSRPNGRPAPPXRRRRPLRQGEAPRXRRNPRRPSARGAPLAPPRRGRSSGRPRPXRRSTRRTPPPPLPHPRPPLPXRLXPGRSTPPRPPRRPRRPPHNRLPRTAPTTRQSPATRRGRSRACPRPPPRRCRSLRSTHRAPSPTPWSIAIDDLCWLLSCRRRKWLLCTASCASPPAPTDWCV

SEQ ID NO: 336918 - protein, 164 aa, Zea mays
  Clone ID: MRT4577_70439C.1.pep
LPPPEDSGQFKRRVKKEWAPFPKNLPFKLVQKGPVPNLAGGPVSPTTNGLNPWWFPFKRALPPPGGGLFKPEILFLPPGSPFGGQGGIPPPGFFPMAGGPLLFHAHKGFLENKGFFGGLPGGEHVFRALSLFQGCFVKPKKKRKSVFPRRVKKGGPPLFFFKKR

SEQ ID NO: 336919 - protein, 64 aa, Zea mays
  Clone ID: MRT4577_7043C.1.pep
YFFFFFFFFFGFFFFFSLFFFFLLAFYIVYLGGGQKNPGLNFFYKIQGLWGREFIITRANYIKG

SEQ ID NO: 336920 - protein, 330 aa, Zea mays
  Clone ID: MRT4577_70440C.1.pep
MCVLHPTVSCACLLTEVHEKTRALEASGYFFCLEDRALLCRDCDVAIHTVNSFVSVHQRFLLTGVQVGLDPADPVPPIAEKHVNAAGGSVNQPVRHQPKRSPTVQFSVEGSASVPTKNVTNGDCSRQNFVPTARGEVVDWTMNNSTIRSVESPPKYMSEESPTLLQSSQTTTVFSNQINGNSDGTYHLSFSSGNVTDSLPDWPVDEFFSNSEYVPNLGFSEHGSSKGDNAKLESAGGSLQCRLAEGSIAEELLGQVPGLITDDYMSRVPENSWTVPEVPSPPTASGLNWHGNLCFPAYDSTMFVPEITSLQNSQNQFTVPSSFKRRRREY

SEQ ID NO: 336921 - protein, 64 aa, Zea mays
  Clone ID: MRT4577_70441C.1.pep
MVELTVSVLLLVAGVVAMLVLHILIVVWALRRGVVLRAAASRQDEERAEGLFVEDLNQLPCHAH

SEQ ID NO: 336922 - protein, 51 aa, Zea mays
  Clone ID: MRT4577_70442C.1.pep
LPSDVFFPVRRQEVVQLICFVFPLDHLHWYCPPFFICKVCVCSCKSFITPF

SEQ ID NO: 336923 - protein, 195 aa, Zea mays
  unsure (1)..(195): unsure at all Xaa locations
  Clone ID: MRT4577_70443C.1.pep
MRIQCNACGAAEARVLCCADEAALCVACDEEVHAANKLAGKHQRVHLLTDSATAAASPAPAVPKCDICQEASGYFFCLEDRALLCRDCDVAIHTVNSFVSVHQRFLLTGVQVGLDPADPVPPIAEKHVNASGGSVKQSVRHXLPRRSLGVQXSVEGSASXPSQNVSNGXYSRQXSVPTAXAEXVDWDLEQYSIQS

SEQ ID NO: 336924 - protein, 328 aa, Zea mays
  unsure (1)..(328): unsure at all Xaa locations
  Clone ID: MRT4577_70444C.1.pep
HSLFCSVSNPPARPFSCLSLLQEASGYFFCLEDRALLCRDCDVAIHTVNSFVSVHQRFLLTGVQVGLDPADPVPPIAEKHVNAAGGSVNQPVRHQPKRSPTVQFSVEGSASVPTKNVPNGDCSRQNFVPTARAEVVDWTMNNSTIRSVESPPKYISEESPTLLQSSQTTTVFSNQINGNSDGAYHLSFSGGNVTDSLPDWPVDEFFSNSEYGPNFGFSENGSSKGDNAKLGGAGGSPQCRLAEGSVAEELLGQVPGLITDEYMSRVPENSWTVPEVPSPPTASGLNWHGNLCFPAYDSTMXVPEITSLQNSESHFTVPSSFKRRRREY

SEQ ID NO: 336925 - protein, 78 aa, Zea mays
  Clone ID: MRT4577_70445C.1.pep
GNKGPPQGAAQDPTRPTNRRGGRPKRAHTQKPQPAKGGSAPSPLRWERPGVSQGRRPPPPAREMKLGDPKQKLSHRKH

SEQ ID NO: 336926 - protein, 44 aa, Zea mays
  Clone ID: MRT4577_70446C.1.pep
KTNRKFWETDLSKMRFLIFDRLYSITVNLDEVPLYITFAPLLDN

SEQ ID NO: 336927 - protein, 122 aa, Zea mays
  unsure (1)..(122): unsure at all Xaa locations
  Clone ID: MRT4577_70447C.1.pep
VSQTYPQQSGPVRRNEFVVIIXPPCTAVPLPTFETGQTVHDKXHFGAVNIFTLEELEXDVVPSSQDCDIPCVTRXEHQLIDFSEDXFVSVLTFNAYTDDVLILPTDDPLVDAIDSTPEDVDD

SEQ ID NO: 336928 - protein, 104 aa, Zea mays
  Clone ID: MRT4577_70448C.1.pep
VKKALRREIYMTWKQQIYPALEQGDQRPGAFDRPLLTRWYKHEEPHEPPQSGRRFVGVGGPSKELGLNHAAPTLPSAGHAPWEDRRYPDPKSINSSSEISGVHI

SEQ ID NO: 336929 - protein, 227 aa, Zea mays
  Clone ID: MRT4577_70449C.1.pep
MEDLVSSPSFRSVLSSSSEGQAQSGESSWTDYFVDFMLSEEERKRQEDASSYSYCATEDEGSKYGGDGSNRDEEEEEEEEEEEEEDSMVSDAASHAPTTAATALIPAGRYKELKKLKKKPFGKALDHDGSLEDTASSPVNSPKVSVVSQLELSPKRRCNIRDLTKGVVGIGDDHGGEGMDVCTDATPTEGARLGDQYHTSIAPCAELKDKGICLFPFSVLLPYHGPN

SEQ ID NO: 336930 - protein, 75 aa, Zea mays
  Clone ID: MRT4577_7044C.1.pep
ITLWGLEKRKRGKRGRYKLWVSPGGPGPRVFLSCRVYRVLVVWVFPGAPRGLELGNWFILVQGPSTHKNPLFWDL

SEQ ID NO: 336931 - protein, 223 aa, Zea mays
  Clone ID: MRT4577_70450C.1.pep
MEDLVSSPSFRSVLSSSSEGQAQSGESSWTEYFVDFMLSEEERKRQADASSYSYCATEDEGGSKYGGDGSNRDEEEEEEEESMVSDAASHAPTTAGATALIPAGRYKELKKLKKKPFGKALDHDGSLEDTASSPVNSPKVSVVSQLELSPKRRCNIRDLTKGVVGIGDDHGGEGMDVCTDATTTEGARLGDQYHTSIAPCAELKDKGICLFPFSVLLHYHGPN

SEQ ID NO: 336932 - protein, 155 aa, Zea mays
  unsure (1)..(155): unsure at all Xaa locations
  Clone ID: MRT4577_70451C.1.pep
KTPKKKKKTTKKKKQKNTKKKTQTKKKQKQEKXKHTQNTTTTKKKPKKKKRXRTRKKKKKGGRERGRPKQEKNKKEKQTKGKKKKKKSXXKKKNHKSNKKQPRQXSNKNHPNGKKETKRXKRRFRLIWIMGSQESPPPHVSNTEQLREPRAPQQN

SEQ ID NO: 336933 - protein, 70 aa, Zea mays
  Clone ID: MRT4577_70452C.1.pep
EKEWLLKGVIALGRKLIGLQDVVAVEWNLLGFDLPVALHEPCYTRERWAMFSQTLHRSMCRVGKFLDGTL

SEQ ID NO: 336934 - protein, 151 aa, Zea mays
  unsure (1)..(151): unsure at all Xaa locations
  Clone ID: MRT4577_70453C.1.pep
KDCDNEKVSKKLECILXDHKTLLXPYYRSGHKKLCSSLKLLQWKATNGITDKSFNEILKLIKKFFSEENKLSASTYEAKEIVCPVGXEARKIHACPNDCNMYHGEKNKKLKVCLVGEPPEKRIVAKVMCHFSMISCLKRSFCNKEHDKMMW

SEQ ID NO: 336935 - protein, 66 aa, Zea mays
  Clone ID: MRT4577_70454C.1.pep
LSRNSPSSINGHLRKNEVPPFPSPKLSTRLKRGSLFGAFKRMGFPILPLVFHPRILLKQNSVLCVA

SEQ ID NO: 336936 - protein, 63 aa, Zea mays
  Clone ID: MRT4577_70455C.1.pep
SRSVRTEKQVSYHTISHTLSRSLYPKVVFVFALSFYVYMKWMMMNINTYIKHMHKYCMNPLIT

SEQ ID NO: 336937 - protein, 98 aa, Zea mays
  Clone ID: MRT4577_70456C.1.pep
GRPVLQPLSPRHGHGECREGRCHGDNPTGRGIGGQHNGNRNHNRVGVGGVVHLLRLCSSRCRGRRGHRHPAVRRGGGQDGGVFRGSILAAGAAGPAEL

SEQ ID NO: 336938 - protein, 392 aa, Zea mays
  unsure (1)..(392): unsure at all Xaa locations
  Clone ID: MRT4577_70457C.1.pep
MSSADSCVSSPASPIGFEGYEKRLEITFSDAPVFEDPCGRGLRALSREQIDSFLDLARCTIVSQLSNESFDSYVLSESSLFVYPXKVVLKTCGTTKLLLAIPRILELAAGLSLPLLSAKYSRGTFIFPGAQPAPHRSFSEEVSVLNAFFGNLKSGGNAYLIGEPFKPNKKWHVYYATEEPERPMVTLEMCMTELDVKKAAVFFKNSTGGSCTSAKEMTKLSGIHEIIPEMEICDFEFDPCGYSMNGVFGPAASTIHVTPEEGFSYASYEAMNFDPSSLVYSDVIRRVLAGFSPSDFSVAVTIFGGRGFAKSWATGADIDSYMCGDPVEQELPGGGLLMYQSFTAVPSGSVSPRSTLQTDGWSSDGMEMASNDEMCIGCWNAVKKVVKKDLDA

SEQ ID NO: 336939 - protein, 171 aa, Zea mays
  Clone ID: MRT4577_70458C.1.pep
RLLAEATPKGILKLMNTDGLTIYHIKSHLQKYRIAKYMPVSSTSEGKEEKRAAAANDVQNLDLGTGMKITEALRVQLDVQRRLHEQLEIQRNLQLRIEAQGKKLQKMFEEQMKTSRTVMGPPQGADVAFIGAGEQEEEVEVEDAFDDVQLLAAVSSASVGYRDGGFQSKIS

SEQ ID NO: 336940 - protein, 73 aa, Zea mays
  Clone ID: MRT4577_70459C.1.pep
FKTQWRGGRGAPAAPLPSKSPKRERSNQIRSLHPQPIHGDRVRPGRAQHRRALPWILRLGQRRISGPTEASRH

SEQ ID NO: 336941 - protein, 72 aa, Zea mays
  Clone ID: MRT4577_7045C.1.pep
QGRHPPLKNPPLVNVLFCGSPGFPHYLDLLRQTPLCSPTSPVFLKKSWWRSIDQFLVMGAPPRGFVFSPPRF

SEQ ID NO: 336942 - protein, 85 aa, Zea mays
  Clone ID: MRT4577_70460C.1.pep
LALSHWFQLCPSLGIPAWPEPCRDAFALREGICASVFYPNNCVPSVAPARVFPLFRQAWLLPWLPLVSSGPPPGPNQDHKGPLFQ

SEQ ID NO: 336943 - protein, 64 aa, Zea mays
  Clone ID: MRT4577_70461C.1.pep
MYLQAYIDDDGDKVYTTKIDSPLALPTQSAHPARVSPDDKYSRQRVLLKKRFGLLPTQQPPPKY

SEQ ID NO: 336944 - protein, 87 aa, Zea mays
  unsure (1)..(87): unsure at all Xaa locations
  Clone ID: MRT4577_70462C.1.pep
MPDPSXYLPTVEATSQRGVRASGIMNHPSTSTNESKTIQTILPEKQVVLXSDMFVVLXSYTHRVAPKGNXIVFERAVAETIYPHYEL

SEQ ID NO: 336945 - protein, 93 aa, Zea mays
  unsure (1)..(93): unsure at all Xaa locations
  Clone ID: MRT4577_70463C.1.pep
RRAQSDFDVSITALFYGLRHTDLHVIMNEFGNAKYLVVPGLHILGVVTDIGFXITRFNSIDTVFLDYFTVSCLSFLSSSTVYESYCPHLVETS

SEQ ID NO: 336946 - protein, 128 aa, Zea mays
  Clone ID: MRT4577_70464C.1.pep
SPAENPSTGCFERSLFRRRVVGSRGLRGGRAFSSAWRCVMEAAVDGEVGESGGSRGRRRRSGGRATANDEEVRIAERHPWNVSRRGSGEGDGALSRLPSEDAARIGGGAAFGARIRRAPRSGRCHQSR

SEQ ID NO: 336947 - protein, 81 aa, Zea mays
  unsure (1)..(81): unsure at all Xaa locations
  Clone ID: MRT4577_70466C.1.pep
AAALFFFFFFFFFXXXFFFFFFFFFFFFFFLKTKQALYAYYFWTVVGNDNPGGPTRIENPKFKTSRNSSGGGGGPINRSGG

SEQ ID NO: 336948 - protein, 70 aa, Zea mays
  Clone ID: MRT4577_70467C.1.pep
PFFFFFFDKEPGRKPKFPFNFVISVSSSLTSINQVTSFPILSNYFCVIKSLIIPNKKLNLIINQSNTRAL

SEQ ID NO: 336949 - protein, 67 aa, Zea mays
  unsure (1)..(67): unsure at all Xaa locations
  Clone ID: MRT4577_70468C.1.pep
NPADSYVCTTVIKTLSIFRNSKNVCSRCRCHDQSPLLGTGLSAIIVWTICSVTSALXLWCQKTMSAR

SEQ ID NO: 336950 - protein, 81 aa, Zea mays
  unsure (1)..(81): unsure at all Xaa locations
  Clone ID: MRT4577_70469C.1.pep
MDLADPQQQQXLIAGAALLLGNAAFLKLILGSRSGAGKRLPPTIPGAPXVXXLVKFMRGPIPMXXREQYARLGSVFTVPII

SEQ ID NO: 336951 - protein, 113 aa, Zea mays
  Clone ID: MRT4577_7046C.1.pep
HTPPLFLIPRQPFPFRSMTGHHYNNRRGSQFSWGPAAKDTRSIYFDHAIHRPQENPRLRDPYRRELGILGIWRVFLAAPDFIPRGLSLIGSGTHSPRVHVFSREFPPFGNPFF

SEQ ID NO: 336952 - protein, 144 aa, Zea mays
  Clone ID: MRT4577_70470C.1.pep
KAYRPLRDRGPYPADQVLRGLEGSFAFVVYDTQTSSVFSALSSDGGESLYWGISGDGSVVMSDDIQIIKQGCAKSFAPFPNGCMFHSETGLKSFDHPTNMMKAMPRIDSEGVLCGASFKVDACSKINSIPRRGSEANWALANSR

SEQ ID NO: 336953 - protein, 110 aa, Zea mays
  unsure (1)..(110): unsure at all Xaa locations
  Clone ID: MRT4577_70471C.1.pep
FGSRWVCRCCCLSPCAACAGRSLGLRWCRLXCACSCRGSACRRRVXXGCXACGSRSWCAXCTWVXASSSLVFLVVCLVACVSWPVLGVALGGLGWCLLWCLAGCASFWRS

SEQ ID NO: 336954 - protein, 161 aa, Zea mays
  Clone ID: MRT4577_70472C.1.pep
MAIMAATATAVASPSSSTSPGPLQPSPRFLPPVSTPARCHLLPKPRRWCARLHIERRVAVGSDVSSSHDVAAEEAAAAPKVGKRVRVTVPVRVHHVAKAPGLDLRGMEGVVKQYIGVWKGKRITANLPFKVEFELKLDGQDKPVRFITHLREQEFEILGEE

SEQ ID NO: 336955 - protein, 86 aa, Zea mays
  Clone ID: MRT4577_70473C.1.pep
GTKPCDAGLDLKGSGEKGHFGTYKGPGGFKAPAKGLKPPPLGKGVLRGPPRGPWPGGLNQGPGPLGGKPPNGGWGGGKKKAPGANL

SEQ ID NO: 336956 - protein, 33 aa, Zea mays
  Clone ID: MRT4577_70474C.1.pep
CLIGGPAAISCKCSMNETATGKQQDDGRGPSIT

SEQ ID NO: 336957 - protein, 186 aa, Zea mays
  Clone ID: MRT4577_70475C.1.pep
REYDGKLADVWSCGVTLYVMLVGAYPFEDQDDPKNFRKTINRIMAVQYKIPDYVHISQDCRHLLSRIFVANPARRITIKEIKSHPWFLKNLPRELTEVAQAAYYRKENPTFSLQSIEGIMNIVEEAKTPPPASRSIGGFGWGGEEEEDETKEEEDETKEEAVTEAEEDEYEKRVKEAQASGEFHVS

SEQ ID NO: 336958 - protein, 60 aa, Zea mays
  unsure (1)..(60): unsure at all Xaa locations
  Clone ID: MRT4577_70476C.1.pep
ALIFYTFQPPVFFIFYLFIFCYLYFFYVVSLYFIFXXYFYQVQVTEQGKTEGDRDKQTTE

SEQ ID NO: 336959 - protein, 72 aa, Zea mays
  Clone ID: MRT4577_70477C.1.pep
VGATRLKLVGSSFRLPGLCFLSFWFVCSGVLEMGFDFIHAFALGLVLPRSELAPLGAGWGSSGGRSGFLGVI

SEQ ID NO: 336960 - protein, 203 aa, Zea mays
  Clone ID: MRT4577_70478C.1.pep
MGALKYVEELQKKKQSDMMRFLMRVRCWELRQLKVIHRASRPSRPDKARRLGYKAKQGYVIYRIRVRRGGRKRPAPKGATYGKPTNQGINQLKYQRSLKSTAEERVGRRCANLRVLNSYWINQDSTYKYYEVICVDPQHKAIRRDPRINWIVKPVHKHRESRGLTATGKKSRGLGRGHKFNHTTAGRRKTWKRNNTLSLWRYR

SEQ ID NO: 336961 - protein, 115 aa, Zea mays
  unsure (1)..(115): unsure at all Xaa locations
  Clone ID: MRT4577_70479C.1.pep
STRPLEADASNASLDQPSHSSVFTSSSNDNQGNACEHPSPNTRPEGEQPLMDNSGLTSLVPQNLTSASDICKMGEILNENRTLEANPSNGSITESPQSKVLLVPSLDILQRXMFQ

SEQ ID NO: 336962 - protein, 126 aa, Zea mays
  Clone ID: MRT4577_7047C.1.pep
RLSPRRPRTAYVAKTTRRGRRHLFPTLLHLHLRATAEMGADAELNRAEEKPRRRTGRPGRGWTGAQTTRCRATHAGDGALDDRHPLQLPSRPCVASSSSPAAALAYSRGSTSCACARPPTTDTNAD

SEQ ID NO: 336963 - protein, 136 aa, Zea mays
  unsure (1)..(136): unsure at all Xaa locations
  Clone ID: MRT4577_70480C.1.pep
MALVKSDAEEEWSDSDFDDASDSEVAEALDWLDAVEGPDXSSPPRRLLGXGGGAAARRPNAHGGVLSRPLQPLSNRTQKLASHISATPLEEWEGRMNVAMSNSVTTAIRDSIRDTAIGKXTNTEKADRATVEQAID

SEQ ID NO: 336964 - protein, 89 aa, Zea mays
  Clone ID: MRT4577_70481C.1.pep
ATSASSLEPKWLHNLCRQKSPKVRAMSSRGGHRPAVSSEALADGLAEQIICTCASSVIQPRWDHAGRRSIVSRKASRAASPTSRDARTR

SEQ ID NO: 336965 - protein, 531 aa, Zea mays
  unsure (1)..(531): unsure at all Xaa locations
  Clone ID: MRT4577_70482C.1.pep
MALVKSDAEEEWSDSDFDDASDSEVAEALDWLDAVEGPDXSSPPRRLLGXGGGAAARRPNAHGGVLSRPLQPLSNRTQKLASHISATPLEEWEGRMNVAMSNSVTTAIRDSIRDTAIGKIRNTEKADRATVEQAIDPRTRMVLFKMLNRGVFNNINGCISTGKEANVYHATKTDGQELAIKVYKTSVLVFKDRDRYVQGDYRFRHGYCKHNPRKMVKTWAEKEMRNLLRVRAAGIRCPAPLLLRLHVLVMEFIGKGGWAAPRLKDAALSDDKLHESYFEIITTMRTLYQTCKLVHGDLSEYNILYFEGHLYIIDVSQSVDLDHPSALDFLKEDCLHVSEFFKKRGVPVMTVTDLFNFVIDQSISDEDVDDYLEKAQQKILENGGAVPNDDEITPTVMVQTLDYVKQCEADIVNMSIMQRSSSGYEPTADKLYDQPLLGFVRTKNTNTEKEQGQPARNLVEVEEDESESCLSSDEDDSWHEDDPKVGPEERKAARKENKKKVKEEKREARKTKIPKAEKKKRKKMAKAKCKR

SEQ ID NO: 336966 - protein, 164 aa, Zea mays
  unsure (1)..(164): unsure at all Xaa locations
  Clone ID: MRT4577_70483C.1.pep
MAAQNGSGGAAVVLNVYDLTPINDYLYWFGLGIFHSGIEVHGLEYAFGAHDLSTSGVFEVEPKRCPGYVYRRPVWMGTTEMSRAEFRSFVQXLAGKYHGNTYHLISKNCNHFTDDVCKSFTXKPXPGWVNRLERVGYFFNRPLQKSIQVSTVTHAETHPAFSDE

SEQ ID NO: 336967 - protein, 114 aa, Zea mays
  unsure (1)..(114): unsure at all Xaa locations
  Clone ID: MRT4577_70484C.1.pep
LGKTNRTAXSRIXXXSQGLQTLXLPLIAFXMTXLASLANLALPPTINLLGELXVLVTTFSXSNITLLLXTDSNILVTALYSLYIFTTTQWGSLTHHINNIKPSFTRENTLMFIH

SEQ ID NO: 336968 - protein, 177 aa, Zea mays
  unsure (1)..(177): unsure at all Xaa locations
  Clone ID: MRT4577_70485C.1.pep
MGNGDAPPVLFSFHGADPRRRVIDVAPIHLLDGPAPYADAHAPPPSISLQTRGRSPTAAAGAESSVSTLLEVRGLTEYVKETGQXILAGDHLTIREGEIHAIMGKNGCGKSXTLTKGLTGQSHYEVTGGTILVEGGDLVDMEPYDRPLAGLFMNSQAPXEIPXINNFDFVXMAANAR

SEQ ID NO: 336969 - protein, 68 aa, Zea mays
  Clone ID: MRT4577_70486C.1.pep
GESGWGRGRGAASAGISVEAARRWLRWCALYASEDVPLPLAVICQALLSSPSPDSPSGFASHSSRFSL

SEQ ID NO: 336970 - protein, 87 aa, Zea mays
  Clone ID: MRT4577_70487C.1.pep
HASADAWVRRVRRLLRGRLRPVEQLPSHQPSRGLHVQPRPPCRRLHGAGRHEAEFEFDKGRVTPWEGERIHEVAAEELELTLGVGAK

SEQ ID NO: 336971 - protein, 114 aa, Zea mays
  Clone ID: MRT4577_70488C.1.pep
SRVRPGDLPHRRTWERSEHRLTLHVRGSVVKDPRLCCSGGLPDMRKDALIFGIALEHYCTQGAGKRMLRGGTLNTRACNAETCILSATLRRPALGAADGVPGAWEPGLRESFSW

SEQ ID NO: 336972 - protein, 260 aa, Zea mays
  unsure (1)..(260): unsure at all Xaa locations
  Clone ID: MRT4577_70489C.1.pep
GRELTNLASALQVLQHLPNLTSLVLTRNFRGGETIPVDGISGFKSMQVLVLANCLLTGVIPPWLQSLGSLNVLDISWNKLNGNIPPWLGKLDNLFYIDLSNNSFSGELPISFTQMRSLTSTNGSSERSPTEDLPLFIKRNSTGKGLQYNQVSSFPPSLILSNNLLVGPVLSSFGYLAKLHVLDLSWNNFSGPIPDELSNMSSLEVLNLAHNDLDGTIPSSLRXLNFLSMFDVSYNNLTGDIPTGGXQFSTFAPEEFDGNP

SEQ ID NO: 336973 - protein, 86 aa, Zea mays
  unsure (1)..(86): unsure at all Xaa locations
  Clone ID: MRT4577_7048C.1.pep
FWIAGGRFGGSWLTSACLQRISFFLGQPNSNXLAAVFHRLAWETPGVPKLIGLAEHPLLAGWRITKRARTVRPSNQWPSLIGNGAP

SEQ ID NO: 336974 - protein, 67 aa, Zea mays
  Clone ID: MRT4577_70490C.1.pep
NVTAHNYSTRFICENKYAHLKKKKKKKKKKKKKKKKKKKKKKKKKKNKKKKKIKKKKYRKKKRGGLF

SEQ ID NO: 336975 - protein, 127 aa, Zea mays
  Clone ID: MRT4577_70491C.1.pep
GAGVGASQKNSQKMSLSSESASAKGNHRPPSSSCGTDAGAGGAATAAAFSGLGGTFRWLWLCMTTWPLHQSSSMRSSSSPSGLEVSPMLLQSGTNWFIAQMASTTQPSIDEKPPITSCSVRAHTLQS

SEQ ID NO: 336976 - protein, 84 aa, Zea mays
  Clone ID: MRT4577_70492C.1.pep
LEAGRDSQSGVFLFPIAAARGVGAGGASCRRGTALPLCKAGRRATPAPSTDVVVRHHRRIECYTKDFSRLDVWSYVSNRVWSIY

SEQ ID NO: 336977 - protein, 68 aa, Zea mays
  Clone ID: MRT4577_70493C.1.pep
LLHENDAGLEYRVLDDLSYLSKTLLLFWEPQEYVVLKPTVCWAKDHLNLSSDVSFLMYQTTRTSIPYS

SEQ ID NO: 336978 - protein, 334 aa, Zea mays
  Clone ID: MRT4577_70494C.1.pep
MDVVMITGLDIESASPSAFSMSKVPFKLSSKIDSTSWGAYMSQHAKTKGPMTEKEHTTFLNLCLEHFMFCGPSLAPTKNYISLAHRLAGGNPIGPRKLFLGEVYRFLHLLTSNLLSEFESSTSLSLDNFADDSDTGHLYSLMIRPGFLSEGEEPLNYNGFPSQLSETTPMVFSRKNVPPMKKLIIQHQPDSPKPAPKRGRTLETIAPRVQTKVRKVVAKKVLKEARSSSPNQEALNAHQVCTLSVSHIRCSHIPGNCSSHASQTIILEASSGEEHAFQWHSPLEAIDILAEIIDTLIVLQDLHESVVPEPTVNPIPKKLQCIMDLLSAPIGTLV

SEQ ID NO: 336979 - protein, 112 aa, Zea mays
  Clone ID: MRT4577_70495C.1.pep
HTLAILLLLGVVAGAFITFGNSASAGGLRIFGITMVFSNSGSLATSSLASVDYRHLRRCSRSFGFSLSESSLIPFGNEGSPFTKFRHYGRLNISWPVGQNPHFLAFRHSSGG

SEQ ID NO: 336980 - protein, 468 aa, Zea mays
  Clone ID: MRT4577_70496C.1.pep
MAAPASTTAAAAAALLLLLLLSLAAAADMSIVSYGERSDEEARRMYAEWMAAHGRTYNAVGEEERRYQVFRDNLRYIDAHNAAADAGVHSFRLGLNRFADLTNDEYRATYLGARTRPQRERKLGARYHAADNEDLPESVDWRAKGAVAEVKDQGSCGSCWAFSTIAAVEGINQIVTGDLISLSEQELVDCDTSYNQGCNGGLMDYAFEFIINNGGIDTEKDYPYKGTDGRCDVNRKNAKVVTIDSYEDVPANDEKSLQKAVANQPVSVAIEAAGTAFQLYSSGIFTGSCGTALDHGVTAVGYGTENGKDYWIVKNSWGSSWGESGYVRMERNIKASSGKCGIAVEPSYPLKEGANPPNPGPSPPSPTPAPAVCDNYYSCPDSTTCCCIYEYGKYCFAWGCCPLEGATCCDDHYSCCPHDYPICNVRQGTCLMGKDSPLSLSVKATKRTLAKPHWAFSGNTADGMKSSA

SEQ ID NO: 336981 - protein, 687 aa, Zea mays
  unsure (1)..(687): unsure at all Xaa locations
  Clone ID: MRT4577_70497C.1.pep
MAASTTAAAALLLLLLSLAAAADMSIVSYGERSDEEARRMYAEWMAAHGRTYNAVGEEERRYQVFRDNLRYIDAHNAAADAGVHSFRLGLNRFADLTNDEYRATYLGARTRPQRERKXLGARYHAADNEDLPESVDWRAKGAXVAEVKDQGSCGSCWAFSTIAAVEGINQIVTGDLISLSEQELVDCDTSYNQGCNGGLMDYAFEFIINNGGIDTEKDYPYKGTDGRCDVNRKNAKVVTIDSYEDVPVNDEKSLQKAVANQPVSVAIEAAGTAFQLYSSXWRSPCCWVHLWTIWLNSEMNDSIIXILVFDYXGGHERNKIHLPXQDMPMLGRGHLIALKLSLSYRFTQDYFLWKEXSVVTLQAATVTHHTPDLVYFDPDYIFSNFYSTIVLQCPTTESCSLVFLKDYPATSCEALLMVYNFDVFLXPFGKTCFGNIAAXYPPLINNYHFNSMNHLPLYWXNYRFLAXGIFTGSCGTALDHGVTAVGYGTENGKDYWIVKNSWGSSWGESGYVRMERNIKASSGKCGIAVEPSYPLKEGANPPNPGPSPPSPTPAPAVCDNYYSCPDSTTCCCIYEYGKYCFAWGCCPLEGATCCDDHYSCCPHDYPICNVRQGTCLMXMLGPSRDLLQLATEITASFFRLISNRQIRCLTXGKDSPLSLSVKATKRTLAKPHWAFSGNTADGMKSSA

SEQ ID NO: 336982 - protein, 71 aa, Zea mays
  Clone ID: MRT4577_70498C.1.pep
QALVRAVLLPEQGRPERQQDVQPDVRPDLQGRRRRRARLIDPLFIGARIQVHIKIIFNILYNGYVSPYMSS

SEQ ID NO: 336983 - protein, 71 aa, Zea mays
  Clone ID: MRT4577_70499C.1.pep
PVGVTSIRRALIFFLVLHSTWYQARQACQGGRLGTYQLVGQWHPVLLVDRERKVLADGPTEQDPVHLRVPR

SEQ ID NO: 336984 - protein, 60 aa, Zea mays
  unsure (1)..(60): unsure at all Xaa locations
  Clone ID: MRT4577_7049C.1.pep
PGRAHYFIXMADSARPVLLVDVVVLDVDVDVVVVLAADVVVNNTTNGFLSPNSVVSSRLP

SEQ ID NO: 336985 - protein, 76 aa, Zea mays
  Clone ID: MRT4577_704C.1.pep
MSCNCGSSCGCGSSCKCGKKYPDLEETSTAAQATVVLGVAPEKKAAPEFVEAAAESGEAAHGCSCGGNCKCDPCNC

SEQ ID NO: 336986 - protein, 67 aa, Zea mays
  unsure (1)..(67): unsure at all Xaa locations
  Clone ID: MRT4577_70500C.1.pep
KGPLINPARAFGPPFVGSRXXKHQWVYWVGPMVGPGLSGVVYKHLVAGTAPKKKKKPAPSFGDPRRG

SEQ ID NO: 336987 - protein, 82 aa, Zea mays
  Clone ID: MRT4577_70501C.1.pep
LLGWPPWGNEIFWGFFFFAPLLVKFPLLGGFPGCLKFLGGCPFSQKKKKKKKKKKKKKKKKKKKKKKKKKKKKKKKKKKIRG

SEQ ID NO: 336988 - protein, 46 aa, Zea mays
  Clone ID: MRT4577_70502C.1.pep
VIVNEHSCRYNIYSGTSSLIYVAKSLERIISIMDNFSMLISHDSRY

SEQ ID NO: 336989 - protein, 109 aa, Zea mays
  Clone ID: MRT4577_70503C.1.pep
EKSPVILSSLGRSSLSPLRRHLHYMVFSSTVYRACLRSEVAIVVHHLQLLVCVILLIFHTDFSSVQPAVNAVRFCHPTSPRESHHVLLRACQGSAWMLYLMRSLGVVRE

SEQ ID NO: 336990 - protein, 96 aa, Zea mays
  Clone ID: MRT4577_70504C.1.pep
RDYSSVSCRTGICTTTLMCSTARTTTVLRHNIKRLVQSNDSCFMYVDCHWRCFISTVFSTSTLGTCALAATLFSARPNAEGIVTEDFFLFLKRDYI

SEQ ID NO: 336991 - protein, 67 aa, Zea mays
  Clone ID: MRT4577_70505C.1.pep
FGSRGACLLAVLNRWGSKMDPGTVWNCLRTRVGARKINAWSPAGIHWYEPYVLIGGSIETYEHSRLL

SEQ ID NO: 336992 - protein, 100 aa, Zea mays
  Clone ID: MRT4577_70506C.1.pep
HESSLVYPDRIGQVCSSESARGSSRDHEVSSRAREAPVDAHACHGRRPCNAAFRNRTAGQTLSSLWQWPAQRAMRSAMSRVTMQPLCSGGTIVCTTLLSE

SEQ ID NO: 336993 - protein, 266 aa, Zea mays
  Clone ID: MRT4577_70507C.1.pep
ENTFCVRVDLAWVQTTALGYLELGLDLHAVGGVVAAELQDGCTSKTDQHSVNQNTCTDSQMGHSRTNDVLRKRITGTILNVDNLRMLGGRRGFFYLLCVILHNTKPVGHHDLVGLDISILLLADFSLVLLTFLQLYSYSMVDVLLVLFILPLGILAPFPAGINALFSHEQRRSAGLARVYALWNITSLVNVVVAFVCGFLHYKSSSKKHPSMQPWSFGGEETSWSLFPIGLVLCKCIQARLVDWHVSILEIQDRAVYSNDPTIFWQ

SEQ ID NO: 336994 - protein, 73 aa, Zea mays
  Clone ID: MRT4577_70508C.1.pep
FPAANNLLPFSHLGGVSPRFFLTQLTIVSVLSARCALMVAPSFTCTNVCPSCPLVFQNPRALYHQPIIGGALS

SEQ ID NO: 336995 - protein, 142 aa, Zea mays
  unsure (1)..(142): unsure at all Xaa locations
  Clone ID: MRT4577_70509C.1.pep
LARVTAEGVADMVDESGPRRSGTRADAATYASXXXXXXXXXTRPPRPRQRRRCSRSGTWSRCCSXXEGCRSGLTPRRWTRWPWSLXXXXXXXXXXXXRTWPSSRWPRRGCRRRPRRQAPRRQGPRRPCRRRRRGILADSCVN

SEQ ID NO: 336996 - protein, 77 aa, Zea mays
  Clone ID: MRT4577_7050C.1.pep
VMLPEAIAIVMAPTDTTRKHGIFHLTDPGGMGVIHDCQERGFHPHKAPLDGSPIYKQCSHVYMDTDIKFDMIDLRER

SEQ ID NO: 336997 - protein, 240 aa, Zea mays
  unsure (1)..(240): unsure at all Xaa locations
  Clone ID: MRT4577_70510C.1.pep
CHLRILSKGSVPSTIWNGIELTGNRSLILDFQNNSLKTIPDTFDPPPNTTVMLYGNPVCGGTNGSLITNLCQPMSVNMQTSQNEHGSSCQPCPADKNYEYNPSSPLTCFCAVPLGVGLRLKSPGITDFRPYEDDFEINLTSLLQLFRYQLSIERYIWEVGPRLNMHMKLFPSNSSLFSISEIVQLRHVLAAXENTXSDVFGPYELLNFTLGSYADEFPNAVSTGLSKAALGSIFASTIAG

SEQ ID NO: 336998 - protein, 85 aa, Zea mays
  Clone ID: MRT4577_70511C.1.pep
TQNLGAAQPFKILGLAPSLKTENICIPHDFKTLNHLPRVVRSFYYHPGTTFLKETLGRVPPGNGENTLKHFLKQGSKKEFPTSAG

SEQ ID NO: 336999 - protein, 216 aa, Zea mays
  Clone ID: MRT4577_70512C.1.pep
MGDEPDGEAEEYLFKVVIIGDSAVGKSNLLSRYARNEFNPHSKATIGVEFQTQSMAIEGKEVKAQIWDTAGQERFRAVTSAYYRGAFGALLVYDITRRSTFDNVGRWLQELNTHSDTTVAKMLVGNKCDLGDIRQVPVEEGKALAEAEGLFFMETSALDATNVRTAFEIVIREIYSNVSRKVLNSDSYKAELSLNRVSIDGDSKDEQKQGSRFGCC

SEQ ID NO: 337000 - protein, 50 aa, Zea mays
  unsure (1)..(50): unsure at all Xaa locations
  Clone ID: MRT4577_70513C.1.pep
FKKDLISGSCVVAYQLGVGXLGPLGKNVHVPLQGQLKIKSECVEDLFFLD

SEQ ID NO: 337001 - protein, 209 aa, Zea mays
  Clone ID: MRT4577_70514C.1.pep
MAVSLAVNRPLLGLHENVPLAVAHPQFLPFKWPPKSKLPSVVGIRCSSSPFNDKTLISITPNTSHLNPNPLACRFHASQFGEQESNKYVEAYAVGRNIRMSANKARRVIDQIRGRKYDETLMVLELMPYRACEAILKIVFSAGANASNNLGLSKGSLVISKAEVNEGKTMKRVKPVARGRAHPIKKRTCHITITVKGLPSESVVEAKPA

SEQ ID NO: 337002 - protein, 66 aa, Zea mays
  Clone ID: MRT4577_70515C.1.pep
TVNPCIPSGDLDERERSASHDVHTVGHCDNRPEVIVPSIAIFQSPVLSYQRSRYCDCTCSEFSSSH

SEQ ID NO: 337003 - protein, 85 aa, Zea mays
  Clone ID: MRT4577_70516C.1.pep
HAIACDSLLTIKQVSSYYLLKKKKKKKKKKKKKKKKKKKKKKKKKKKKKKKGKKKKKKKRKKKKKPPLGPNPREGAMFKPSCAGG

SEQ ID NO: 337004 - protein, 53 aa, Zea mays
  Clone ID: MRT4577_70517C.1.pep
RCVDLQLSELYVFNKYKCVKELDQIGLSPVDYNKCIVCQYNFLWTVLVMTNVA

SEQ ID NO: 337005 - protein, 151 aa, Zea mays
  Clone ID: MRT4577_70518C.1.pep
SSASGGQRQRQRPTKFPPSPPPLPSSAWPPTCCARATSSCRRRRRGSGRRRRRAVGELAPTVAIQAPPASGGGRAGRDIVPRGGAKTPRHNEARGLRLEVYAGPSIPEIARPKLADVTGGCCHEGYDRDQDDREELRRQIDARARANTAAV

SEQ ID NO: 337006 - protein, 58 aa, Zea mays
  Clone ID: MRT4577_70519C.1.pep
MCAMALVHHRFKRVFYAFPNPVTGALGGVYMLHGERSLNHHYNVFRVSVPEAYSNGLN

SEQ ID NO: 337007 - protein, 172 aa, Zea mays
  unsure (1)..(172): unsure at all Xaa locations
  Clone ID: MRT4577_7051C.1.pep
ARSLTRRRGDQAGGPSAKRHGRRRGAGTRRCTRAARPALHRLHPLQRLHHLLHRGPTARLAGQAAERQLRRLERLLLLIVCFGLISVGLSAERKKQKLSEIQSGVEEAESLIQKMDLEARSLQPSIKASLLAKLREYKSDLNNVKSELKRISAPNARQATRXEELLESGMAD

SEQ ID NO: 337008 - protein, 46 aa, Zea mays
  Clone ID: MRT4577_70520C.1.pep
HEGQATEAQPKTVLHKTRATSNWGPNGRSKGEATESASIKSAARGA

SEQ ID NO: 337009 - protein, 101 aa, Zea mays
  unsure (1)..(101): unsure at all Xaa locations
  Clone ID: MRT4577_70521C.1.pep
SVIHTHNTLYVSRSACMFTGYREDVGTIRXLLDAHLSLTEQPSKLDTYDPRSPFFTDTTMLGYDAIXKSKMKDAXISNGSLLRECNIYHSVIAVCSRVISA

SEQ ID NO: 337010 - protein, 79 aa, Zea mays
  Clone ID: MRT4577_70522C.1.pep
FSCQKGRRLPVDRKLVQRISNPPFTGCVHQPLFVPSRTLRAGRNLGTVMFPHSAEGPVGVFALVPTAYPKGRRVGAPCK

SEQ ID NO: 337011 - protein, 180 aa, Zea mays
  Clone ID: MRT4577_70523C.1.pep
MSRTPVGRVGSDLSHARANHHHATTSDGTSSKDRDSRAKSKASPFFSGLGGAWRKQAEEKRKGRPKPRRAALDVGQWVKRHMASMVEQLRASFSRHSEREQRRRPHSFSGHGPGAAREMREREHWRRRRGQLSSAPASLRVSAANSGRLSVGGSVQVSPPAVGEHHGRSLCCALGARRGG

SEQ ID NO: 337012 - protein, 264 aa, Zea mays
  Clone ID: MRT4577_70524C.1.pep
MDTPPQSRARPPQQSKPSPPSAPPPLPFSATTSPSHGFSSPSPFGGHLRPLSMSRTPVGRVGSDLSHARANHHHATTSDGTSSKDRDSRAKSKASPFFSGLGGAWRKESSSSSDVPGKQAEEKRKGRPKPRRAALDVGQWVKRHMASMVEQLRASFSRHSEREQRRRPHSFSGHGPGAAREMREREHWRRRRGQLSSAPASLRVSPANSGHLSVGGSVKVSTSSEESTMEELQSAIEAAIAHCKNSISVAKQTAPTGDDGTKLQ

SEQ ID NO: 337013 - protein, 959 aa, Zea mays
  unsure (1)..(959): unsure at all Xaa locations
  Clone ID: MRT4577_70525C.1.pep
MAKSSADDAELRRACAAAVAASGARGEEVDFSILLGKGRGIFEKPGRLAEPHVLALRVEKGRGILEKLGLLAMLRFLAVTVKQPSRGEAMKAFTRVLVNSTEAVAEPVKLYXLNHITKGDVISNGTMGNTLVMSFDNLRSLNVAPPKWTMRNIDDRNRLLDXILNMCKEILXNIXKVVGDDFLESPLGTXEKDVFDRKXVSXSIAKKDXAIQSECQLTKSITSVLGFYIQIHRTMHEFMELDVCYVHTLIRCNPLRNDVRHGLXVRFQMXDDVDARRINSERWVRPMRLFMNCTESSRKISTMQSVDQKEHIHDFESLMQXLQSDRXFGATSTGGSFEESRMLKNVEACEWLTGAIRSLEVPNLDPCYVNMRAVRXLKAELEKLGTXFLRNIICYARXYLSSLVAFMISDKRNFSHFGEINRPCSSDFRYXCKGYAGFLQQQYFRDKSCXGHLWKAFXYTHNIILTSXLAISAHSFICNLRGXQFNRKVDELTYTIAAEEIPFQLGLSKTDLRRVXNPAYLGLISRLAPCTGGCRRHLPPMSCFLRCGTSARRSFWTNDDLGLMDPDGNDLKPDSTSAELGTLNEALXELLDGIQEDFYAVVDWAYKIDPLRCISMHGITERYLSGQKADAAGFVRKLLDDLESRISVQFSRFIDEACHQIERNERNVRQTGILAYIPXLPKNVKTGNKQQDSGALILGTGDYMIXFCFKIKRALWRNCAYCRVYCDKFFCCLRDSFLKWQTXPRSDFVSYRFAVLASRMEQYIQGQSRDLIDKAYTKLVSTMFATLEKIAQSDPKTADIVLIENYAAFQNSLYDLANVVPTLAKFYHQASESYELACTRHISSLIYLQFERLFQFNRKVDELTYTIAAEEIPFQLGLSKTDLRRVLKSSLSGIDKSISAMYRRLQKTLTSDELFPSLWDKCKKEFLDKYESFVQMVTRIYGNEPIMSVNEMKDVLAGF

SEQ ID NO: 337014 - protein, 44 aa, Zea mays
  Clone ID: MRT4577_70526C.1.pep
LAGQVARGRAGQRAQVQHVLGTVTGAAGPNGLDLATANASRQRL

SEQ ID NO: 337015 - protein, 1046 aa, Zea mays
  unsure (1)..(1046): unsure at all Xaa locations
  Clone ID: MRT4577_70527C.1.pep
MASPSNPPLSLPSSLNITITEKLSRTNHVLWQAQVLPAIRAAQFEGYLDGSIAAPPPAINEKDGDKVISKPNPEYARWVAQDQAVLSYLFSSLTREILTTVASLRTSAQVWSTLEQMFTCQTRARSVSTRIALHTLKKGNSSVADYYSKVRSLADELGASGVVISDDELVSYILSGLEENYNPVVSAVLAREEPVTPGALYAQLLSHESRLELQSGASNIQFSANMASYGGRNRGRSGSSRGGGQSRGRGRFQGAYSSNSTGRHNRQDTGNRSKKPTCQLCFKVGHVVTNCWYRFDENFVPDQRLAAAAAPSTTDPSWYTDTGATDHITGELDKLAVYDRYNGTDQIHTASGAEFQALVERLLGRKIIAIQTXGRRVCSPQHLSSTGHIRLPDRESXIKPLVKIIGGMLPRVQLELLWIPRQTTTHHQLFHRSLRSRSRGTVRTSSRXALDTASVRVSSASHEAPSTATDNNDESSLGSVPISSSTAPDPESAAEELVPALSPASPVHRTRLQQGIRKTKQYTDGTIRYGFLITTSEPSNLTDALIDANWKLAMDVEYAALVRNKTWHLVPPKQGRNIIDCKWIYKIKQKADGSVDRYKARLVAKGFKQRYGIDYEDTFSPVVKPTTIRLVLSIAMTKGWCLRQLDVQNAFLHGVLEEEVYMRQPPGYEDITKPHHICKLNKALYGLKQAPRAWYARLSDKLKILGFRSSRADTSLFFYKKGMITIFLLVYVDDIVVVSSSSKAVQALLEDLKTDFALKDLGELHYFLGIEVKRIRDGILLSQEKYATDLLKKAGMATCKPTVTPLSTSEKLSAHVGDALGSEDATKYRSIVGGLQYLTLTRPDISFAINKVCQYLHAPTTQHWTAVKRILRYVKGTADIGLKIKQSSSWLISAFSDADWAGCLDDRKSTGGFAVFLGSNLISWSARKQATVSRSSTEAEYKAMGNATAEVMWIQTLLDELNIACPRTARLWCDNMGAKYLSSNPVFHARTKHIEVDYHFIRDRVLQKRLDVQFISTNDQVADGFTKPLTQQKLEEFKCNLNLGRL

SEQ ID NO: 337016 - protein, 57 aa, Zea mays
  Clone ID: MRT4577_70529C.1.pep
FVVWASASCVCARFVLPCVFVAWVFTGLVVKQPTELRAAAGYVTSSARELFRAGPAG

SEQ ID NO: 337017 - protein, 42 aa, Zea mays
  unsure (1)..(42): unsure at all Xaa locations
  Clone ID: MRT4577_7052C.1.pep
MVMAEGTAVLRQNQPGTKAQGSXNWPDESFDELDSTLDVQQY

SEQ ID NO: 337018 - protein, 85 aa, Zea mays
  Clone ID: MRT4577_70530C.1.pep
RPGNIEWPIKGGTRVFTIPRGFIRCSYLAGRAAGANNELDMYVLCRPLGSQSDLQHYMLGAWGRDLASPRLYYGVDRKGRHRTYT

SEQ ID NO: 337019 - protein, 52 aa, Zea mays
  unsure (1)..(52): unsure at all Xaa locations
  Clone ID: MRT4577_70531C.1.pep
AFINEXHGWEQNINYTVKTTPSLTQTPNPLGHLTKPQTYPQSRRTNMKAMHN

SEQ ID NO: 337020 - protein, 44 aa, Zea mays
  Clone ID: MRT4577_70532C.1.pep
NMYKYSRSIPASINEVAHANKNVGSFFPKRVHNTNVLIPTITFD

SEQ ID NO: 337021 - protein, 34 aa, Zea mays
  Clone ID: MRT4577_70533C.1.pep
GRSVRPCWLFCDLPKVAWPPSCLRSASGLFSGPA

SEQ ID NO: 337022 - protein, 134 aa, Zea mays
  Clone ID: MRT4577_70534C.1.pep
HRRLERLENLELESYLYDDLPDRDESNELDKYMAEPLIKQDPFDILAYWKNQTDKYPILSQIARDLMSVQVSTVASESAFSAGGRVIDPYRNRLDPEVVEALICTKDWINAVRKDSKSVLSIVAELKPLETDPL

SEQ ID NO: 337023 - protein, 67 aa, Zea mays
  Clone ID: MRT4577_70535C.1.pep
VPLVAGTVKKENEVFSAGMTVNDWTPFFGGDTTAPELSVMERVFKLKKGHPPAIVGDIRKSLKTSYG

SEQ ID NO: 337024 - protein, 117 aa, Zea mays
  Clone ID: MRT4577_70536C.1.pep
MAEPAGKARERRVSIEEVAKKLSLWHTATFRPILTHAELEPILCAAGFVALPSAPATHQKQDERPGVAWREYAFLGGGNASPAAAAPRRWLGPRPRLPYPRVDGLHLKTYQAFLGAV

SEQ ID NO: 337025 - protein, 145 aa, Zea mays
  Clone ID: MRT4577_70537C.1.pep
RISLVVPRVSISLCGWEPRWLPNVQDCEENSTHSAKNLPSAGPDERLYPHFVEHNKNSFSASAKKDKGKGKLPVGDSGCSMRSPLLDCNLCGATVRMRDFRPVLCPSRFSPNNIVVPGTGRKLTLTHGVSAASGINEWVTDGVER

SEQ ID NO: 337026 - protein, 131 aa, Zea mays
  unsure (1)..(131): unsure at all Xaa locations
  Clone ID: MRT4577_70538C.1.pep
MDVRHPFITIIRSMLRTAIXTNSETXAAWSDTIQDYKDTPEAHXSRYNLTEIQKEDRKVTVEELNNTVMSGHYSRXKEDKVYKRDRIESRTGQIAMRYRLTDNTKEDHVKGGLDNSALTVXTVPNAEDNKL

SEQ ID NO: 337027 - protein, 86 aa, Zea mays
  Clone ID: MRT4577_70539C.1.pep
RTRGFQVVMSEEGKVVGFQPTNLPAVNHWATNPLATLLYQGRSLSPGIIEPRLKISRPAKAAPIELLMSVNQDSFFALARPVEDPW

SEQ ID NO: 337028 - protein, 86 aa, Zea mays
  Clone ID: MRT4577_7053C.1.pep
SAAARFFAIGMFLIVSSWPENHIDPCASTDLMAQDKDVAHAIEYDATIVTLGTIPALVGGSTNSMIFLWTTHPITEQEDRSHWLIH

SEQ ID NO: 337029 - protein, 233 aa, Zea mays
  unsure (1)..(233): unsure at all Xaa locations
  Clone ID: MRT4577_70540C.1.pep
MSTYLKKPPPCSVSLIVLLPLTLILLCFTFLLPLSAYISNPLASTAVATRACVGATAGVVRAAPATTTVGDVDGVVGSQRPAELMSVLVGVHTMPGKHSRRHLIRMAYALQQQTPALRAAARVDVRFVLCARPMPPEHRAFVALEARAYGDVLVLDCAENAEEGKTYTYFASLPTMLGSGSGGRPYDYVMKVDDDTFLQLDALVDTLRSAPRXDMYCGVGLPFHDRQFPPFML

SEQ ID NO: 337030 - protein, 115 aa, Zea mays
  Clone ID: MRT4577_70541C.1.pep
SPPPPEMTKKVSKLAKVGQETPDPSPDFSRPEKAPPPRGGFPPFGFVKGGSLMTKGFFVGPKKGGGPPPQSLLNQISRWALGGIKLKFLAPSSKFGHGRFPPPDENQGFFGKPKG

SEQ ID NO: 337031 - protein, 72 aa, Zea mays
  Clone ID: MRT4577_70542C.1.pep
MGKTPVRMKAVVYALSPFQQKVMPGLWKDITTKIHHKVTENWISATLLLTPVVGTYQYAMWYKEQEKLSHRY

SEQ ID NO: 337032 - protein, 103 aa, Zea mays
  unsure (1)..(103): unsure at all Xaa locations
  Clone ID: MRT4577_70543C.1.pep
AEPLLADDGITVAILDEREVNDNTPVTYGDDIXEAKNVNVTIVTMLGIYTENNMIAKRMRNTMLQNGHFDQENFTDSYTIPCYRXETLCRXVSGSTRVEPHGR

SEQ ID NO: 337033 - protein, 72 aa, Zea mays; identical to SEQ ID NO: 337031
  Clone ID: MRT4577_70544C.1.pep

SEQ ID NO: 337034 - protein, 72 aa, Zea mays; identical to SEQ ID NO: 337031
  Clone ID: MRT4577_70545C.1.pep

SEQ ID NO: 337035 - protein, 179 aa, Zea mays
  Clone ID: MRT4577_70546C.1.pep
SKLTSKKKKKKKKKKKKKKKKNPRPQHNRLAFPSPPARLSLLSDSLSRSRVHLAAASKRDQRAPLGDGGAAAAAASNNLGGSFGEMLIDFVPDGAGLSLAESGGFVKAPGGAPANVACAIAKLGGSSAFVGKFGDDEFGHMLGNILKQNNGNAEGGLFDKHARTALAFGTLKHDGEGEF

SEQ ID NO: 337036 - protein, 124 aa, Zea mays
  Clone ID: MRT4577_70547C.1.pep
GLFFFFFRDHPTTKNYSGVTSPLRDSHLNTIKTMVAPFISPYTSNQTHSKFPTSTLDRSRGEAISNEKPTAGKITSPTVIALAQIFTDEHDSDWIKGTICFGIDLVVRVIGQTQKFHQWYKEIV

SEQ ID NO: 337037 - protein, 163 aa, Zea mays
  Clone ID: MRT4577_70548C.1.pep
MAASALASRALRPPHGRHPPAPSPRPRPRSATAAAPRTRCRAVAADERPADPAFPERQNRGISGAVERPEADVVVIGSGLGGLCCAGLLARYGQDVLVLESHDRPGGAAHSFDIKGFNFDSGPSLFSGFQSRGPQANPLAQVLDALGESVPCASYDSWMVYVP

SEQ ID NO: 337038 - protein, 108 aa, Zea mays
  Clone ID: MRT4577_70549C.1.pep
TTHPLLRAHGSHGASVPCSVVLAELNPKLPRRPCSDLLPAAPNRSFYRGTRASSASPQVESSLRAPTSCVANSPVVSNLQSHEHNSHHQSKGINLIHAYTSTEMEFGK

SEQ ID NO: 337039 - protein, 422 aa, Zea mays
  Clone ID: MRT4577_7054C.1.pep
MLLEELLRCQIHEWYPAFRRHSIPTVIIPLPAAFLRYLAGQRAYPNADADAEDGADEEPLPFLLPAITSGRQPFAPIHAHHPDPDSLLNSDLFFGSSSEDVFDPDADHPLRPEFPELEVAIDAAIAELGGAALPKLNWSAPKDATFMSADGTSRCTCFAEVAMLLRSSDCVAHDLASARQSCKDFVRPEGARRNAQKVSAGSEEGARPNADGIRGCEGTNGAPSNSSKTGEEGGKTNDGDCDVEDATEEEHNENTWVDDGFQYYLALRKWYPGLRPESEFRCFVREQKLVAVSQRDPSAYYPSLPGWSSEVQPKIEALFGARIEPQFASNNYTFDVYVRTDGRVKLIDFNPWGGYTLPLLFTWEELEEKGRGSELEFRVVMQQGAVRPGLMTAVPYDMLDWGEGSGWDVFLKKADEELDRQI

SEQ ID NO: 337040 - protein, 44 aa, Zea mays
  Clone ID: MRT4577_70550C.1.pep
GRGGISLWLLFAVARVPSSTRSVQCLALSLHSIDLLLSWSGGTC

SEQ ID NO: 337041 - protein, 52 aa, Zea mays
  Clone ID: MRT4577_70551C.1.pep
ELTIRCRALFFFFQAGDDYSPRAGLDNIVHGKLKDQMIRTIMRITQWHGQSE

SEQ ID NO: 337042 - protein, 118 aa, Zea mays
  unsure (1)..(118): unsure at all Xaa locations
  Clone ID: MRT4577_70552C.1.pep
VCDRATCDEEVTGCGRSRRGLGWSSSIYTYTELCDIIQWITNPSIRRVAMIRHLKLISALIYDETFILLKIFIKNVILDAWTYTRALPAXTVTAMDFLFVLXRLGRTLYGFCGVVMCG

SEQ ID NO: 337043 - protein, 84 aa, Zea mays
  unsure (1)..(84): unsure at all Xaa locations
  Clone ID: MRT4577_70553C.1.pep
PVKLIATMVSSITTIACLLVLTLFVLSAASVLATSLWHGIRMVTLGIGGAALQPDRAACVWVAACPARELPYLLRLYHGCXPCE

SEQ ID NO: 337044 - protein, 111 aa, Zea mays
  unsure (1)..(111): unsure at all Xaa locations
  Clone ID: MRT4577_70554C.1.pep
FNQKFFPFTQLVIAHFXQKKFFPFNQLAXAITPPAFLHHQILLPFNKLVPQIRVSFLTKPQLLPFYNQFGANPPPLLKIQQLLPFVQLVLKNPTPSYQKHIIGGPPPPPHY

SEQ ID NO: 337045 - protein, 81 aa, Zea mays
  unsure (1)..(81): unsure at all Xaa locations
  Clone ID: MRT4577_70555C.1.pep
AVPLSWMTPPPSVQLCXSKLGNLWAVIVLSLVTLPVQFSGVGWVPRSPEQLGAALVSPALVLGPSSGSQMYKFRFPFSVRL

SEQ ID NO: 337046 - protein, 143 aa, Zea mays
  Clone ID: MRT4577_70556C.1.pep
SPALSPPVEPELGKGQGSCAPLLPSPSPAPPRPGQRRLAEYRLGLQLHGHTGDMRGIWGCWDAAIVTSSRDRTVKFWTRNPEKDSEYGLSKTLGGHSSSVGPLGWIPFSYRFPEGGISSGAMDTFAFLWDLQKREVAQSDERP

SEQ ID NO: 337047 - protein, 36 aa, Zea mays
  Clone ID: MRT4577_70557C.1.pep
VPLSLWCFGPVRASLGRRATLAWDFPRPVRLLSCPN

SEQ ID NO: 337048 - protein, 313 aa, Zea mays
  Clone ID: MRT4577_70558C.1.pep
MASISKFLLALLFSYHTLIAHAADDRRHKVLSVGSLMKSSTACSEPKVTPPSTGVTVPLHHRYDPCSPVPSKKVPTLEERLRRDQLRAAYIKRKFSGAGDIEQSDAATVPTTLGTSLSTLEYVITVGIGSPAVTQTMSMDTGSDVSWVQCKPCSQCHSEVDSLFDPSSSSTYSPFSCSSAPCAQLSQSQEGNGCMSSQCQYIVNYGDSSSTTGTYSSDTLTLGSSAMTDFQFGCSQSESGGFNDQTDGLMGLGGGAQSLASQTAGTFGTAFSYCLPPTSGSSGFLTLGTGSSGFVKTPMLRSTQIPTYYVVLP

SEQ ID NO: 337049 - protein, 96 aa, Zea mays
  Clone ID: MRT4577_70559C.1.pep
SPLLSRIFKGEFFWLKLGGPFWKARSGRFTNCPSVRSPSFFFFFGKKLWIQSPPFLWGGAYGPAAPVPRFETLCLVFFQKLTFLGQAKKKQLIFIF

SEQ ID NO: 337050 - protein, 38 aa, Zea mays
  Clone ID: MRT4577_7055C.1.pep
MVFGCPQKKKKKKKKKKKKKKKKKKKKKKKKKKKKKKK

SEQ ID NO: 337051 - protein, 89 aa, Zea mays
  unsure (1)..(89): unsure at all Xaa locations
  Clone ID: MRT4577_70560C.1.pep
VLGDISAIGPPRCSTMDVALHRPSWQTACRTQLNRAAEYPSLASWRNCEDARTDRPSKQLSMLNGXEWDAPCCGSFMLGLCGGYAQRDR

SEQ ID NO: 337052 - protein, 57 aa, Zea mays
  Clone ID: MRT4577_70561C.1.pep
GQSKLYSRLSTRLALCADPFSFSCGWIEQEWTICFRKKIPGWCVCQVFLTRVHRTGP

SEQ ID NO: 337053 - protein, 85 aa, Zea mays
  Clone ID: MRT4577_70562C.1.pep
GREGLRARYSISTVIHREATLRRIMASVTARGPVAVLRPTTTLVFLGHSRRLGLTGTATTTRSSLKDLRQRRVVPSPCLARLPRR

SEQ ID NO: 337054 - protein, 152 aa, Zea mays
  Clone ID: MRT4577_70563C.1.pep
MFYGAMVWDPWLIVSQIVCLQCLYYLSLGVAMALLVGTRVPRLTLLYFFDFATLTPRTPTGWCAIASFILAAVAGAGFMLYVIERAKKCLDFAATLYIIHLFICIVYGGWPASITWWVLNITGLAIMALLGEYLCIRRELKEIPISRLRASV

SEQ ID NO: 337055 - protein, 66 aa, Zea mays
  Clone ID: MRT4577_70564C.1.pep
ISPHHPVLVQPACSCPPYMECVVPHIWSSPSSRRPEHVFCPMYLRLSPASLKISSLTQKKKKGGRP

SEQ ID NO: 337056 - protein, 91 aa, Zea mays
  unsure (1)..(91): unsure at all Xaa locations
  Clone ID: MRT4577_70565C.1.pep
VFFTLLPIDVRRSLLGQAECARYPPRRRAPRAATVVRWPRRSPEFVEAAESERPRCSCGTXWRPLQLLITSIDDHGYDYYLSSLWWWLNNN

SEQ ID NO: 337057 - protein, 95 aa, Zea mays
  unsure (1)..(95): unsure at all Xaa locations
  Clone ID: MRT4577_70566C.1.pep
GGEPKKQAGPPAQETALHIVCLXPPQGPHPGGGHIRTLTPFLXXEQRGGGGGLYHYXNSXSXFSTKLTPQRGKDLKEQPXVLQVVPSXTYQVHGP

SEQ ID NO: 337058 - protein, 109 aa, Zea mays
  Clone ID: MRT4577_70567C.1.pep
MAGDRTVQLIEMNVGDIEDAKTDRHYPGEISYGAALRLRRANSYISKCREAATLATSATIKPAIRGNCEQVRMMIRQQAYLGQNVELASPSASTAPSENKEIEIVIACE

SEQ ID NO: 337059 - protein, 228 aa, Zea mays
  unsure (1)..(228): unsure at all Xaa locations
  Clone ID: MRT4577_70568C.1.pep
MATQARENHRHSFTTKDERSGEGAEDQAIDDWLPITSSRNAKWWYSAFHNVTAMVGAGVLSLPYAMSKLGWGPGIAVLMLSWVVTLYTMWQMVEMHEMVPGKRFDRYHELGQHAFGERLGLWIVVPQQLIVEVGGDIVFMVTGGRSLKKLHDVLVCDXCRPXCSEGGGDIRLTYFIMIFASCHLLLSQLPNFNSXISGVSIAAAVMSLSYSTIAWGSVGAQGQAARRG

SEQ ID NO: 337060 - protein, 266 aa, Zea mays
  Clone ID: MRT4577_70569C.1.pep
MMVGRFSFFVRVLLAFYTSLAAAKAAQEPLVQQGYRVGEKIPVSCLNRTIDTGEHITDAAGQLSYIPFPTCNETGRPLELLFGIEKEINCTIDFIDDPFFHLLEFYVHNDAPLTCRIPTKPLPPSALKDEFEKGTTEETDGQGSLSDIYTPMVVALAGTLQLSHLHVATSMNVLVHAAPKSVSPGTIAAATAYSISREPPTRIVIGDPLPLKFSVRWYPTTQLPSGWTGVGGHLTFSTLVYCMLSALASAAICVTYFRGVELPRRL

SEQ ID NO: 337061 - protein, 113 aa, Zea mays
  unsure (1)..(113): unsure at all Xaa locations
  Clone ID: MRT4577_7056C.1.pep
FRTSGLLPRALSARHLTLXSGEITEWSDGKVXPTVRASNGSSWAHRRQSAAAVRLEPETWVLEYQRSALFEGTRLLPAAAELIASRCSTMARRARRRMQGRRRLFGGAQANPT

SEQ ID NO: 337062 - protein, 91 aa, Zea mays
  unsure (1)..(91): unsure at all Xaa locations
  Clone ID: MRT4577_70570C.1.pep
NTSTFTIFQQFLQAPITSLLPHNLSPSXSSLYQNPILQPXTIQHSIPYFILPLSPLFLQQSSSLIHLLPLVHLFSQNINVQQLHQLFANKP

SEQ ID NO: 337063 - protein, 63 aa, Zea mays
  Clone ID: MRT4577_70571C.1.pep
RKRRNFYFHEKKGTGAGALDQGTLAPQSQRDATLIKQKHSLLVHNKKQLAVCNRLQGSSPALY

SEQ ID NO: 337064 - protein, 717 aa, Zea mays
  Clone ID: MRT4577_70572C.1.pep
MEMDLDPAAEAAEIRLQDHNDAEDARRFILGSSADAAVNLDAEIDPVAGGTGTGSTSPTNESTVEGDRAGKKRSKAWNDFTEVKDLVNGKRVRVSAICIHCKATFSAKSSGGIGHLLRHVDTCAAKKEKERSGRIQSVLKYNPDGSLMRWEYSDARAQYIVNSHNPRFVKTSRQTIARDLIKLYNERMDKLIETLKKSVSSIAITSDIWSGKAKEDYISVVAHYVNSDWELEKRLLGLRPIEVAHTGRNIADRVHMVVDDFGISDKIFSIVLDNASANKTAVSVLKPVFSAYIGHLLPVEVREEDELASIFLHKRCNCHIVNLIVKSGLKRLKNYLDDFRTAITFLNASNQRIAAFKSFCLSLGVPPRKFGVDMDVRWNSTYLMFKHLVPYRSTFSVFIQTNHPVQRDGSFLLTDDHWDVAEKILSFLELFYDTTVALSGTYYPTSALMLHHILKIARHLNAFENDALLRDAIVPMKTKYLKYWRKIHVLYCFAFVLDPRAKMRGFNKLLMRLSGLNRTDYSRYPTSIRSKLTKIFQIYELKFGEVRLSAQQHKSAGTAGKATEAWDDIYGDDILMPSQSTIPTPSVSSTAAAISELSSYLDSDTVTQFDSDFNLLNWWQRHKLTYHVLSILAKDVLTVPASTVSSESTFSLAGRVLEDRRRRLTPDMVEVLSCIKDWELADLCSQHTVEKDTKELEVVFEAMYLEETGGGKERRGG

SEQ ID NO: 337065 - protein, 101 aa, Zea mays
  Clone ID: MRT4577_70573C.1.pep
GMQSLFPCRTCKCFGWPPGELECIVSHLLRTVILWLIMLSETALVHHSPSWLLTVACGASLVAQEFIIHLDSLSMLSHLRQSTESIVKYVWLPPKKKKKQN

SEQ ID NO: 337066 - protein, 87 aa, Zea mays
  Clone ID: MRT4577_70574C.1.pep
LNADESGSLCQGADRDMYMDAVCEDPTSTLTGDYGRDYGCDTGELGEDADTDLINLELQEILWLWGKLDPLECVFRELLVHNLLKRA

SEQ ID NO: 337067 - protein, 72 aa, Zea mays
  unsure (1)..(72): unsure at all Xaa locations
  Clone ID: MRT4577_70575C.1.pep
XXTXTXHLILYNXHXPLKRIYYKKLSHPPXTXSSILICSTIHLRIHFYYIIPLTYFFSFLHILPFFLTPTFT

SEQ ID NO: 337068 - protein, 62 aa, Zea mays
  Clone ID: MRT4577_70576C.1.pep
IILLITCCSAGNALVIGVMSIGCSKWIRHVLLQPKNHFQLFWSDLKKNCPLLVNKGTFGGPE

SEQ ID NO: 337069 - protein, 354 aa, Zea mays
  Clone ID: MRT4577_70577C.1.pep
MARSPKGRNLQARQRRSASSDVPLSSCETKGTSKGNDVSVTSEKNEWKGATCPVCLEHPHDAVLLLCTSHHKGCRPYMCGTNYRHSNCLEHFKGAYAKEKMALGVSAESASGLPLSSNTLPSSNQPCVMELACPLCRGEVKGWTVVEPARQYLNRKRRNCMHDGCSFHGSYKELCKHVKSKHPTAKPREVDPATADEWKRFECERERQDAISTIRSMNPGSVIMGDYVLELNGGGNNHLLSDGDNFDLGERLNFFTSLDRTLNERIDLYDSSDGLDEGFDFLASLFTHGRRISTGGSLSRAYRRHRDRPRRSTNSADASDIQHESASTQRGQRAVRATGRTSRRHHHLREAAER

SEQ ID NO: 337070 - protein, 101 aa, Zea mays
  Clone ID: MRT4577_70578C.1.pep
MVCMRRGLLHDLAIRNVKSRLSIYADDVVLFVKPTEDLVCVKMILDCFGEASGLVVNLHKSYTIPISCDAQTVQDSSNILQCTPASFPCNYLGLLFLIRSW

SEQ ID NO: 337071 - protein, 68 aa, Zea mays
  Clone ID: MRT4577_70579C.1.pep
SCLFEKTSKTASLNSSYSASCGAQPCFNNTIYVIAINSKDKAWVLWKYRPHKAVAALTTNTPPGMRNR

SEQ ID NO: 337072 - protein, 80 aa, Zea mays
  Clone ID: MRT4577_7057C.1.pep
TESIPMYLYGLSLEGDYPPQLSGLKASLLQLGRTWPEPLLPNCIRTHQSLHSRGPNPSLDQTTLARPMPNWHVNPSLFHI

SEQ ID NO: 337073 - protein, 77 aa, Zea mays
  unsure (1)..(77): unsure at all Xaa locations
  Clone ID: MRT4577_70580C.1.pep
VATNTSMSPRQRXRAQQQSQXRRLSTSPDVIQGHQPRDNHTDHGGSAVLIVIVTLALGALIFRRIYLANEYIFDFEL

SEQ ID NO: 337074 - protein, 85 aa, Zea mays
  Clone ID: MRT4577_70581C.1.pep
GAVHWHSCLCCPAEPLGLWSPSRWVWRREMKSPSNREIRPRICSMLCAPVRTCSRDVRCRSTAHTCSLARSRTAYKDTTACGCHE

SEQ ID NO: 337075 - protein, 94 aa, Zea mays
  unsure (1)..(94): unsure at all Xaa locations
  Clone ID: MRT4577_70582C.1.pep
MRECMWIHICHTGIXVVNAXWELXYCTEHGIQGDGQMPGDKTIGGGDDVLNSAQTDMVAEMLVCRAGAAYMEPDGTDVGWTGCXRALFHSEELI

SEQ ID NO: 337076 - protein, 60 aa, Zea mays
  unsure (1)..(60): unsure at all Xaa locations
  Clone ID: MRT4577_70583C.1.pep
WLHFFSSGLMXHSAHMSFPPILCLEQFLGLLFDSSNDTVNPCSFSLSENSVGAFLATSWS

SEQ ID NO: 337077 - protein, 58 aa, Zea mays
  Clone ID: MRT4577_70584C.1.pep
YGILEIPALSSLFPSAPFIGYFIHPFSSNPNSSTPEIIRSSPSRRTKGSRTFPPLPIL

SEQ ID NO: 337078 - protein, 235 aa, Zea mays
  unsure (1)..(235): unsure at all Xaa locations
  Clone ID: MRT4577_70585C.1.pep
HASAHASAHASVLSEHIADWVREESGKKIIFHTFSNTGWLCYGVILENLQQHDPSXSGXIKACVVDSAPVAAPDPQVWALGFSAALMKKRSVTTKGLGSDDSRSDVLVVESNKELKLGATEAVILSALESFFDVVLNYPKINRRLCDVMELLSWKQPKCPQLYIYSSADRVIPAKSVEAFIDGQRKAGHEVRACDFVSSPHVDHYRSNPGLYSSQLANFLEDCVLAKRCEGACTS

SEQ ID NO: 337079 - protein, 141 aa, Zea mays
  Clone ID: MRT4577_70586C.1.pep
AAAAPSIPRPRPPTPSASHARRRPPRPCCLHPVRNLSPLGFEGNMARLVSSSLVRGLVRSCRAPSTATVSRPTFQQVMTYSSGISGDSNANGGTRATRVTADTDTHQDFQPTSKGSDMSLQDIVAQDIKENPAIIFMKGYP

SEQ ID NO: 337080 - protein, 63 aa, Zea mays
  Clone ID: MRT4577_70587C.1.pep
CQLFSILSQFLTPPCALGFVTRNDPSLGLFLIDYICVHLSLPYVASSVCDRPTTLGMGRPLCA

SEQ ID NO: 337081 - protein, 69 aa, Zea mays
  Clone ID: MRT4577_70588C.1.pep
GQLDMRGNEDKDWPHFVEALEPYSVTAFFTGSCNSIAIVNYGALSTWGWTQRWRLGHPPDTKTESSPGP

SEQ ID NO: 337082 - protein, 107 aa, Zea mays
  Clone ID: MRT4577_70589C.1.pep
KGMTYFFSGDYDGDQCKSGQHFKINVTYGQGLPKSLKSPEDAPSPASPVAGDDDSAPDTIVPSNFSHPKEENDDDKASDDQKSSSSVSILMHAQLHIVLLGILLFLF

SEQ ID NO: 337083 - protein, 55 aa, Zea mays
  Clone ID: MRT4577_7058C.1.pep
NAECLSTIFASSYNLNDRGALYICIMHHYRFFLRESYAMVDHRLNSVHDIVQPKD

SEQ ID NO: 337084 - protein, 78 aa, Zea mays
  Clone ID: MRT4577_70590C.1.pep
QVRCIYLVARYAGGDNVAITEDAVAIRVRQRGVHRLPLSRWLATTTVTPSGWTPTNIASYFNRLAEYAADWCYFEALD

SEQ ID NO: 337085 - protein, 172 aa, Zea mays
  unsure (1)..(172): unsure at all Xaa locations
  Clone ID: MRT4577_70591C.1.pep
MKHPRPTEQDVSLALSLSTDSSTTTSDSAGTPPAKRARARARRRGAVVATSGEGEFVCRTCSRAFPSFQALGGHRTSHLRAXPRPRPRRRRRPGAQAAQAAGRQRQRQXCEGGKQRHECNVCGLGFEMGQALGGHMRRHREEEMGAADAWVTLWRTEASRAADPPVLLELFA

SEQ ID NO: 337086 - protein, 43 aa, Zea mays
  Clone ID: MRT4577_70592C.1.pep
TTRQVKWLTIISWSMLFDKDNEQEPDPYVIMETASKTFHDLDY

SEQ ID NO: 337087 - protein, 69 aa, Zea mays
  Clone ID: MRT4577_70593C.1.pep
KSFWFGLPALYQAFLRLQRVVILDLPPAYHLNGTATVQKNGTCAGSNCVCLFPKRIISGFAAKEKLLKQ

SEQ ID NO: 337088 - protein, 142 aa, Zea mays
  Clone ID: MRT4577_70594C.1.pep
LTPAMSSIDLSCNEWPLAPPPSSWTRWRNLAAAAAAAGGGGRDRVGGGELRRGDVHRGDVPQQRDGQGGVALRVALQRGALAQQPRGDRGRPGGHLQLAQDYDAPARSRTTAWSTTTTSPDKSGDLPSAWPSTPPVECTEID

SEQ ID NO: 337089 - protein, 73 aa, Zea mays
  Clone ID: MRT4577_70595C.1.pep
TDNMNQNRDTSCNCTHGAPRPTTHYQTRLLTLYLAHVTRILHWAVHSTTTAIATTHCYTHRDGEKPLRSRHTE

SEQ ID NO: 337090 - protein, 46 aa, Zea mays
  Clone ID: MRT4577_70596C.1.pep
KKGPGGLFFKKTGVPFITGVFFDPITPGPINIVVKRPGISLINQGF

SEQ ID NO: 337091 - protein, 107 aa, Zea mays
  Clone ID: MRT4577_70597C.1.pep
MAGGGVVKHILLASFKEEVTQERLDELIRGYAALVGVVPSMKAFHWGTDVSIENMHQGFTHVFESTFESTEGIKEYIEHPAHVEFASVFLPVLEKVLIIDYKPTSAN

SEQ ID NO: 337092 - protein, 202 aa, Zea mays
  Clone ID: MRT4577_70598C.1.pep
MWATKKLATTALLMLTSLLAARYLIEHTASSGMSSRYQILHLVHHLEWLKSPADAKETSPGVVITTAAASSNTSASKNSSAAAQVFPWLATWSQMTRLADIASGLPHATEAVDDGRTAWENLTASVHVHQRQKAEQQRRLCPYSVRGMDDTPSNKPESGGGGGAFTVGVPCGLTVGSSATLIGTPGLLSRNFWIELVGTTTA

SEQ ID NO: 337093 - protein, 109 aa, Zea mays
  unsure (1)..(109): unsure at all Xaa locations
  Clone ID: MRT4577_70599C.1.pep
PIGVGDQCGLMGLYKSWREALXPYTRSYYLLHADGFTIIYADRASTEDMLFERARXLLHXQGTWMLDHNVAVLLRXRETVKELHCKTLVIKHEDSDKVPEKVLFCVKWY

SEQ ID NO: 337094 - protein, 187 aa, Zea mays
  unsure (1)..(187): unsure at all Xaa locations
  Clone ID: MRT4577_7059C.1.pep
MSSPIHTIDLHIKRYTRRVPDPATLVDTRHRPEIRSTSSFSGFALIYAREGGAAMAVQNXRINDESTGTMLGFMKGRIVXGTLGHCILKKNAHALTAQIRAVLLKIVAAKEPMIETMLASSFSLXEVNEVDGEGIRQGVLQSERNGITERXRSHQDNVADXKRPKVTHFSRCRRGIWGPLQRVPDSY

SEQ ID NO: 337095 - protein, 173 aa, Zea mays
  unsure (1)..(173): unsure at all Xaa locations
  Clone ID: MRT4577_705C.1.pep
GGGVFFFFFFGCFFFFFFFVFFFFFFFFFFFPFQTTHLFGFNPPTKGRGGGGGPKPGPPGRAPFFPFSRGRQGPPRGGNLSPXPPGPPGELGGGPPPRKGGPPRGPEPLGGVLPNPAGPGNPTGPPPIKTRLRKPLNPGLQGPLQKGRGRPAPPPGGGPERGGGVPQGVDPTS

SEQ ID NO: 337096 - protein, 38 aa, Zea mays
  Clone ID: MRT4577_70600C.1.pep
RAGLSLRHKAFILGCRGSRGSPSSCGRSPMSKLKTNPQ

SEQ ID NO: 337097 - protein, 116 aa, Zea mays
  Clone ID: MRT4577_70601C.1.pep
MSTTVSRASLDQKLALAKRCSREATLAGAKAAAVATIASAIPTLASVRMLPWAKANINPTGQALIVSTVAGMAYFIAADKKILSLARRHSFEQAPDHLKNTSFQGTGRPHPAFFRP

SEQ ID NO: 337098 - protein, 125 aa, Zea mays
  Clone ID: MRT4577_70602C.1.pep
MCTWPECDPRQLLCRCSDWSYEFCQCFVGSRRCARWHQDSASHLSASLIRSPPCPLWPARQLKFLNVASFCAFASVYANGIRLKKDALKATSCFWPVTVNVLLTKHRKMYRLRVEPIPPSDVRMR

SEQ ID NO: 337099 - protein, 476 aa, Zea mays
  Clone ID: MRT4577_70603C.1.pep
PIYIQEGRLTPRSDVYSFGLVLCELMAGKGVRKGAINLILYANKGCASGKGFREICDAAIANENNMKILKEMQKLAAECLSLTISRRPQMTDVVKRLRTLRKELKNRHENYSEPILASHHSWRKNKKQEMIAPTYNSKLQIKKSLSFFKRSISSSKVQSEPSNVRIFAQEELKEVTHNYSCLLGGGLSGKVYRGTLEDNAVVAVRVFSEVLEGFEEAFVNGGMILSQISHRNVVKLLGYCLDADCPAFVYEYAARGSLSDVLDRHEDFPLDLRAKIAVKIAEALEYLHSPATGIIRHGYVVPSKILLDGNFMPKLTGFSWARKLIKDPIHDRCVSLRVKADVYQFGVLLLMLISRKNFVFYADHDDIVAQFRAARQADGSGRAFFDDDVAGHGGDVGLLEEMGRLSLKCVCEEIDQRPTMSEVAEHLRIITRSWKKCSSSEGATALVSKAMAKKSHVAAEAEATKLDWPPGSDIRD

SEQ ID NO: 337100 - protein, 108 aa, Zea mays
  Clone ID: MRT4577_70604C.1.pep
MADPDVIEVTFGNDVINTTVTSSGQAVERWIAEILALHRPGSNGYSIIVGLDVEWRPSFGPHHEPLGRVLPQLRADQVRLHRRLRLFRGRPQAAWRRVLIDAVRCCVV

SEQ ID NO: 337101 - protein, 108 aa, Zea mays
  Clone ID: MRT4577_70605C.1.pep
PFGLRGPCSSRLSSVASGGRRAVAVLVALRLAVAVLSCRSRSFVVWFRPVFVPCGRLLAWSYRVSFLVVLVLWLCFGLVRVRLCVGWVSVRRRLVLVPPARVVCLRVI

SEQ ID NO: 337102 - protein, 210 aa, Zea mays
  Clone ID: MRT4577_70606C.1.pep
GPGKTAKPLPSSPVPLVLCAGEKERRRPRDGDEAVERWIAEILALHRPGSNGYSIIVGLDVEWRPSFGPHQNPVATLQLCVGHSCLIFQLLYADYVPGALAEFLGDRGIRFVGVGVEADAERLSDDHGLVVANAEDLRGRAAERMNRPDLRQAGLRALVQVVMGVNLVKPQRVTMSRWDASCLSYEQIKYACIDAFVSFEVARRLLGGAY

SEQ ID NO: 337103 - protein, 155 aa, Zea mays
  unsure (1)..(155): unsure at all Xaa locations
  Clone ID: MRT4577_70607C.1.pep
MADPDVIEVTFGNDVINTTVTSSGQAVERWIAEILALHRPGSNGYSIIVGLDVEWRPSFGPHQNPVATLQLCVGHSCLIFQLLYADYVPGALAEFLGDRGIRFVGVGVEADAERLSDDHXSRWDASCLSYEQIKYACIDAFVSFEVARRLLGGAY

SEQ ID NO: 337104 - protein, 84 aa, Zea mays
  Clone ID: MRT4577_70608C.1.pep
HSSFPFSPAGGFINSRHSVSASQGWEVGSDRRPGERHRRHRRPSDRHRTDTNVSPSAFACPHYLAIDTPDPRTSSSSPRYAVAG

SEQ ID NO: 337105 - protein, 202 aa, Zea mays
  Clone ID: MRT4577_70609C.1.pep
MADPDVIEVTFGNDVINTTVTSSGQAVERWIAEILALHRPGSNGYSIIVGLDVEWRPSFGPHQNPVATLQLCVGHSCLIFQLLYADYVPGALAEFLGDRGIRFVGVGVEADAERLSDDHGLVVANAEDLRGRAAERMNRPDLRQAGLRALVQVVMGVNLVKPQRVTMSRWDASCLSYEQIKYACIDAFVSFEVARRLLGGAY

SEQ ID NO: 337106 - protein, 68 aa, Zea mays
  Clone ID: MRT4577_7060C.1.pep
TGPCMGRDCSLKRRAPKLAYNLTTNNGPYASNGLLKACRKRVTMKPEDLPGTLQMIQTPTSCRLGMRC

SEQ ID NO: 337107 - protein, 97 aa, Zea mays
  unsure (1)..(97): unsure at all Xaa locations
  Clone ID: MRT4577_70610C.1.pep
PGFSTAPCSIPRRRAANWREIGSSSFPVLPVDSRLATARXLPQARVLGFEGRDPGLQLRDARGLGRELGVEGRQLRRGGHLPRPTRRREPLLGFGLG

SEQ ID NO: 337108 - protein, 89 aa, Zea mays
  unsure (1)..(89): unsure at all Xaa locations
  Clone ID: MRT4577_70611C.1.pep
GPHXLPRSVPMLRRRSRPSTKRSTTCLPRLRMRTRRMPMHTLASRQPSFSNMRRPPPLPSDIVFAMHLNIYTMSRYIVKSMYLKKAKIS

SEQ ID NO: 337109 - protein, 119 aa, Zea mays
  Clone ID: MRT4577_70612C.1.pep
VRWGPRGPAFVPFGEGWLRAWRCRGLGCFLCVVVFRSRVRAACVAGALGVGPGVLVCVGFLALVALRSLPSFLSGALSCRLRWCCVPVSGCVCLRVGRSFGSSLRWLGALGRSVAAFGS

SEQ ID NO: 337110 - protein, 121 aa, Zea mays
  unsure (1)..(121): unsure at all Xaa locations
  Clone ID: MRT4577_70613C.1.pep
GSPPAPGYTSYRRSSNLKNCHEFLSQQPPPLVTPFSPSRLTPPSTPQVSTPPCCHXLRQIEPQPIPHAIYPMVHPITQEAPPTPPCELCGSPQPTXKCGGNFDRSPIPPLNAALAPLIPPK

SEQ ID NO: 337111 - protein, 70 aa, Zea mays
  Clone ID: MRT4577_70614C.1.pep
CSPPELKPPTNAGPKDHFPPPKRVHHLKGEQIRSCLFGLVPPCICSYVSPRPLFVNSQYLKVIKKWGFTC

SEQ ID NO: 337112 - protein, 109 aa, Zea mays
  Clone ID: MRT4577_70615C.1.pep
MVHFLDLGPKFCRFWFQLNPMVIWSWLNWGFFTIVGPSNFWTQGFLPLVDHFLPEFSLFLTSFRPLCSMVGLTPGFEPLERLKLGFPARTVFLACLIFPLPSRRCGGRV

SEQ ID NO: 337113 - protein, 56 aa, Zea mays
  Clone ID: MRT4577_70617C.1.pep
CCAQAFQDARVPWTLCPPRHPINFEKRFKISLGPYPNFHSGPLFQSFSCMLHPPHE

SEQ ID NO: 337114 - protein, 84 aa, Zea mays
  Clone ID: MRT4577_70618C.1.pep
PDVSQRSYLFRAQDDQRGRGAGTRNAPHPCHPRPEARHRGGEPPRVHALHAHPSTQYQSAGSMTWTSLDGTQDAAQPRLQLSMS

SEQ ID NO: 337115 - protein, 316 aa, Zea mays
  unsure (1)..(316): unsure at all Xaa locations
  Clone ID: MRT4577_70619C.1.pep
PLSLSLSLSLSLSLSLSLSLSLSLSLSLSLSHDISKLSDEKTSCDTELLILKEKLEMAQALAEESEAIATESRQIAEEHKAYAEGKDEEVKVLERSIEELENTVCVLESKVEIVKEEAERQRMQREELEVELQKVRQQMLAGPPSGKARRYMEDGMIDLADSYRHPVDMHNELLSAQETIRILRKEVSEKESEIAQCNAHISELNIHAEAAAQEYKHKLMELETMAQQVKTDNSTAHACSGRQEKINSKPRGSGSPFKCIGIGFVQQMNSEKDEELSAAKQRIVELEGIAASRQREIFMXLNAKLATTESMTHDVI

SEQ ID NO: 337116 - protein, 56 aa, Zea mays
  unsure (1)..(56): unsure at all Xaa locations
  Clone ID: MRT4577_7061C.1.pep
QIRPSAAPCSRGWRSEMFMTSAAYHLVRPWRCPAYRSRPGSRGGCRXAPTADPFGF

SEQ ID NO: 337117 - protein, 85 aa, Zea mays
  Clone ID: MRT4577_70620C.1.pep
MGRGAVNSSKDNVCETAGKANDRASGIQHGSSETSKAAKEMVSAAANSAKDTVQSARDSFSYIAHRAYECAEDTSDRAADRAADA

SEQ ID NO: 337118 - protein, 91 aa, Zea mays
  Clone ID: MRT4577_70621C.1.pep
DTRVASRLIWIDIYIDNPFVQRTSTLFFYGLRYSLIHARYEELWRVIDATDAAKKTRYAWTWTDRPISRTHWGSRGGRPAVFRKASWGTRP

SEQ ID NO: 337119 - protein, 80 aa, Zea mays
  Clone ID: MRT4577_70622C.1.pep
ADRIWRMRPLTSVERDQASLSILWSRLVYCTRAWRVACQKHIINSRAMHSAETRYLPPSVGHSRKGLVGYVQVKRWRGYE

SEQ ID NO: 337120 - protein, 92 aa, Zea mays
  unsure (1)..(92): unsure at all Xaa locations
  Clone ID: MRT4577_70623C.1.pep
MHRNTIAVLAGAQLAAAGLYPGITADNHTCLLDEPALSCSKGAVPGKVDTCCSETFGGLVLQTQFWDTXWLRKPRTSXPEKTWTIHGLWPDF

SEQ ID NO: 337121 - protein, 40 aa, Zea mays
  unsure (1)..(40): unsure at all Xaa locations
  Clone ID: MRT4577_70624C.1.pep
DTYRWAFICPDHDGPTRXTTQTHISLGQTYIGKDLAGILL

SEQ ID NO: 337122 - protein, 84 aa, Zea mays
  Clone ID: MRT4577_70625C.1.pep
EALGPDTPQRGQNNFFFSPWQVKVFMAGTIFGAPVKYFWPVVPPPFRLTCIMSFWISKKIVPPFNALSKILLNAGPLCVPFWPP

SEQ ID NO: 337123 - protein, 213 aa, Zea mays
  unsure (1)..(213): unsure at all Xaa locations
  Clone ID: MRT4577_70626C.1.pep
AGRGAAKEKIAGLFGACTTTAEQLNLVDTLQHLSIDHHFSTQILSVLTSAHAAEELNSGGACLHDVALRFRLLRQHGFWVSPEVFDRFRDENGSFDVGGVADDDARGLLSLYNAAYLLTHGEAELEEAALFARQRLESMSMRGSXEYPLAQQVSRAAHLPLPRTVRRVETLHYVSEYGGDPTREHEHEHDPSVLEFARLDFEVLQTFPVKGAQ

SEQ ID NO: 337124 - protein, 90 aa, Zea mays
  Clone ID: MRT4577_70627C.1.pep
LYMASFLLCRILNRKKTRPKGQVFSRKPIRHGGAQTGGPPLGKQKGGPPNKGGGHQQGGGNLKKRVGGGKLLPLGEGNPQGVSPRWGTKQ

SEQ ID NO: 337125 - protein, 75 aa, Zea mays
  Clone ID: MRT4577_70628C.1.pep
TEQCNKQDIRTHRSYRELLLQFATPYAPHSAAAAGTGAKTIYTDDVRLILHAANDSDPQGQAGLRHHGAARRLQW

SEQ ID NO: 337126 - protein, 36 aa, Zea mays
  Clone ID: MRT4577_70629C.1.pep
HYHESQNITGETRIKHRRHGVHRSTPKPLKKTAIFL

SEQ ID NO: 337127 - protein, 125 aa, Zea mays
  Clone ID: MRT4577_7062C.1.pep
MLSSRRNSGIILREGSVRDWSEFNDPSPSPKPLYSQSYVAVRGLLSSVVSLDFFLLSSKLKSVYAAMTSQRHSRSQERSKSKGLSCRRVAVRLLFFFMLGIFIGVMPLFSVDVYKKIVSEDKMLP

SEQ ID NO: 337128 - protein, 48 aa, Zea mays
  unsure (1)..(48): unsure at all Xaa locations
  Clone ID: MRT4577_70630C.1.pep
PHYHRQTRSYKPQKKKLLKCHDIRTNAFFLGPSTHXRRNLPTKTSLKK

SEQ ID NO: 337129 - protein, 105 aa, Zea mays
  unsure (1)..(105): unsure at all Xaa locations
  Clone ID: MRT4577_70631C.1.pep
FISRDYPILLPIDHXIYAXLSRSPSVNGXLNDLPWFEVLDLSHAQEDDGCLTKCKWSSLQRTTFFLWELIPLQNLXPPSVGRLSYVRVGYHILDAVTGRVGTYAF

SEQ ID NO: 337130 - protein, 197 aa, Zea mays
  unsure (1)..(197): unsure at all Xaa locations
  Clone ID: MRT4577_70632C.1.pep
MLSLIIRRSRSRFIIHGIKISCNSLSAVDSSSSVLVSRRTFRXTPALSYFGFNYGKISNLNQRFGNYAYSGSSFASSTRSLSSEAXAVAATCDGLTGERIIANQWPIXDENEGDWKSHAAAIAQSIQVIKXRRLQXWKKLLVRLXKVYLEELNKXSGLWXDDPTHAXGRKGREHGLALRGKMKRELLTFXKRAFLEH

SEQ ID NO: 337131 - protein, 238 aa, Zea mays
  unsure (1)..(238): unsure at all Xaa locations
  Clone ID: MRT4577_70633C.1.pep
EIVVRAPPPSESQDTAGFGGGAPSPSRWPKAEVHALIQLRTELETRYQDSGPKCPLWEDISSGMRRLGYNRSAKRCKEKWENINKYFKKVKESNKKRPEDSKTCPYYHQLDALYRSKALASSSSGPGAAPALPPPPPPPQRPDQQAAAAAPPVTVVLAPVPXPRRGLTATXNGNGNGCAGRGSSDNGGGGSGGMQKQQASNGGVAAARFSAVDGAGGNGVATNKREEGIVRKEEAVAA

SEQ ID NO: 337132 - protein, 107 aa, Zea mays
  unsure (1)..(107): unsure at all Xaa locations
  Clone ID: MRT4577_70634C.1.pep
TACVDQKMGIQTKSVXYMVLLLSLTXLRNGIXWTDYALMRFHLYITITNGLHVLIELPQLVLYAIYYKNTHKIVHARMLKAGQVVKTQADAHGSRDSNNHRCGRSTY

SEQ ID NO: 337133 - protein, 121 aa, Zea mays
  Clone ID: MRT4577_70635C.1.pep
LLFHWELEACIYPCCISHPKILLFHTDPGSKRRTSSIQNKHGVSEAPSFQELTSDPVPNVEADKHPISSTIEESNPDPADDDDEKEVDDWLQDVDSVPSKTGNNTAVGEEEDVSFSDLEDD

SEQ ID NO: 337134 - protein, 177 aa, Zea mays
  unsure (1)..(177): unsure at all Xaa locations
  Clone ID: MRT4577_70636C.1.pep
CGGSSPPSFHGSLEAVGSLQVTMSQSFDINVLREEARSRWLKPSEVYYILQNHERFPITHEAPKKPPSGSLFLYNRRVNRYFRRDGHTWRRKKDGRTVGEAHERLKVGNVDSLSCYYAHGEQNPCFQRRCFWXMLEPAYEXHIVLVHTEGAEGRYYSSHLSNGPPEPLSSLGYPNAI

SEQ ID NO: 337135 - protein, 169 aa, Zea mays
  Clone ID: MRT4577_70637C.1.pep
IYRSRESYLYFLLLVTVDGKFAGALLFHWELEACIYPWCISHPKILLFHTDPGSKRRTSSIQNKHGVSEAPSFQELTSDPVPNVEADKHPISSTEAEIVDKSVIQEELVMKTEAKSLPTEESNPDPADDDDEKEVDDWLQDVDSVPSKTGNNTAVGEEEDVSFSDLEDD

SEQ ID NO: 337136 - protein, 464 aa, Zea mays
  unsure (1)..(464): unsure at all Xaa locations
  Clone ID: MRT4577_70638C.1.pep
GKKKKKKKKKKKKNKPSRAGDSRVRRYYSTPLYLPPHAPVLARPPDRTHARHELAAMSWFARSIAATLSSAHSDDDESEPASGDNSPPRASDPTSAETGESDEQPDTPSRGVKGDISELTESLTRRFWGVASFLAPPPTEGETQEEXGGGGGGGGGDSRRXEVPQSPRIDGIRSDLAEIGGRVKTGISMLSNAGAVAEISRFASSFLPFGPGDQGEEEEGEAVGVTEEVVVFVGNISKHPKTWLDFPLFVDDRHADDFELSDEQYGHAVAIERLVPSLSYLRTELCSTNMSEACFWEIYFVLLHSKLSKQDAEILSTPQILEAREGLLQSSPTKHKLLSEXGILQNLKRVSCHRQASXKHGVSEAPSFQELTSDPVPNVEADKHPISSTEAEIVDKSVIQEELVMKTEAKSLPTEESNPDPADDDDEKEVDDWLQDVDSVPSKTGNNTAVGEEEDVSFSDLEDD

SEQ ID NO: 337137 - protein, 72 aa, Zea mays
  unsure (1)..(72): unsure at all Xaa locations
  Clone ID: MRT4577_70639C.1.pep
QSSIVRQRISNLRFCATLVSDHGLLASIAXRHGDRNALCTHSTMARVAHSIMSCHVVDATVITRRKVYQLCL

SEQ ID NO: 337138 - protein, 124 aa, Zea mays
  Clone ID: MRT4577_7063C.1.pep
AETTYLRSAGASSGIGLETARVLALRGVHVVMAVRNVSAGLKAREAIVAKIPVARIDVLELDLSSIASVRRFASNFDSLNLPLSILINNAGVMTRSCTRSCDGLELHFATNHIGVSSYTSTHYS

SEQ ID NO: 337139 - protein, 66 aa, Zea mays
  Clone ID: MRT4577_70640C.1.pep
NLTVVLQWFEQSLCVLSYQSIPMSQGIAASCMIQAQLSELLRSHSHLSLPRHLGSPDVSSSRQNES

SEQ ID NO: 337140 - protein, 813 aa, Zea mays
  unsure (1)..(813): unsure at all Xaa locations
  Clone ID: MRT4577_70641C.1.pep
FNLLTHASAHASALPSSSRRRLLASASASASASAPRCASPEERRESERGDPSDPIHRHNLRPLDLLRPRATPGQGWRIESVISDIQGCSLQLCQLVNSLLPSLTARACMCIEKLQDINHEHVFDLVKEVAMELAATSAVSSVNLLKLSSLLSLSTNMELYTEAVSLENLKTRALRCESREELDLAEQMIPLVNYMHDHLLKEKQQLSINGVPIPADFCCPLSLELMSDPVIVASGQTYERVYIKLWLDEGFTICPKTLQRLGHSNLIPNYTVKALIANWCESHDIRLPDPMKSLKLNFPSAASFLEDLSAADGSPLHXLSCQGLIFLGPQKLMCIXNLNGASPPHSLVNQNSHAHANRHGHEVSTSQTSEKTNGSVPDVSRLSLASSEARESSLEGRRGGSIGQISEHSTEEAFQSSNLDRDLQDNLANSSLNGSLPNSGQLDGECDNGVTRVPSDRTNYSSDASGEVTNGGGAPVASSVPQREHLIPPRLGMGTKQFIRRQPSDRGFPRIISSSTMDTRSDLSAIENQVRKLIDDLKSDSIDVQRSAASDLRSLAKHNMENRIVIANCGAVNVLVGLLHSPDAKTQEHAVTALLNLSINDNNKIAIANADAVDPLIHVLETGNPEAKENSAATLFSLSVVEENKVRIGRSGAIKPLVDLLGNGTPRGKKDAATALFNLSILHENKARIVQADAVQHLVELMDPAAGMVDKAVAVLANLATIPEGRNAIGQARGIPALVEVVELGSARGKENAAAALLQLCTNSNRFCSIVLQEGAVPPLVALSQSGTPRAREKAQALLSYFRSQRHGNSARR

SEQ ID NO: 337141 - protein, 63 aa, Zea mays
  Clone ID: MRT4577_70642C.1.pep
FIVQRRLGHLDSGWILFLNALAESQRFRWGNAASEYTDLEEDINRSFLFHGLSWNHLHPSGLN

SEQ ID NO: 337142 - protein, 155 aa, Zea mays
  Clone ID: MRT4577_70643C.1.pep
WLPLSATLLNSISCLGALTSDVSTARPKPIHKYCKNVYDISSIVTPLLEDLCKSPEEQLDEVLRDLDTAVNEASGLIGNWHQTTSKMYFGWRIESVISDIQGCSLQLCQLVNSLLPSLTARACMCIEKLQDINLHENRANPASPCGGGGRPLLEK

SEQ ID NO: 337143 - protein, 140 aa, Zea mays
  unsure (1)..(140): unsure at all Xaa locations
  Clone ID: MRT4577_70644C.1.pep
MDVADLSEGGCTVDKTGNCVRLTEPEDPAFVLTSVXIHYETISKQNLRXLTRIHTKKCPLMICTTDAACHWIVNDARXKHVHXNCSTPAAVNLYCCANIPCTRVTMDDDRIMYSDANYRTMNSCTIAEGCSTVILRDLVC

SEQ ID NO: 337144 - protein, 46 aa, Zea mays
  Clone ID: MRT4577_70645C.1.pep
GFTRTKARNLTFAPVKEGGPPAPEYRPKKCLAMLDQWTSSATGQLS

SEQ ID NO: 337145 - protein, 120 aa, Zea mays
  unsure (1)..(120): unsure at all Xaa locations
  Clone ID: MRT4577_70646C.1.pep
SENELNSMVALIDSIRSTEKAQKTSRSDVSKLSKDLEEANELNEDLISQISKLRQESNEMHVHITNKLGQAQSLAKALSEELASLHEIAQNGQQXLEATSIELASIAEARNNLKKELLAA

SEQ ID NO: 337146 - protein, 86 aa, Zea mays
  unsure (1)..(86): unsure at all Xaa locations
  Clone ID: MRT4577_70647C.1.pep
MALFTAPAVDVLVLLLWTSAYGGDSQGEGVPAPYQDASTDXEVRVRDLIARMTLAEKVRQMTQMERIAKSSDALRDYYISSLLRGC

SEQ ID NO: 337147 - protein, 67 aa, Zea mays
  Clone ID: MRT4577_70648C.1.pep
RPVQVRIDRAGVEEHCAALHQQVFTRNPYIAHLSQFLFSNSGVKGETRKLRTKQQQQVIKKKKKKRP

SEQ ID NO: 337148 - protein, 82 aa, Zea mays
  Clone ID: MRT4577_70649C.1.pep
YHLSSCILHNHVDFGPKVLTSCSLISRVFINLPLGGQEEPRGNERVVDEEHRAPSPQRRRAYFRDGGEVVLVVRRWRRAVIQ

SEQ ID NO: 337149 - protein, 188 aa, Zea mays
  unsure (1)..(188): unsure at all Xaa locations
  Clone ID: MRT4577_7064C.1.pep
MRWFYHKGSSGFSSASTAEDVTAGVDGQGLVAVITXGASSGIGLETARVLALRGVHVVMAVRNVSAGLKAREAIVAKIPVARIDVLELDLSSIASVRRFASNFDSLNLPLSIXCKYQSYYFVVPLLSRAVKSQPKIIVVCVWLVXGVLFDSNNAGVMTRSCTRSCDGLELHFATNHIGVSSYTSTHYS

SEQ ID NO: 337150 - protein, 95 aa, Zea mays
  unsure (1)..(95): unsure at all Xaa locations
  Clone ID: MRT4577_70650C.1.pep
NPNIPPKDDGSIAFXNDFFKRQAFLTLSXTFMFNTYLXPLKYVYTFLPTFLSYNLHTSRHFLYFLMVEPKITFSIFHDNINFFLKKFTLSFFIFF

SEQ ID NO: 337151 - protein, 98 aa, Zea mays
  Clone ID: MRT4577_70651C.1.pep
HKEGGPSVTVAYESHTTILGIFQQFQYKVKKGGKKKERKISDHQTCKDKKSAHNNAGWCQAKFYPITKPAWDGLQLQRQLPKPFLINLFSVNFLWSST

SEQ ID NO: 337152 - protein, 54 aa, Zea mays
  Clone ID: MRT4577_70652C.1.pep
NSPPPRLGHLFYSLPEGHLKDQKKKRNQHIYLMCIYNTKTNSKPNPKNKRFKTA

SEQ ID NO: 337153 - protein, 95 aa, Zea mays
  Clone ID: MRT4577_70653C.1.pep
WGNKDAFEAQKCKKISSPVLGAFLSDLLNIWWWGAVFQAQTMAKRGEQTDSKKNPGTDRNFIKNHKVPLSSVVKKTLGTSVCLQNSLDIFGGLFG

SEQ ID NO: 337154 - protein, 250 aa, Zea mays
  unsure (1)..(250): unsure at all Xaa locations
  Clone ID: MRT4577_70654C.1.pep
SLPSPLPGRAPQLVSLKHAALLPARPWVLSRPPPTSTRVGYPRPRREAQPSRPQARPGQRPSYGQRSPQRRLGLRAQRRALSLYPLRLFRARPPALLPCSSPAFAWPLRSPSASSSPFCSQQVPSLFLNPWRPAVHLLGRGEPPSAPSSMAAAPPQSSSSVPMFPSVSRARSPSPWLCARASLFGCCRAEPGFQRPFMLWFSLFASMCKRLRARIPWAXFAFARHRLQVEFSFAELLGISPIGVESSSCG

SEQ ID NO: 337155 - protein, 64 aa, Zea mays
  Clone ID: MRT4577_70655C.1.pep
PVAFYTSQTPPEGGTKPFDVKTATRVLPPSERLHTFPLPHQTENPATGIAVVYFFYLLFLELKG

SEQ ID NO: 337156 - protein, 75 aa, Zea mays
  unsure (1)..(75): unsure at all Xaa locations
  Clone ID: MRT4577_70656C.1.pep
KLLCLTTKSKKLKAKMANGEIGNVDYYGLVGVRRGCTRSELDRXANLLLCLRHKXDKALAFMERCDFFDREWDGS

SEQ ID NO: 337157 - protein, 96 aa, Zea mays
  Clone ID: MRT4577_70657C.1.pep
VGIRQGFPIYFLVNRCSEGRRNSSQYRANWVTGTPLGSMTVPLNFISNLRHCRGVPYILYWPRTQGLFIMFFSEQDVGGSFLQVLQLHRRIAFRLH

SEQ ID NO: 337158 - protein, 63 aa, Zea mays
  Clone ID: MRT4577_70658C.1.pep
ERRLNWEKAGVPQERSGRTGGSQLDVGDMIEEYMIWHERSMSGWYLDMARFIFSFFFFYYFCF

SEQ ID NO: 337159 - protein, 71 aa, Zea mays
  Clone ID: MRT4577_70659C.1.pep
MSRRWSRTIYVGNLPGDIREREAEDLFYKYGKTVDIDLKGPPKPPGYAFVEFEHTRYANEGTAGRDGYNFY

SEQ ID NO: 337160 - protein, 117 aa, Zea mays
  Clone ID: MRT4577_7065C.1.pep
GLRLKLCSALVTSSSSEQTRPSKQTTRQGSRGGRNARCCSSSQDLAAEHRREECAVAIVLTTWKVIGIPSERALQPEYIDNKRTRLIAQAQPAAYYRLLSCLARGLQYHRREALDIT

SEQ ID NO: 337161 - protein, 221 aa, Zea mays
  unsure (1)..(221): unsure at all Xaa locations
  Clone ID: MRT4577_70660C.1.pep
MAAASPPLLPTTVVPAAAAPPTPAPTAISSXTPPTPTXAIRAFLSRLLDTTRRALSGARPWSELADRSALSRPESLAEATSRLRKNLAYFRVNYAAVAALCLAAALLAHPFSLAALLALLAAWCLLYVLRPADAPPVSAFGRTFSDREVLGGLAAASAFVVFLTSVGSLIFSALALGTAIVCAHGACRVPEDLFLDDVDQAAGGTGNPLLSLIASATGGRV

SEQ ID NO: 337162 - protein, 99 aa, Zea mays
  Clone ID: MRT4577_70661C.1.pep
PPQHDHSVRDTKDAEALLVPRREGSRLHLTTSSSTFAIKSAGLWNHRTTSTTPKRVPRRTSFGLTSHGTSRACQNAPGGPSACRYSPQEETEPYGPTVL

SEQ ID NO: 337163 - protein, 141 aa, Zea mays
  unsure (1)..(141): unsure at all Xaa locations
  Clone ID: MRT4577_70662C.1.pep
SPDQPWLHNIIKAPHVNXCRTVDARLQQFSLMNKSNKHALRVIAEHLSLEYAADIXDIFAKMDLNKDQMLNFYELNLGLHKSGHQIPHAHVQILMEAADADGNRSLDYGEFGTLSVHLTKIVNDQHLHKAYAYFDRNQSVY

SEQ ID NO: 337164 - protein, 100 aa, Zea mays
  unsure (1)..(100): unsure at all Xaa locations
  Clone ID: MRT4577_70663C.1.pep
AGRAGKDGKLQKIDEGMLKSPEGKESWXRKYIKLFENTVADYNFGTLIRTNSREDYTEKNTMFITRIQFYAIEICRNRLGLNDRAHELAKKEWNEKQAKK

SEQ ID NO: 337165 - protein, 110 aa, Zea mays
  unsure (1)..(110): unsure at all Xaa locations
  Clone ID: MRT4577_70664C.1.pep
MCLRINSCFGAPPADEAHFHAPPNKHGASRTTQRNGAHYNSNGHGHGDGYPARTAASRAEAGRKATNDVRSGPVHAGAQEKAXXXXYPYAGADGTLKQQQQQPAANGRPA

SEQ ID NO: 337166 - protein, 97 aa, Zea mays
  Clone ID: MRT4577_70665C.1.pep
RETFDCLHRGDVSKRKVEHALKKMCREGSYWGTVAGVYVGVVYGVERVRGRSDWVRRCFELDSFDCQKNFFFFCCCTRDPPAEERDGRRLLVRRAGL

SEQ ID NO: 337167 - protein, 255 aa, Zea mays
  unsure (1)..(255): unsure at all Xaa locations
  Clone ID: MRT4577_70666C.1.pep
AARGRGWLCRRRVPIPSPPHPPQTPPKTLAAAAAMDAAALEALILDLHAIEAVKLGSFVLKSGITSPIYLDLRALVSHPRLLAAIAALLSSLPDTRPYAILCGVPYTALPIASVLSVDRGLPMLMRRKEVKTHGTAKAIEGAFRAGDTVLIIEDLVTSGASVLETAAPLRAEGLVAADAFVVVDREQGGRENLAANGITLHSLMTLTEVLAVLLKHGKVTEEKAAEVKQFLDANRKVTVPGAAKPRXVRKGFPER

SEQ ID NO: 337168 - protein, 893 aa, Zea mays
  unsure (1)..(893): unsure at all Xaa locations
  Clone ID: MRT4577_70667C.1.pep
MPPWWGKSSSKEVKKSAKENLIDTFQRLISSNEQKGSRKSRSSRRHGKDTAGDKGCWSTAQSRSTSPSKEVSRCQSFAADRPHAQPLPLPKSRAKVTRTSSDITNSKSTLEKHGKGQLLPLPPIQPKKRPEATEPVTEVATASVSSNCSIDSDDPGDSQLQSPVGNEAENATRITATSSSSVVRKECSSAITRKNTKEVAKPNSAILSNQILSTSPEDRXADGYQSNLQSPRQIALESAPNSLMSSPSRSPRNICPVQIPTSAFWAVKPHTDVTFLGSGQCSSPGSGQTSGHNSVGGDMLGPIFWQPSRGSPECSPIPSPRMTSPGPSSRVHSGSVSPLHPRAGGVTPESPTNRHAEGNKKQTHRLPLPPLSIANSSTFLPNSSNPTSPISRSPGRTENPPSPGSRWKKGKLIGRGTFGHVYVGFNSDRGEMCAMKEVTLFSDDPKSKESAKQLCQEISLLSRLQHPNIVRYYGSETVDDKLYIFLEYVSGGSIHKLLQEYGQFGEQAICSYTKQILLGLAYLHAKNTVHRDIKGANILVDPNGRVKLADFGMAKHINGQQCPFSFKGSPYWMAPEVIKNASGCNLAVDIWSLGCTVLEMATSKPPWSQYEGIAAMFKIGNSKELPPIPDHLSEEGKDFIRQCLQRDPSSRPTAVDLLQHPFVQNAPPLEKSSASHPLEQLTAISCRTNSKVVEHARNMSSLGLEGQSILQRRAAKFSLPNSDIHIRSNISCPVSPCGSPLLRSRSPQHQNGRMSPSPICSPRTTSGASTPLTGGSGAVPLNHVRQPAYRNEGFTVTSRGFDDHMPSRPVDPVHGRFIRVQQFPVGRQERVVSEVDILSSQYGKMRHANVWDPHDRPLPSERSSQQCFGNHAKLKPSLDLRSGPRHPGRNHGH

SEQ ID NO: 337169 - protein, 154 aa, Zea mays
  unsure (1)..(154): unsure at all Xaa locations
  Clone ID: MRT4577_70668C.1.pep
MMNIFVKTLTRKIITLNVESSCTVHNDKDMLLDNEGILPYAVRLIFDGIDLENGRTVADYPISADPTLHLVLMIKLGTMIDVFFPLSKTSSINIEPTESIDGVTERAEHRECIPPVQQRLIYAVIELADRHTVQDYNIEVGSXIHLGLAQMSAY

SEQ ID NO: 337170 - protein, 481 aa, Zea mays
  Clone ID: MRT4577_70669C.1.pep
RGTFGHVYAGFNSDKGEMCAMKEVTLFSDDPKSKESAKQLCQEISLLSRLQHPNIVRYYGSETVDDKLYIYLEYVSGGSIHKLLQEYGQFGEQAIRSYTKQILLGLAFLHAKNTVHRDIKGANILVDPNGRVKLADFGMAKHINGQQCPFSFKGSPYWMAPEVIKNASGCNLAVDIWSLGCTVLEMATSKPPWSQYEGIAAMFKIGNSKELPPIPDHLSEEGKDFIRQCLQRDPSSRPTAVDLLQHPFVGNAPPLEKSSASHPLEQLTTISCRTNWKVVEHARNMSSLGLEGRYQSILQRRAAKFSLPNSDIRIQSNISCPVSPCGSPLLRSRSPQHQNGRMSPSPISSPRTTSGASTPLTGGSGAVPLNHLRQPAYRNEGFTVTSRGFDDHIPSRLVDPVHGRFIRVQQLSAGRQERVVSEADILSSQFGKMRHANVWDPHDRPLPSERSSQQCFGDHAKLKPSLDLRSGPLHPGRNHGH

SEQ ID NO: 337171 - protein, 107 aa, Zea mays
  unsure (1)..(107): unsure at all Xaa locations
  Clone ID: MRT4577_7066C.1.pep
PAYGNLSFETMSYLPPLXSHDLTEVXVYYLXRYACIPCLEICKVALRCTSENSTSPCYDDERYCTMREXLPLICCNDXTHKEQGSLHDIIRSYPDGYPPPYQASTTS

SEQ ID NO: 337172 - protein, 36 aa, Zea mays
  Clone ID: MRT4577_70670C.1.pep
MSGFLEGSRCSECMDWGEKRNTVASIAAGVLFFTGW

SEQ ID NO: 337173 - protein, 133 aa, Zea mays
  Clone ID: MRT4577_70671C.1.pep
PPSCLVTREYGWTPPMERIIKAQALRDSSMFGYMSSKKTMEINPENPLMEELPKRAEADKNDKSVKDPVILLFETALLPFGFSLDDPNPFGNRIPRMLKLGLSIHQDEEAPEAYPHMPPLEDYPGENKMEEVP

SEQ ID NO: 337174 - protein, 57 aa, Zea mays
  Clone ID: MRT4577_70672C.1.pep
MARHGPHQAAVKSMTTSSPPYWAGVKQGHSHHVSVTRDHALHSQTAIICYASVSVRW

SEQ ID NO: 337175 - protein, 495 aa, Zea mays
  Clone ID: MRT4577_70673C.1.pep
MATTATTMAPVTAPVATANLEPTPTPLHPRPAAPPHLRALSTLAPVKSEAPPTPSSSTAITAAAGAEDPSYIITVPSYSAWFSFDSIHDTERRLLPEFFVGEAAAASGCRGPHAYKYYRDSLIRRFRARPGRRLTLTEARRGLVGDVGSVRRVFDFLEEWGLINYGALPSGSKQAKEKREEAAQQSSLPSGAIAPRKLCTGCRTVCGLAYYACDKADISLCARCYVNNNYRPGLSPANFKRVEITEDAKPDWTDKETLHLLEAVLHYGEDWKKVSEHVSSRSEKDCIARFIRLPFGEQFMGHKEDRMRFENTDDNTDEPGANVSKRLRLTPLADASNPIMAQVAFLSAIVGSDVASAAAQAAISAQSRVDLNDGEIETSINSIKQEESSHTNGLSANVLLKEAAANARAQLEKERNSIEQSLSNIVDVQMKEIQDKICRFEQKEMLMEKERQQLHFLRDLLFTDQLAVMQHQQRSPAVATECKGDEKPKPVASMS

SEQ ID NO: 337176 - protein, 95 aa, Zea mays
  unsure (1)..(95): unsure at all Xaa locations
  Clone ID: MRT4577_70674C.1.pep
KKKEIEKREKKKEKRKKKKRRKEKEKRKRRKREKEKKKXKKKKQKKRKGKRRRKREREERKEKEGERKKRTEGGKREERRKKKGRKEEEKXRHYL

SEQ ID NO: 337177 - protein, 116 aa, Zea mays
  Clone ID: MRT4577_70675C.1.pep
QGTLSIPWPSRHTCNSINHTNAAIRIHSVRLKGVSLTGVRRHLLYLTWAGEDEYYKILFHAGTNRGMGGLALTRRNMLRFPRGSANGTLISDLFSTVPIVSVPKKGFQVMVQRAPA

SEQ ID NO: 337178 - protein, 93 aa, Zea mays
  unsure (1)..(93): unsure at all Xaa locations
  Clone ID: MRT4577_70676C.1.pep
VSSHVVSHQITQVFVWPVIKKPWSILLEVAIQLGKGWVXSRRQRPSRYQYDGRESGMACLRVIXYQLPXXAGPLVSLLHDGILIPRGLPTLXX

SEQ ID NO: 337179 - protein, 89 aa, Zea mays
  Clone ID: MRT4577_70677C.1.pep
PHILPLLRRCSPAYLNTFHLIALKMVRPHSIYILILIFYSFINIIILISYIILTIYTFYYLHISHFYKRTIIHTLNNISYHLTYYQTIS

SEQ ID NO: 337180 - protein, 103 aa, Zea mays
  Clone ID: MRT4577_70678C.1.pep
VRCVHICVASYSGAYLMCRRTHTRTLAKSSGIVYGVILRRRRLADPSYVSVVFAGLDLVAAGGAGTRLLSSELWRWRHGSQYSGGLGLCRAIWCRNVGNGAQH

SEQ ID NO: 337181 - protein, 114 aa, Zea mays
  Clone ID: MRT4577_70679C.1.pep
MRHKYLTVSNRANHPKKFEVLPVYQSSFAAGDDFSSLTDDRKTRALVHAMVEILFLCGTGKRAVVASVARANRGKIDAALEDLSVESAVDLQKVLKTSTFTSRKDAFNTLLANI

SEQ ID NO: 337182 - protein, 90 aa, Zea mays
  Clone ID: MRT4577_7067C.1.pep
GLGLFVVKGLMVPAVQRSIVCPHSPRFLVPTVYSYHHLTRHPVLAHSPYRATLVNRSVENTAFASGVRVSANTQHGVRPTQSSYLGCLPR

SEQ ID NO: 337183 - protein, 48 aa, Zea mays
  Clone ID: MRT4577_70680C.1.pep
RLKVIYQQPAVPQHHHNPACSCLELLWCHKGTVVFQCTIATRGKPAFR

SEQ ID NO: 337184 - protein, 183 aa, Zea mays
  Clone ID: MRT4577_70681C.1.pep
MMVLWHCWLLIYHFQIGLDQIEALYQYAQFQFECGNYSGAADYLYQYGALCTNSERNVSALWGKLAAEILMQNWDLALEELNRLKEIIDSKNFSSPLNQLQNRIWLMHWALFIFFNHIRYLNAIQTNAHHLIRYLATAVVVNKRRRNMLKELIKVIQQEHHSYKDPVTEFLECLYVNYVVVGF

SEQ ID NO: 337185 - protein, 155 aa, Zea mays
  unsure (1)..(155): unsure at all Xaa locations
  Clone ID: MRT4577_70682C.1.pep
MSKLGYDGVVALLVADISLSIGPDQIEALYQYAKFQFECGNYLGAADYLYQYGALCTNSERNVSALWGKLAAEILMQNWDLALEELNRLKEIIDSKNFSSPLNQLQNRIWLMHWALFIFFNHIRYLNAIPTNAHHLIRYLAXTAVVVNKRRRNML

SEQ ID NO: 337186 - protein, 218 aa, Zea mays
  Clone ID: MRT4577_70683C.1.pep
MAGAAATAHCTLSRPPSPISCTHRIFFIPSPSSSSASHQGAADVLQWSLPLPLCVGHLNCNAQSRAQIVSSHSQIQPLRIWPALTSLNDWHTAQGTTRRARTPRMRGKNRFRSVLTRLKLCISMPNFSLSVVTTQGLLITFTSMVLCAQTVSEMYLNAIQTNAHHLIRYLATAVVVNKRRRNMLKELIKVIQQEHHTYKDPITEFLECLYVNYVVVGF

SEQ ID NO: 337187 - protein, 241 aa, Zea mays
  Clone ID: MRT4577_70684C.1.pep
MQLSGLASNRPQPLCIPRVCGADEHVDVQIPPARVLGDYIVFSIVFLDFEVLSMSKLGYDGVVALLVADISLSIGLDQIEALYQYAQFQFECGNYSGAADYLYQYGALCTNSERNVSALWGKLAAEILMQNWDLALEELNRLKEIIDSKNFSSPLNQLQNRIWLMHWALFIFFNHIRYLNAIQTNAHHLIRYLATAVVVNKRRRNMLKELIKVIQQEHHSYKDPVTEFLECLYVNYVVVGF

SEQ ID NO: 337188 - protein, 146 aa, Zea mays
  unsure (1)..(146): unsure at all Xaa locations
  Clone ID: MRT4577_70685C.1.pep
MRECSNDAQMLSGGIQAGNACRALCXLEHGTEGDGQMDGDKTMGGGDDAFSTFFRGTGAGKNVPRAAAVDLEPTWVDEVRTGSYRAAVHPARLISGKEAAAGTFARGHXTIAMETXGLCHCRXRELGGNCTGSPGXLAFNAGGARN

SEQ ID NO: 337189 - protein, 76 aa, Zea mays
  Clone ID: MRT4577_70686C.1.pep
SRSPSSPSEIFFRVFLPTARGCFSFHLRRHSFPSAFNHKNFNFNPAWPPPKTPFWKIQMEHPWPINNQNPFLGLTS

SEQ ID NO: 337190 - protein, 106 aa, Zea mays
  Clone ID: MRT4577_70687C.1.pep
CRKNAGEVNAVQAISVMSSERFIALWKIAEVSKHKQHSITHIDQQGALGARSSLASATRALSKPSTTKMRTWAFCEAMQAQWHDIVHGRGHPRQGSGSYRSPQFRP

SEQ ID NO: 337191 - protein, 78 aa, Zea mays
  Clone ID: MRT4577_70688C.1.pep
LKFLHFFKYASLHFCAQNQGWDTASPVLHFYTNAKCEQFSDSSMQTNCSVWQTIYLFHAYQCTASQLNDNERMEDKYN

SEQ ID NO: 337192 - protein, 67 aa, Zea mays
  Clone ID: MRT4577_70689C.1.pep
SGSKAIRTLLQTHAPALANNDSAYHCDKSLFTLVALPHVKNQFTIVVHKFSPETTPENGSSRNDSPP

SEQ ID NO: 337193 - protein, 93 aa, Zea mays
  Clone ID: MRT4577_7068C.1.pep
ITPHQNWYLHILNDYEDIPGSVLMAPPPSLASASKASPKRFYPHLLRLLAFLCSSFFTFFSVISSRLGYCISRSEPGGQGIGIEMGSREEKSF

SEQ ID NO: 337194 - protein, 51 aa, Zea mays
  Clone ID: MRT4577_70690C.1.pep
LSHREFTRSLRCLTRGRGPRPRPRRPASRTRRSRKGRHQRRGRSLRLRLRR

SEQ ID NO: 337195 - protein, 56 aa, Zea mays
  Clone ID: MRT4577_70691C.1.pep
FFSFFSPIDHSRKCKRGQNKGGTFPLATLGKKTFQPPKFGRAGFTSLALLPFNSPG

SEQ ID NO: 337196 - protein, 102 aa, Zea mays
  Clone ID: MRT4577_70692C.1.pep
PVTSFTALALLYNTQGVYTWPWGGADGISHFEDNPMKSILRGRDAWDICNAPCTFMFFCISVGCWRSYLVANSIYLFMLKVLPASNPWLCVLVQNLDKESEI

SEQ ID NO: 337197 - protein, 44 aa, Zea mays
  Clone ID: MRT4577_70693C.1.pep
IDWFSSTAQAFQRVRDRIFKFYRYPMSSSPPLSPDIRSHYHQGV

SEQ ID NO: 337198 - protein, 73 aa, Zea mays
  Clone ID: MRT4577_70694C.1.pep
ARGGARNHSRSACLSSYGAAGVQECPIGQQIRWKKVNLEPFSYCNPPGKRTQAAESLVAEVMAGTKEECKWAS

SEQ ID NO: 337199 - protein, 113 aa, Zea mays
  unsure (1)..(113): unsure at all Xaa locations
  Clone ID: MRT4577_70695C.1.pep
ESTIIEPEPPVSCATLXALXQDELNYPSIRVILXDNXPFTATAKRAVTIVGTASSTYTVAVNVPASVTVEVIPPKLTFKALEEVLKYSVTSKSANGQTLIGPVEGELKWLSGK

SEQ ID NO: 337200 - protein, 62 aa, Zea mays
  Clone ID: MRT4577_70696C.1.pep
CASFKCRTNAAFVLVRVLRQYYNSTYLCVRIDQWEQRRIYTPGHVVPALPLINTPLHKSLFY

SEQ ID NO: 337201 - protein, 1582 aa, Zea mays
  unsure (1)..(1582): unsure at all Xaa locations
  Clone ID: MRT4577_70697C.1.pep
MVRIAEHSGETCESFSMVEEAASSRPQSSSHPTLGVAAMRPARRRTPGVGCAGLADHLRAATWPPKFRPHLPEKYDGATNPSEFLQVYVTAITAAGGDTTVLATYFHVALSGPARTWLMNQAPGSICSWEELCVWFVVNFASAYQRHGVEAHLHAVRQEPGETLQAFISRFTKVRGTIPRISDASIITAFRQGVCDEKMLEKLATHDVDDVTTLLALSDKCARATEGXVLALGTTGKGYQDXDSDVITQGGGRKKKRNKNHDHEKPRFAISVAAAAXGPRRVRQAPRPQGYSGDTCPVHPKSRHXAADCRXYQTRTARQRELTEKPWLRKDKTSATSRPXCLKDVFTRDSDSSDGGDRRKKMYVMYGGSWELTSRRSVKSLHWEVLSAVPGVPKTTPHQGWRGTTISFGASDCPDNMEGAGVLPLVTAPVVANMRLHHVLIDGGASLNVISHAAFRHLQVPGSRLGPSRPFSGVGPQPVYPLGSITLPVTFGTKENFRTENVQFDVAEGDRTAALAAVEXYTPWRPRSLGPXRGKRPQYQGALQGTESAADRGRRRAREXIQELVLVTFLQANADVCAWEPSQMPGIPREVIEHQLKVYPDARPVSQKPRRQSVERQDFIREEVRKLLHAGFIEEVHHPVWLANPVVVPKANWKLRMCIDYTSLNKACPKDPYLLPRIDQIVDSTSGCDLLSFLDAYSGFHQIRMAKEDRKHTAFVIVDGLYCYVVMSYGLRNALPTFVRAMSKTFGDLIWNKVEIYVDDIVVKTREGSAIVEDLALVFGKLRATCSKLNPEKCIFGVSAGKLLGFLVSYRGIEANPEKIKAIEVMRPPAHVKDIQKLTGSLAALSRFISKLAERALPFFKLLWKSGPFAWSEEAEQAFKELKQHLASLPILVAPEPGEPLYLYIAAAAEAKPVYYVSEVLHEAKARYLETHKLLYAVLVASRKLRHYFQAHKVVVVTSFPLRAILYNPSATGNIAKWAAELAEFQLDFQPRHAIKSKVLADFIMEWTPPLCTPEGRTPLRVPYRHRGAIFIEPHWTLFFDGSARQQSAGAGVVLADPGENQLQYVVRLEFKATNNMAEYEALIFGLSAALSLGVRQLLVKGDSQLIIKQVREKCSYNEPTLAAYLLHVRKLEKDFTTLELQHVPRSDNLAVDDLSQRASTQAPIPEGTFERRLLRPIAQLARLDEGGEIGTLKPAIPVASQDPPKTSATQSGPNAWISEIRDYLKENILPEDHVSAERIVWLAKRYTMVEGGLYRRGCNDILMRCITQEEGRELLMEIHGGECGSHSSSRTLVXYHVKQIHTPAQALQMIPPSWPFAVWGXDILGPFPRAVGGYRYLFVAIDKFTKWPEATPVVSITQGAVVAFLKSIVCRFGVPSRIITDNGTQFTSRVFQEYCEGIGIRLCFTSVAHLRSNGQVERANVEILRGLKTRTYDCLKKHGTNWVSELPSVLWGNQTTPSRATGETPFFLVYGAEACLPPEIIMGSPWAQSFDESAQEQLLCEDVDFIDEHRWRAAVRNARYNQALRRYHQRFVHSRKFEVGDLVLRRILNREGLHKLSPSWEGPFKVTEICRPGCVRLAIDN

SEQ ID NO: 337202 - protein, 90 aa, Zea mays
  Clone ID: MRT4577_70698C.1.pep
CTKKIPQNICFGHSCKCGVRGCTRNVYLYLHYPLLLIPLELLQDTMHSTRYIDINFTNKKKLAFCTDAQTHVICISKWNIMNTKIHCFPE

SEQ ID NO: 337203 - protein, 88 aa, Zea mays
  Clone ID: MRT4577_70699C.1.pep
NSKGNLKWGKGGTMTKTGAFLLFFQGAQNGGVFFPIPIATLKDLRGFKALGVTPKSPAKEPPKTFLTYGQLPNWAGFKSFWPPGQKGL

SEQ ID NO: 337204 - protein, 293 aa, Zea mays
  Clone ID: MRT4577_7069C.1.pep
MDMSSIAANLGLSGSRPVIRKAGELRRLCDVNFDSSVLGIGEVCKAIICLEIAASKLQVIFDRAEAVRMSGMSEKAYIRSFNSLQNGLGVKTTLDVRELGIQFGCVRLIPFVQKGLSLYKERFLAALPPSRRASTDFGRPVFTAAAFYLCARRHKLKVDKLKLIDLCGTSSAEFTTVSTSMTDLCFDVFGIAKEKKDPKSIKGNRELLDVLPSKRKHEDDSDSSASDESSDNDQDELDLPTHKRRKKMEREAYNDWKSSVLSSNKKTKPDPAKPRRQAQLNFKKPSEVTPAAN

SEQ ID NO: 337205 - protein, 40 aa, Zea mays
  Clone ID: MRT4577_706C.1.pep
RKNSYMMSSSDHHFSQAVGSASPSMARSRITKYSTVTYTK

SEQ ID NO: 337206 - protein, 197 aa, Zea mays
  unsure (1)..(197): unsure at all Xaa locations
  Clone ID: MRT4577_70700C.1.pep
MSEVSVINQAEVEDAGAGQLMDLPPGFRFHPTDEEIISHYLTHKALDHRFVSGVIGEVDLNRIEPWDLPGRAKMGEKEWYFFCHKDRKYPTGTRTNRATETGYWKATGKDKEIFRGRGVLVGMKKTLVFYRGRAPRGEKTGWVMHEFRLEGRLPQPLPRSAKDEWAVVQVFNKELXAARSEPLRGRRGTRARGLAGL

SEQ ID NO: 337207 - protein, 162 aa, Zea mays
  unsure (1)..(162): unsure at all Xaa locations
  Clone ID: MRT4577_70701C.1.pep
MSEVSVINQAEVEDAGAGQLDLPPGFRFHPTDEEIISHYLAHKALNHRFVSGVIGEVDLNKCEPWDLPGRAKMGEKEWYFFCHKDRKYPTGTRTNRATETGYWKATGKDKEIFRGRGVLVGMKKTLVFYRXRAPRGEKTGWVMHEFRLEGKLPERVPRSART

SEQ ID NO: 337208 - protein, 75 aa, Zea mays
  Clone ID: MRT4577_70702C.1.pep
PRPRLMVFHGRYFSLQNYIFPRVVVQECKENKYIIPACVCVCVCMETILKKRYGLCVNEKRTVPAFDLGQGRFTP

SEQ ID NO: 337209 - protein, 34 aa, Zea mays
  Clone ID: MRT4577_70703C.1.pep
WDYIFNYVKTFRAHPERLLPERTLVGMEKHFMRS

SEQ ID NO: 337210 - protein, 128 aa, Zea mays
  unsure (1)..(128): unsure at all Xaa locations
  Clone ID: MRT4577_70704C.1.pep
MVVSEAGGKANNCADERTFGAPTKIFVSRPYMDRLQFPIRRVGRLLXKGRCPPMLITSAPFYISDSLDYLLNVVLALTGNPERDNKKTRIIPRHXVLFCITNDTXLCKLISAVSISHSGFLPNIHTVL

SEQ ID NO: 337211 - protein, 65 aa, Zea mays
  Clone ID: MRT4577_70705C.1.pep
QMVLVITHVLPLTLVFVTVSQHPKMSSAPVLVFKILLNIKFPPPLRQLTRRRNERVAWAGHAGPV

SEQ ID NO: 337212 - protein, 70 aa, Zea mays
  unsure (1)..(70): unsure at all Xaa locations
  Clone ID: MRT4577_70706C.1.pep
RVEPTVHASCDRISSQYHKSXQGVAEFYKSALRYLAYTTGEARTESFKRDSAXFDXSRAALEGDSTYKVG

SEQ ID NO: 337213 - protein, 215 aa, Zea mays
  unsure (1)..(215): unsure at all Xaa locations
  Clone ID: MRT4577_70707C.1.pep
MKYSKEDKPERAGGAGAESRAVPVALVVVVLCAFSFYLGGIYSTGRSLLDSIQPAPTALLALGAATTTRRPSDDGQARPALASTAAVAFPECPADYQDYTPCTDPKRWRRYGTMFPNGXSAYVXLMQGLVPGMRDGTVRTALDTGXCGVAXXWGGDLLXRGILTVSLAPRDNHEAQXVQFALERGIPAILGIISTQRLPFPSAAFDMXHCSRCLI

SEQ ID NO: 337214 - protein, 48 aa, Zea mays
  Clone ID: MRT4577_70708C.1.pep
SFLSLVTIAFASDAGVYNLLKYVRCFPRQPVPCRPCVPGVGPGRVASR

SEQ ID NO: 337215 - protein, 101 aa, Zea mays
  unsure (1)..(101): unsure at all Xaa locations
  Clone ID: MRT4577_70709C.1.pep
QAVATKILALLALLALLVSATNAFIIPQCSLAPSAIISQXLPPVTXMGFEHSAVQAYRLQLVLAASVLQQPIAQLXQHSLAHLNLQTNAXQHGHQFLSSLI

SEQ ID NO: 337216 - protein, 142 aa, Zea mays
  unsure (1)..(142): unsure at all Xaa locations
  Clone ID: MRT4577_7070C.1.pep
EHSTHQAKRTITDLATLATEGLALLALVALFASATYAFIIPHCXLAPSAIITQFLRPDTSMGFEHLAVQANMQQQALAESVLQHPIEQLPQQSLPHITIQAITSHHPQQFLPALSHLGMVNPAAYLQEQLLAFNPLAVANVA

SEQ ID NO: 337217 - protein, 126 aa, Zea mays
  unsure (1)..(126): unsure at all Xaa locations
  Clone ID: MRT4577_70710C.1.pep
MKYSKEDKPERAGGAGAGSRAVPVALVVVVLCAFSFYLGGIYSTERSLLDSIQPAPTALLALGAATTTRRPSDDGQARPALASTAAVAFPEXSXDYQDYTPCTDPKRWRRYGTMFPQRRRRVRGPD

SEQ ID NO: 337218 - protein, 196 aa, Zea mays
  unsure (1)..(196): unsure at all Xaa locations
  Clone ID: MRT4577_70711C.1.pep
MLASRMPMYTTLLDGDDRRGKDRLGVGHMAPMTLYGAVVPWNVTRYACSLXEDGSEYKITPIIFSPAEHKSRELFERISYVQVASLQDGDLYLFKALVCCKHAGHKNKADLLKEGDLVEGSVEDVWIWVEANQIAAAVNTITVQDVMRLMLGQSTFHKGDADHLXKLKKTIDAYXHSCTECXYHAGDCLRLADLNH

SEQ ID NO: 337219 - protein, 153 aa, Zea mays
  unsure (1)..(153): unsure at all Xaa locations
  Clone ID: MRT4577_70712C.1.pep
STARKISPRGRGILTVSLAPRDNHEAQVQFALERGIPAILGIXSTQRLPFPSAAFDMAHCSRCLIPWTEFXXLYLLEIHRVXRPGGFWVLSGPPVNYENRWHGWNTTXQAQKADLDRLKKKLAKMCLKLYSMKGDIVVWKKFFKACFNKLTPG

SEQ ID NO: 337220 - protein, 611 aa, Zea mays
  unsure (1)..(611): unsure at all Xaa locations
  Clone ID: MRT4577_70713C.1.pep
MKYSKEDKPERAGGAGAGSRAVPVALVVVVLCAFSFYLGGIYSTGRSLLDSIQPAPTALLALGAATTTRRPSDDGQARPALASTAAVAFPECPADYQDYTPCTDPKRWRRYGNYRLSFMERHCPPPPDRQQCXLVPPPKGYKPPIRWPKSKDQCWYRNVPYDWINSQKSNQHWLVKEGDRFRFPGGGTMFPNGVGAYVDLMQGLVPGMRDGTVRTALDTGCGVASWGGDLLGRGILTVSLAPRDNHEAQVQFALERGIPAILGIISTQRLPFPSAAFDMAHCSRCLIPWTEFGGLYLLEIHRVLRPGGFWVLSGPPVNYENRWHGWNTTAQAQKADLDRLKKMLASMCFKLYSMKGDIAVWQKSADACYDKLTPVTTPAKCDDSVDPDAAWYVPMRSCVTAPSPKYRKLGLNATPKWPQRLSVAPERISVVPGSSAAAFKQDDARWKLRVKHYKTLLPALGSDKIRNVMDMNTVYGGFAGSLIKDPVWVMNVVSSYGPNSLGVVYDRGLIGVNHDWCEAFSTYPRTYDLLHLDGLFTAESHRCEMKYVLLEMDRILRPTGYAIIRESTYFLDSVAPIAKGMRWSCEKHSSENKADKDKILVCQKKLWAGKQ

SEQ ID NO: 337221 - protein, 167 aa, Zea mays
  unsure (1)..(167): unsure at all Xaa locations
  Clone ID: MRT4577_70714C.1.pep
GPQRRTCFRRDDGRCENGSSLAPAASRPYPLRSPSRARAAAHFCAHRRRGRPTGKIPGKGKNPLGAFPPPFSPGGGXPPPFFXKKXKKPPPGEKKPGAVFPPRAPPPPPPKKIFFPPPPPPXFLNKKKKKNPFFVFGGGXKRGGGGPPPPGPXPPRPAPPPPPGRGG

SEQ ID NO: 337222 - protein, 118 aa, Zea mays
  unsure (1)..(118): unsure at all Xaa locations
  Clone ID: MRT4577_70715C.1.pep
KEPXGXGKGGXEVYXRXXRPGXEEIFFFXQXXXXXDRGRGTXEAPTKGNPRGNQXXXPEAXXXXXXXKXXXXXEPXXXKDXTXXPXGPXTXKDAXXXXNXGDSXXTXHXXXAGSXHKD

SEQ ID NO: 337223 - protein, 179 aa, Zea mays
  unsure (1)..(179): unsure at all Xaa locations
  Clone ID: MRT4577_70716C.1.pep
MDPSDSNSAAGGKTQNVTVPPVEGVAGGGTSYGWVDGGLRGTNIGAGVIDPTKVHSDDLLHVWSMPSTANVSQQEAPRPLEKVNLLAARNERESFQIALRPKVSWATSGIAGSVQIQCTDLCSSSGDRLVVGQSITLRRVVPILGVPDALXPIDPLSPPISIQPGETAAVWVSVNGPCG

SEQ ID NO: 337224 - protein, 193 aa, Zea mays
  unsure (1)..(193): unsure at all Xaa locations
  Clone ID: MRT4577_70717C.1.pep
SPPGRHATVGGKTQNVSVPPVEGVAGGGTSYGWVDGGLRGTNIGAGVIDPTKVHSDDLLHVWSMPSTANVSQQEAPRPLEKVNLLAARNERESFQIALRPKVSWATSGIAGSVQIQCTDLCSSSGDRLVVGQSITLRRVVPILGVPDALVPIDPLSPXISIQPGETAAVWVSVNGPCGQPAGXYEGEIFITAV

SEQ ID NO: 337225 - protein, 367 aa, Zea mays
  unsure (1)..(367): unsure at all Xaa locations
  Clone ID: MRT4577_70718C.1.pep
MDPSDSNSAAGGKTQNVSVPPVEGVAGGGTSYGWVDGGLRGTNLGAGVIDPTKVHSDDLLHVWSMPSTANVSQQEAPRPLEKVNLLAASRERXSFQIALRPKVSWATSGIAGSVQIQCTDLCSSSGDXGVPDALVPIDPLSPQISIQPGETAAVWVSVNVSCGQPPGLYEGEIFITAVKTELDSRTESLPKSEKCRLYRELRSCLDLTGPRDYSSPEEMVQRLTSASTVLXXRVLDNPALQDCQENNGFGDMMDEDVINNISVRLKLSLTVWDFTLPVTPSLPAVFGISETVIEDRFCLEXGTEGWYSALDHHFRWLLXYRISPFFCRWGDSMRILAYTCPFXAADHPKANEYYSDPRLAAYAVPYA

SEQ ID NO: 337226 - protein, 141 aa, Zea mays
  Clone ID: MRT4577_70719C.1.pep
RSSQHVISTLYLDVAAARPDLHQLSVKSAGPRPSRTVLRDRLRFRLCAIERYVFLIRWCDLCATNLLSPSWCCVHVGSARTRGSAITIRWPGRRAIRGSLRRRRPCIRWQQAACRGNVLLLMSDTSGRRALASGTGPAFGR

SEQ ID NO: 337227 - protein, 72 aa, Zea mays
  Clone ID: MRT4577_7071C.1.pep
NKHPSDAFTVRGRNASRDVKNVRMPVDSRHVAVDDEASEREAEVLVHVVLLLHHLPVASTGRQRHHPPMAVG

SEQ ID NO: 337228 - protein, 193 aa, Zea mays
  Clone ID: MRT4577_70720C.1.pep
PRASAPLLPGAWSDVDPLLEAPSAGFPASFSFPARRLHCSRRRPACWRAHAPCRVPARRPDPLLLSLQARSISSARWTLQPWSPYAPSPLFACRHDSPRCPSLCAQPRAPCSPLPCCTPLSTVEKLSPSVNALACHSVASPDTQWSPSLDSGVAGHRVAHLGHVPLRAQHLGVASDPGTLNPQQSPWLLQPRP

SEQ ID NO: 337229 - protein, 101 aa, Zea mays
  Clone ID: MRT4577_70721C.1.pep
KIHESLKKASNGLGSDPWPSMNTGSTPTLFIYDIFTRGHAGDPPPYLFVWNFLWVGQGRSPGWASRAARAPNSFGVLGWVNPALGGGWVRSFWWGVARFGG

SEQ ID NO: 337230 - protein, 211 aa, Zea mays
  unsure (1)..(211): unsure at all Xaa locations
  Clone ID: MRT4577_70722C.1.pep
MGATRADADEKEEGVMATDFFWSYTDEPHASRRREILAKYPQIKELFGSDPLAFIKIAAVVSLQLWTATLLRDAGWSKILPVAYFFGSFLNHNLFLAIHELSHNLAFATPSLNRWLGIFANLPIGVPMSVTFQKYHLEHHRFQGVDGIDMDIPSQTEAHVVKNTVSKSIWVVLQLFFYALRPLFLKPKPPGLXEFTNLTIQVALDAAMVYL

SEQ ID NO: 337231 - protein, 657 aa, Zea mays
  Clone ID: MRT4577_70723C.1.pep
MDPSDSNSAAGGKTQNVSVPPVEGVAGGGTSYGWVDGGLRGTNLGAGVIDPTKVHSDDLLHVWSMPSTANVSQQEAPRPLEKVNLLAARNERESFQIALRPKVSWATSGIAGSVQIQCTDLCSSSGDRLVVGQSITLRRVVPILGVPDALVPIDPLSPQISIQPGETAAVWVSVNVPCGQPPGLYEGEIFITAVKTELDSRTESLPKSEKCRLYRELKSCLDLTGPRDYSSPEEMVQRLTSASTVLRRVLDNPALQDCQENNGFGDMMDEDVINNISVRLKLSLTVWDFTLPVTPSLPAVFGISETVIEDRFCLEHGTEGWYSALDHHFRWLLQYRISPFFCRWGDSMRILAYTCPWPADHPKANEYYSDPRLAAYAVPYAPILSCTDAAKNSLRREVEILKSKPHWSKAYFYLWDEPLNVEQYDMICNISNELRSYAPDVRILTTYYCGPSGSELAPSTFEAFAKVPNVLRPHTQIFCTSEWVLGTREDLVKDIVAELRPDLGEEWWTYVCMGPSDPQPNWHLGMRGTQHRAVMWRVWKEGGTGFLYWGSNCYEKAMIPSAEICFRRGLPPGDGVLFYPGEVFSSSHEPVASTRLERILSGMQDIEYLKLYSSRYGREEGLALIEKTGMYLGPDRYTLDHGPVDVMRGEVYRTCRS

SEQ ID NO: 337232 - protein, 72 aa, Zea mays
  Clone ID: MRT4577_70724C.1.pep
IRLEPVLQDHFFCPGHTFRNRGILKLLVGQQTTTGLLTGSKCCLTTIQRMHTTHDFIPSSAPMPLTRLQRLR

SEQ ID NO: 337233 - protein, 54 aa, Zea mays
  Clone ID: MRT4577_70725C.1.pep
EPATSSALGRSRSSRNGTITLPPANRPWRRITALPRLEELHHLWTVVAMLCAAC

SEQ ID NO: 337234 - protein, 149 aa, Zea mays
  Clone ID: MRT4577_70726C.1.pep
MSREVSNKNEKIPWERSTKKSAESTSSKRNECKMVKSNHIPFQCPRIPKHTPLLSIPLGKPPQFDGMNLPGKDDEDYDSDEVAQTIHRNTQATTVLLASLCRDEFNKVNGLQMAKEIWGALKTTHEGGKITKMELIEGELGRFTINKGE

SEQ ID NO: 337235 - protein, 554 aa, Zea mays
  Clone ID: MRT4577_70727C.1.pep
MNDAGEAEAQELAPPGASAAAGLQGRAEVDTSTPFKSVREAVDRFGGSAAWSSDLIKRMFALPPSPKKQEGGDELADLEEQTAQLEKELGVKERETLDVLKELESTKKVVADLKLKIQNEGAGAFCIPEESVRGQAELPTAAEEVAEVQPENAETDVVMGALHVQLHQSPGTSVLKGLEQAKANLNRTTSDLAAIRASVESLRNDIAKERILVERSREKVCANTTLIASLEDELNRTAQKLQTLRDLQRRRDDQSDIFIEIKKMTSELEQLRNAASAAKSEAAMLSAEIEQMRASIGTAEVRCRAARKIEEAARAAEALALAEIKILLRNEASVEDLQGMEDVSLSLEEYSELAAKAQEADERSRKKIDAAMVQVDEANRTESDSLRKLEEARLQVEECKKALQDAQKRVDAANRGKSAVEEALRRCRSTTGHRRRSVHDPPRFKHPAPRSRDSQNMDIVGVSKGPLKPTLSIGQILSMKLMGPDGYDKSVWDDASEASTMSLGHILNRRHAVVYSSDATAQKKFPGKRKKFAFTGLSIFLARQAKRKKEKGSH

SEQ ID NO: 337236 - protein, 70 aa, Zea mays
  Clone ID: MRT4577_70728C.1.pep
QKGAEPSLVQAFVDIIAELRSQEVALFQSPVVKRTSDRHLLYHPLGNGDVVTSLILYSVHQDRSYNLSFQ

SEQ ID NO: 337237 - protein, 118 aa, Zea mays
  Clone ID: MRT4577_70729C.1.pep
MAASNFMGSSSRLRVGLLPSVTPHLGRRALAARASADSGGGGPVRVRFAPSPTGNLHVGGARTALFNYLFARSRGGKFVLRVEDTDLERSTKKSEEAVLSDLSWLGLDWDEGPDFGAD

SEQ ID NO: 337238 - protein, 57 aa, Zea mays
  Clone ID: MRT4577_7072C.1.pep
RAKEAPMQMKPPPVGGSNTGLLGLEENVGEPQENTKSPPAGDVSPKRPSLWGGQQPP

SEQ ID NO: 337239 - protein, 129 aa, Zea mays
  unsure (1)..(129): unsure at all Xaa locations
  Clone ID: MRT4577_70730C.1.pep
XGTSPHERRRRGRGARSRPTPAPPPPPACKAWAEVDTSTPFKSVREAVDRFGGSAAWSSDLIKRMFALPPSPKVANLCPRPAPPPQMLCLGYLPLVESCVWCVVSCFWLVRRSIVSSVVPRFVGNTADS

SEQ ID NO: 337240 - protein, 85 aa, Zea mays
  Clone ID: MRT4577_70731C.1.pep
SDREMHTEALCTAPCTERLTDAAVSAAVTPPRDIAPGASSWLLVGCAPEAWRSVRGTAHAGTERVESRPLYRIGTLQSARSFPHS

SEQ ID NO: 337241 - protein, 174 aa, Zea mays
  Clone ID: MRT4577_70732C.1.pep
MDVSDQSVRLTIEAQPSDPAVTPGFMAATPFEPQLSDSPPRPSVAADDGKDDDNNEASCSARGRLDDGAAGPERRLTLPALRLAVLEKAASGLGALGFIWATVVLLGGFAITLERVDFWSVTAILLVEGARIFSRSHELEWQHQATWSLSLVDAGRSSVRLVARSFRFVSRAGG

SEQ ID NO: 337242 - protein, 42 aa, Zea mays
  Clone ID: MRT4577_70733C.1.pep
TFYWGPPSSYIGMLRQYLTTPDVVHHVVFHVLCTHVCGRVAA

SEQ ID NO: 337243 - protein, 123 aa, Zea mays
  Clone ID: MRT4577_70734C.1.pep
ALAFLHALTPFSHFRLSGSQCVIVSLGYGVAGTVFITSYPVIRQYLHSAYAPPHPSSCLSCLMALVVPCGCSVHCALVCSMPRPSSCFLFSLRVSDVDWRWNSMMRDTFIVSVSVFNLCRGRG

SEQ ID NO: 337244 - protein, 61 aa, Zea mays
  Clone ID: MRT4577_70735C.1.pep
KKTKSALQQAMTCLLSTIHFAADSCWKGIFLQRTVKCLRYMHLASEVKRRLVSSFFSLPTC

SEQ ID NO: 337245 - protein, 108 aa, Zea mays
  unsure (1)..(108): unsure at all Xaa locations
  Clone ID: MRT4577_70736C.1.pep
QRRLKTNKAPKEKKPSAAXKKPAAHPPYAVMIGEAIAALKERKGSSSEAINKYVXERNHCGKLPTNFRKQLNVQVKKVAYVSKLTRVKNCLKLPCTDAKPKAGKPKAP

SEQ ID NO: 337246 - protein, 39 aa, Zea mays
  Clone ID: MRT4577_70737C.1.pep
DMDGPQEPKLWGWHNKRICKGHILKTQEASGVFKLNSHN

SEQ ID NO: 337247 - protein, 295 aa, Zea mays
  unsure (1)..(295): unsure at all Xaa locations
  Clone ID: MRT4577_70738C.1.pep
MPTNTNVTPQATPHTESCSPIFDATPQIKSPGGVQQAAETDLPDNGPCFDQTPSEHVDQISLDPEMQTVLALREYLCDTQSDTSSHYSTLRNRNDIVGTLNLLMNLYCTLLDNALPETDEMDKCKAIMVPMVSRGHWTLYVVNTVKKCIHILDSNPYGATLGGTTWKEYHFAQLDLGGRKLPXVKVIMSRLNKAIQHVRXHDXFPKFGNFAIDLCPNCPNMTAGSNDCGFYVMGYILFYDCVEGSLRSDIEAGNTSEIRSLALHYITFHPKNKALLLLEDIQRFKVKWMQFSLDM

SEQ ID NO: 337248 - protein, 114 aa, Zea mays
  Clone ID: MRT4577_70739C.1.pep
QLPQRWRGQTLVIWVVFLTKILVLQKKFDPQLVGRVNYANKSRYVPTWLRQDGHINIYPALDEYTTPQRGASTSEEKKKFVIHKKNPTYLALPGRQIKNNPRCGLGVRSILKPN

SEQ ID NO: 337249 - protein, 194 aa, Zea mays
  Clone ID: MRT4577_7073C.1.pep
RPSLCTAAPQPTRASVRKSKSSALSLTHARIDRSSSTHRRRRQINGQLTKVDPRRRHGKRPLPADEEEEEEEEELPPPPAKYEQLDQEEKHHVVVSQLQAGATFSGGRGSSSSSVAGPSPEAYAQYYYSARADHDASAVASALAHVIRASPDQLPPQQAACLYGAAGAPVLRQGEGDHPQPQAAAHHHPGGHVA

SEQ ID NO: 337250 - protein, 223 aa, Zea mays
  unsure (1)..(223): unsure at all Xaa locations
  Clone ID: MRT4577_70740C.1.pep
MDSATSGAMELVAALLRGRVPPELGGDGAEGRALVATLAAAVLGAALFVLWRRAAAGKKRKREAAVAAAEATQAKARGGKAAEEEKPADDGRKNVTVFFGTQTGTSXGFAKAXXXEAKSRYYKASXKVXDLDXYXAXDEEYXXLKKEKLXLFFXATYGXGXPTYNXARFYKWFTXGNXXXVLLNXFXYTXFXLGNRQYXHFNKVXKVXDXILTEQGXGKRLVP

SEQ ID NO: 337251 - protein, 77 aa, Zea mays
  Clone ID: MRT4577_70741C.1.pep
YLSVPLKDLQSSVFGYEHRHRYISSPPPFKPVYPPHDPPHHVVRSLGPSSHVSFECRRQEFRLSSSSASNRSTPQPP

SEQ ID NO: 337252 - protein, 91 aa, Zea mays
  Clone ID: MRT4577_70742C.1.pep
IGPCLDPKKPGFGTPRLRAGKFRAKGHTQTKGQGWVFHYPGKIPHFFFLKGKNQVGFPFEVFCLRGFKKKKKKPKKKKKKQKKKKKKKKKK

SEQ ID NO: 337253 - protein, 118 aa, Zea mays
  unsure (1)..(118): unsure at all Xaa locations
  Clone ID: MRT4577_70743C.1.pep
RVSFLSVSVILSVLVHVPVVPLFLGHSCSPVSYCNSRIHAGDVAVHDALDRADRTDYVLILIRYHATYVALGAHAQGELGAEAVTVIDAGWMDGSCECASEPSRGIGRFLLXMIRPFL

SEQ ID NO: 337254 - protein, 144 aa, Zea mays
  unsure (1)..(144): unsure at all Xaa locations
  Clone ID: MRT4577_70744C.1.pep
IPGGCHSNGGWPSSQPLVSSYCSNKQRVTXLTAGKQQLAASLFVSPPTKADQKPQASPKTAKDIPSTHKVTTTNVAAHSDNQQVIPADAPPPDLLDLRHQTDPSNRPSPDPFSQLQGLLGPTSAAPALSRTPSTTTNTSKPPYL

SEQ ID NO: 337255 - protein, 144 aa, Zea mays
  Clone ID: MRT4577_70745C.1.pep
VGVVQGALVRAGRLRAVLAHGLPVGVGVGVHVARAGGRAQPDVVLVVGGVVARVRRPLPVLRDQEVLAWLAVSMVAVVELRRATAQLVALEVLGCKVVHQRMTALARHVDGINPVRPRNALVSPRPWLHSCVLVQRSGTSLEPN

SEQ ID NO: 337256 - protein, 44 aa, Zea mays
  Clone ID: MRT4577_70746C.1.pep
VITPEKHNPVSLWYALNLKYHSPLWYASNPYRKVYKLYDRCWND

SEQ ID NO: 337257 - protein, 69 aa, Zea mays
  Clone ID: MRT4577_70747C.1.pep
VTCIMGSMRVRSCRYARTANRYYKLNKPACSPLRIQLTIQERRNVQKVHMLYQQHGWYPPFIVIDRDRP

SEQ ID NO: 337258 - protein, 54 aa, Zea mays
  Clone ID: MRT4577_70748C.1.pep
ICSNRSDEITSSLSKKPRCTIGWLKRGDRIMNKARDLRLFVPFSFFFFYPAARA

SEQ ID NO: 337259 - protein, 258 aa, Zea mays
  unsure (1)..(258): unsure at all Xaa locations
  Clone ID: MRT4577_70749C.1.pep
MEVKVLSSRLVKPAYNAGGAAPPASLDDYIPLSIFDRVTYNMQMAIIYAFAPPAPPTAAIVKGLATVLAQYRAFAGQIGEAPDGTPALLLNDHGARVVEATVDDANLVDLAPAKPTPELLLLHPDMTHGLQEVVLLQLTRFRCGSLAIGFTSNHVAADGHATSNFLVAWGRATRGLPTGLPPSVYYQPGQFKPRPSPGPGRVVDDDFDHRSREYYHLPSPAADNNHGYGYGDEDVIDSIVIHKAHFTKEFIAXLRSRA

SEQ ID NO: 337260 - protein, 85 aa, Zea mays
  Clone ID: MRT4577_7074C.1.pep
KNPSSPSPVPFRLIPTWTANNLFYRQIMCASARLLKIGASTLTFWVGSPRNRSHPFTSGLGFSKNWLPSEPENKGFGLMCWDPYM

SEQ ID NO: 337261 - protein, 69 aa, Zea mays
  unsure (1)..(69): unsure at all Xaa locations
  Clone ID: MRT4577_70750C.1.pep
DQHQLLPFILVXSSSPASFLTQPQMAACYQTVGPSAGTLLQVKHLLGLKQLAWTKPAGFLQQPICGGAI

SEQ ID NO: 337262 - protein, 204 aa, Zea mays
  unsure (1)..(204): unsure at all Xaa locations
  Clone ID: MRT4577_70751C.1.pep
PPPKGPCPGPPPPGGPPPRPFSPTKKSPPNCPKFGSRPKGAPXPKFRGPPPPKGPVESGGKPKGLGIGPPPQKFPGLNFFFYVHKNPFSLPPLLFFPPRGPFFFSKKKKKIFRGCVWGPKKGGRPDGGVILTPGIQNSPWGGGPFPPKKTPLFRLERGVFFLFFPPCYCQRGGRVVKVFPPQQTGGFPGGKKNSPQSLFGFFCG

SEQ ID NO: 337263 - protein, 75 aa, Zea mays
  Clone ID: MRT4577_70752C.1.pep
EPPRGPARPVFAPRQTNLPMNSDIRALLRPCSVESDSRGFVFLSHRNCPRPLNKTCFCILQPKTQTRIGSRLWVA

SEQ ID NO: 337264 - protein, 123 aa, Zea mays
  Clone ID: MRT4577_70753C.1.pep
IRVNSQPGVGLRDGEGWFEPPDLCNHNQPAYCTQTLPSIREQGEQPCILMCNYTWHLPLSILQVATEYIYERCLTTRAAKGSILSGGMLVHKPSPKEQKLWPGSKDLKTDSGITFAAKQSAPG

SEQ ID NO: 337265 - protein, 70 aa, Zea mays
  Clone ID: MRT4577_70754C.1.pep
SGVLKFAWKADSSRRRKSFMPRCNICRAFEFTSSAPCDSAQIYTLTELATSISTPLVSTVTLAPSSSCWP

SEQ ID NO: 337266 - protein, 487 aa, Zea mays
  Clone ID: MRT4577_70755C.1.pep
MNSGQGKTKRYGVKDRLKDLKSGQDFWERDSRKGKCGQPSSGQKYKENWASLLHLSGDHPGRRTGDDVRSYRMPPNELAELKMQLQDLLEKGFIRPSSSSWGCLAIFVKKKDQTLRICVDYRPLNEVTIKNKYPLPRIDILFDQLTRSRVFSKIDLRSGYHHIRIRPEDIPKTAFATRYGLFEYLVMSFELTNAPAHFTYLMNSVFIPELDKFVVVFIDDILIYSKNEEEHAKHLWIILMRLREHQLYAKFSKCAFWLEEIQVLGHVLSVKGIAVDPSKFKDILEWKSPTSVHQVRSFLGLASYCRRFISDFSKIVKPITGLLKNDVKFDWSSKCNEAFERLKVLLTTALVLAQPDIEKPFDVYCDALGSGLGCVLMQEGRVIAYASRQLCRHEEHYPTHDLELATVVHALKIWRHYLLGNICHLYTDHKSLKYIFTQSELNMRQRRSLELIKDYDLEIHYHPGKANVLADALSRKSLLSLSHRKIT

SEQ ID NO: 337267 - protein, 62 aa, Zea mays
  Clone ID: MRT4577_70756C.1.pep
STILPPSYHISLLFFFNSNFNHLYPNFHTPIYYFYTYNFSHNSYYNNLIINDFTNVLLPFYP

SEQ ID NO: 337268 - protein, 120 aa, Zea mays
  unsure (1)..(120): unsure at all Xaa locations
  Clone ID: MRT4577_70757C.1.pep
SIKAXXANGGFXRRXERVTKSRKXRXXPSXXSXRVGXXTLESRGXLAVGKAKAHSPKRLVAXVAQSKGPPTKXNGYXHISRTPSXPSDKTPKEXXNPRXGLGKRGGGEKPGRRGRTXVGG

SEQ ID NO: 337269 - protein, 204 aa, Zea mays
  unsure (1)..(204): unsure at all Xaa locations
  Clone ID: MRT4577_70758C.1.pep
MAPGLQRFIDIADDGTPQLDAASGEELVRVDRTVAVALGPRSPESPGTLFVTTRRVIWLSEAEKGKGYAVDFLAISLHAVSRDLEAYPSPCIYTQIEAAVGTEEEAGESNPEANELELSRVSEMRLILADPGQLDALFDVFCHCAELNPDPNAECNGENGWIHGEDMSNGDWIHDDVXWLMLQINDQRFEDAEEEQESHENNGH

SEQ ID NO: 337270 - protein, 85 aa, Zea mays
  Clone ID: MRT4577_70759C.1.pep
RRISSARPAVSPCKFQPPACSCCSALIAELPFALSSLPTLSSLFPCFPRARLRRPRQLARPATLYIYMLPSRIIIKPVEPRSSLL

SEQ ID NO: 337271 - protein, 66 aa, Zea mays
  Clone ID: MRT4577_7075C.1.pep
YKYPSLTKQNKKWHGLQVAIAFHPAEHAEYLLIRYVLHMESAHDLKLTTDPRDMNILLDDYQVLHR

SEQ ID NO: 337272 - protein, 130 aa, Zea mays
  Clone ID: MRT4577_70760C.1.pep
MSASEFRIPYQQVSPSQPAENVNQFKTCRCGEGDPNSTSETGDSPPASCPNCQVLKSGHLLLSSKGIGWTSWKKRWFVLTRASLVFFRSDPNVPPPRGAEPIVTLGGIDLNNSGSVVIKEERKLLTVFFP

SEQ ID NO: 337273 - protein, 230 aa, Zea mays
  Clone ID: MRT4577_70761C.1.pep
MAPGLQRFTDIADDGTPQLDAASGEELVRVDRTVAVALGPRSPESPGTLFVTTRRVIWLSEAEKGKGYAVDFLAISLHAVSRDLEAYPSPCIYTQIEAAVGTEEEAGESNPEANELELSRVSEMRLILADPGQLDALFDVLCHCAELNPDPNAECNGENGWIRGENMSNGDWIHDDVDMVDENVPQFFNANPIGQNGGYDLSRSVFELQINDQRFEDAEEEQESHENNGH

SEQ ID NO: 337274 - protein, 83 aa, Zea mays
  Clone ID: MRT4577_70762C.1.pep
DGFPHVGDHSLDLSLVDGTVVPTRVTVASSAIAGPVPGGAAVAPATVHGYVGCAASACKSADRNEAGQDSDMLVSHAVIRVRL

SEQ ID NO: 337275 - protein, 51 aa, Zea mays
  Clone ID: MRT4577_70763C.1.pep
FTCWPPSSPASMPYPCRNLQSSRPVVSISCLCLHPVGSGSYLQGQAGSALQ

SEQ ID NO: 337276 - protein, 122 aa, Zea mays
  Clone ID: MRT4577_70764C.1.pep
LKSLLIVNCPELRSLETCIVDLPSLESLFLYDCESLVSLPRARAGGPQEYSSLHELTIRRCPGVKSLPSALQQRLDNGLMDKTNLDFRLCQGEGVQLSPGPVVGEAPRDPHALAACHPQRHR

SEQ ID NO: 337277 - protein, 124 aa, Zea mays
  unsure (1)..(124): unsure at all Xaa locations
  Clone ID: MRT4577_70765C.1.pep
DNKTKKKKEGTRNGKKKKKRKEKKKKERERKGTKKKRGXKGKTREKKXEKKKEQTRKQKKEGGGGPQNAKKKGLGHKKXEFRERKKRAQENQGPNCPGGGEEKPRGSILKVGLSLLGATFHYGI

SEQ ID NO: 337278 - protein, 231 aa, Zea mays
  unsure (1)..(231): unsure at all Xaa locations
  Clone ID: MRT4577_70766C.1.pep
MAVSFANVNAEAGLKKLDEYLLTRSYITGYQASKDDLAVYSSFLAAPSSKYINGSXRWFNHIDALLRLSGVTAXGXXVKVEPSAVPSASILDVADGQAPAADEDDDDDVDLFGEETEEEKKLLKXRAAAAKASGKKKESGXKSSVLLDVKPWDDETDMAKLEEAVRSVQMEGLLWGASKLVPVGYGIKKLQIMMTIVDDLVSVDTLIEDYLCAEPVNEYVQSCDIVAFNKI

SEQ ID NO: 337279 - protein, 83 aa, Zea mays
  Clone ID: MRT4577_70767C.1.pep
GQQQSCLSSRTLKPTRLLIWTRRLWGPGAPRKSTSMTGEASVRTSYGSLWPGCWSRTKRTLCAFDIHNEITPPIGHGCKRVGC

SEQ ID NO: 337280 - protein, 214 aa, Zea mays
  Clone ID: MRT4577_70768C.1.pep
EAGLKKLDEYLLTRSYITGYQASKDDLAVYTSFSAAPSSKYINVARWFNHIDALVRLSGITAEGQGVKVESSAVPSAPTPDVAEAQAPVAEEDDDDDVDLFGEETEDEKKAAEERAAAAKASGKKKESGKSSVLLDVKPWDDETDMAKLEEAVRSVQMEGLLWGASKLVTVGYGGGWAMHQPNLSIAICLLCVASDIAVSIFGSYSSRMYQYQS

SEQ ID NO: 337281 - protein, 229 aa, Zea mays
  Clone ID: MRT4577_70769C.1.pep
MAVSFANVNAEAGLKKLDEYLLTRSYITGYQASKDDLAVYSSFLADPSSKYINVARWFNHIDALLRLSGVTAEGLGVKVEPSAVPSASILDVADGQAPAADEDDDDDVDLFGEETEEEKKAAEERAAAAKASGKKKESGKSSVLLDVKPWDDETDMAKLEEAVRSVQMEGLLWGASKLVPVGYGIKKLQIMMTIVDDLVSVDTLIEDHLCAEPVSEYVQSCDIVAFNKI

SEQ ID NO: 337282 - protein, 151 aa, Zea mays
  unsure (1)..(151): unsure at all Xaa locations
  Clone ID: MRT4577_7076C.1.pep
HAFGRCSRTPTASWRRGARSPTRCTAAAGASAARRRRPPRPRRRPPPPPGPRAPGPSAAAPTTPTALPCASPAPPTPTTATTKNATPTRPTTTVGPPRRITRAAAGGQPQWTKATXGPAAAPGAHGRRLGRPLGEGQHQRXGPPGCSVPCP

SEQ ID NO: 337283 - protein, 111 aa, Zea mays
  unsure (1)..(111): unsure at all Xaa locations
  Clone ID: MRT4577_70770C.1.pep
NAQASAHASGGDDFRALVFEFMPNYSLDRWLGVNPRSEEPRIVKSLSVIQRLNIAVDIADALXSLHTISLAHIVKXDVKPSNVLLGEDMRAVVGDLGLAKLLHESGSHDTC

SEQ ID NO: 337284 - protein, 208 aa, Zea mays
  unsure (1)..(208): unsure at all Xaa locations
  Clone ID: MRT4577_70771C.1.pep
MEVSFANLSSEVGLNKLDEYLLTHSYITGYQASKDDLVVYTSLSSAPSSKYINVARCLNHIDALVRLNVMTAQVQGEKVESSVGPSVPTPDDAEAQDPVAEEDDDDDVDLFGEETEHENKAAEERAAAAKASGKKKESGKSSDLLDVKPWDDETDMDKLEEAARSVXMEGMLCGASKLVTVGYGIKKLQIMMPIVDDLVSVDTLIEDY

SEQ ID NO: 337285 - protein, 128 aa, Zea mays
  Clone ID: MRT4577_70772C.1.pep
HASASFQDDLVASTSSSTGTGSKYINVTRWFNHIDALVRLNGITAEGQGVNVESSAVASAPTPDETEAQAPVAEEDDDDDVDLFGEETEYEKNAAEERAATAKAFGMKIESWKSSVLLDVKPWDDETD

SEQ ID NO: 337286 - protein, 213 aa, Zea mays
  Clone ID: MRT4577_70773C.1.pep
LDEYLLTRSYITGYQASKDDLAVYTSFSSAPSSKYINVARWFNHIDALVRLSGITAEGQGVKVESSAVPSAPTPDVAEAQAPAAEEEDGDDVGPFGEETEDEKKAAEERAAAAKASGKKKESGKSSVLLDVKPWDDETDMAKLEEAVRSVQMEGLLWGASKLVPVGYGIKKLQIMMTIVDDLVSVDTLIEDHLCAEPVSEYVQSCDIVAFNKI

SEQ ID NO: 337287 - protein, 69 aa, Zea mays
  unsure (1)..(69): unsure at all Xaa locations
  Clone ID: MRT4577_70774C.1.pep
WSRVGLLFPPVGRVSAASXRXSAPAMAPPVPPLFSSXXSPPLVLXVVGAGSLXGLLVVEPPERSRGSSR

SEQ ID NO: 337288 - protein, 99 aa, Zea mays
  unsure (1)..(99): unsure at all Xaa locations
  Clone ID: MRT4577_70775C.1.pep
CVQILRGVCFVITGKRNLGGQAPLVWSKNYCTKKYDCXHLPNSLGMDFVNNDDASVVTLLNYNFLHMNMYRYKDILINDVTLTRPQDSPNTDNIHIADS

SEQ ID NO: 337289 - protein, 185 aa, Zea mays
  unsure (1)..(185): unsure at all Xaa locations
  Clone ID: MRT4577_70776C.1.pep
GVRAASFANLNIAAPLKTLDEYLPTRSSMSGYHASKDDFVVYTSLSSAASFNYINITRCFNHIDALARLSGITAXGQGVKAESSAVASAPTPYVAEAHAPAAEDEDHDDVDLFGEETEDQKKAAEERAAAAKASGKKKESGKSSLLLDGKPWDDETDMANLEEADRSVQMEGLLWGAFKLVPVGY

SEQ ID NO: 337290 - protein, 149 aa, Zea mays
  unsure (1)..(149): unsure at all Xaa locations
  Clone ID: MRT4577_70777C.1.pep
KADEYLLTRSYITGYQXSRDDLAVYTSFSGGPSSKYINVARGVNHIDALVRLSGITAEGQGVKGESSTVPSAPTSDVAEAHAPLAEEDDHDDVDLFGEETPHEKKAAEEHAASAKASGQKKESRKASPLLYVKPXHDETDMANLDEAAR

SEQ ID NO: 337291 - protein, 79 aa, Zea mays
  Clone ID: MRT4577_70778C.1.pep
SRKSERTDVAICRGEQLWPFPYDLIQREVERYSNAQNRWWPKGAVNMGAFRFINPRLVTAIKGLGPGGIEDIKSLGRAP

SEQ ID NO: 337292 - protein, 229 aa, Zea mays
  unsure (1)..(229): unsure at all Xaa locations
  Clone ID: MRT4577_70779C.1.pep
MAVSFANVNAEAGLKKLDEYLLTRSYITGYQASKDDLAVYSSFLADPSSKYINVARWFNHIDALLRLSGVTAEGLGVKVEPSAVPSASILDVADGQAPAADEDDDDDVDLFGEETEEEKKAAEERAAAAKASGKKKESGKSSVLLDVKPWDDETDMAKLEEAVRXVQMEGLLWGASKLVPVGYGIKKLQIMMTIVDDLVSVDTLIEDHLCAEPVSEYVQSCDIVAFNKI

SEQ ID NO: 337293 - protein, 312 aa, Zea mays
  Clone ID: MRT4577_7077C.1.pep
GVSAGAAFVLSSERAHADGGGSTFRFPGFYSSAPSPAPAPAPAPAAPPPQEGGGAEEAPKVSTQHPRTSAAGFDPAPLERGVEAINKLKQASDPKKLFEFMKKQEETHQQEIAAKKLELQKALAEIELEQKRVDFEERKKLDQQRAKIKSQMAQYEDELKRKRLQAEHEAQRLRNQELVKMQEESGIRLEQIRRATEEQIQEQRRQTERHRADLEQATISKKAMAEAEGRILVTRQTEDVKRRLILEEINADREKWIQVINTTFEHIGGGLRTILTDQNKLVVAVGGVTALAAGIYTTREGARVVWGYVDRI

SEQ ID NO: 337294 - protein, 65 aa, Zea mays
  Clone ID: MRT4577_70780C.1.pep
KRNPAMDEAFLINVYLRNGYHIVPEDSHSPTGRRSDSKLLPVGPKVISQIESADAYIYAYVDVCL

SEQ ID NO: 337295 - protein, 54 aa, Zea mays
  Clone ID: MRT4577_70781C.1.pep
IPVIAPACPQVRFKVPPKVSFTRNVALLVLVRAHQFVTIHTSSVSLCQSEFRPK

SEQ ID NO: 337296 - protein, 73 aa, Zea mays
  Clone ID: MRT4577_70782C.1.pep
HALTPSVRSFRNSVWSSRTMNIQVSTLPVFSRCSHQPSIMLSNMWASCECLYVYSGLKVSIIRSRSCGRSYRS

SEQ ID NO: 337297 - protein, 122 aa, Zea mays
  Clone ID: MRT4577_70783C.1.pep
MAYDGSSPTKVLRRAIAGRHAMHTPYRMVLSIPGVKGSQPEDYLPKVGKLVELPASRSDRTVERQPQQEIRPPRSLSRPGMSSAMRPECRAKCPTAAPDYLLEDLGDVEGMGHIPGEVGDGG

SEQ ID NO: 337298 - protein, 73 aa, Zea mays
  unsure (1)..(73): unsure at all Xaa locations
  Clone ID: MRT4577_70784C.1.pep
KEEGKGFFVLKIVKKEDXKFELRKFLKDIKANLKKSLNKVRKKWEGGIMGXKSRXKTKAWKKLLAKKIAQRMT

SEQ ID NO: 337299 - protein, 300 aa, Zea mays
  Clone ID: MRT4577_70785C.1.pep
MDIDLFPDIDLDALLASFSGDPAAVSGLIIPSPPPPAPATAHDAEAGSPESVTSRTNPLGEVALSEIERLLMQEGEAELGGEVDGISVDQFFDALYDGEEAKGEREAGASADVDSGRDDVLEVVTPEAGTVEVDGDDPISKKKMRQMRNRDSAMKSRERKKSYIKDLETKSKHLEAECRRLSYALQCYAAENMALRQSLLKDRPLGAPTATQESAVLTETLPLVSLLWLVSIVCLFLMPVLPNRSPAAPSSGGRDLVMAAGKTSSETPEILELILHGRRCKSTRAKIKLCILPFHAGAAC

SEQ ID NO: 337300 - protein, 109 aa, Zea mays
  unsure (1)..(109): unsure at all Xaa locations
  Clone ID: MRT4577_70786C.1.pep
WDHRHPPPPXPPLASRLPAHRPCRSPHPRLPPPPAHLSPPRRRTARRRTGPXIPSXPPRPVPPPPPASGASRSPRAPPPRAGSSGRSPTPATPPPHRAPSPAPAEAGTG

SEQ ID NO: 337301 - protein, 76 aa, Zea mays
  Clone ID: MRT4577_70787C.1.pep
FTQETPQVMNKAKEPTLRLQIKELGAWTVPQKTEEPQTEKEKPSMDAAVIPKKVSSSGEIEGPQTIKGPTGTPQRK

SEQ ID NO: 337302 - protein, 105 aa, Zea mays
  Clone ID: MRT4577_70788C.1.pep
RNRDSAMKSRERKKSYIKDLETKSKHLEAECRRLSYALQCYAAENMALRQSLLKDRPLGAPTATQESAVLTGKTCYPSSNLYSFPKLDESICLPSVSPLWLEPWI

SEQ ID NO: 337303 - protein, 80 aa, Zea mays
  Clone ID: MRT4577_70789C.1.pep
GAVRSDNANVQIGVQVSCSQNHPACFVKPLRHLRGPLFSFGAFDIQAWVLTVIFSREYDPLCNEMGCSFVLIVPVVKGKF

SEQ ID NO: 337304 - protein, 259 aa, Zea mays
  Clone ID: MRT4577_7078C.1.pep
MAAAAKAAAVAVSAGAAFVLSSERAHADGGSSTFRFPGFYSSAPAPAAPPHQQPPPPSGGQREEAPEEAPKVSTQHPRTSAAGFDPAPLERGVEAIDKLKQSSDPKKLFEFMKRQEETHQQEIAAKKLELQKAVAEIELEQKRVDFEERKKLDQQRAKFKSQTAQYEDELKRKRLQAEHEAQRLRNQELVKMQDESGIRLEQIRRATDEQIQEQRRQTERQRADLEQATLSKKAMAAAAVRILVTKHTEDVKRRLLLED

SEQ ID NO: 337305 - protein, 114 aa, Zea mays
  unsure (1)..(114): unsure at all Xaa locations
  Clone ID: MRT4577_70790C.1.pep
FIAPINFSCADSFYHHQTLDNLNLFIKXTKNLFATMLDTHIPYLLVANNTQTPIFLQENGTVILTPHLCQDTYFRLLAINFFGLAKAATPMATIFRGQYLFTGSETTSVWLEVS

SEQ ID NO: 337306 - protein, 120 aa, Zea mays
  unsure (1)..(120): unsure at all Xaa locations
  Clone ID: MRT4577_70791C.1.pep
TRPPTRPAAAAHAEEKCDMSVGKWVREPRGPVYTNLTCPTLPDFKNCHKYGKDPGHLFWRWQPDGCDLPRFEPERFLNVXRGKRMXLLGDSLARNQMDSLLCLLSEVPVLRNGLVPLPIT

SEQ ID NO: 337307 - protein, 141 aa, Zea mays
  Clone ID: MRT4577_70792C.1.pep
SAAARRSSASARQLGASLWEIHDVAREVRRSRRRGGRAIAAGREHGGGGELDQPQSSGGIRRHVADSSMKHHKFDQERSHRIQPFSPASYTSSVGDSNVNLTRSPTRSLGIMGRSMGEGYSLKTSTELLKVLNRIWSLEEQ

SEQ ID NO: 337308 - protein, 90 aa, Zea mays
  Clone ID: MRT4577_70793C.1.pep
TFVFSLILCSFVLAVPYACVPLRTQFLAVQSEIFHRTKKYVLSCRVVLVPQQYCTRYLSVEQVVPLAVLPAGEGPVVAVPAVDGPASRVP

SEQ ID NO: 337309 - protein, 54 aa, Zea mays
  Clone ID: MRT4577_70794C.1.pep
SCISCTVVRPCRSVIMMHLDGQCGLYIFYVFPRLVGIGSRMPMYPLYVQVGVEL

SEQ ID NO: 337310 - protein, 100 aa, Zea mays
  unsure (1)..(100): unsure at all Xaa locations
  Clone ID: MRT4577_70795C.1.pep
MALWMRLLPLLALLALWGPDPAAAFVNQHLCGSHLVEALYLVCGERGFFYTPKTRREAEDLQVGQVELGGGPGAGSLQPLALEGSLQKRGIVQQXCCTSI

SEQ ID NO: 337311 - protein, 267 aa, Zea mays
  unsure (1)..(267): unsure at all Xaa locations
  Clone ID: MRT4577_70796C.1.pep
LRRVLLLNYSVTISLDRSPSSLAQLPSCGRRSADIDPSARCADAYVCACAGEMEEEERGAAAELAAIAGAGPPPKLEDFLGGGANGNHNGRNNSDAGSGDQVVSAATAEMYDSELKFLAAGFLSGATGTTAPTISPAAAPQEQADPKMPVPAPEQKKAVDSFGQRTSIYRGVTRYRWTGRYEAHLWDNSCRREGQSRKGRQVYLGGYDKEEKAARAYDLAALKYWGSSTTTNFPVADYEKEVEEMKHMTRQEVVASLXRKSSGFSRG

SEQ ID NO: 337312 - protein, 122 aa, Zea mays
  Clone ID: MRT4577_70797C.1.pep
QTPQPRSYCANILIYKRCSVETTLPAKNFKSYLFVKLICSLIQFLKILKSRLNLLITDSDLSVIHKLEMTSVSDSDPKEGSHEIFLRMYSLSRKCQSSLLCFNLIETSRPSSEGKPCICISR

SEQ ID NO: 337313 - protein, 71 aa, Zea mays
  Clone ID: MRT4577_70798C.1.pep
STGVYSPGNPYGIPEEIVHSMPRDIKGEGAFGPGSDEAMVEFPREAIKNSQSERLAQKKCAAHHTKKRNAW

SEQ ID NO: 337314 - protein, 99 aa, Zea mays
  Clone ID: MRT4577_70799C.1.pep
VTGHPLRHRQRSFFRPVLDVFLRVLCWPCSIVSRVTHPRHIVQEVRAYLQTVFVCQPAAPRAVYSSDHLRSYLPRWYAGRSVSVLSVVLEHGMFTRGSV

SEQ ID NO: 337315 - protein, 111 aa, Zea mays
  Clone ID: MRT4577_7079C.1.pep
RAIAPPPSPPPTTRRRIRSRFTAPVRCAGPSVTRAGSGNGVARRRRRSPRGCRPSRQRLRLRLRRPRPRCLPPVPRPRPPRRRRRRRRWTAPRPRRARTTSRDAHTEASRL

SEQ ID NO: 337316 - protein, 53 aa, Zea mays
  Clone ID: MRT4577_707C.1.pep
RGYLRFLDDALEYRIHVSGPNHSRTERTRAGTTKTPRCGTADRGPAVAAHGDE

SEQ ID NO: 337317 - protein, 36 aa, Zea mays
  Clone ID: MRT4577_70800C.1.pep
LTVETRTFKVLDNQLKGALQVESEQRRGCIADRLIC

SEQ ID NO: 337318 - protein, 279 aa, Zea mays
  Clone ID: MRT4577_70801C.1.pep
SPFASLADALLAARRIWLDEVDVNGWLEAFAAHPAIGTTSPSVSKWSKEEQSAALSTATDSTAQELAEWNARYREKFGFVFMICASGRTAAEVLAELKRRYTNRPIVELEAAAQEELKITELRLTKLFSLEPTVPSTTIEGPTVQSDKAAGSSNRSRPPITTHVLDIARGSPASGIEVHLEMWKDCSAPPSFNNKDFSGWETLGYSVTNNDGRSGQLMDIVDNIAPGFYRISFNTGKYTPAGFFPYVSIIFEIKENQAAEHFHVPLLHSPFSFTTYRGS

SEQ ID NO: 337319 - protein, 419 aa, Zea mays
  Clone ID: MRT4577_70802C.1.pep
MAGREMRLLERRRAGDDGGEMPSCSSTDGNTSSANASTSSSTTASSGVRRSGGAAEGRETSSRSAGTINLSQEYRLAIHTPSYQEIWDKIHIDGDGDEQREGGFGGNGEDEEGEEGEDRVTLAGVLRPEDEVVDRALADAPDTELTRLAKNYFSSTNQASLLCLSLRRALRRARSLYGPITDLLALIPQSPQLATPHCDCAFDAFLLFDQMPNPFPAPAAGFQCMQRSFSGLKNHLDLRLLSVRRRRRWLRCAKRGSGICLIACATGAAVAGLVLATHAITALLAMAPACAASNSCCCPLAASMKRLQRHMDRLDATARGTYVLNNDVATIERLVGRLHATVESDKMLVRLGLERGRGQHHTIEEVVRQLRKNHPSLQRQLADLAEHICLYFAAVNRARLLLVHHLNAQSDAESESPLS

SEQ ID NO: 337320 - protein, 104 aa, Zea mays
  unsure (1)..(104): unsure at all Xaa locations
  Clone ID: MRT4577_70803C.1.pep
TAPADFRFPTTNQTRHWFTRLXVQYHRPVXAKGDDDAVCEKFXAEYYRSLCPVEWLEKCNEQTGERGRRPMTSSECTARHLQLDHSTSWPHSPTVTFCIPTSRI

SEQ ID NO: 337321 - protein, 332 aa, Zea mays
  Clone ID: MRT4577_70804C.1.pep
MAAPLPLSAEDMLRVNGSRRFAAAMAAASPFASLADALLAARRIWLDEVDVNGWLEAFAAHPAIGTTSPSVSKWSKEEQSAALSTATDSTAQELAEWNARYREKFGFVFMICASGRTAAEVLAELKRRYTNRPIVELEAAAQEELKITELRLTKLFSLEPTVPSTTIEGPTVQSDKAADRIRIIGAHLGAQPQPCANKAPEITGSSNRSRPPITTHVLDIARGSPASGIEVHLEMWKDCSAPPSFNNKDFSGWETLGYSVTNNDGRSGQLMDIVDNIAPGFYRISFNTGKYAPAGFFPYVSIIFEIKENQAAEHFHVPLLHSPFSFTTYRGS

SEQ ID NO: 337322 - protein, 113 aa, Zea mays
  unsure (1)..(113): unsure at all Xaa locations
  Clone ID: MRT4577_70805C.1.pep
MRSGSLPYQYPFNLSCTRATFTFCSVYFSIILLYXMFFIYXSDNCYFYYIFFHYFFLFIIXFYLLIYLILXNFLILLFYIFNLSFIIFIYLLFFIFYIXLYNFSIIILFXFYF

SEQ ID NO: 337323 - protein, 214 aa, Zea mays
  unsure (1)..(214): unsure at all Xaa locations
  Clone ID: MRT4577_70806C.1.pep
MAEQEPTAEQLAQIAAENEEDEHSVNYKPPAQKSIQEIQELDKDDESLRKYKEALLGRVAVSADPNVPNVIVTRLTLVCSTAPGPLELDLTGDLESFKKQSFVLKEGVEYRIKISFRVNREIVSGMKYIQHTYRKGVKIDKTDYMVGSYGPRAEEYEFLTPMEEAPKGMLARXSYNIKSRFTDXRQTDHLSWEWNXTIKREWRTELSWETAGRR

SEQ ID NO: 337324 - protein, 132 aa, Zea mays
  Clone ID: MRT4577_70807C.1.pep
KLSDGVNFSGPGAREQFLGGGGGPPGHGKPSAGRGGCQHYSIVHTGFAELGLTQQKPRIFALSCHFSTSLEAGSSAPSVVGSVLSVATSHPRFFFFGPLTTFVGLWDDHFKSCRNNVFWLASRKISLSTGML

SEQ ID NO: 337325 - protein, 81 aa, Zea mays
  Clone ID: MRT4577_70808C.1.pep
MDPWISSQPSLSLDLRVGLPPLSLHHQAPVAVALPRPKLLVEEEQTQGEEGARPDMAWNRDRRHRRRGCGRRRDMRNCSSN

SEQ ID NO: 337326 - protein, 51 aa, Zea mays
  Clone ID: MRT4577_70809C.1.pep
IGAIGGKLDYPLVHITDSCLSVALGRIQKIPRFGNLAPAVSLMMNPACAIY

SEQ ID NO: 337327 - protein, 39 aa, Zea mays
  Clone ID: MRT4577_7080C.1.pep
EVDGAWKGVWDGGGGVAVLVVWEELTFWIKYKVFVFDYK

SEQ ID NO: 337328 - protein, 141 aa, Zea mays
  Clone ID: MRT4577_70812C.1.pep
MTVGWTWSLDEVSSVGSLTMVDLGNGGALDIDVEVEANANMVPEAEDRRRRGEVGRRDDRWSEEEARAANRGGVKSRRGSEGKHAERGWDGRWIETEERAVDRWGGRGEEEAERQIKRGAARHGRSERPGGETGRGAWQPV

SEQ ID NO: 337329 - protein, 112 aa, Zea mays
  Clone ID: MRT4577_70813C.1.pep
CCSSCSTISLYLSMPHVASRLLALACSCSARGPSPPECVLHKTEKSEIDYIVSSSRSLLCTPYLPALLITIVHAVPRLYLHVFVTDPSCPRDVPRYNTDDFIIQSCFLQTKN

SEQ ID NO: 337330 - protein, 60 aa, Zea mays
  Clone ID: MRT4577_70814C.1.pep
CVLRATEGEAVASIGPATEALCILKQLLAIHKATHGECVQRSKGGLATIELRPMQSECTA

SEQ ID NO: 337331 - protein, 98 aa, Zea mays
  unsure (1)..(98): unsure at all Xaa locations
  Clone ID: MRT4577_70815C.1.pep
MAAMNLYGSVMSWNVTRCSTALDEAEFDYNIVHITSHHHTRPRHIDXNLFSQVPAVQDIELYLFQSIAICKYAGCTNKPELIREGNLEEALMVDVWID

SEQ ID NO: 337332 - protein, 75 aa, Zea mays
  Clone ID: MRT4577_70816C.1.pep
WYSFQISVFTTIINLRAPLNFLIQGEYSKKKKNFLNENGRKKTQLGTPVKFLVRPVHLSKGVLVLVDNCTKLVIP

SEQ ID NO: 337333 - protein, 76 aa, Zea mays
  Clone ID: MRT4577_70817C.1.pep
MLLNPASVLDTIRQHLLEEPPAAADESFGILVADQWSGSLPFRTDDADDDDDPTDEAGQAAGDRTLLGREEERIVQ

SEQ ID NO: 337334 - protein, 88 aa, Zea mays
  Clone ID: MRT4577_70818C.1.pep
MEEGGRHDHDAGDRISSLPDDLLFSILLRIGSIRAAARTSVLSRRWRHVWARLPELRFGTWDEQPGGDVPGLRRRRPRRLLRPGRPPP

SEQ ID NO: 337335 - protein, 91 aa, Zea mays
  Clone ID: MRT4577_70819C.1.pep
NNKVLIEARQKTYVVTDREYGKCSHLYGHGQSLVVHKILACVSLNRGGYLLITCSQMLRVKNKTTQMLMVKDLRPSKHYLPLDIMIFRRRL

SEQ ID NO: 337336 - protein, 133 aa, Zea mays
  Clone ID: MRT4577_7081C.1.pep
KMKWLFPLMPSHLLQYGPDEMQGARHADEAWSRASALQELGGSNDQVRGERRNVLAPDHHGLSSGIRRWTAVQEITNVLWGFSTTDATDVHVLDATIACRGYPYFFQGRGWHCAGGSSGDARLRQQHNVRRLT

SEQ ID NO: 337337 - protein, 157 aa, Zea mays
  Clone ID: MRT4577_70820C.1.pep
MGTVDMCGDGVPLHVMCLGLPCKVRFRIWLMPGWRSLDSKTVRFRADDTTEVATLKALTTFYGYHPLEMMMHPLGLFPAEKRDDPMWCNKALKSDAMMHLIGLAQTAKITLDDREDFVVDLSSELVEKDLQVEQTSNRIQVLEQVEIWDNTIEVLEN

SEQ ID NO: 337338 - protein, 53 aa, Zea mays
  unsure (1)..(53): unsure at all Xaa locations
  Clone ID: MRT4577_70821C.1.pep
XGGRRSITKHNVCEDVESTKIYLWPYITHSSNLYCTSLERETSILAPCFTEKL

SEQ ID NO: 337339 - protein, 84 aa, Zea mays
  Clone ID: MRT4577_70822C.1.pep
AGAGNKKKKKKKKKKKKKKKKKKKKKKKKKKKKKKKKKKKKRQKSRLVSWILQKTKFFLPPKAKEVLQLGIKLGWGLKLKGGEK

SEQ ID NO: 337340 - protein, 57 aa, Zea mays
  Clone ID: MRT4577_70823C.1.pep
RRLCLIAQFVAQFECGLFLAKCPGMLKDICETGIRKSVSVWSELNWFHNNPCKTGKE

SEQ ID NO: 337341 - protein, 56 aa, Zea mays
  Clone ID: MRT4577_70824C.1.pep
PKQPARVEAYHNSAPLAELNRSISLYCKDSTKKTPISKRATRPLNDQAPSVFPFFL

SEQ ID NO: 337342 - protein, 92 aa, Zea mays
  Clone ID: MRT4577_70825C.1.pep
LLGRCPGRCLLLRALFCLMPCLALGAFFLCGVRFCVFPALPLVMSPPSSCRRVRPSLLSAFSCRWRCCPAWVVASVRFLPPLPVRRGACQNT

SEQ ID NO: 337343 - protein, 126 aa, Zea mays
  Clone ID: MRT4577_70826C.1.pep
RLLAEYTFFLQLRTTHLLVWNNTVVPILYITHRRNRQKNQYEDDAHHKSSCLLIDEALDTQNKQTTTWACFFTTCNNPKHYGSNIHLLQADQLYIHNKQLLVPDQRKTRFFLLPHNTYRCSKEIYS

SEQ ID NO: 337344 - protein, 83 aa, Zea mays
  Clone ID: MRT4577_70827C.1.pep
QLLIGDRFLWSSAGAMLVRCVKFSCRVGSVVTRTSGVVLSSVSGLRHGRCRAGMTSVVGAVIGVAGTLWRTGSEVLGQAQFSS

SEQ ID NO: 337345 - protein, 89 aa, Zea mays
  Clone ID: MRT4577_70828C.1.pep
VCVTLGLLSVFAVCRSYYRASVCRAYLSLELSCRVRPHLGGQNPKSSWRVACRHSGVTVCCFRRHHLVRCVLGLAFLSRPPRGRGSAQQ

SEQ ID NO: 337346 - protein, 46 aa, Zea mays
  unsure (1)..(46): unsure at all Xaa locations
  Clone ID: MRT4577_70829C.1.pep
LLGXFVLNYSGGPYLQDFXGNKLRSGLHQVVRMPPFLRPAPPPMTS

SEQ ID NO: 337347 - protein, 66 aa, Zea mays
  Clone ID: MRT4577_7082C.1.pep
LHTTKINLHACTNIKCPCGQLRQHGAQVPQEGPQVPQEGLQSGDFICTECCHMLVSRYVDHMCSDL

SEQ ID NO: 337348 - protein, 364 aa, Zea mays
  unsure (1)..(364): unsure at all Xaa locations
  Clone ID: MRT4577_70830C.1.pep
GRIANQIRENVTRDMHPALLRSESTRSYRSDVPFDGQGQMDYIGRDARRQLSDRLKNVLRRDPPDAETPFSFSHRRRATSTSFDEEPTRPKPTRHEVPPPSSRKGKVRSKEEERKCAVESDVRSFRYGPSNTPTTTQLESEPVSPRNLMRSFSAPVSGTTFVKLLSEEPRVLTGARLQRKQEGNGSSRPASSDERKGRKDAFSIRGKVSNLRQNFGLRAKLFGKKFHASDEPFPDDLPPIGTLVTAPSVLIHPGVLQENSTEVPPSPASWCSSPPDEMSRGGYPSPVSPLEASFSGHRSPLRTEAKDMASAASEXRNPXSEQAHAEEGRAETSPVQDEQDDGDMDDTDHPMKSFVRAVLVVAGM

SEQ ID NO: 337349 - protein, 83 aa, Zea mays
  Clone ID: MRT4577_70831C.1.pep
RHQIAASCSICSLICLLNRAMGGPPSCSAPRRSVASSSRSPSPLPPTCSHPSLTAGVSRRRSCRVVAARPVHAATPDWLLPPG

SEQ ID NO: 337350 - protein, 69 aa, Zea mays
  Clone ID: MRT4577_70832C.1.pep
SGLRSLCSLAHEGPPWEIIIVHLEVVVLRSAFRNSPTPSLVSCCEHAALDSTLDTGNQVGKAHRLAVIH

SEQ ID NO: 337351 - protein, 74 aa, Zea mays
  Clone ID: MRT4577_70833C.1.pep
LHLNYIILVLYFSTGGERPLPWYCIKKKLKLSPTEKGHETWPPLHHDSRRSAIYRSDLYPCFEPLSPYTSIHPL

SEQ ID NO: 337352 - protein, 47 aa, Zea mays
  Clone ID: MRT4577_70835C.1.pep
STNIHLCVSNRCRWLLLRTPSIITTLSFQIHMNLFGLKFTLNMTFLN

SEQ ID NO: 337353 - protein, 130 aa, Zea mays
  unsure (1)..(130): unsure at all Xaa locations
  Clone ID: MRT4577_70836C.1.pep
MKKQGDIASLFRNHAAKKHKFIASTPQEQEEDRINEEIVNPMSSALPPPTLYDVSRLPHDPGERQPIASYHANDHDAIRRAYILRGPFQPYAHEFPNRKNWXRDRQFXNFGWFQNFPGIEYXVKKDAAFC

SEQ ID NO: 337354 - protein, 354 aa, Zea mays
  Clone ID: MRT4577_70837C.1.pep
MGVQRYRFFCCGCGANAAAGGRERDEDGGFGVSDGKAEKGVEAGPGRGLSWAQVEAMTGGFTSAVVGEGGFSTVYLARLSGALAAVKVHRSSERLHRVFRQELDALQRVRHPHIVRLLAFCDQQEEGVLVLEFAANGNLHERLHGGGKAAGTMPWARRVSVALQVARALEHLHDRCEPQVVHGDVKASNVLLDASMSAKLCDFGSARMGFSAAVRPRSSARTMLGSPGYVDPHYIRSGVVTKKSDVYSFGVLLLELLTGMEAFCAEEGRLLTAVVAPRLRAGDPPCDARGLVDERLGTAYDAAEAAAVAALAAACVGDNPSLRPSMADVVRTLEQRAQGSISAVERRSDGQRKV

SEQ ID NO: 337355 - protein, 565 aa, Zea mays
  Clone ID: MRT4577_70838C.1.pep
MSEAEAAGSLSRRRMEDEEGAAAMEADAAHSGRGEAEDEEVESSDYTSEDEGTEDYRRGGYHAVRVGDSFKQGAYVVQYKLGWGHFSTVWLAWDTVHSRYVALKVQKSAQHYTEAAMDEVKILKQIADGDPDDSKCVVKLLDHFKHSGPNGNHVCMVFEFLGDNLLTLIKYTDYRGIPLPMVKEICRHVLIGLDYLHRTLSIIHTDLKPENILLVSTIDPTKDPRKSGVPLVPPSMRTDEPPPKVPAQSGNGGLTKNQKKKIRKKAKRAVAATSEGSSAVASADTDGSDDRGDLGTTNEGSPRQDGAKKRVTRDRRGSKGAKKMMAMKADLKCKLVDFGNACWTYKQFTNDIQTRQYRCPEVILGSKYSTSADMWSFACICFELATGDVLFDPHSGDNFDRDEDHLALMMELLGMMPRKIALGGRYSRDFFNRYGDLRHIRRLRFWPLNKVLMEKYEFTEINANGMADFLVPILDFVPEKRPTAAQLLQHPWLDVGPLRQQPKTRPESARSPGDGVSEKQKKEKEEREAMAVELGNIAIDGASSSRMANDPQSSTNKTTATSSKK

SEQ ID NO: 337356 - protein, 208 aa, Zea mays
  Clone ID: MRT4577_70839C.1.pep
MSEAEAAGSLSRRRMEDEEGAAAMEADAAHSGRGEAEDEEVESSDYTSEDEGTEDYRRGGYHAVRVGDSFKQGAYVVQYKLGWGHFSTVWLAWDTAHSRYVALKVQKSAQHYTEAAMDEVKILKQIADGDPDDSKCVVKLLDHFKHSGPNGNHVCMVFEFLGDNLLTLIKYTDYRGIPLPMVKEICRHVLIGLDYLHRTLSIIHTDLK

SEQ ID NO: 337357 - protein, 34 aa, Zea mays
  Clone ID: MRT4577_7083C.1.pep
PLVSQYISLPPPLERPQRPTSDADPDEHQQGSRA

SEQ ID NO: 337358 - protein, 632 aa, Zea mays
  unsure (1)..(632): unsure at all Xaa locations
  Clone ID: MRT4577_70840C.1.pep
MAEAAAAGSLSRRRMQDEEGAAAGSLSRRRMQDEEGAAAIEADAGXEEERSGGGGGXVESSDYMSEDEGTEDYRRGGYHAVRVGDSFKQGTYVVQSKLGWGHFSTVWLAWDEAHSRYVALKVQKSAQHYTEAAMDEIKILKEIADGDPDDSKCVVKLLDHFKHSGPNGNHVCMVFEFLGDNLLTLIKYTDYRGIPLSMVKEICRHVLIGLDYLHRTLSIIHTDLKPENILLVSTIDPLKDPRRSGVPLLLPSESTDEPPPKVPAQSGNGGLTKNQKKKIRRKAKRAAAATSDGTSAVASADTDGSDDQGDMGTTNEGSSGTMKRATRDRRGSKGAKKMAMEADLKCKLVDFGNACWTYKQFTNDIQTRQYRCPEVILGSKYSTSADMWSFACICFELTTGDVLFDPHSGDNFDRDEPSSLSTFVCVGGGHMWEPPALGLHCPLYSYGLSNYDARILIKDYFDLLITDHFEGCIYVDSFKKVPFPYLNCFCDHLALMMELLGMMPRKIALGGRYSRDFFNRYGDLRHIRRLRFWPLNKVLMEKYEFTEINAHGMADFLVPILDFVPEKRPTAAQLLQHPWLDVGPLRQQPKTLPDSAQNSDDGVSEKQKKEREEREAMALELGNIAIDGAGGK

SEQ ID NO: 337359 - protein, 297 aa, Zea mays
  unsure (1)..(297): unsure at all Xaa locations
  Clone ID: MRT4577_70841C.1.pep
MDYDRLNSPNTSAISLEVMGHRLXYFTGSKLQAPWDHGLGCINGXVKFLEKNSRKGRFCPSKLKGKRVIELGAGCGLAGFGMTLLGCDVTTTDQVEVLPLLMRNVERNRSWISQSNSDTDTIGSITVAELDWGNKEHIKAVEPPFDYIIGTDVIYSEHLLQPLMETITALSGPKTKILLGYEIRSATVHEKMMEMWKSNFIVKTVSKSKMDVKYQHPNIHLYMMDLKAPLIPEVEATDDNGNDDEEVVSNLGEXRRQWTEERILFRLVTRXKSGSLDDWEIRRCGAMAARLLKDVKL

SEQ ID NO: 337360 - protein, 303 aa, Zea mays
  unsure (1)..(303): unsure at all Xaa locations
  Clone ID: MRT4577_70842C.1.pep
LRLNLPSTSAISLEVMGHQLXYFTGSKLQAPWDHGLGCINGXVKFLEKNSRKGRFCPSKLKGKRVIELGAGCGLAGFGMALLGGDVTTTDQAEVLPLLMRNVERNRSWISQSNPDSDILANTKTDSVGSITVAELDWGNKEHIKAVEPPFDYIVGTDVVYSEHLLQPLMETITALSGPKTKILLGYEIRSTTVHEKMMEMWKSNFIVKTVSRSKMDVKYQHPSIHLYMMDLKAPLIPEVEAADNGNYEEEVEVAVNQEEDEDPGVKSESCSGSSPEAKSGSLDDWEIRRCGAMAARLLKDVKL

SEQ ID NO: 337361 - protein, 178 aa, Zea mays
  unsure (1)..(178): unsure at all Xaa locations
  Clone ID: MRT4577_70843C.1.pep
MDYDRLNSPNTSAISLEVMGHRLXYFTGSKLQAPWDHGLGCINGXVKFLEKNSRKGRFCPSKLKGKRVIELGAGCGLAGFGMTLLGCDVTTTDQVEVLPLLMRNVERNRSWISQSNSDTDTIGSITVAELDWGNKEHIKAVEPPFDYIIGTDVVSLVMQCLESSELCLSNNKPYLLSG

SEQ ID NO: 337362 - protein, 298 aa, Zea mays
  unsure (1)..(298): unsure at all Xaa locations
  Clone ID: MRT4577_70844C.1.pep
MDHDRLNLPSTSAISLEVMGHQLXYFTGSKLQAPWDHGLGCINGXVKFLEKNSRKGRFCPSKLKGKRVIELGAGCGLAGFGMALLGGDVTTTDQAEVLPLLMRNVERNRSWISQSNSDSDSVGSITVAELDWGNKEHIKAVEPPFDYIVGTDVVYSEHLLQPLMETITALSGPKTKILLGYEIRSTTVHEKMMEMWKSNFIVKTVSRSKMDVKYQHPSIHLYMMDLKAPLIPEIEAADNGNYEEEVEVAANQEEDEDPGVKSESCSGSSPEAKSGSLDDWEIRRCGAMAARLLKDVKL

SEQ ID NO: 337363 - protein, 306 aa, Zea mays
  unsure (1)..(306): unsure at all Xaa locations
  Clone ID: MRT4577_70845C.1.pep
MDHDRLNSPSTSAISLEVMGHRLXYFTGSKLQAPWDHGLGCINGXVKFLEKNSRKGRFCPSKLKGKRVIELGAGCGLAGFGMALLGGDVTTTDQAEVLPLLMRNVERNRSWISQSNSDSDILANTKTDSVGSITVAELDWGNKEHIKAVEPPFDYIVGTDIVYSEHLLQPLMETITALSGPKTKILLGYEIRSTTVHEKMMEMWKSNFIVKTISRSKMDVKYQHPSIHLYMMDLKAPLIPEVEAADNGNYEEEVEVAANQEEDEDPGVKSESCSGSSPEAKSGSLDDWEIRRCGAMAARLLKDVKL

SEQ ID NO: 337364 - protein, 86 aa, Zea mays
  unsure (1)..(86): unsure at all Xaa locations
  Clone ID: MRT4577_70846C.1.pep
HACVHKIPKGSILVGPXGTGKTLLAKATTGESGVPLWSMTGSDLMEMFAGVAPFTVLHLLQEAWQGASSMVFNYQIEAIGRCKMTS

SEQ ID NO: 337365 - protein, 99 aa, Zea mays
  unsure (1)..(99): unsure at all Xaa locations
  Clone ID: MRT4577_70847C.1.pep
FKKNAEMKGFSPRQHQLVTAGYENNISMIPHNGKQGGDAESADXGGQPKALNLELEQPESGLLTTDPAIVLLHNSKDISTTKANDTTTASTGTPDVTEA

SEQ ID NO: 337366 - protein, 150 aa, Zea mays
  Clone ID: MRT4577_70848C.1.pep
PLSFSATTVGRSKRTVRRSCSGDSNFERRRAATGKRWRPDRGIRGARTDVWFEELWAHMSFDQMNGTRGVFFYSNGWRTESRGLGGLALVGEENGESATLATHGLTGSMAGFPRVGLRERRGLSRDMGPKCLTAVWVHNKMGPCVMELSD

SEQ ID NO: 337367 - protein, 73 aa, Zea mays
  unsure (1)..(73): unsure at all Xaa locations
  Clone ID: MRT4577_70849C.1.pep
MWLLIFYQHTRIQKRNTELYGKNYKKAGKARHTYPVNVDADWCTEGVLNDXEALCLDGTFYGNVARFMNHKCI

SEQ ID NO: 337368 - protein, 53 aa, Zea mays
  Clone ID: MRT4577_7084C.1.pep
VHFKWNFYSQAHYQKTSQHITHNFVRPPLNLSSPAPNFINNHNFQLFLQPTFL

SEQ ID NO: 337369 - protein, 100 aa, Zea mays
  Clone ID: MRT4577_70850C.1.pep
RPTCTNKTIERPSQGKNGTTGAQPRARGLSTSDQPSELAAANASAGTTCGPGWANPHNPLPSSHWYVTSRTSGIGPRPPRPELKKRSCREQADIPADSPS

SEQ ID NO: 337370 - protein, 177 aa, Zea mays
  Clone ID: MRT4577_70851C.1.pep
GAHGLFLRVKLASKNFVKLASKNLGGHKSSWEVRVWAIGSTLWRAWPICAPAAATAVLNSVPVGGAAGRAEPAARPSASVGRAAGSQRCAACPPDNPRTKARRLRMDLLTYKSCEWIWWICAGPRWFSASLDAASTDDVGHDDDAGEEYDDEDWGRGGSCEKEVAVGAGGGGGLVPN

SEQ ID NO: 337371 - protein, 171 aa, Zea mays
  unsure (1)..(171): unsure at all Xaa locations
  Clone ID: MRT4577_70852C.1.pep
RERGCPSRQPMKEGSRLRPRSSPASPHRPMDLPDCQAPRHCIRSTSRSPHRHTWASIVTPQAAADPNKFVAADWGLLEPLFTKMEMLHFEMQTLTVSRLEVVQPLHDMMTALQGWMTRLGGFMEQMEVVVGQLGCLPASLQSLEMPATGSVXNVAGAVDVDSEVASCSSEL

SEQ ID NO: 337372 - protein, 41 aa, Zea mays
  Clone ID: MRT4577_70853C.1.pep
SSVHAYLIKLHFSMCVCAPENSAKWQFYKMPCDRNSMQIIT

SEQ ID NO: 337373 - protein, 307 aa, Zea mays
  Clone ID: MRT4577_70854C.1.pep
MGGPLTAAGGRGDGGAKAVEPLRPPPPPDPKTMARWYQLEALERAVRGNTLAFLETGSGKTLIAVMLLRAYAHRVRRPDSRRFAVFLVPTVVLVGQQARVVEQHTDLVVKQFCGEMGVDFWDAATWRSQLEDGEVLVMTPQILLDNLRHSFFRLQDIALLIFDECHHARGNTPYACIFKEFYHPQLNSSASDPLPRIFGMSASLIYSKDLNPHNYSKQISEIENLMNSKVYTVDSESALSEYIPFASTKIVDFDDSNISSELHANILSCLNRLNKKLSGKTRHGGQFGVRYKGEVGTFGMPTEGNRD

SEQ ID NO: 337374 - protein, 350 aa, Zea mays
  Clone ID: MRT4577_70855C.1.pep
MSTTSSDEKAVVQNKKVVLRRYVTGRFPTENDMEIIVDTISLRVPSGQTAVLVKNLYLSCDPWMRGRMNKQDDGPTVPPHGEAMVNFSVGKVMDSTHPDFTAGDLVWGMTGWEEYTLVIQPESLRKINHTELPLSYYTGVLGMPGLTAYACFFEVGKPRKGDFVFVSAASGAVGQLVGQLAKIAGCYVVGSAGSDDKVGLLKTKFGFDDAFNYKSEADLGAALKRCLPDGVDVYFDSVGGATLDAVLLQMRRGGRVAACGMISQYNLEEPYGLRNLYCIVAKSIRLEGFYFTSYMHVYARFEEKMAGYIKDGKVPVVEDVVEGIDSAPAALIGLFSGKNVGKQLVAIARA

SEQ ID NO: 337375 - protein, 90 aa, Zea mays
  Clone ID: MRT4577_70856C.1.pep
GPPPRSPSLTPRPNSEPQSRAEPPRPPCPQPSAMARTKQTARKSTGGKAPRKQLATKAARKSAPATGGVMRPGGFRPCTVALRQIRKGHT

SEQ ID NO: 337376 - protein, 81 aa, Zea mays
  unsure (1)..(81): unsure at all Xaa locations
  Clone ID: MRT4577_70857C.1.pep
IHAKGWRVSKETGYVSPPNEPQMAFTPGVGFSPNRPNKAAKAMKSPPNSQKEKESAXKPPKRLPQGEDRAKPMAEGGDAPF

SEQ ID NO: 337377 - protein, 50 aa, Zea mays
  Clone ID: MRT4577_70858C.1.pep
QSNGSTDITTEAHKFLQTILSIYPGSGRISLHTFLKVSTGPLISTTFTIS

SEQ ID NO: 337378 - protein, 47 aa, Zea mays
  Clone ID: MRT4577_70859C.1.pep
SYSQLLDHCFLFLENSFFLSECYRILICRQQKIQTNVPQKQYIICQL

SEQ ID NO: 337379 - protein, 54 aa, Zea mays
  Clone ID: MRT4577_7085C.1.pep
ITSRRKIMVDIEKGYFVIWCDQSKVFFPTYASMPTVKNLSVVFLFDHTLIIRYH

SEQ ID NO: 337380 - protein, 371 aa, Zea mays
  Clone ID: MRT4577_70860C.1.pep
MAAVAGVSEPPMVEQVITEFFAKSLHVILESRSPYDSSRNFTRPSPPSSPLAGSQPRDRWFNLALRDCPAALENFDLWRQSNLEPLVIDIVLLQRDNTRIASVEASRIIERWVIKYETSRSGNVIKNTDKNARSSCSQDHSLYRRAYIGSTVLFRSLYLVVRLLPAYHLFEELNSSGRICPLSLSHRISSFVEPFTRAEDAEMKHFAFAPIETLLGSLSLSVSYVPVLELAAVPEQSTPMPPELIKDYVGSPTTDFLRKLDSLPSDGIAPACFPVTRRHSWSTGHGVRPPASPFLMSSEPHGRLQPCMPTDNSPTAYIHPHITSSSEKKRNTVNEECYSSPPLSPSPSHPPSSYPKNPFFRYGSAPLSIPT

SEQ ID NO: 337381 - protein, 51 aa, Zea mays
  unsure (1)..(51): unsure at all Xaa locations
  Clone ID: MRT4577_70861C.1.pep
AGPAWRVPGPPGTHVVXKKKKKKKKKKKRKKKKKRKKKKKKQKMKKKKKKI

SEQ ID NO: 337382 - protein, 183 aa, Zea mays
  Clone ID: MRT4577_70862C.1.pep
SEFAAASTCYVSRLLSFAYMSLISVVAYLAMFIQSGCILLRLYKTALQTVNKTNESHPFQEYLDLDIRLPQEKAEELSKLAVVHINAVLVELRRLLLAEDLVDSAKFFGILWVLTYVGALFNGLTLIIIGFIALFTLPKVYENNKTQIDQNIEVVRSKIAELTNKVRAAIPIGKKNPETKKKE

SEQ ID NO: 337383 - protein, 75 aa, Zea mays
  Clone ID: MRT4577_70863C.1.pep
GGLLWTEEEDNPLINLPLINKTNSNAYDYTADVIHTIIPDLFMHTHNTPFTPLKNNTAILNLTPDHNSNFHGCLD

SEQ ID NO: 337384 - protein, 84 aa, Zea mays
  unsure (1)..(84): unsure at all Xaa locations
  Clone ID: MRT4577_70864C.1.pep
APPPSLSCLAFAFSGVVLCLCVLWSSFLPSGSVSRFLPWWAPWRFLLCLWVCFRSRRSLALVGVFWPSGLLTVFLGLVSXGRRL

SEQ ID NO: 337385 - protein, 86 aa, Zea mays
  Clone ID: MRT4577_70865C.1.pep
KKKKKKKKKKKKKKKKKGKKTKRIKTYIHLQAKILPLPKWGGRSNGCTLIYPCFEGETPSSLPPKSISRALPFTPSGLGTPWLSPI

SEQ ID NO: 337386 - protein, 102 aa, Zea mays
  Clone ID: MRT4577_70866C.1.pep
GSGASASRSPPPRIRAFPYGARVALRVWVALVFSAWSRSRGSEELHGSLICQGGFSRQRHRSAAAGAAALGHFLSPRAPGASFGSAGLGAGLQQISSSSASL

SEQ ID NO: 337387 - protein, 108 aa, Zea mays
  unsure (1)..(108): unsure at all Xaa locations
  Clone ID: MRT4577_70867C.1.pep
PEQWRTLRHWVSHNLDLQNQIFGALHVMRVLAKKYDFKSEDERIPLFHIVXDTFPRQLNIFIKLVQIVNPRSEVADLIKLICKIFWSSIYLEIRKQLFDTNVVNAWMV

SEQ ID NO: 337388 - protein, 88 aa, Zea mays
  Clone ID: MRT4577_70868C.1.pep
GGEHVETLKTPFLGGMFRTFGQVKEILTLHKQGKTASELLVEPNGWAGFLEMCYWKTLPHLGAWDFFYKCGGVKSRGSIKWRGYTKVL

SEQ ID NO: 337389 - protein, 37 aa, Zea mays
  Clone ID: MRT4577_70869C.1.pep
LSFPKPEATPLCFNVGQEKIWFCKDFPDPKGGLKLLC

SEQ ID NO: 337390 - protein, 98 aa, Zea mays
  Clone ID: MRT4577_7086C.1.pep
MTASKKGPGKGDTPKGILLREGNGPRAPLLIRGSKAGPSERFNSRLRALGLHAHYWSEVQRPAPRKGSTTASGHSGSVPTTDQGFVGWPSKGSHPPQT

SEQ ID NO: 337391 - protein, 110 aa, Zea mays
  Clone ID: MRT4577_70870C.1.pep
PETKEGCNTQPFVNFEKKWGKRAIVHTQYFGWVTREGFGRGKLFPSTLGEVAEGAQRGHPKKRLLDVPKNLCLAGIDALKEKRFWVLFVRHNNHGRLFFLFELNERDPFG

SEQ ID NO: 337392 - protein, 77 aa, Zea mays
  Clone ID: MRT4577_70871C.1.pep
TTGPWLQNLVQQGYKQKFHNLMILKNGTSLHPNTLPLELAKKPFFFIGSLETTPPKIGPSVENFSFIFSNPTPEIFF

SEQ ID NO: 337393 - protein, 44 aa, Zea mays
  Clone ID: MRT4577_70872C.1.pep
HDVELLGRKNRCIIKHLTDLNINKHLRLGAALAGYTACVTSLIS

SEQ ID NO: 337394 - protein, 158 aa, Zea mays
  Clone ID: MRT4577_70873C.1.pep
SPCSWSGVRCFDDKVEILNLTGRQLAGTLAPEIGSLRGLKSLLLPKNNFRGQIPREFGGLSALEVLDLSSNNLDGTVPEELWAMPLLKQLSLHDNQLQEGVQAIADDQAGCLSRKLGCWSLLYKWDFKDWISLGGLREKDNTNVPNFSEADVMHNLQS

SEQ ID NO: 337395 - protein, 142 aa, Zea mays
  Clone ID: MRT4577_70874C.1.pep
MDGRMFGLETPLMVALQHLLDVPDGDAGAGGDKASGAAAGGGPTRTYVRDARAMAATPADVKELPGAYAFVVDMPGLGTGDIKVQVEDLYLCGMWRGIIVVCSGGASGVRVCVPSVSVSVYQFLSDVSASVSYEPCRMLSVC

SEQ ID NO: 337396 - protein, 93 aa, Zea mays
  unsure (1)..(93): unsure at all Xaa locations
  Clone ID: MRT4577_70876C.1.pep
SRPRPANRTMSPTLTHCAKSRSVCPRPTXKTNTIXSYIATKQETLQFGGLCQVDYPALTTXDXGTELTIKRSSRETSEQPVTWNSETGWKLQT

SEQ ID NO: 337397 - protein, 106 aa, Zea mays
  unsure (1)..(106): unsure at all Xaa locations
  Clone ID: MRT4577_70878C.1.pep
AXXXSPQRSPAPSSHVSTPGSTQRKTRRSILAAGXXNYFSTLDSKRHAADNAQVRELQRKVSTLESEIEKMXXEHLLQLKRKDEFIRDLINRKDPNNNSVRGESTS

SEQ ID NO: 337398 - protein, 107 aa, Zea mays
  Clone ID: MRT4577_70879C.1.pep
PEFRGGLTFQPPPVVPGGGLGRVQGAVWLVTETAPLGGVFSRIGPKFAFLLAQRAFVPWFFGGGMEKGVFSQAREDLVVLLKAYEEVGAMGAFVEGSEGEHYLETGQ

SEQ ID NO: 337399 - protein, 77 aa, Zea mays
  Clone ID: MRT4577_7087C.1.pep
GGLFLMFQIFIFRCFGFNFFFFGPPKLIKWPVFFNLGNWKTLGFPNFIRFETFPFLPLLCFLKRTRPFLFSKILPPL

SEQ ID NO: 337400 - protein, 109 aa, Zea mays
  unsure (1)..(109): unsure at all Xaa locations
  Clone ID: MRT4577_70880C.1.pep
PPTHISKYTCSWHKTESLHMVGLLYPLHVPPXVWAGIALAFVEAHPPAHGNSVIMAVVDRFSKYAHFIVLAHXYTASSIXYTFFAEIVPLYGFPISIVSNRPLVFTLVT

SEQ ID NO: 337401 - protein, 112 aa, Zea mays
  Clone ID: MRT4577_70881C.1.pep
MVKGRTGQRVRLYVRGTILGYKRSKSNQYETTSLVQIEGVNTKEDVAWYAGKRMAYIYKAKTKSSETRYRCIWGKVTRPHGNSGVVRAKFKSNLPPESMGRKVRVFMYPSSI

SEQ ID NO: 337402 - protein, 112 aa, Zea mays
  Clone ID: MRT4577_70882C.1.pep
MVKGRTGQRVRLYVRGTILGYKRSKSNQYETTSLVQIEGVNTKEDVAWYAGKRMAYIYKAKTKSSETRYRCIWGKITRPHGNSGVVRAKFKSNLPPESMGRKVRVFMYPSSI

SEQ ID NO: 337403 - protein, 112 aa, Zea mays; identical to SEQ ID NO: 337401
  Clone ID: MRT4577_70883C.1.pep

SEQ ID NO: 337404 - protein, 151 aa, Zea mays
  Clone ID: MRT4577_70884C.1.pep
FFFFFFFFFFFFFFFFFFFFTFFEKTLDPSLMGNNTIKQKKGQKNEKQKKGGQNRKHGARGGSRGTGKAWNTNMEQKKRKANANPERKGKTGPTPRRTLAPSGKGEKPNPKGKKKLEKTQGEETKGPNPDRGHPENKYGYEKQTKSKREHK

SEQ ID NO: 337405 - protein, 112 aa, Zea mays; identical to SEQ ID NO: 337401
  Clone ID: MRT4577_70885C.1.pep

SEQ ID NO: 337406 - protein, 76 aa, Zea mays
  Clone ID: MRT4577_70886C.1.pep
PITLHLDARVHTENTKHGNSQAPLPVPGSRERAGLQDEHLRLKARASRGPAEGHEDSIWRRSARTHILCAIHASRK

SEQ ID NO: 337407 - protein, 206 aa, Zea mays
  unsure (1)..(206): unsure at all Xaa locations
  Clone ID: MRT4577_70887C.1.pep
AHHRRERGGAGLASSVAAAXSTFLGTHLEDPAPQNGRIVARVAXGLGGXAKPDPKKVXKTSSCSDSPLXVPGAVAPDYLHGSLDEHYRFDPFRLGTPVEYLLSEXHSLDQNLAKNDAGGIIGTRFESSEVKSTPMQTYSEVIGLQRIRECELIHGRWAMLATLGALYVEWLTGVTCQDAGTVXLVDGSFYLGQPLSISISTLIWIE

SEQ ID NO: 337408 - protein, 99 aa, Zea mays
  Clone ID: MRT4577_70888C.1.pep
MGAAAAMQAMKMFNQGNSGSGKSGQNQLIGIAMGEAAKLFDQQNANGNAPSGSNKQDVVASAAKMALQMYMKGGSGGGASGGSSGGVGGLLNMASKFMK

SEQ ID NO: 337409 - protein, 30 aa, Zea mays
  Clone ID: MRT4577_70889C.1.pep
FFGLSVPIFVTGGSKREILNNRIYSSPSFF

SEQ ID NO: 337410 - protein, 59 aa, Zea mays
  unsure (1)..(59): unsure at all Xaa locations
  Clone ID: MRT4577_7088C.1.pep
WTRLVVCYYARTPFSHTVTSMAKRVASSNAAPYKQNGSAIKPRPVSPLVVPTRPSNNXQ

SEQ ID NO: 337411 - protein, 157 aa, Zea mays
  unsure (1)..(157): unsure at all Xaa locations
  Clone ID: MRT4577_70890C.1.pep
ARGQGGGRRQGTRRGKQRRAGAAGQRPRAQQQQQPPAPGNNPRGGGRPXGXXEANRTXGGAQXQTXAPDGKXRTPGRDSSXGSGXKGARADRNGXXAGGXRXQXGDTAGXNTGGDPGNREEDPGHRDESDRERXGTGPGEPDTXETNGDGRGSGEGT

SEQ ID NO: 337412 - protein, 74 aa, Zea mays
  unsure (1)..(74): unsure at all Xaa locations
  Clone ID: MRT4577_70891C.1.pep
PFRAAARXGXLPGVAPFLAXXFAPSPLFLSSSPPPAPSSSSSSSSLSXGFFLXASWPMGAXPAAGLRLXXLGPR

SEQ ID NO: 337413 - protein, 74 aa, Zea mays
  Clone ID: MRT4577_70892C.1.pep
LDPCLVWRSRVRVKEYSSKIVDGAIPQKIRDEVNPGLIPSHPSLTPNQTHNEHHVTSTGEPLDPIYLGYVICLL

SEQ ID NO: 337414 - protein, 61 aa, Zea mays
  unsure (1)..(61): unsure at all Xaa locations
  Clone ID: MRT4577_70893C.1.pep
DXGRERVGCRRLHSDRPTDRXPLXFRASSLLXNTPXXRPPRPRLLLHLLLLVMLLTSNQSC

SEQ ID NO: 337415 - protein, 137 aa, Zea mays
  Clone ID: MRT4577_70894C.1.pep
QTEVDCEYLKRWCEQLAEENRRLGKEVAELRALSAAPAAPLTTLTMCLSCRRVASSSPSSSSSPRPSIPGAAAASGGSMASPAAAATLPAHAVLLRVQRRRGGGRGVRDSLGGAREACQGCQIGLVGVDAMEMHGSV

SEQ ID NO: 337416 - protein, 80 aa, Zea mays
  Clone ID: MRT4577_70895C.1.pep
GYDLRTNHAFRIVDNFIPIPKAPVYIYYTWENIVNHVFEDLQKTKAPNNYIAFTKTPLVHSCSLGFASRTNAVHLPKVGD

SEQ ID NO: 337417 - protein, 130 aa, Zea mays
  Clone ID: MRT4577_70896C.1.pep
FSPVVIKLASSRVFMLEALPLLYVCIGLVFTTLFHLSSIFCWLLVPAACPCSSSRVQFILYSLCSFFFLGRGVFQMLLFRAPNIQVRGSYFFLAFLFRPCLVCQPFVLSLLCEFLLLQSHYPVVNYFFVL

SEQ ID NO: 337418 - protein, 54 aa, Zea mays
  Clone ID: MRT4577_70897C.1.pep
PVRSYQGDLALPWPKGSKYVTRASFRGMDPMAPGSWETYHLLYTGCPPGPPPGM

SEQ ID NO: 337419 - protein, 47 aa, Zea mays
  Clone ID: MRT4577_70898C.1.pep
ISKKKKKKKKKKKKKKKKKKKKKKKKKKKKKKKFLHFPGGPFKRGNF

SEQ ID NO: 337420 - protein, 92 aa, Zea mays
  unsure (1)..(92): unsure at all Xaa locations
  Clone ID: MRT4577_70899C.1.pep
MFMRPVRAHLLQRLSASGEIIHDHAXLARHVLVGDDTADHSVSGHHTXHXPIQIILALIIMLRDGLHRKMGKADRHRLRVGSDGAIGSTHAG

SEQ ID NO: 337421 - protein, 87 aa, Zea mays
  Clone ID: MRT4577_7089C.1.pep
SPTSWFQQHTDVLNDVVEPQQSRNAFDAEANTVYAGKHDQSLGSPSVSMTPCTTSIAPPYASSSTNESESRRNEDVSVVASLSDPAG

SEQ ID NO: 337422 - protein, 102 aa, Zea mays
  Clone ID: MRT4577_708C.1.pep
QTPPNKFKISPQKTFKKNCLFIPPIFLKDPPQKLASSKGRPFRFQKQITIFYQWGGAWQKGDHQQPFFYLAKKLFLLGQPTGGNDVKRRFITNPGVLGKKNF

SEQ ID NO: 337423 - protein, 69 aa, Zea mays
  Clone ID: MRT4577_70900C.1.pep
RPPTRPTNKKKQKKKKIKRKFSVHYIECKKLVSDKGDPFVRVLSIRSVCTRLPRAPTRHHVSIPVAAVY

SEQ ID NO: 337424 - protein, 144 aa, Zea mays
  Clone ID: MRT4577_70901C.1.pep
MAQGTLEVLLVGAKGLENTDYLCNMDPYAVLKCTSQEQKSTVASGKGSDPEWNETFVFTVSENATELVIKLLDSDGGTDDDSVGEATIPLDGVYTEGSIPPTVYNVVKDEEYRGEIKIGLTFTPEEARDEDQPEENYGGWNQSS

SEQ ID NO: 337425 - protein, 146 aa, Zea mays
  Clone ID: MRT4577_70902C.1.pep
CPAYARPDWTDPPWASRGPPACPWRRSAPADQPCWAVGPQRCRLLPAPPTASRCPPPCTQPWLASGAATTRHRHPPSDPPPRSPREPMQAMPAPPYPLPPPPGASRRRSASSRPSRTSGDGDARTRERERERERKGRRGRRKACRI

SEQ ID NO: 337426 - protein, 83 aa, Zea mays
  Clone ID: MRT4577_70903C.1.pep
THASTDASVLNFINFILYYILTKRRKIILVRRETQQKKKTKKKKKMDAQSKESKLTNTYMIQHISSIKSPKFNTLSITRQQLD

SEQ ID NO: 337427 - protein, 89 aa, Zea mays
  Clone ID: MRT4577_70904C.1.pep
RFCFQTRSDVDVLDDGYKWRKYGQKVVKNSLHPRSYFRCTHSNCRVKKRVERLSTDCRMVMTTYEGRHTHSPCSDDASSGDHTDCFSSF

SEQ ID NO: 337428 - protein, 67 aa, Zea mays
  Clone ID: MRT4577_70905C.1.pep
EDRKSLSTGGRPSAFSTGPCLPRCSTVSSLHCNGLMACCTTPPHLTRLHSLQFIRLIYTIGIMSSLA

SEQ ID NO: 337429 - protein, 39 aa, Zea mays
  Clone ID: MRT4577_70906C.1.pep
LCGAQAAVSYPLDIRVRFAITILVYPWVKYNRINTTIAI

SEQ ID NO: 337430 - protein, 82 aa, Zea mays
  unsure (1)..(82): unsure at all Xaa locations
  Clone ID: MRT4577_70907C.1.pep
GGARFASATNARTIXQNLFAPRSIIXNIYKQLLEGAYXHPSWLAYKLQQPIAARGLQQLIVQLXQQFLAHLTIQTIVTKQEQ

SEQ ID NO: 337431 - protein, 62 aa, Zea mays
  unsure (1)..(62): unsure at all Xaa locations
  Clone ID: MRT4577_70908C.1.pep
LXNPYTCDYKTNQINPGRSLTFNWQQRVWWGGAFNFGGRTKNFSEVKARGGGGKKGKKKHWP

SEQ ID NO: 337432 - protein, 61 aa, Zea mays
  Clone ID: MRT4577_70909C.1.pep
MLDDLTHLRQLIINVTFYLFFYNCKWLQRYLLKLSRQFECTNIIYLQRLSDPAKNALSSNA

SEQ ID NO: 337433 - protein, 62 aa, Zea mays
  Clone ID: MRT4577_7090C.1.pep
SREQKLDLRGTLSFGSLVGASHVARSIGSQRFHLAANVISVITALQYLSQMAELPDVPSYGE

SEQ ID NO: 337434 - protein, 843 aa, Zea mays
  unsure (1)..(843): unsure at all Xaa locations
  Clone ID: MRT4577_70910C.1.pep
TGPRTPGAFAXDRPCPCGXKXIIGRRCADRSTPVTCGRPCEQLLPCKRHRCEKVSHASAGSCGDCAVLISVCCFCRNKNETLLCGDLMVKGELSEEDGVFSCNEVCGRTLACGNHACKDMCHPGPCGECELMPRKVSTCHCGKTRLQERRASCLDAIPTCDKICDKKLPCGVHKCKVNCHEGECPPCLVLVEQKCRCGSSGQMVECHKFSMEEFRCKKPCGLKKNCGRHRCSEICCPLSRKVAHLEGGNWDPHLCQISCGKKLRCGQHACQLLCHSGHCPPCLETIFTDLTCACGRTSLLPPLPCGTPTPSCPHQCSVPQPCGHLASHSCHFGDCSPCIVPVMRECIGGHVMLRNIPCGSKDIRCTQPCGKNRQCGIHACNRPCHPPPCDQTPANGDASSSSGGKASCGQVCGAVRRECKHTCTASCHPSSPCPDLRCEFSVPITCSCGRITATVPCGAGGSSMGDNMFEVSIIQKLPMPLQSVESNGRVPLGQRKLSCDEECAKMEKKRVLAEAFDITPPNLDALHFGENSSSSDLVSDLFRREPKWVLAIEERCKFLVLGKVRGSSSSNLKLHVFCPMMKDKRDAISLIAGRWKLSVQSACREPRCFVTIHVTSKSKPPARILGSKAGVPVTAAHPYFDPLVDMDPRLVVAMLDLPRDADVNALVLRFGGECELVWLNDKNAIAVFNDPARAATALRRLDYGSAYQGAAMFMPSSAQASSSGNVWXRAEGWGVXARNNPWKKPASAAEPDPPSGDWTGVAGHAPAPGRRGVNTASQVMGTTNRWNVLESDAAASSGPGDERKPAQRMDTAYSAIPNVGNAGPSMTKLQPDAEVDHWEEACE

SEQ ID NO: 337435 - protein, 251 aa, Zea mays
  unsure (1)..(251): unsure at all Xaa locations
  Clone ID: MRT4577_70911C.1.pep
RAAGIRHEVQSACREPRCFVTIHVTSKSKPPARILGSKAGVPATAAHPYFDPLVDMDPRLVVAMLDLPRDADVNALVLRFGGECELVWLNDKNAIAVFNDPARAATALRRLDYGSAYQGAAMFMPSQRSXSSGNVWXRAEGWGVXARNNPXWKKPASAEPDLPSGDWSGVAGHAPAPGWRGVNTASQVMGTTNRWNVLESDAAASSGSGNERKPAPGTDVHSTVSNTGNAGPSVTKLQPDVEVDDWEEACE

SEQ ID NO: 337436 - protein, 69 aa, Zea mays
  Clone ID: MRT4577_70912C.1.pep
CLVFLGDGPKLLVSQSDGTIPGPTDQGGSWVTCGAMRLKFWKMGPLGLCLCLGLESLPFTFLAGVCCGR

SEQ ID NO: 337437 - protein, 126 aa, Zea mays
  Clone ID: MRT4577_70913C.1.pep
MNILESSTRSGCQVVLNEIEHQRALMKGLYDLIVPTLDPCSRQEKLVQQIFQDISSSSGKVLSFLEPGDNSKKQANLIKYRRKRGKNSGVESHMLGEEAKEIGNKRRCVAKEVYIYMFTCVSFTWA

SEQ ID NO: 337438 - protein, 111 aa, Zea mays
  unsure (1)..(111): unsure at all Xaa locations
  Clone ID: MRT4577_70914C.1.pep
PLRLLVWVLQDYDAGEWVLKHTVGFPELFGRIACQFRVEYSVVAVHPDGNWVFFVRHWDRKLVAYDMDRREVRVVADLGXRRCRRXLPTPYVPLYSASAGLTNASVGFRVE

SEQ ID NO: 337439 - protein, 80 aa, Zea mays
  Clone ID: MRT4577_70915C.1.pep
RPAGSRRAPILLSAPTSRHGRPLPPRHATHLAILASLRTLCLRDSHYLVCTRRTNALRGTRHQRPLVTAPVRADSEPTTS

SEQ ID NO: 337440 - protein, 64 aa, Zea mays
  Clone ID: MRT4577_70916C.1.pep
FQTSNLFMICHKSGKYSHTTQPGHFLIYTVSTYDTNRRFFDNPHIERGHQTTQAHLLLKRPMSF

SEQ ID NO: 337441 - protein, 41 aa, Zea mays
  Clone ID: MRT4577_70917C.1.pep
GRGWQHHHHQMQAGVQHLTTDSACLFSFWLLKERVSPHSSY

SEQ ID NO: 337442 - protein, 401 aa, Zea mays
  unsure (1)..(401): unsure at all Xaa locations
  Clone ID: MRT4577_70918C.1.pep
MASTALVAVAVGGAISLGLVASSGVASCSLRAGGDSRRFGPRLVLLRRGGAEGEGTRTRNCPIFRCANKVDVVTEDDSVDGDVTDDGEDLEAAADDAIDADVGTEDELESSLPEDVEWIKQQPLPYPLDALEPYISKETVEQHWGVHQQIHVDRLNGMIGGSEWEGMSLGQMMLASFNEGREQPHPPFFHAAQVWNHDFYWRSMKPGGGGKPPERLLKFINRDFGSHEGMIRQFMDAALTQFGSGWVWLSYKGSGLPYVKSRSPIPSDNHGRLVISKTPNAINPLVWGHSPLLAIDVWEHAYYLDYEDRRADYVSAILEKLVSWETVESRLAKAVARAVERDEHLRRRILRKQRLAQANGQSRARSRARQGXARRPGSRQEPSRGGMTTQLVNGVHQDTVM

SEQ ID NO: 337443 - protein, 428 aa, Zea mays
  unsure (1)..(428): unsure at all Xaa locations
  Clone ID: MRT4577_70919C.1.pep
MASTALVAVGGAISLGLVASSGVASCSLRAGGDSRRFGPRLVLLRRGGAEGEGTRTRNCPIFRCANKVDVVTEDDSVDGDVTDDGEDLEAAADDAIDADVGTEDELESSLPEDVEWIKQQPLPYPLDALEPYISKETVEQHWGVHQQIHVDRLNGMIGGSEWEGMSLGQMMLASFNEGREQPHPPFFHAAQVWNHDFYWRSMKPGGGGKPPERLLKFINRDFGSYEGMIRQFMDAALTQFGSGWVWLSYKGSGLPYVKSRSPIPSDNHGRLVISKTPNAINPLVWGHSXSSRLMFGRYIFYIVLFLSFAFHKVYIFTNIYLHFRGQHAYYLDYEDRRADYVSAILEKLVSWETVESRLAKAVARAVERDEHLRRRILRKQRLAQANGQSRARSRARQGXARRPGSRQEPSRGGMTTQLVNGVHQDTVM

SEQ ID NO: 337444 - protein, 45 aa, Zea mays
  Clone ID: MRT4577_7091C.1.pep
FPLVKSVYSLGKERLLHPIPCMVYWVLAVGGRRWLTIEKSYWRLL

SEQ ID NO: 337445 - protein, 163 aa, Zea mays
  unsure (1)..(163): unsure at all Xaa locations
  Clone ID: MRT4577_70920C.1.pep
HQRNNLRQRRNNEEQKTEKPTLKRTKRKKRENRYGRPVYGPEVXAAGMGGAAMYELARKXHDSPIGEKIRLGENPGATQVYEETAGLIVNDRVMRTRKPXLSAALXPGILGNGKGSLXRPGKTLPGSXGDAPIARGVLGPALDTDALWEFQSIKRRVGDVTTG

SEQ ID NO: 337446 - protein, 160 aa, Zea mays
  Clone ID: MRT4577_70921C.1.pep
IGYLEAGREYLCPPVQCRDAAMRETARANRARPRSSVLRTSTHAPASQPSSSATRGPRLRHAAEDSIVAVGLYKGRAEPRAPWMPPHLSCTCDRPRELPSLPRSPSSSSSPTSAISPTGTSTWAWYHLQLPRRDVLPDHAATSVRRCTTADLSLRATTLM

SEQ ID NO: 337447 - protein, 86 aa, Zea mays
  Clone ID: MRT4577_70922C.1.pep
PWRPSFVTMHAYVLPKYRVFISEGVFGMNSSSCIDKPEVIQRVFMYIAVVSLNVCAIVPCNNTYNNKVAQSVSFIKKKKNQKTRNI

SEQ ID NO: 337448 - protein, 76 aa, Zea mays
  Clone ID: MRT4577_70923C.1.pep
GGGGGFFFFFLFFFFFFFFFFFLEGTFQEAFIKKRPKQMIINPTYKKIPRGEEGGERKQPTTFFITLPHGVNTGTP

SEQ ID NO: 337449 - protein, 57 aa, Zea mays
  Clone ID: MRT4577_70924C.1.pep
RTKQKGKPTIPWKTVSHHPPSAWPAATEHLIPPLIVVIIVEKLKFTNNNTKKTSVRV

SEQ ID NO: 337450 - protein, 155 aa, Zea mays
  Clone ID: MRT4577_70925C.1.pep
PQISPHNIHTYTLIISKERRRVRKQVEKHCGISPRVDDIVGWGCIDLGVTGCDISSSMPWARHRGDSISAAAAIVRKPTGDTAMGRSRFLGFPWKTRGEGVPWLLAWEKMDRGWRRGGHEKSRGLGRPPAAGGRGRGWCCCPVKKENVGGSRNGR

SEQ ID NO: 337451 - protein, 42 aa, Zea mays
  Clone ID: MRT4577_70926C.1.pep
RNRTTMHLVNMRHTLFFVSMYQCRMFTRCITNKSRRRIMCFQ

SEQ ID NO: 337452 - protein, 71 aa, Zea mays
  Clone ID: MRT4577_70927C.1.pep
HIGAYVPLLMHHDSTRINRRARFAVHPWRNNTTVHFTHATLVHLQLLSHAKPVGILNLPHAPYEVLEPLLR

SEQ ID NO: 337453 - protein, 174 aa, Zea mays
  Clone ID: MRT4577_70928C.1.pep
MQKQAPKLVVGILLLGAGAFFLNRAEKSQLFQQQGIATSIGKVTSTTKPIVLEIRQIPQRVKKLIELLPHQEVNEEEASLFDILYLLLASVIFVPLFQKIPGGSPVLGYLAAGVLIGPYGLSIIRNVHETKAIADFGVVVLLFNIGLELSVERLSSMKKYVFGLGSAQVLATTA

SEQ ID NO: 337454 - protein, 55 aa, Zea mays
  Clone ID: MRT4577_70929C.1.pep
RSFFLMSREGNAVYEENAPIRPFIGLSHFLAFRSHVVLCVIPKLSAIIDSLPWIT

SEQ ID NO: 337455 - protein, 82 aa, Zea mays
  Clone ID: MRT4577_7092C.1.pep
MWRRALAMVLFMAGAALLAGACRARAQQGVWSIITPPMFQSMLSHRGDRGCQGAFYTYHPFIEGRTKVPGFGTTRDQQTPKP

SEQ ID NO: 337456 - protein, 87 aa, Zea mays
  Clone ID: MRT4577_70930C.1.pep
NQPLQVLPSIFQRCMLLYGSRTFPRYYIVEIPSRTVVLWSNASSISRPPPYLGCSGCRRGTLPALRGFAAGYVRRSGWPNALPESPR

SEQ ID NO: 337457 - protein, 90 aa, Zea mays
  unsure (1)..(90): unsure at all Xaa locations
  Clone ID: MRT4577_70931C.1.pep
TLKYELHQCLXYGTEIAMNTLLFLXVGGAXXARGKYLLKASYARICTQTLVMSHTXXNNHQGREGRVKMKQXHIGLSKNASTLRCSXRQV

SEQ ID NO: 337458 - protein, 58 aa, Zea mays
  unsure (1)..(58): unsure at all Xaa locations
  Clone ID: MRT4577_70932C.1.pep
GVEYQLPNLIVGAVTKESSMVLLKMEYLLSSYSIFKSTIDTFVCXSTDDEVWKLLLHP

SEQ ID NO: 337459 - protein, 65 aa, Zea mays
  Clone ID: MRT4577_70933C.1.pep
KCIVVLDPATCSLRRPGYRSTGYVGLCCKGYGLHVVRFSIFWCRCLEGSVSRLQNLKGLPGTRCK

SEQ ID NO: 337460 - protein, 56 aa, Zea mays
  Clone ID: MRT4577_70934C.1.pep
TARCCSDRFVRLAGQLSKPSKNGDRRSDGGKSCTTHLTAQVLMLERAASKLVFAHP

SEQ ID NO: 337461 - protein, 74 aa, Zea mays
  unsure (1)..(74): unsure at all Xaa locations
  Clone ID: MRT4577_70935C.1.pep
KVFTATDLPGRGVRFSNXKGQAPEPGQNITLVSFQREGDAVARARELQRASLAGAPVRIEISKGVSVKHPPIIK

SEQ ID NO: 337462 - protein, 71 aa, Zea mays
  Clone ID: MRT4577_70936C.1.pep
GPDQHAHERTQALGSSRRVSVYRPDTCISTLPLYRASRRANPHRNFPDTTVVTLLRCPAHAKHPGRSVSCR

SEQ ID NO: 337463 - protein, 99 aa, Zea mays
  Clone ID: MRT4577_70937C.1.pep
SRRGRGRVQCPRRDRGSRRTPEARSAARGGAMCPSGSRSSTTSSTTRWRRRRGSRAARGAEESAASEARKGGDRERETGLRRLGGEAEEQEERAEVSPF

SEQ ID NO: 337464 - protein, 62 aa, Zea mays
  Clone ID: MRT4577_70938C.1.pep
HPPAGGRNQWISLARLWYIGYFGHKITRVRSSLNFCNIVAPLYTRCDVSNFFLPLISFLEYG

SEQ ID NO: 337465 - protein, 38 aa, Zea mays
  Clone ID: MRT4577_70939C.1.pep
LQHIKKKKKKKKKKKKEKKKKKKKKKKKKKIKPGPKGQ

SEQ ID NO: 337466 - protein, 50 aa, Zea mays
  Clone ID: MRT4577_7093C.1.pep
SRQLAHMFTSFGSFVSGDSEALMPGGIFSSTAESRRCCPGMGWGLSTPMS

SEQ ID NO: 337467 - protein, 106 aa, Zea mays
  Clone ID: MRT4577_70940C.1.pep
APKKTKGRGLSKDKFLFKNVMGPTKAMISRSKEPQQVKSAGCGQNGSLRRTPRAPKPRAGKEAVALEGNRSYGRKKAVYQKPGPIIRTPPFSEATKMNLCGEKVPG

SEQ ID NO: 337468 - protein, 52 aa, Zea mays
  Clone ID: MRT4577_70941C.1.pep
SGSMVKSRGISVEFGEPAYRRYCVRNVVGAVCIGEFSVFFLLSSNENNKYQP

SEQ ID NO: 337469 - protein, 86 aa, Zea mays
  unsure (1)..(86): unsure at all Xaa locations
  Clone ID: MRT4577_70942C.1.pep
AKTKGTETSHKLKKKAISNCRIHIPVLITQKIAPPKRPAKRFTCFFXXACFLGPPSFDTPSLNXPQYQRKRRWRERQAATVATNPG

SEQ ID NO: 337470 - protein, 120 aa, Zea mays
  unsure (1)..(120): unsure at all Xaa locations
  Clone ID: MRT4577_70943C.1.pep
KENALIGFFPVXDVRVFNPPNGPLLFKVAEAXKTTXGGFLFPPAPKGNPFFGSLVPLAPGPLGGGGPRNPPSFPPGSPVLFSQFPGGGFQGGAGGSFVPRGFAVMAVFSCSPPPPAPGGR

SEQ ID NO: 337471 - protein, 104 aa, Zea mays
  Clone ID: MRT4577_70944C.1.pep
PAAALCWGGVFSVFWGSNKRWDHSLVAKHPWRGNSPLRRTTLTAPMNRRSRKPTYVAACGDDATEESNPPPEPNHHKLPSNGINTNLNSPSPAGQLSPHPGRLQ

SEQ ID NO: 337472 - protein, 115 aa, Zea mays
  unsure (1)..(115): unsure at all Xaa locations
  Clone ID: MRT4577_70945C.1.pep
QAFPLRGEGFFLSAPCNMEQQSAFXCLGLFLGIQEKGSQSVTVVYEFVTRKTPSGDFVSKHKGIYPFPGEKGVGHRNLFAIPWQKFLAEHTLFFGEGRPHLKPELSIKPPKNKGL

SEQ ID NO: 337473 - protein, 387 aa, Zea mays
  Clone ID: MRT4577_70946C.1.pep
ASEKDARGELLCAGENFAHSGGELLEFPLDGCSAGGGFPVNDHHVSGQSVSPQKKRRKTDNGDDGEACKRCSCKKSKCLKLYCECFAAGVYCSEPCSCQGCMNKPIHEETVLSTRKQIEFRNPLAFAPKVIRMSDAGLETGEDPNNTPASARHKRGCNCKKSSCLKKYCECYQGGVGCSSNCRCESCKNAFGRRDAETELPEEMKQEESDQTENPQQEKENDQQKANVQGEDHPLLDLVPITPPFDFCSSLLKLPNFSSAKPPRPTKARSVTSRSSASKATAAVQPCRSSKLAASASASGIDEETPDILHEPDSLSNCVKTTTSPNGKRVSPPHNALGSSPNRKGGRKLILKSIPLFPSLTGDTNSGSAMNSTDSAFCASPLTLGPS

SEQ ID NO: 337474 - protein, 165 aa, Zea mays
  Clone ID: MRT4577_70947C.1.pep
MSALRIARAALRARPAAIARPIQRRGYAEVANDKIKLSLALPHQSIYKSQDVVQVNLPAETGEMGVLANHVASIEQLKPGLVEIIEEQGGNKQFFLSGGFAVVQPNSVLSINAVEGYALEDFSAEAVRNQIAEAQKIASGNGSEADIAEAKIELEVLESLQAALK

SEQ ID NO: 337475 - protein, 66 aa, Zea mays
  unsure (1)..(66): unsure at all Xaa locations
  Clone ID: MRT4577_70948C.1.pep
IIILALFYGAHYISDIATTSNIMLHSFLTALYTMQVTAILSFAAACSAAXVVVLFERDAYLCRMDP

SEQ ID NO: 337476 - protein, 112 aa, Zea mays
  unsure (1)..(112): unsure at all Xaa locations
  Clone ID: MRT4577_70949C.1.pep
MSGQAYDYDHLLCDIEGQHLXADAIVYHDGSXTAXQSENFPXLKPEEAAGMIKDFDEPXTLAPTGLFVXRTKDMVIQXEPEVVLIXKNRAESITIMKTVMAVIIEDRIDVPN

SEQ ID NO: 337477 - protein, 147 aa, Zea mays
  Clone ID: MRT4577_7094C.1.pep
MKKVVLKLDVHDDRHKAKALKAVSGLHGIDQLGVDIKDQKMTIVGTVDPVAVVGKLRKLFPAVQILSVGPGKEEKKDDKKDGGGDKKEGDKKDGDKKDGGDKKQQEAKPAMSVYPPYGYAHYGYPPPPPPRYVVHSAEEDPNSCVIC

SEQ ID NO: 337478 - protein, 198 aa, Zea mays
  unsure (1)..(198): unsure at all Xaa locations
  Clone ID: MRT4577_70950C.1.pep
MSAFIRVARGVRAAPIRPAMQPLVARSAVAHFTTSMPRRSEHAEETFEEFSARFEKEFDGVQDVFELQRNLNNAFAYDLVPAPSVIAAALKAARRVNDFGTAVRIFEGIKTKVENKGQYEQYLEELKPLRXELGVPXXKEELYXRGEVNGTIVSIFRALNPGCWPETEGNQTKRCGSLIAAAPNRLCLVAKKKKKNPR

SEQ ID NO: 337479 - protein, 56 aa, Zea mays
  Clone ID: MRT4577_70951C.1.pep
SCNLDKVFQKQLWMMNAVPVLHSKHGLFTRAHWQALVTQWSLLELLVRTHTQERQV

SEQ ID NO: 337480 - protein, 198 aa, Zea mays
  Clone ID: MRT4577_70952C.1.pep
LGKATSFIEQEDTRVKAIGRIEKTCTDRPEWKNNSHLCSLPKGSSVPSYFGNPSFCAPGGGGPCIHGVVESAIVLSKGLWVMTGSSPGAESFTVRTGRPAAAEEKIRRKDCLVQYQMIGTGLTSRFGLVGFEMKTRARSSSANSRCAAAYTARWWSWSCRRPCKCPPRPCPGRRQGFDRKGRCSCNNKGSSICGRTTH

SEQ ID NO: 337481 - protein, 167 aa, Zea mays
  unsure (1)..(167): unsure at all Xaa locations
  Clone ID: MRT4577_70953C.1.pep
TILPPDLLFCCRRSACSHDERLSARRGSRHHPEPLGQYNCALNDTVNTPQAEQGRISVTVNRLQSQVLADKKQTFSDSSKTSNGADFRHGPPPPGAQKLGFPKYDGTEDPLGWLHKCELFFHSGRSVHVFSILSIAYMPHEGDAKVIIRDGTGNRCMRSFFAXTAXR

SEQ ID NO: 337482 - protein, 153 aa, Zea mays
  unsure (1)..(153): unsure at all Xaa locations
  Clone ID: MRT4577_70954C.1.pep
VCFKLGHTADRCWHRYDENFVADQRHVVAAATNSYTVDTNWYTDTGATDHITGELDKLSFREKYNGGEQIHTANGAXDQDTRNTLLKGRCHKGLYPIPSAPIKQAFVVSKPSFDRWHRRLGHPAAPIIHRVISSFNLPCHVKSNKEYVCDACQ

SEQ ID NO: 337483 - protein, 55 aa, Zea mays
  Clone ID: MRT4577_70955C.1.pep
NVFRFSPCTNFFNQIKLYIRHTLVIVWAFSHSYPSLKYITHALNCFFKPIHNFIP

SEQ ID NO: 337484 - protein, 106 aa, Zea mays
  Clone ID: MRT4577_70956C.1.pep
ILCMGTGFQRETLKTRLGRKIPRDFRTMGLGEPLKKGAVSPSPQNLGHAKRLFWGKKKTRAPPIPLLNPAKGWGEKKNKFFPPKKKKKKKKKKKKKKKKKKKKPRA

SEQ ID NO: 337485 - protein, 116 aa, Zea mays
  unsure (1)..(116): unsure at all Xaa locations
  Clone ID: MRT4577_70957C.1.pep
EGAQKEPQMSIPSXIRQRDWFPSDFTFLATTQEDHIEGTRNDKGKGESTGDHFCHKLTKKILDGSMXRRRSETDHMFKPDGRWLKEMNMNAYSFFISWPTSFPNGTTEGGFNPNGI

SEQ ID NO: 337486 - protein, 190 aa, Zea mays
  unsure (1)..(190): unsure at all Xaa locations
  Clone ID: MRT4577_70958C.1.pep
MALALQWPLQLPLQLQARPPAVTAGHHRRRXTESSPSGAPRRSXARCCASAAAAADTGKAQTAARRAYPFDEIEPRWQQHWEEHRTFRTLDIGEVFDTSKPKCYILDMFPYPSGAGLHVGHPLGYTATDILSRFKRMKGFNVLHPMGWDAFGLPAEQYAIQTGTHPKNTTERNIERFRTQLKSLGFSYDW

SEQ ID NO: 337487 - protein, 109 aa, Zea mays
  unsure (1)..(109): unsure at all Xaa locations
  Clone ID: MRT4577_70959C.1.pep
MHDALKDENDAETKLLARDINGVLNDALKVQNLXPTLEGIXVQMDSTLXSSLHHEAHIDGERDXYRILPLDSFAHEEEVTXQYSEXLLLVLHPDKNTSLGADEAFKLIS

SEQ ID NO: 337488 - protein, 117 aa, Zea mays
  unsure (1)..(117): unsure at all Xaa locations
  Clone ID: MRT4577_7095C.1.pep
ATPQAYRKGGTFYTNPNPEQDKANASELGNCAEYSGAPNEEEVLKXTREPLASEAADSYRRKRALLNGGGITNFTDVATTSNGIIRALADKESKLKALRRHIYVRRGGPKYQTGLGK

SEQ ID NO: 337489 - protein, 83 aa, Zea mays
  Clone ID: MRT4577_70960C.1.pep
GRPTSPTGVYVPPSAVSLVAAAATISSSSHLLLLSRHQAASLQCGLSCLGHPKGPGTVTAHAPAAKDVPFMAVVDTTAASTAA

SEQ ID NO: 337490 - protein, 80 aa, Zea mays
  unsure (1)..(80): unsure at all Xaa locations
  Clone ID: MRT4577_70961C.1.pep
ACWFLSGCCVGFSLAVPSAGARSGGCRVALGACARCGFLVAVAALAVRPPCFCRXCXLAAIVGACCAFFVAXAWVAXXSG

SEQ ID NO: 337491 - protein, 69 aa, Zea mays
  Clone ID: MRT4577_70962C.1.pep
MVKESAITSVGQSLTSSSRTGSPVLIRACGPSNFDSKPTRPPMRPPTSPPTRPPTRPPTRPPTRPPTRP

SEQ ID NO: 337492 - protein, 46 aa, Zea mays
  unsure (1)..(46): unsure at all Xaa locations
  Clone ID: MRT4577_70963C.1.pep
NSIQGMSRDFQXISFLTVSARLKTVPAYINTLIRSDRICIFSAIVN

SEQ ID NO: 337493 - protein, 83 aa, Zea mays
  Clone ID: MRT4577_70964C.1.pep
LGSMSSAVPLTLRLLRRRPSRFSRSSRGIGIIISLRSIAPAAPRAPAGGGIGGSQLIGYASPGTARRSSPPCVAWWTAACGWN

SEQ ID NO: 337494 - protein, 110 aa, Zea mays
  Clone ID: MRT4577_70965C.1.pep
KALGIPTAAGVLGQLTASSSHIMTVNCYPACPQPELTLGMPSHSDYGLFTFVLQDHVEGLQVMHDGRWLTIDPIPGSFVVNVGDHLEIYSNGRYKSALHRVHVNSTRPPT

SEQ ID NO: 337495 - protein, 61 aa, Zea mays
  Clone ID: MRT4577_70966C.1.pep
PLVDPGFDPRGPLSKGPPASRTLVLGGLDRSDSARERKGAMRTGGEWEGEERRRGMTGPRV

SEQ ID NO: 337496 - protein, 38 aa, Zea mays
  Clone ID: MRT4577_70967C.1.pep
YYTIITQNYSHISNCNPCYLIIRLFHLYYNFTQFTSID

SEQ ID NO: 337497 - protein, 67 aa, Zea mays
  Clone ID: MRT4577_70968C.1.pep
AWTVLTVAKERLCNRSSLPAGPSPRKTPVMLMTHDETLPDEKQMPRPADDCTCLGSWQQSLAHVDKL

SEQ ID NO: 337498 - protein, 97 aa, Zea mays
  unsure (1)..(97): unsure at all Xaa locations
  Clone ID: MRT4577_70969C.1.pep
DPSYMEPRCLPVTXYEEPGRCGGTCARKLKENEPLLDKIDDQELRRWHHXPCDGACCTGWRRCVRDTCYQGSNVNIGRPVPQAWKLLTYIIQIMGQC

SEQ ID NO: 337499 - protein, 158 aa, Zea mays
  unsure (1)..(158): unsure at all Xaa locations
  Clone ID: MRT4577_7096C.1.pep
SQXXTNSXTGENAXPGAAPRXXRAAXTDRHTXAPKGATQGEGSAHPEEGEGGXGSXRQXNXTXAXPXGXXKERXEXXDXDKXEXKXTXXEGGGXGGANETAAXHXKAEXAAGGGSXXKXDPTXKXXPGEEGQDENXKAKEXXTNNXKAXEAHXXANPE

SEQ ID NO: 337500 - protein, 35 aa, Zea mays
  Clone ID: MRT4577_70970C.1.pep
QIHLTLFVLNQASLTLTKFSRKKMHQHLQHKISLH

SEQ ID NO: 337501 - protein, 165 aa, Zea mays
  Clone ID: MRT4577_70971C.1.pep
WRRPGLGTDRIDRAALPAATGANPLLLLGTGTGTAAAGAGSSSSPTSTLAGAGGTLNTRPPSKCISITLPPSPSASACSSSRPWHGGQRDSSRSRHRARHAHAARSASDDDDDDVGALSPLRQPIGLDLDRGGARRCLLARLVVGLEPEVTRTSEWLLRLHTASL

SEQ ID NO: 337502 - protein, 126 aa, Zea mays
  Clone ID: MRT4577_70972C.1.pep
VHCTQTKPPQAKCWAVLCIKSARPWALASQLDPDTNPFCSVIPSWELDTDYYLHVTPVRDDFMFDSYPLSLPLEIMCWWDLECGWRARAQHVRRLLRLVGGPGMHGVDGSRVPGAWLGVGLVPVKT

SEQ ID NO: 337503 - protein, 143 aa, Zea mays
  unsure (1)..(143): unsure at all Xaa locations
  Clone ID: MRT4577_70973C.1.pep
RSARAQKNAPTNIFFSSRSDPTNAAFLGQGRATANASPVRDVSAVVDGRRITMRNYLRNGPDRVKDLGPFCVQTPSYLTGDHPGHYGXDTGGLSADPEAFTRNRALDVNHRHRATLPTPCCITQKVLEKRSPPDINEPVRSKA

SEQ ID NO: 337504 - protein, 52 aa, Zea mays
  Clone ID: MRT4577_70974C.1.pep
LQSTHSIPLPTRIIHANAHARGRHIQMMLMVSPSPAVAVPTLLFGAPVTPAS

SEQ ID NO: 337505 - protein, 147 aa, Zea mays
  unsure (1)..(147): unsure at all Xaa locations
  Clone ID: MRT4577_70975C.1.pep
ETARGPQNRPPPWGGKGKNVDRSTQETPRLGLRQRQGGFPPTPGFSGGGGPTSTPLSPPPPXGEGPREPQVPCPKAAPVPKKPQGEPXPPPGPEARLSGXRIPGKGGFRIPRNGPRGXPPXGGPPGGYPRGXRGGPPPGSPPKKGPS

SEQ ID NO: 337506 - protein, 112 aa, Zea mays
  Clone ID: MRT4577_70976C.1.pep
DAPPPALPSGCRGCYMHDLYSQYRFHKQDLGRLFIARLPPSMELPTIAGSHADNQARNRACAYHCVSYILSCITKHSPQNKQLMIGRVPGGIDNSLLYTQVDPWNVPEPHRE

SEQ ID NO: 337507 - protein, 67 aa, Zea mays
  unsure (1)..(67): unsure at all Xaa locations
  Clone ID: MRT4577_70977C.1.pep
REQWAAVRIQAAFXXXXVXXXPPPPPPLQLLIFFFVVKFPINKQICVSYSLSRKASLKNGRRGLLLV

SEQ ID NO: 337508 - protein, 53 aa, Zea mays
  unsure (1)..(53): unsure at all Xaa locations
  Clone ID: MRT4577_70978C.1.pep
SYDAPXLPPHRIFKAVRIXPXXYHRTDSRFNLVFNEDKKNHSTIITKKHLNYY

SEQ ID NO: 337509 - protein, 151 aa, Zea mays
  unsure (1)..(151): unsure at all Xaa locations
  Clone ID: MRT4577_7097C.1.pep
RAVCPGTAVVLVRASAGGAAVAHAGRLAVFGLVVFVFLGGALSRGGGAATVKTXKIGAPPPPSGGLPGTLISDQXRDFDLPLQERFYLSPLPPXXAXXRVKTSAXDIXNLKPLLXXNAWPSLPPALRLRASXLRLPLXTXFASXPPGGEQP

SEQ ID NO: 337510 - protein, 126 aa, Zea mays
  Clone ID: MRT4577_70980C.1.pep
NGTTGCFLNHEPGLSANTKAGPDRPGGRGRASTQGGPNQGSRAGNEARRRKGQSGDRGEQGIRAQHHTTDQTGTKKGKAWEDEGGTKRTINGRHTRPASHPKNPTSQRKKGIGQPAGRGVTRRESR

SEQ ID NO: 337511 - protein, 118 aa, Zea mays
  Clone ID: MRT4577_70981C.1.pep
LGVCHELGSKTHHSPKTPRNPPMCLRILLRSGCNEDNLLQTAAAQGLLPQLPRIPRTNSYYRAGMRAAPGLLHRALPRLWPHTVEHRLGSRGEGESSIQQTWEQMGALGGREVRRFLR

SEQ ID NO: 337512 - protein, 109 aa, Zea mays
  Clone ID: MRT4577_70982C.1.pep
MAPVEAQSSQGRRSVLELLWFTEPSLTTHAPWLTVSRAPAGQRRAPRWLLLRYDLRPSAEPKRSGRAPARRLQQAAGSRRRRRGPWRPRTRGRGGWRRRGDEGWAPVIQ

SEQ ID NO: 337513 - protein, 77 aa, Zea mays
  Clone ID: MRT4577_70983C.1.pep
LSFVRPGAAGQLASSSSRVVAASQPAWRRGGGGACMYVAALDDHAANARVRSRAARGRAGRWRWPPRPSYRLAWRAA

SEQ ID NO: 337514 - protein, 590 aa, Zea mays
  unsure (1)..(590): unsure at all Xaa locations
  Clone ID: MRT4577_70984C.1.pep
PGFTQQSVARNNVPNMGQWQNTRFAAEKDFKKEDIIQRRKLAPSSRAPTGPVIQSPVSSKSGELSGSSMGGQFGSAVTSAVTGVQKDKFAANSGTAVGFPSVASSPSDSMHRIQQPAVASSKRKTNSVPKTQPPVSAVGSPASVSNMHALLNASSPSIGTTPMGDQAILDKFVKIDNISHRYQLFNKKKFDKISQKKPIINRNQNVAGCLNSCFHSEDYIDTTRPLCNSMISGTINTCKGRVINFVSTKDMYQSHSRPFPVDFNELSDETVRMQYGDIKDFDDPNSYGCVFILPTKHYADLFAGQLIFFMLQDGHSKADDEVVRSTPFANISTPFGPLPNNVVSDVKQEGGVSQQLNAAAHANVAPGTQMQQLPVNRMLPSANGNQILAMQQGYMQGAAMPPRSQHLDQNLVQQPQHQQPQQQPLQQNAQAQVQQPSSLPLNQMQRPQVLPTSPLSQMLGPGSNLPMGSSQIGKNKAPPTSLQLQMLQAQPQQPMSRKVMMGLGSAMNMGNMVNNVVGLGGLGNVMGMGNVRPISSPMASMSGLGNNSNPMNMXMASNLAAAGLRPGMNPAAIAXVRMXLAQQRAAGMYP

SEQ ID NO: 337515 - protein, 231 aa, Zea mays
  unsure (1)..(231): unsure at all Xaa locations
  Clone ID: MRT4577_70985C.1.pep
MAALTSAKGALLPSWARSSSGGHGGDLWRVLGKALATAGGGGGGCSLLLPRRWQSSLPQLDHVADRSNEESGGGGGEIDWDNLGFGLTPTDYMYVTRCSPEDRGDFPRGELCRYGNIELSPSSGVLNYAQGLFEGMKAYRRPDRAGYTLFRPEENARRMQRGAERMCMPAPSVEQFVHAVRQTVLANRRWVPPQGKGALYLRPLLIGSGPILGLAPXPEYTFLIYAAPVGN

SEQ ID NO: 337516 - protein, 353 aa, Zea mays
  Clone ID: MRT4577_70986C.1.pep
MRVNVLRRSNEESGGEIDWDNLGFGLTPTDYMYVTRCSPEDRGDFPRGELCRYGNIELSPSSGVLNYAQGLFEGMKAYRRPDRAGYTLFRPEENARRMQRGAERMCMPAPSVEQFVHAVRQTVLANRRWVPPQGKGALYLRPLLVGSGPILGLAPAPEYTFLIYAAPVGNYFKEGLAPINLVVHDEFHRAMPGGTGGVKTIANYAPVLRAQMDAKSKGFTDVLYLDSVHKRYLEEVSSCNVFVVKGGVVATPDTRGTILPGITRKSVIELARDRGYKVEERLVSIDDLMGADEVFCTGTAVVVAPVSTVTYQGERYEFRTGPDTVSQELYTTLTSIQMGMAAEDSKGWTVAVE

SEQ ID NO: 337517 - protein, 482 aa, Zea mays
  Clone ID: MRT4577_70987C.1.pep
MAATCGGSWGRRWLRCVRDSRRVCVCVPVRTVHITSQSHALTSRRVEAGLCGPLLLVSVTDRFFLIRPWPPPRPGRSMPLPAAMRSSMLRGRCNLFLPFAARCSQAGGGGGGGCSLLLPRRWQSSLPQLDHVADRSNEESGGGGEIDWDNLGFGLTPTDYMYVTRCSPEDRSDFPRGELCRYGNIELSPSSGVLNYAQGLFEGMKAYRRPDRAGYTLFRPEENARRMQRGAERICMPAPSVEQFVHAVRQTVLANRRWVPPQGKGALYLRPLLVGSGPILGLAPAPEYTFLIYAAPVGNYFKEGLAPINLVVHDEFHRAMPGGTGGVKTIANYAPVLRAQMDAKSKGFTDVLYLDSVHKRYLEEVSSCNVFVVKGGVVATPDTRGTILPGITRKSVIELARDRGYKVEERLVSIDDLMGADEVFCTGTAVVVAPVSTVMYQGERYEFRTGPDTVSQELYTTLTSIQMGMAAEDSKGWTVAVE

SEQ ID NO: 337518 - protein, 84 aa, Zea mays
  Clone ID: MRT4577_70988C.1.pep
FMCLQKLEPKMARPPPPPENIRHLAPPISARSSPTFCRRTRVRFCYAVAPDSSSSYGLILRHSHLTTTHTPTNKSKYAPTPGAR

SEQ ID NO: 337519 - protein, 85 aa, Zea mays
  Clone ID: MRT4577_70989C.1.pep
ESTRETLKPHGGKMDNNGLTNGGGVKKKLAGKEDFPWPTQKKKKKPLLGWIKKAKLLNPGLEREIPPFMVVQGTGVPGGLHYRPF

SEQ ID NO: 337520 - protein, 157 aa, Zea mays
  Clone ID: MRT4577_7098C.1.pep
EHHPSASYFSSSHIGVSHTLWFSSVHPAALRTGVRSTDRFHFGVDHRRSYHHDLGLGATVMVRGSRRSRSHRYVADDGRTCFSRFLSSAEAYTRLFGVVSFPRRRRSVEVFQLSHLAGIHVVLAMQRSTIRERRGIAAERRKSIKPAVRRQRDQRMR

SEQ ID NO: 337521 - protein, 40 aa, Zea mays
  Clone ID: MRT4577_70990C.1.pep
VLCSGVVNFQVKKNKKKKKKKKRTEDIKLIKYTKKCNTDN

SEQ ID NO: 337522 - protein, 131 aa, Zea mays
  Clone ID: MRT4577_70991C.1.pep
LPLTLQHQGARRGLFFWRRTRIRGPGIVRQAGRRIRHVRASDEGNFDQNQYNWSSFFFYDSSLVNLRYELGRRQDDWNEDMLAFTLCMRPGSHGRLMPMVTDLPGSLDPMSIVVLRTGSPAAAALVYPDQH

SEQ ID NO: 337523 - protein, 98 aa, Zea mays
  Clone ID: MRT4577_70992C.1.pep
GAPSRLGLARWKILKRLKFPSSPGGGPIFGVPWAPQRVFFPPTPKASPLRAPSFGLFFFGGPFWNSPPQIRFRSVVFFLKFFFGHPKNMLSLGGEGYL

SEQ ID NO: 337524 - protein, 102 aa, Zea mays
  Clone ID: MRT4577_70993C.1.pep
TAGPPLFPRIRHALTLKLSCVDSYEQPMSHLLPPTYLLHVRQRLTRSRTVGVRADHLRMIPGYRAIDSPTCGALYECRRADGECRRTSSTRADRGDSEKSPY

SEQ ID NO: 337525 - protein, 76 aa, Zea mays
  unsure (1)..(76): unsure at all Xaa locations
  Clone ID: MRT4577_70994C.1.pep
VTGHPVVHDCHQLLEPFQDSRTDEAHSIYILRHRDVQELHATHRAYPEIYREDLLHXITDEVLAVHARAAILHTLD

SEQ ID NO: 337526 - protein, 95 aa, Zea mays
  Clone ID: MRT4577_70995C.1.pep
FADLVNLFPAQVKVPTAMSALLLYISSAILIEMLVFLVRVVQPISSLLFTTIPRLRLLLVSFFLTFFGYNGYCQQYQIRNVIRNSYIYFIFLLPL

SEQ ID NO: 337527 - protein, 48 aa, Zea mays
  Clone ID: MRT4577_70996C.1.pep
KLQVQGSRIKVCKHLSTTGMGPSDHQYVSFVMYDFTFFKHTRLILPSE

SEQ ID NO: 337528 - protein, 63 aa, Zea mays
  Clone ID: MRT4577_70997C.1.pep
LSFFGCGFHCLIEYFWCPVFINDWSVVQGIAVISSTILRLVKSLILSKHLPLLAGQGGARAVA

SEQ ID NO: 337529 - protein, 49 aa, Zea mays
  Clone ID: MRT4577_70998C.1.pep
KNKPIWDKIRKSPLKKTIILFVPLQAWKHSQDQGLTLGFILSRETNLLM

SEQ ID NO: 337530 - protein, 35 aa, Zea mays
  Clone ID: MRT4577_70999C.1.pep
IEKKKKKKKKKKKKKKKKKKKKKKKKKKKKKKKFV

SEQ ID NO: 337531 - protein, 124 aa, Zea mays
  unsure (1)..(124): unsure at all Xaa locations
  Clone ID: MRT4577_7099C.1.pep
MIKCCWLMMRHCRLKSCIGPPNHPXIAKKDARGSPNRTKDDTSSDEFDKDSIERDDRWLEELGCKTLELFAVTHIFSRAEAAYQEAMALQLQEELIREEASERAGTELKPKRRAADKKRRGKNM

SEQ ID NO: 337532 - protein, 119 aa, Zea mays
  unsure (1)..(119): unsure at all Xaa locations
  Clone ID: MRT4577_709C.1.pep
RKPTPPAGEAEGKHGPGKKPAQXGGSXXRAGGQXSNATXXXEKXXNEGRNENXXAHQQAEDQDKKXXDKQANXKRNXNPEAPAAGTNKRRNKQQAXNTEPRTREEPGKPTXTPKKGKPS

SEQ ID NO: 337533 - protein, 68 aa, Zea mays
  Clone ID: MRT4577_70C.1.pep
YLERVAPLTHAVGNVLKRVFVIGFPIVIFGNKISPQPGIGPGIAIAGVAMFSIIKAKIKEENRQGKKA

SEQ ID NO: 337534 - protein, 78 aa, Zea mays
  Clone ID: MRT4577_71000C.1.pep
MLGRAWDLISGEAGRSSTTEKLDQRMEGRGSMCRRIGDGSSAPMGDIVDGLHLWVTSLTAHRDDGPPNAWTPTTVECR

SEQ ID NO: 337535 - protein, 158 aa, Zea mays
  unsure (1)..(158): unsure at all Xaa locations
  Clone ID: MRT4577_71001C.1.pep
MCWATLLPSTAWKKVTGMSSFGPLMVHKGSEPEMHVIVHVDYEEHTLTESLGAAAGMIVQEVTGDVXMIDTPAYEAXRGLTFKHIGMCFYYXMTEESLTNYYGXRXGNQXLINLIDSHGXHWATSSEATSAILMTDRDSFAADCTERARVQTEPVLLL

SEQ ID NO: 337536 - protein, 66 aa, Zea mays
  Clone ID: MRT4577_71002C.1.pep
VQPGRVKQRKSAIEGIFWFFLNKIMPVDCKGLKMVFSKSSGRAPKLSGLPRNERHPCIKSVSWEPD

SEQ ID NO: 337537 - protein, 69 aa, Zea mays
  Clone ID: MRT4577_71003C.1.pep
ASPTSCVAVGQTAPYSCPPPQRRRTMGLAIRRRLISGARSGVQRTRSTCSTRWNFGSLTGFNSEGGRTV

SEQ ID NO: 337538 - protein, 181 aa, Zea mays
  unsure (1)..(181): unsure at all Xaa locations
  Clone ID: MRT4577_71004C.1.pep
LARRRYWWWFILHQLGICKPLHHSLAALAIARGTGGAPAPLLSLRLGARRALLVSEHAAAEECFTAHDAALGGRPRLLVGDRLNYGYTTVGWSSHGDHWRALRRFMAVELFAASRLAARAADRRAEVAALVGALVRDAPRAGAEVALRPRLFELVLNVMLRALTGAPXHGGGDVRGLRRSS

SEQ ID NO: 337539 - protein, 72 aa, Zea mays
  Clone ID: MRT4577_71005C.1.pep
NNKRCSTSSTKAMGTAMCSNSRFHEDLFPPRDSIASKNFFMELNGPCDPILLLWLFIHCFQDKHFLGLYGRW

SEQ ID NO: 337540 - protein, 75 aa, Zea mays
  Clone ID: MRT4577_71006C.1.pep
PVVFLQQQIFLPFSQLVAATRVSFLTKQQLLPFYQQFGVNPATFLKIQQLLPFVQLVLTDQGASYQQHIKGGALF

SEQ ID NO: 337541 - protein, 442 aa, Zea mays
  unsure (1)..(442): unsure at all Xaa locations
  Clone ID: MRT4577_71007C.1.pep
MSSSPSPAATRLDLDGNPIAPLTICMIGAGGFIGSHLCEKLMAETHHTVLAVDVYCDKIRHLVDPAPPHLAGRISFHRLNXKNDSRLEGLIKMADLXVSAYSSTYLPFFFLDCLLLLGMHFELTHGFPHPLLPCCCCLDLICAXTINLAAICTPADYNTRPLDTIYSNFIDALPVVKYCSENSKRLIHFSTCEVYGKTIGSFLPKDHPLRKEPEFYVLKEDESPCIFGPIVKQRWSYACAKQLIERLVFAEGAENGLDFTIVRPFNWIGPRMDFIPGVDGPSEGVPRVLACFSNNLLRREPLKLVDGGQSQRTFVYIKDAIEAVVLMIENPARANGHIFNVGNPNNEVTVRELAQMMTEVYANVSGEAPLDEPMIDVSSSQFYGEGYDDSDKRIPDMTIINKQLGWNPKTPLKDLLETTLTYQHKTYKEAVKRQMSQASAST

SEQ ID NO: 337542 - protein, 394 aa, Zea mays
  Clone ID: MRT4577_71008C.1.pep
MSSSPSPAATRLDLDGNPIAPLTICMIGAGGFIGSHLCEKLMAETHHTVLAVDVYCDKIRHLVDPAPPHLAGRISFHRLNIKNDSRLEGLIKMADLTINLAAICTPADYNTRPLDTIYSNFIDALPVVKYCSENSKRLIHFSTCEVYGKTIGSFLPKDHPLRKEPEFYVLKEDESPCIFGPIVKQRWSYACAKQLIERLVFAEGAENGLDFTIVRPFNWIGPRMDFIPGVDGPSEGVPRVLACFSNNLLRREPLKLVDGGQSQRTFVYIKDAIEAVVLMIENPARANGHIFNVGNPNNEVTVRELAQMMTEVYANVSGEAPLDEPMIDVSSSQFYGEGYDDSDKRIPDMTIINKQLGWNPKTPLKDLLETTLTYQHKTYKEAVKRQMSQASAST

SEQ ID NO: 337543 - protein, 69 aa, Zea mays
  Clone ID: MRT4577_71009C.1.pep
DAWADAWEERSISGSYAEEKKEVVVSCIAACMMRACKRKRCMATWLDSLFKICMRFLSFSFLIHLLKIA

SEQ ID NO: 337544 - protein, 82 aa, Zea mays
  Clone ID: MRT4577_7100C.1.pep
IEPISGVMKFSSEDAPLIRIDRTKMEADKGSLGAATMGPDVPCCVDELHECVFPPKHYLFGKPDMISVNKINWKRKKHSGGG

SEQ ID NO: 337545 - protein, 426 aa, Zea mays
  unsure (1)..(426): unsure at all Xaa locations
  Clone ID: MRT4577_71010C.1.pep
MSSSLSPAAAAAPLDLDGNSVAPLTICMIGAGGFIGSHLCEKLMAETRHVVLAVDVYCDKIRHLVDPAPPHLAGRISFHRLNIKNDSRLEGLIKMADLTINLAAICTPADYNTRPLDTIYSNFIDALPVVKYCSENSKRLIHFSTCEVYGKTIGSFLPKDHPLRKEPEFYVLKEDESPCIFGPIVKQRWSYACAKQLIERLIFAEGAENGLEFTIVRPFNWIGPRMDFIPGVDGPSEGVPRVLACFSNXCTCFYFYFLRMVGLILHHSILLRRCMVLQNLLRREPLKLVDGGQSQRTFVYIKDAIEAVVLMIENPARANGHIFNVGNPDNEVTVRELAQMMTEVYANVSGEAPLDEPMIDVSSSQFYGEGYDDSDKRIPDMTIINKQLGWNPKTPLKDLLETTLTYQHKTYKEAVKRQMSQASATS

SEQ ID NO: 337546 - protein, 98 aa, Zea mays
  Clone ID: MRT4577_71011C.1.pep
TKGVGNSNGLATGIYILGIKSSPLPKEEAPKTSSQAEFQSFWRASFIAGAALKKATHCSIGIQIPWGEGISLPSLRKNFGMNTNRPALELGQNHPPFA

SEQ ID NO: 337547 - protein, 51 aa, Zea mays
  Clone ID: MRT4577_71012C.1.pep
MNRAVLKPLPTLKTRGFCPFNCNCGSPKLQLGIFLKTLPGMNAIGNQTLRV

SEQ ID NO: 337548 - protein, 48 aa, Zea mays
  Clone ID: MRT4577_71013C.1.pep
LKQNNNVPLEEHLWMQQPLVLITKVYLIVTFLVFHDPSTLIITACNIY

SEQ ID NO: 337549 - protein, 63 aa, Zea mays
  Clone ID: MRT4577_71014C.1.pep
KEFVKLFQQPLFAEKWGCLSSLFGCFVQLHLFVNKILDHPSGWKLFSRKCKTLLCLMGGLCIF

SEQ ID NO: 337550 - protein, 213 aa, Zea mays
  Clone ID: MRT4577_71015C.1.pep
MALSAARRLSTTASSSSVADAPPKLSSLFQNPKPRPLPVRGVEEPRRGARPRPRQPWEEEAGALLLRLHKGRYLPGPDLSSAPHAVSPDAVKTAAEWFGHDHQPVAKWLSGSDLKKLALFGCPTVERRTVFASKRLRAFFNIQEDKICGSCKLRSSCKFVNQEVARHNRVILSDTMRIISLFVLDACPQELEITAELKASVCKLLKDAINLSS

SEQ ID NO: 337551 - protein, 46 aa, Zea mays
  Clone ID: MRT4577_71016C.1.pep
FIHFLSRNVCICKITDSYLSYSPARLRKKISQFFSCPRTLRCYHCC

SEQ ID NO: 337552 - protein, 100 aa, Zea mays
  Clone ID: MRT4577_71017C.1.pep
RDCSIIILMCVLILLLLLSNFEFNVFKCMRIIWLACRINKNMPSMLVDITILSKRELMQMLSFDSDWSKLVRMTLEVNHANFPLFHVGVPNLARLAPNGY

SEQ ID NO: 337553 - protein, 67 aa, Zea mays
  Clone ID: MRT4577_71018C.1.pep
RRARRAVIVKNRHKMIMAKSGGLAYMDTTDGGPFTSTVADCPHPMDTFEGKPVSLATVALRIDSTSK

SEQ ID NO: 337554 - protein, 108 aa, Zea mays
  Clone ID: MRT4577_71019C.1.pep
PPRPNGRHSTPPDTCKKRVGTGWPLEERAVSNSAARRRPETQSPPSGSQHTYVQHHAPMTLKGNRNNHHLTKVSSNMPPRSLLRPRTSCILSDNWMSSRPRPTYRSSS

SEQ ID NO: 337555 - protein, 42 aa, Zea mays
  Clone ID: MRT4577_7101C.1.pep
LFLCRFVAGVLLLVSMAPSCSWRGLFRVTRPDFTGRPIGKIS

SEQ ID NO: 337556 - protein, 91 aa, Zea mays
  Clone ID: MRT4577_71020C.1.pep
LFVWAPSGPLLFFNLTTTSSSSDGCGTDDFSCPNEQHLPCRSVEGNAAGPVPADQQFSTTFFRPIITKYTCPAFEPSEYHLLICSVISTRS

SEQ ID NO: 337557 - protein, 101 aa, Zea mays
  unsure (1)..(101): unsure at all Xaa locations
  Clone ID: MRT4577_71021C.1.pep
ALMLPCISYKSATASIFPHCSQAPIASLLPPYLSPALSFCCEIPILQPYWIQHAIASGYLPLXPFVLQQIFSLYQXVPLVHLFALXILSLQLSQLVLSNLF

SEQ ID NO: 337558 - protein, 63 aa, Zea mays
  Clone ID: MRT4577_71022C.1.pep
RAGFLSNSFEKRWFFFSFFNREACTLSYIAPDNVCKRDKLLAIVPNPVCRVTRRNPPYPGGLL

SEQ ID NO: 337559 - protein, 60 aa, Zea mays
  Clone ID: MRT4577_71023C.1.pep
VSTSRTAPYHGGRSIAILHPSNLQRSSNTHSNIYRSALLVPILRLLISALVGSHHLMPLV

SEQ ID NO: 337560 - protein, 50 aa, Zea mays
  Clone ID: MRT4577_71024C.1.pep
CWLQQSVSVKLKLGVMARHTTQRLYQLKHDVASIVVVKLARCIASQTRPV

SEQ ID NO: 337561 - protein, 79 aa, Zea mays
  unsure (1)..(79): unsure at all Xaa locations
  Clone ID: MRT4577_71025C.1.pep
MGRLLAALVFEYLEXPQLSHTMKLYFPECNLPDFXXNELKDFSNKSGAEGSKSAESGPMFLDVLECYLKYEVYLLLDQQ

SEQ ID NO: 337562 - protein, 40 aa, Zea mays
  Clone ID: MRT4577_71026C.1.pep
TKYPMWCGMSSRLMLSPSHAASFYSPVCDVNAPPRMSPKC

SEQ ID NO: 337563 - protein, 39 aa, Zea mays
  Clone ID: MRT4577_71027C.1.pep
ISWLNTVFLYINDGVLWSCNHAAYGPSIPLKTIWFLSHG

SEQ ID NO: 337564 - protein, 116 aa, Zea mays
  Clone ID: MRT4577_71028C.1.pep
GNKKPQIFMAMGGALVFVDPFIGDNLWAEPVKGEGQSWDIVAFHKIWGGLPAGPFPGGLGMGGGGQGPPLFFPKLYGCFGGPGIFPGGFLGPIRGEGARPRVYLVLFETPFPLGFC

SEQ ID NO: 337565 - protein, 183 aa, Zea mays
  unsure (1)..(183): unsure at all Xaa locations
  Clone ID: MRT4577_71029C.1.pep
MAREENVYMAKLADXVERYXEEMVDHMHNVPNTVDVEQLTVEERDLWSGAYXNVIGGRRASWXRIVLLLSETEXRSPRNEPQSIDEPLSTEYRAQIEAELINIRDGLLXVLDSLLVASSTGAVPKVFYLKMNVDYHRDLAESTTVPDRKESADITMMVYYAAHDIASTEMRPTHPISLAIAPN

SEQ ID NO: 337566 - protein, 150 aa, Zea mays
  Clone ID: MRT4577_7102C.1.pep
ETDTVSTLPTIRGIGYRLKKADNDQEMAGRALWLCDIKAKRLETNLLTAQVSQHAWWDETLLNLHLLVSLGAARNITTTTTDNKDDIRGAPADLPALRPTRRLRVPCVPRPPRRQHCLYQTFPLSDIPGCDQNLPAFNSTGRAILPLLGG

SEQ ID NO: 337567 - protein, 57 aa, Zea mays
  Clone ID: MRT4577_71030C.1.pep
QPSRTTTTRSFRPKICIGTRCFIYVSRVDTVLANQQNLQAAAPPQLVLSGNQLYQSN

SEQ ID NO: 337568 - protein, 78 aa, Zea mays
  unsure (1)..(78): unsure at all Xaa locations
  Clone ID: MRT4577_71031C.1.pep
MSSHSCVPMSNSYFIIIIALEKATWRLVERDVMTAVMVEEQERPXKKGDIFSFFGTVADMASMSNDELVAIDAANFMQ

SEQ ID NO: 337569 - protein, 95 aa, Zea mays
  Clone ID: MRT4577_71032C.1.pep
FHTNHPFLFIPPEGALLVLNNDPHIYTPYFCIWEVKPIHVRRIDRSLSTFIYENSPFVFPPFPKYVSPLQLTKYFTTCPFLLLDDKTKMSLFYHQ

SEQ ID NO: 337570 - protein, 103 aa, Zea mays
  unsure (1)..(103): unsure at all Xaa locations
  Clone ID: MRT4577_71033C.1.pep
KMLACTFLMPSVGFMSMPLHCYSCKVLCPCPRIVIVARLCMHPSGCFHGLMAPLGNDINMPVYLLSPLVFCQGDRRGNPLLFLKKKKKKYPLFGXXFXXXYXX

SEQ ID NO: 337571 - protein, 92 aa, Zea mays
  Clone ID: MRT4577_71034C.1.pep
TNARCGTDCWALPSRIRYSWAAVYHQFSSPRIRWLWVHLSATWTSCFSLYSASRMFLVMIRLFQLSLGSSCASSIPCNAQLLRESQIYQSAL

SEQ ID NO: 337572 - protein, 64 aa, Zea mays
  unsure (1)..(64): unsure at all Xaa locations
  Clone ID: MRT4577_71036C.1.pep
MADESSDSAGEPQPAPAPXRRRSSANYRAYATEPHAKKKSKISASRKLQLKTLMLQIANREMER

SEQ ID NO: 337573 - protein, 114 aa, Zea mays
  Clone ID: MRT4577_71037C.1.pep
APIPAMASRGGWAPIPDDPTTIPLGRRWPCRWGILCRGGLSRVAILPLPPTLLPRSRWWALYFNKRVPPLVAPYFDVLAFSVGIVRPIGTWKTGLVLPLCLLLLYKDILAACHI

SEQ ID NO: 337574 - protein, 41 aa, Zea mays
  Clone ID: MRT4577_71038C.1.pep
LPNFTGYKIFFLFIRGDYKRLGLKFLLPKLTVLIKNYREVT

SEQ ID NO: 337575 - protein, 119 aa, Zea mays
  unsure (1)..(119): unsure at all Xaa locations
  Clone ID: MRT4577_71039C.1.pep
MVAESFLFTSESANEGHPDKLCDQVSHAVLDACLAQDPDSKVACETCTKTNMVMVFVEITTKVSVDYEKIARDTCRVIFFTSAPVGLFADRCKVLLNIQPQSPDXLAQGVHGHSPQRPQ

SEQ ID NO: 337576 - protein, 65 aa, Zea mays
  unsure (1)..(65): unsure at all Xaa locations
  Clone ID: MRT4577_7103C.1.pep
FRPPIPLPSWAPSPLPSAPFSSTCNHTSNPSXPPPHLHLPWCHSLPLGSPSRGANLQRFSVEGGR

SEQ ID NO: 337577 - protein, 74 aa, Zea mays
  Clone ID: MRT4577_71040C.1.pep
RTGPFPRGFTSRNSGSLCDTPISQSLGQLNFDPIVFCSNKCLEGIFASSSRMQYERHADDCPWFPAARNLKCAG

SEQ ID NO: 337578 - protein, 89 aa, Zea mays
  Clone ID: MRT4577_71041C.1.pep
LGFFKHFFGFFPLVLYFYLPLSTGPTKISREWGGTIRPGKNGTASWQQKKGGAFLPHNQLEGGGGPRGGILWLPQRPGGAPRDCPLQPK

SEQ ID NO: 337579 - protein, 46 aa, Zea mays
  Clone ID: MRT4577_71042C.1.pep
RRRTCRGGLAGRGGKGLGPGSRAQCRWARSGRGRAGAQPGPVSEWP

SEQ ID NO: 337580 - protein, 157 aa, Zea mays
  unsure (1)..(157): unsure at all Xaa locations
  Clone ID: MRT4577_71043C.1.pep
APCVDSDEVQDFLYTLLLTPINPTRLYISFLSSSCSLYPIRSVFFALPPCRAGGGGVFLSVAPPCPSWGLSSLRPACLLLWPARLPPLLPFRSLALLFPCVXSPCGSLLGGLCFWVGFGAVRFLLACFLFLVAACRSVASPLAPWFAPASLGSVRAA

SEQ ID NO: 337581 - protein, 206 aa, Zea mays
  Clone ID: MRT4577_71044C.1.pep
MAKEYYTTSSLVVGYALCSSLLSIINKYAVTKFGFPGLLTALQYSTSAAGVWILGKLGFLTHDPFNLETAKKFAPAALVFYLAIFTNTNLLCHANVDTFIVFRSLTPLLVAIADTTFRKQPCPSKFTFLSLVVILCGAVGYVTTDSAFSLTAYSWALAYLVTITTEMASTGRSSQRWSPGAKAGFNWTPSCQWRCRASSSCSSSLA

SEQ ID NO: 337582 - protein, 334 aa, Zea mays
  Clone ID: MRT4577_71045C.1.pep
MAKEYYTTSSLVVGYALCSSLLSIINKYAVTKFGFPGLLTALQYSTSAAGVWILGKLGFLTHDPFNLETAKKFAPAALVFYLAIFTNTNLLCHANVDTFIVFRSLTPLLVAIADTTFRKQPCPSKFTFLSLVVILGGAVGYVTTDSAFSLTAYSWALAYLVTITTEMVYIKHIVTSLGLNTWGFVLYNNFLSLMLAPVFWFLTGEHRSVFAAMESRGEGWFQLDAVVAVALSCVFGLLISFFGFAARRAVSATAFTVTGVVNKFLTVAINVMIWDKHASAYGSVCLLFTILGGVLYQQSVTVKGNGAVVAQRELVPEQPEEVDEEKQSLVSSAK

SEQ ID NO: 337583 - protein, 224 aa, Zea mays
  unsure (1)..(224): unsure at all Xaa locations
  Clone ID: MRT4577_71046C.1.pep
HWVPRGRPKGSTTSRXMDAAGSSGAGFTPHVITVQAGEDVSSKIMSFSQHGPRAVCVLSANGAISNVTLRQTATSGGTVTYEGRFEILSLSGSFLLVEDGGQRSRTGGLSVSLAGPDGRVLGGGVAGLLVAASPVQIVLGSFNSGGKKEAKKHAPSAPTPAPLKVAPPTTTRMGPNSSSPPSRGGTLSESSGGAGSPPPPLHQGMAASSSNDQPPFLSSIMPWK

SEQ ID NO: 337584 - protein, 43 aa, Zea mays
  Clone ID: MRT4577_71047C.1.pep
LDPVPYNITPQPLMHNHNIHYNKDHQPISFTNPTVHHLIRPIP

SEQ ID NO: 337585 - protein, 47 aa, Zea mays
  Clone ID: MRT4577_71048C.1.pep
SRSECNYTRGSLYSGNGPSFGRHARSALGLVYFFSKKIIFLFLDRRR

SEQ ID NO: 337586 - protein, 80 aa, Zea mays
  Clone ID: MRT4577_71049C.1.pep
WFFEAFFFCFFLDSDEIGLQRLQIHGATGQGYRICELVWNNNCGAFADPKFFSPVWPHIEVQSTLDAVLETSSKIPHSNS

SEQ ID NO: 337587 - protein, 90 aa, Zea mays
  Clone ID: MRT4577_7104C.1.pep
CWCSTLSWTWMRIERTINWSCFVVSGATSLTTGSLFTSAPGLSLPKKVELAQLVQSGYGACTIVESAPAGSQGRVDVIQDQIGLTCLETQ

SEQ ID NO: 337588 - protein, 97 aa, Zea mays
  unsure (1)..(97): unsure at all Xaa locations
  Clone ID: MRT4577_71050C.1.pep
THQTKLLINYSTTISTSIFAILELLXLPFNSTNSFIIPQFSLTPNSIIPHFLQPLTLIFFLHLSVQAYILHQSLSIXLLQQPINHIQQQFLXHLTIQ

SEQ ID NO: 337589 - protein, 125 aa, Zea mays
  unsure (1)..(125): unsure at all Xaa locations
  Clone ID: MRT4577_71051C.1.pep
LAGVLKLRDWKNLGFPKFNGFEKIPFFPSWVFSKGAPPVGLSKNLPTFIGFWAPPFTGLLSGGGLVFPPRVPFSFARALAPVFLVFFPSFFATFAGFPLKVFNWGVPXLGFRFSXFRALSPKKFF

SEQ ID NO: 337590 - protein, 92 aa, Zea mays
  Clone ID: MRT4577_71052C.1.pep
ILRTPVVLFFWRKGVLKKLNKRELRHMTMYKISYMCEQAKCLFAKNKAKKKKKRRNRVSFRGKKKGQGNCQTKCQNFIKFFLYLTCIPVDPS

SEQ ID NO: 337591 - protein, 112 aa, Zea mays
  Clone ID: MRT4577_71054C.1.pep
AEQLTVRAQDSAHRTKPLVGESAGWRLSPSAQSEQSPWGRVKLRSASWSKVPVRDRCRREMGDRAVEQGPGRDASSEFRTRVLDLILDLSGGWSWYAGDPGSPLESSQQEQT

SEQ ID NO: 337592 - protein, 147 aa, Zea mays
  unsure (1)..(147): unsure at all Xaa locations
  Clone ID: MRT4577_71055C.1.pep
IKDSSVRRAMMDLYAKNXRHRNVIEVFDEMRKLGQLPDSEIIATAMNAYGKLKEFDKAAALYQAMREAGCVFSDRVHFQMISLLGAQKDFKALEVLVGELSHDPSIDKRELYLVAAGVYERAYKFDKASQIISQIRSSNEFDVQKLR

SEQ ID NO: 337593 - protein, 344 aa, Zea mays
  Clone ID: MRT4577_71056C.1.pep
MSGYHAKREIVTSDKPTGSRKTPSRESGNKYKEESSSSIKSHRRGDKKKKKMKKLLRSCENSKEFYIPTTWDGPDRAYFASFKIFFSLAVVHEEQTIGHNIKSSLKFQAFGFVWYQCDIMMFYQEFGRSKENSAACPAPTAVPPARVRLTTAKSRLRRHRKLRSTRPQGLGPRLGLGRWTLPRPTPGLPRPQPQKVDSASPDRRARPRPQKESRPHPTPASASGGVSASPDLGLGPTAPQGVIITLPLASSGYGEQDRRPIWLAPALFSLVKLQHVCNTHPLMVQRSSMSFSFWKADMDNTLKTTEKKGSSNNFGPNGKAISERDPMPVGKQSLNAREAERNDR

SEQ ID NO: 337594 - protein, 74 aa, Zea mays
  Clone ID: MRT4577_71057C.1.pep
CSAPSRSTRDTTEPGRKGRSGRTACAVGELHCSSQQTEPVRIRAPPSTPRRQRRWQQTTCGAPPLHHKKKLKIK

SEQ ID NO: 337595 - protein, 63 aa, Zea mays
  unsure (1)..(63): unsure at all Xaa locations
  Clone ID: MRT4577_71058C.1.pep
KKGPVKIKRFGVKLQNLEPPFGRGFKTWGGFSLGGPVGFPPFRLLAGIKNXGFFFFPLEGGGG

SEQ ID NO: 337596 - protein, 65 aa, Zea mays
  unsure (1)..(65): unsure at all Xaa locations
  Clone ID: MRT4577_71059C.1.pep
MATKIFSLLMLLALSTCVANAIICPQXSEALIVALRAPYLGSIIGSVCENPVLQPYRLQQAVAAS

SEQ ID NO: 337597 - protein, 248 aa, Zea mays
  Clone ID: MRT4577_7105C.1.pep
MACRGFFECVLKLLNLVVMAVGLAMVGYGAFLLVTWLQVAPLPPPSSSPDAVPPSGELVRLGRPLLLFVDASLSDGTAERLSSAWFIFAFIGVGAILFVTSIFGCAGARNGCCLSIVIPVDKTGNFDMMYSFLKENWRIAKWVALGAVVFEALLFTVAIIVQSGNQTDYDSDDEYIGARSGIRQPLVNQQAAAAAADPRVPNLDYRPIRNDAWSQRMREKYGVDSFDPNRFQPATISPGEQRNRCTIL

SEQ ID NO: 337598 - protein, 68 aa, Zea mays
  Clone ID: MRT4577_71060C.1.pep
RATVLSISGMFTFLVHFAIPLQFPKQQPVVTLQSSQHCNADGMPITSPPINDYPWSPRWDQAEMVERI

SEQ ID NO: 337599 - protein, 393 aa, Zea mays
  Clone ID: MRT4577_71061C.1.pep
MSPSADAPGPASSASAPPLAPLIAAQLNYLLSHSKLPIRVVQIWSGCRNGRPADRFRLAIPFCLDYVHWDFVYNALSPKVAPDVVFGPEDERFQPLVDYAAAGNGDKSCLARWDCRAPEGLHALVQELRELYIEYQKERVHMVDDARLAFELSTVLSKEGIEVCMVPSADRPDEAKFAVPLLESDFDFAKLVPGCPWRLPQKIHLQVIFPISRSSSYSSMPSAPRLKLISTPDLRSLLSVEDVKLPPWSNGMCLAEYLPALEDSLNGLLVDASASIGSRRRFIEALAPIFGRPLEADPIFCRRATVLSISGMFTFLVHFAIPLQFPKQQPVVTLQSSQHCNADGMPITSPPINDYPWSPRWDQAEMVERIYDFLTDECQNFKKFCSDAITQQK

SEQ ID NO: 337600 - protein, 76 aa, Zea mays
  Clone ID: MRT4577_71062C.1.pep
NVITQFVLMFGVMLIYTYTMFVCIATFSSEVTSHLKSKLVAGISSPRTSCALDHFYLPNNVLYNLLSCIGLILMGP

SEQ ID NO: 337601 - protein, 115 aa, Zea mays
  Clone ID: MRT4577_71063C.1.pep
GGPPVFWNSPFLGGARAGSPFPGSAPTRGGFPLPFPPFFFFLNLGNFPHPSLFFYICYNPVKNPPFSCVGCPIIFGSKKNFGFKKKKKKKKKKKKKKKKKKKTKKKKKKKKKACT

SEQ ID NO: 337602 - protein, 94 aa, Zea mays
  Clone ID: MRT4577_71064C.1.pep
QSLFLFELILCSISMSPCIYNYPLMICLLIDLLSPCLFFQFMGYRFMCSKQSSVFGILFLSCFNFLSFHMFHNPWIQTCLIWEGIMLLMTYFFK

SEQ ID NO: 337603 - protein, 132 aa, Zea mays
  unsure (1)..(132): unsure at all Xaa locations
  Clone ID: MRT4577_71065C.1.pep
RSAKIQEIRDRELYPQLVDLIHRVRSLWKEIMGCHEKHLFAIHDTRIHRMKATTASEXTALFXASLHLERQLTKWYRCFNKRMISQRSCAEAPNEWLKKWLPESQEEVTADGAPSFSPCRLGAPPVFVGLND

SEQ ID NO: 337604 - protein, 52 aa, Zea mays
  Clone ID: MRT4577_71066C.1.pep
VSSCQLVLALYGVIPCVLQLHDSLGQVIYSYVQYMTNSSYICKPATLKLFNL

SEQ ID NO: 337605 - protein, 103 aa, Zea mays
  Clone ID: MRT4577_71067C.1.pep
GDNLFPWWPRAGLVQKLLVSLLTALLTPEQRHQELEVTVLPAVPLRHQRGSSCGRSKGAAPPLDSPMHVALSLPSSQESVVSLLPIYYDCICADTANPPWGEG

SEQ ID NO: 337606 - protein, 176 aa, Zea mays
  Clone ID: MRT4577_71068C.1.pep
TFHHCYSMETAGQTTLQESAVHARRQAACWWPLDTTVCSWDLDDASTLSRSLLLGWDPQLCCFGSLGGAMVAGAAADFCTLRPTCMESPVSEASAAAATGELDDELLLMSLWGECHLFSSCSALKEETATSSQRTPKSLQSGLICSQLLKCFLWPTYSSLISSLHCRFFLLVVFFY

SEQ ID NO: 337607 - protein, 264 aa, Zea mays
  Clone ID: MRT4577_71069C.1.pep
MASSVPVVDILDDDDDDNTCLGIASPASCKRSLGSSGTSSRDFLDAFSPSPPLRKRPPLAAVAPINLDDTPSPPKRRRSSVSINLDDTPSPPKPRLSSVPKQPVGVDDDVALSPPGDVVADRPDSIFDWAAFSESPETVVPTSDGLGSLAAETPGFASPDSIRPPAAPDMSMSSAPPAQKGSGVTSLISLDSDNESDDDIMNMEPLTNLPSNKEAMMCQKDGTEQVHEKQKRQPAGKKLTKEEKDKLMQERKQNDRKKTTESSF

SEQ ID NO: 337608 - protein, 275 aa, Zea mays
  Clone ID: MRT4577_7106C.1.pep
MACRGFFECVLKLLNLVVMAVGLAMVGYGAFLLVTWLQVAPLPPPSSSPDAVPPSGELVQLGRPLLLFVDASLSDGTAERLSSAWFIFAFIGVGAILFVTSIFGCAGARNGCCLSIYSFLIILFILVELAAGGFIFFNHSWKEVIPVDKTGNFDMMYSFLKENWRIAKWVALGAVVFEALLFTVAIIVQSGNQTDYDSDDEYIGARSGIQQPLVNQQAAAAAADPRVPNLDYRPIRNDAWSQRMREKYGVDSFDPNRFQPATISPGEQRNRCTIL

SEQ ID NO: 337609 - protein, 80 aa, Zea mays
  unsure (1)..(80): unsure at all Xaa locations
  Clone ID: MRT4577_71070C.1.pep
IFPHQVSNLFFSIFPPPLFFFLYIFFFYLPPPPPFFIIFFFFYQTSFFPIXLFLHSYYHYCNTRQCEPTSEVCHPGFARG

SEQ ID NO: 337610 - protein, 144 aa, Zea mays
  Clone ID: MRT4577_71071C.1.pep
ARAVVGVFTVRRLVRRGDQRQTQAAVRLLTKWQRVAHALPEDLFVKVAMEPEVDDAGERHPSVTFKSLFLGNCSGMVAEMSAHLPELDVRAGDCREMSWIQSTLYFYGYTGEQAAEVLLDRSLQPKDYYKVKLDYLTSPIPAAG

SEQ ID NO: 337611 - protein, 81 aa, Zea mays
  Clone ID: MRT4577_71072C.1.pep
GSTAPEPPSPGQDSVALYAFPVFRALVVYSGSMGSDAGVVPRQKVGVRLGDVEPRGFVGRASPDIEAHCLGFSQRGNHHVT

SEQ ID NO: 337612 - protein, 63 aa, Zea mays
  Clone ID: MRT4577_71073C.1.pep
MIVKKKKKKKKKKKKKKKKKKKKKKKKKKKKKKKKKKKKKKKKKKKKKKKKKKGGPFLKENNF

SEQ ID NO: 337613 - protein, 70 aa, Zea mays
  Clone ID: MRT4577_71074C.1.pep
GRSRGSSIDPEEKLGSLIFSNAGPPLNRGWPKIYNSKRLRFFSQENSKALFLWIFKGEEEHVLPVLQKHN

SEQ ID NO: 337614 - protein, 88 aa, Zea mays
  Clone ID: MRT4577_71075C.1.pep
LSSFFLLYLSTEGTILTLVSLVTLANTIIASTSTHATTRADLLTNSAAIFNRIRARNSTGITRNTDITLLAADNRLTSKRKGKASTAA

SEQ ID NO: 337615 - protein, 88 aa, Zea mays
  unsure (1)..(88): unsure at all Xaa locations
  Clone ID: MRT4577_71076C.1.pep
GPIQKALDEFRIISEHISTRDLVQENLAFRVFPTLKEWEMPKLEGXRKKGXLVRLPYYSEFKEYFKTPCQEWLASIXEMCNEILGNYS

SEQ ID NO: 337616 - protein, 746 aa, Zea mays
  unsure (1)..(746): unsure at all Xaa locations
  Clone ID: MRT4577_71077C.1.pep
MLHELLLALLGFTGDFVLDXSAAAPRRLPGRRRXGNGDGEVGPSFRLAPDLTFLQPSERTAIERLISLGFYYRELNRFATESRDLSWIQSSIDVSSPHSDNTQKGKVRKGSVYRRAIANGITEILSVYRSAVLQVEQNLLSDPLPILATVTHGLNKFEVLLPPLYELVMEIQHKDIKGGQLLNLLHKRCHCGVPELQSCIQRLLWHGHQVMFNQLTSWMVYGILQDQYSEFFIRRRHERDVENESSQRDVSDKLKQKLAKDTSLASWHTGFHVSLDMLPEYIHMRIAESILFAGKAIRVLRNPSPSATLQDPVIRTVGSHGMQSSVGGSGVPKELANFSNIRAEELLPQAEADKIDSMLKELKHSSEFHKRPFESAVGSIRTIAAYFCWKLVVVRADLNGHLKALKDYFLLAKGDFFQCFLEESRQLMRLPPRQSTAEADLMIPFQLAALKTIGEEDKYFTRVSXRMLSYGMKSSTSQKDLQKPNASELPSQGKAASELTLDGWDSIALEYSIDWPLQLFFTPDVLSKYRKVFQYLIRLKRTQMELEKSWAAVMHKDHADFSDYCKDRKNNSATQLRRQRSKPLWRVREHMAFLIRNLQFYIQVDVIESQWNVLQSHVQDSHDFTELVSFHQEYLSALVSQSFLDIGSVSRILDSIMKLCLQFCWSIEQYETRPNISEIDHITEEFNKKSNSLYTILRSSRLAGSQRAPFLRQFLMRLNFNSFFETTARGVMNSGRLRPITAGAQL

SEQ ID NO: 337617 - protein, 94 aa, Zea mays
  Clone ID: MRT4577_71078C.1.pep
SWSRGSRSVGSRIPRRQQNRRRRRLQKAASSCHLCQTRRTRGRPIISHSPPTKSPYKLSSLKTLKTSIMEQLHGGVGGAELKMVDRSSRKHLLN

SEQ ID NO: 337618 - protein, 89 aa, Zea mays
  Clone ID: MRT4577_71079C.1.pep
MAVADVATSMCAAHGLRKPLCTRSYATSLPGVALAPRRSAARMAVVRASSAHQEQHPAKEWAAAAVVAAALVLAEVAEAEPGISPALKN

SEQ ID NO: 337619 - protein, 157 aa, Zea mays
  Clone ID: MRT4577_7107C.1.pep
MTGSSKKHDLKSKQKLEKKISFYTKVKDAVTSLNAKKTVSKKNKQSRRQKKLKAYDLSALSEFLPEPAAPEQKTEAKLNCKSRQTLVVQESAHLKAVLDNPQFQLDPFAAIHQHLLATQPPAAAKKDDAAGKQGKVSKDKKSRRKKGTSSISQAMDI

SEQ ID NO: 337620 - protein, 71 aa, Zea mays
  Clone ID: MRT4577_71080C.1.pep
AVVTTQSTRHLASHPCRRRSMSLYLCLFICLMPTCAVCSCLNSVVFLFCYRTHPMHHLSPRRNNHSNNKFR

SEQ ID NO: 337621 - protein, 76 aa, Zea mays
  Clone ID: MRT4577_71081C.1.pep
AVVTTQTTRGHHQEHLASHPCRRRSMSLYLCLFICLMPTCAVCSCLNSVVFLFCYRTHPMHHLSPRRNNHSNNKFR

SEQ ID NO: 337622 - protein, 97 aa, Zea mays
  Clone ID: MRT4577_71082C.1.pep
MAFKFILGVALLSVLAGVFLGKRYRRSASGSLRGPMARTGKARGVNIAPREIRLSVCSWKGGVASRSLRGLLALMVMVRRLSGRKLEILEALLFSCC

SEQ ID NO: 337623 - protein, 48 aa, Zea mays
  Clone ID: MRT4577_71083C.1.pep
TCQRPCFCTMCCWHYSTNSGLFAFGVRIGLMPHQCQLIHIWSSRRPAF

SEQ ID NO: 337624 - protein, 53 aa, Zea mays
  Clone ID: MRT4577_71084C.1.pep
NCIVWFPNVANPNPVVFDSHLCFLAPKPKKYFFSPPNKKNWGFSLFILGPCSF

SEQ ID NO: 337625 - protein, 77 aa, Zea mays
  Clone ID: MRT4577_71085C.1.pep
RTRAEPAIFSNTTTYIPKACFYHRTIRPPEYPPMQIATDAKEIATAATLVTPLAILGLRTRISRVEASCGLDTTYIA

SEQ ID NO: 337626 - protein, 331 aa, Zea mays
  Clone ID: MRT4577_71086C.1.pep
MAENTHGSGRHVLGDLTNVICKRAATSDLEKSTGGIKIRRIEKTGTRKEYDANAKASSIGKGIVFGHLFDDVAREKFQSHSIFQNSRVQHIAAEAAGLLSKEANDSKNHYASIGPLDLSDKEQDSSLESEDDYDDEDNDETNGELLHHFFSSELANKMSTNDGECLTQEEIVGSSGNQKPLSSLDATTGGDLPISSAQHASVRTGGLEEAVAPKSCACSFCLKAAFMWMDLHYQDARSRLSVLKKSIKFARSLEEKCRGNEYAANVAGYESKRAVGVEFELSQQQRSLFLYTENALVRESTQLHSAFVKLKELRENCKTDLETLSNSSMRK

SEQ ID NO: 337627 - protein, 148 aa, Zea mays
  unsure (1)..(148): unsure at all Xaa locations
  Clone ID: MRT4577_71087C.1.pep
MENTMTLAVERLDTRDNDKADTQHEDGMAADQSXLVYAGERLEGGRALGDYNXVRQESTVDWDHMLRGGTVIKEQALTGQQHESVIERADSIDRIKERVDQKERIAPVRDXLIYVGEQVAVDKTGXDYHIEGGSALHVALALMGXLLV

SEQ ID NO: 337628 - protein, 127 aa, Zea mays
  Clone ID: MRT4577_71088C.1.pep
MAAGRGDAASMVAVGLVWGATNALMRRGALVWDRRARACPSGNVLRRWAELLLTWQYSAPFAANLSASAAFFALLGAAPISVAVPVTNAVTFAATAAAAAALGERVRPAPAVLGTTLIVLGVWVCIS

SEQ ID NO: 337629 - protein, 61 aa, Zea mays
  Clone ID: MRT4577_71089C.1.pep
AMYTWVAERQALSSATSYTQPEGGLKCFLLLQQSHTLELVPKQATNDLPQDRARLPNTRSA

SEQ ID NO: 337630 - protein, 356 aa, Zea mays
  unsure (1)..(356): unsure at all Xaa locations
  Clone ID: MRT4577_7108C.1.pep
MDSGPVNVEVGSGYGTYGCSKYAAPSGRCATFLEFGNIEAPMYARLRHFFSTIYTRMQIKPSTQPVIVVLPLCHSDDTESARASRKQYKETLYSVLFDMNVPAVCAVDQAVLSLYASKRTSGIVVHIGFNTTSVVPIFQGRVMYEIGVETVGQGALKLTGFLKELMQRRNISCESLYTVRTIKEKXCYVAADYEAELRKDTQASCEIDGEGCFTLSEERFKTPEILFQPHMGGMCEIFRYCLICASITVXYGWSMLILPLXRAMGLHKAVSLCMDHCYVSGTVGDDRWYTKVFVAGGVLCSSGLPESLVMELHHVLPPDMSDGRRVLPPSSGTSSAWPGLQMMREIELLKLSPPYK

SEQ ID NO: 337631 - protein, 88 aa, Zea mays
  Clone ID: MRT4577_71090C.1.pep
VSHLVSCLILIRSDSSIFPMRWLGGSSLLKCSRPTHREGFPHVANWQGIGEGTHSHSHSCICVIDSLLVSCLLGKSCLWILEDILSVK

SEQ ID NO: 337632 - protein, 58 aa, Zea mays
  Clone ID: MRT4577_71091C.1.pep
CWFNSNLVTGFIKHQLTYLCSDPLINCVLTFNGLVAFSPIAPLHQFNIIFIPNVYLLP

SEQ ID NO: 337633 - protein, 49 aa, Zea mays
  Clone ID: MRT4577_71092C.1.pep
VNFPKSQIISYFKNSINNLTNNYLQNPHLNLNYLLEIMILIRKLILKYN

SEQ ID NO: 337634 - protein, 157 aa, Zea mays
  Clone ID: MRT4577_71093C.1.pep
RELDWRVQGTIIPIILIFFPDQQGHAIKQAAAGGGGGVSALCFVGVPPLAHCPPLSHSILFTSPEVLVLLLSPPGLTAYDSSSGTGRISRLGGRAGVRFKHESAVAASEPIPLFVWFRCTSDLSPGRAPARCNIRSSRRSSNLFLCTATSLLWAVCR

SEQ ID NO: 337635 - protein, 139 aa, Zea mays
  Clone ID: MRT4577_71094C.1.pep
QSSTHQTIQTITAQQQQQQGLPSLNHLIILNPVTYLQQQLLSYNPLALPNVAAYHQQQQLQQHMPVITQLAMLNPAVYLQLLSSRPLAVGNAPTYLQQQLLQQIVPPLTHLAVANPSAYLQQLIPFNQLNQSNSDAYLQ

SEQ ID NO: 337636 - protein, 624 aa, Zea mays
  Clone ID: MRT4577_71095C.1.pep
MKFMKLGSNPDTFQDDGSEVRIVETELVSDITVRLGDTKFYLHKFPLLSKCARFQKLIPTTGDENIDIHIHDIPGGPKAFEICAKFCYGMVVTLNAYNVVAARCAAEYLEMNETVDKGNLIYKIDVFPSSSIFRSWKDSIIVLGTTKAHLPWAEDLKLVSHCIDSVASKASIDVSKVEWSYTYNRKKLTVENGHDSPWNGVKQQQFVPKDWWVEDLTDLDIDAYKQVITAVKTKGTVPKDVIGEAIKAYTYKKLPSLSKVSMIHGDAKVRAMLVTITCLLPSEKGSVSCSFLLKLLKATNLLKCGEMCRKELMKRIARQLEEASVLDLLIPTVDGDTTVYDIDLILSIVEEFVRQDSKNAQRHNGGEVNDHVSAPSASMVAVAKTVDGYLTEVARDPNIPVYKFFSLAETVSTGSRPVHDGLYRAIDMYLKEHPSLGKSDKKRLCALMDCKKLSPDACAHAVQNERLPLRIVVQVLYHEQTRACAAATAIRADSIGIGSYESSRSGATTNTEDEWDGVMAVEDLSLSKTTKLVDKCDTAASTVVVGKDKDHGGNKGATGRVAKGGAGAATPKKALGKTVSGKGQTGERSSSDSSDSAVAVAVLTSQEHPKRTTRARSAAKSAAA

SEQ ID NO: 337637 - protein, 75 aa, Zea mays
  Clone ID: MRT4577_71096C.1.pep
MIVGWRSCVDSESVIAREPEVILVSSSGLLEGAIIRRFDRCQDEDVMFINPGNEDLGVGLDRVWLPHVSRWDCCY

SEQ ID NO: 337638 - protein, 52 aa, Zea mays
  Clone ID: MRT4577_71097C.1.pep
EQVVRADREQREAGGGGGGGGQSRGGVVVVLCLSHGCCQAREFRLANQRVSF

SEQ ID NO: 337639 - protein, 112 aa, Zea mays
  unsure (1)..(112): unsure at all Xaa locations
  Clone ID: MRT4577_71098C.1.pep
RFLIAGRGRIKDGAREEMMRGTPGYAHVNEPLHILAEADLPADIIDAXRLMQARQMLQDLLKPGDESQDFFKXMHLPLLPMLNGTLREEGLQSXSDYTPXHNSLGMKRGTTR

SEQ ID NO: 337640 - protein, 272 aa, Zea mays
  Clone ID: MRT4577_71099C.1.pep
LGAAARMPDARGILINSFESLEPRAMRALRDGLCVPGRATPPVYCVGPMVSPGGDGAGHECLRWLDAQPDRSVVFLCFGSLGTFPKRQLEEIAVGLERSGQRFLWVVRSPPGGPPADDVRALLPAGFAERTEGRGLVVASWAPQVDVLRHRAAGAFVTHCGWNSTLEGVVAGLPLLCWPLYAEQRMNKVRIVEEMKLGVEVRRDGEGLVTAQEVEAKVRWVMQDSDGARELKERAEAARARAAEALAEGGPSRAAFLEFVQDLLASEGMVNV

SEQ ID NO: 337641 - protein, 867 aa, Zea mays
  unsure (1)..(867): unsure at all Xaa locations
  Clone ID: MRT4577_7109C.1.pep
MVQELMAQQNEILRQLLQRQPHPQQYGGGQSQRPPAATTYQEFLSTQPPLFTKAEDPLDANVWLRVVKSKFPLLTGACPDDTKTRFAAQQLRGPARTWWDHFRAILPADHEVTWEEFKTAFRGHHIPAGILDRKLNEFPALTQGTSTVLHMRAIMQILMKRRETFSVEVSTPSCNCPWNQLRQMPAPNQDRGRKQEVQVRQGKLNFTTVEELPEGAPVMTGTFLVLNQTALILFDSGASHSFISQKFSVKCQLHFYHTQGSFMIAMLGGKIATNQLNRNVPIQLGSKIVKTTLLILGMDNVDMIFGANWMTQHQVVLDVANRIVEVHSPTCGGFTLFFPSQGTTRSCVFSMIELPLKKIPVVCEYANVFPDELPGMPPDRDIEFAIELQPGTTPIFKRPYRMPPAELAKLKKQLQEVLDKGFIRPSTSPWGCPALFVKKKDESLRLCIDYHPLNAVTIKNNYPLPLFMLELDKFVVVFIDDILVYSKNEAEHAKHLHTVLQCLREHRLYAKLSKCDFWLKEIKFLSHTISEGGIDVDPDKVEEVMNWKPPIIVCHIRSFLGLTGYYKQFIPDFSRIAKPMTKLLKKGAKFDWGQKCEDAFHALRQHLTTAHDYDLEVHYHPGKANVVVDALSRKSQCNCMMMDSRINTLCDELSKMRIEVIPSGTLSHIFVEPTLLDQIVMAQLSDKGVQIIKENLXRKWRSIXFCQDNKRILWFEDRLVVPKNRDLKKRILDEAHLSKFSMHPGSTKMYQDLKPLYWWTRMKREIAQYVSECDTCQRIKASHLKLVGALQPLSIPSWKWDDLNMDFIVGVPNTSRHHDSIWVIVDRLTKLAHFLPVHTTNKAHKYAELYIDRIMCLHGLPRTIVSH

SEQ ID NO: 337642 - protein, 185 aa, Zea mays
  unsure (1)..(185): unsure at all Xaa locations
  Clone ID: MRT4577_710C.1.pep
SRPGGRETETPVEADPPNNTKRESNASHSGQAGTQGGNASREXNSREQGRQAEGQKPGDKTKGGGDDADNTSSRETGAGKHDPRAGNDEQFFFFLPPPRTGTYRQLFHPEQLIKDKEDAANNFARGHYTIGKEIVDLRLDRIRMLADNCTGRQGFLVFNAAGGGTGSGLGSLLQERRSVDYGKKS

SEQ ID NO: 337643 - protein, 86 aa, Zea mays
  unsure (1)..(86): unsure at all Xaa locations
  Clone ID: MRT4577_71100C.1.pep
SARATTIFLYLISEDPPGGDIYGAGGTSFTGXEAXFDGAVVDWGVDHSXLMNTFCDLTAINKLLTCREFKFGCYALHGDALAYCHT

SEQ ID NO: 337644 - protein, 90 aa, Zea mays
  unsure (1)..(90): unsure at all Xaa locations
  Clone ID: MRT4577_71101C.1.pep
VLTCVYGXYNTTKEDGPRVLRSLTFLTNRGKYGPFGDEFGAYFSSATTEGKVVGFHGRSDQHLDAIGVHMQHWLGDRRPAPKYVLSKYLF

SEQ ID NO: 337645 - protein, 82 aa, Zea mays
  unsure (1)..(82): unsure at all Xaa locations
  Clone ID: MRT4577_71102C.1.pep
FDQWFQISFEYDQHDLIHRLGNVLRRSLLRRLNSNPERDLPPKYXSILKGSISHTQKLHYYTLHLNSSDASQSSSEYASNCQ

SEQ ID NO: 337646 - protein, 115 aa, Zea mays
  Clone ID: MRT4577_71103C.1.pep
HVTRQQRLSGPTRNASRADPVSKCQARADWRSRHGAQFDVKGTSTTGGRTLAANCGCDSTERHGVVELDERRGEQGGATERSSQLRAGSRARAGEQGDPGTMWSSAEGATWDWET

SEQ ID NO: 337647 - protein, 58 aa, Zea mays
  Clone ID: MRT4577_71104C.1.pep
TLFVFYNETIHKRLLSIKSLPIHITSINLSNHSITTKTTFQNLTSIFSISYNQTSTYI

SEQ ID NO: 337648 - protein, 48 aa, Zea mays
  Clone ID: MRT4577_71105C.1.pep
GEQHINSVEAEIGADENLTHSSVGSVHSGSKQREQQGYQHLSQWENGH

SEQ ID NO: 337649 - protein, 548 aa, Zea mays
  Clone ID: MRT4577_71106C.1.pep
FNETANFDCSQLQLLVLDEADQILDHGFRNQVDAIISQIPKVRQTLLFSATQTKSVKDLARVSLRDPEYISVHEEARTATPDTLEQYAMIVPLEQKLNMLWSFIKRHLNSKTIVFLSSVKQVKFVYEIFKKLRPGIPLKCMHGRMKHVVQQAIVADFNEATSVLFSTDITSRGLDIKNVDWVVQVDCPENIDNYIHRVGRTARYNKKGKSLIFLCPEEEAMLEKLKATESKIPIHIRKPKAEQLEQISQSIASVLVKFPNLQELGKRAFVTYLKAVYLQKDKKVFNLSRFSAEQFAAYAASLGLPVTPKIRFISHKKNVSKKDMEDIDMKQMKSSLEHEVTITPKINIDLTLCDGDDDILYPKKPTADANMDDRLDDVLHPKESATDTNVTGLERPFKKKKLKINVNRPSGTRVKYDDEGNAIPPLASVAEEVSLEPVVHKDKISQRYAEMLREMQKHDKEDKLEHKKTLREKKLQKKMKLKRKRQEDTGAGSEEDSGSESDRGQDTANKGKKRYFNSDDEDNDAAKDGDVLAQQEALALKLLSNMHS

SEQ ID NO: 337650 - protein, 84 aa, Zea mays
  Clone ID: MRT4577_71107C.1.pep
MPLAKDLLHPSPEEEKRKHKKKRLEQSPNSYFMDVKCPGCYKITTVFSHAQTVVLCVGCSTVLCQPTGGKARLTEGCSFRRKQH

SEQ ID NO: 337651 - protein, 74 aa, Zea mays
  unsure (1)..(74): unsure at all Xaa locations
  Clone ID: MRT4577_71108C.1.pep
HFWICYCHLALSSSLPSPTDLXWLIITMRPLSQDPSNQNGRNWIITFTNSLSGRFWQDSVLLIVRDQLEYSDDL

SEQ ID NO: 337652 - protein, 106 aa, Zea mays
  Clone ID: MRT4577_71109C.1.pep
AAAHLRWQGRQDVQYHLPLRGGLASSISISMSLLAGHPPDDVHVAAAHGRSSINCCRARAFFTITCMMSRHFGHVCYINIYMLGRHGVVDLDMWVQWWLATSRSFE

SEQ ID NO: 337653 - protein, 62 aa, Zea mays
  Clone ID: MRT4577_7110C.1.pep
MCYTVQFLDKVDTSAVRSRAAPSTQMANLVQRKMGDALGYGCTMLTRKDKYLMLAGNDGIVR

SEQ ID NO: 337654 - protein, 90 aa, Zea mays
  Clone ID: MRT4577_71110C.1.pep
ASDVTKASGTLDCTVMMNRAHREIKRKIQGGGNKDSHGHKRQYVAVADFSLARSTRREEQWQHPEHCVLPGHKAIFPGDVRVFELRRKPA

SEQ ID NO: 337655 - protein, 72 aa, Zea mays
  Clone ID: MRT4577_71111C.1.pep
EVPSPPTNFFRLHVPPKRPPWFFPTEQNVLYSLPGQSENCQVILTKIIPLSLPILGPKFKLPWVLNKPWGNC

SEQ ID NO: 337656 - protein, 226 aa, Zea mays
  unsure (1)..(226): unsure at all Xaa locations
  Clone ID: MRT4577_71112C.1.pep
MGSSSDECSPAREMCMEVGGGRRXRRGGGGSRSAADGGRTAKQKQPQRGLGVAQLEKIRLHNQMLAAYRSATRQPPHDHPQQPQGHDVVVDAATHFQLVPPPRSDSSPFQPYHHRGVVQYYGGMYSRTETSPPSLYAHDVRDSSGHRLGPPPPQQHYCMTMMSSSSSSERRRCLQRRRGARLGAQVVAGTGCSFWFCSGLGHVIASGSLGSSIAIMHAWAKNMHHI

SEQ ID NO: 337657 - protein, 75 aa, Zea mays
  Clone ID: MRT4577_71113C.1.pep
HHPIKLLFTAAATTKERTNEKKVRLVILTYSLEVWIGIRQLTELIAGFRMLRRYSSELESVTAISSSTPSPSPCW

SEQ ID NO: 337658 - protein, 97 aa, Zea mays
  Clone ID: MRT4577_71114C.1.pep
VDIANPIFIDMRGCLNKLCAANRALQVTVQDVTCKNITGPSFTPEAVSLLCTGKGPCTGLTMDDGNLEHSWTNNKTMAVCTNAKGSTKGRLKELACL

SEQ ID NO: 337659 - protein, 227 aa, Zea mays
  unsure (1)..(227): unsure at all Xaa locations
  Clone ID: MRT4577_71115C.1.pep
AFGRXGTMFGCDMYNIKPDLVSIAKXFNIKYLLITRELLYKINGELNALFPLXALSSAYMPIGAILVSPEITDVNYSQSNKLGKSNXHGXIYSVYMCLIXILHIMVVRERNIVEHVNKIAPRFQEGIKAFSGSPIVGEIRGLGLILGTEFVDNKSPNDPFPAEWGVGSIFGAECEKRGMLIRVAGDSIMLSPPLIMTPNEVEEIISKFGDALKATEERIGELKSRKN

SEQ ID NO: 337660 - protein, 127 aa, Zea mays
  unsure (1)..(127): unsure at all Xaa locations
  Clone ID: MRT4577_71116C.1.pep
MDSTSVMYTKEVDQASPISVLQPLSEDCSDSENIRREPADXMRLLRRQVALAELXCLSSEVQPSDDKPIQLVEDILEELEDDEEREFSYLLDILIASGIHGTVEDQMYKVCQSIEYPASDDVFDKVE

SEQ ID NO: 337661 - protein, 512 aa, Zea mays
  unsure (1)..(512): unsure at all Xaa locations
  Clone ID: MRT4577_71117C.1.pep
MIANGLRKSSAASSQVSKLVKYIASAGSLQGGHSLSEPSARHYSSEPSLQATEENGFKGHSMLAPFTAGWQSTDVHPLVIERSEGSYVYDSNGKKYIDALAGLWCTALGGNEPRLVKAATEQLNKLPFYHSFWNRTTKPSLDLANDILSMFTAREMGKVFFTNSGSEANDSQVKLVWYYNNALGRPDKKKFIARSKSYHGSTLIAASLSGLPALHQKFDLPAPFVLHTDCPHYWRFRLPDETEEEFSTRLANNLENLVLKEGPETIAAFIAEPVMGAGGVILPPKTYFEKIQAVLKKYDILLIADEVITAFGRLGTMFGCDMYNIKPDLVSIAKALSSAYMPIGAILVSPEITDVIYSQSNKLGSFAHGFTYSGHPVSCAVAVETLKIYKERNIVEHVNKIAPRFQEGIKAFSGSPIVGEIRGLGLILGTEFVDNKSPNDPFPAEWGVGSIFGAXECEKRGMLIRVAGXDSIMLSPPLXIMTPNEVHELGRIYGEAPKAPEERVAALQSKKN

SEQ ID NO: 337662 - protein, 49 aa, Zea mays
  Clone ID: MRT4577_71118C.1.pep
KKGVLPLQKGLCGSGLGFMDLKNLILTSCLLIGLNNQVKWFCWAQSETF

SEQ ID NO: 337663 - protein, 126 aa, Zea mays
  Clone ID: MRT4577_71119C.1.pep
LKGNITDMEIEVAGLLSDVGEQNEHLYSSQQEAFGLHTTIDLLRNKLDASQLVVSEALDNERTAITKIESLAAEKIKLISELDYARDREAREKMTIEDLTAVLHKASCQAQEAHDWIHKIEYDYVH

SEQ ID NO: 337664 - protein, 502 aa, Zea mays
  Clone ID: MRT4577_7111C.1.pep
MPIHLAPSTDPPSPARARMAMLLRKVWGSVLARAAAPGADPRARRAQAHRAEQYQYHGSLSLGALDAVPTDVLAQILRLLGPLDAARSSAVCRAWRVLASDNGLWAFFLRLGPEPWDLVVFAETHLAAGPASHPWLYYDSSPQLSFKQIYGLRALVPGTLIVDGGSGYCKYGWSKYAAPSGRCATFLEFGNIEAPMYARLRHFFSTIYTRMQIKPSTQPVIVVLPLCHSDDTESARASRKQYKETLYSVLFDMNVPAVCAVDQAVLSLYASKRTSGIVVHIGFNTTSVVPIFQGRVMYEIGVETVGQGALKLTGFLKELMQRRNISCESLYTVRTIKEKLCYVAADYEAELRKDTQASCEIDGEGCFTLSEERFKTPEILFQPHMGGMRAMGLHKAVSLCMDHCYVSGTVGDDSWYKTVILAGGSSCLPGLPERLEKELHQLLPPYMSEGIRVLPPSFGTDSAWFGAKMISNVSTFTEAWCAKKKQFRQKTGRSGTLFANSW

SEQ ID NO: 337665 - protein, 110 aa, Zea mays
  Clone ID: MRT4577_71120C.1.pep
MPRAGKVVSRSVVGGDRNRREPTLIRIGQPQASTTAKSSTSAKPHRYRPGTRALMEIRKFQKSTDLLIRKLPFARLVKEITQHYHHELRWQVEAVLALQTSAEDYLVGLL

SEQ ID NO: 337666 - protein, 213 aa, Zea mays
  unsure (1)..(213): unsure at all Xaa locations
  Clone ID: MRT4577_71121C.1.pep
MSSSTGSLDHAGFTFTPPPFITSFTELLSGSGAGXGAVAEGVQPRGPGXGAPKFKSAQPPSLPISSPFSCFSVPAGLSPAELLDSPVLLNYSHILASPTTGAIPAQRCDWQASADLNTFQQDELGLSGFSFHAVKSNATVNAQANXLTFIQGAAGATTRRSGSSEXNKSSSSSGNNKQVEDGYNWRKYGQKQVKGSENPRSYYKCTYNNCSMK

SEQ ID NO: 337667 - protein, 76 aa, Zea mays
  Clone ID: MRT4577_71122C.1.pep
GGEAHRPHWNCHDPTKDSASPHFLKQGDKANQPHSNTYKQVLIYRHPHGQRYNPPSLGHGREQTQMQTTEIRLASR

SEQ ID NO: 337668 - protein, 371 aa, Zea mays
  unsure (1)..(371): unsure at all Xaa locations
  Clone ID: MRT4577_71123C.1.pep
AAAPMLILLLMPLGVVVKQEYKIYRERQLDAAADPPPTIAVVDXRSTSTVQRPDVISSRHRRXEETEQQQQAATSSASSSCCLGSLGGWCVRTMFRPPARGEDYTILQALVSVDMLVLFVATTCGMGGTLTAIDNMGQIGESLGYPAKSVNTFVSLISIWNYAGRVAAGYVSEAALARHRVPRPLLLTLVLLLSCVGHLLIAFGVPQSLYVASVVIGFCFGAQWPLLFAIISEVFGLKYYSTLYNFGSVASPIGAYVLNVRVAGALYDVEAAKQHGGSLAGAGDKTCIGVQCFRKSFLIITAATVAGALVSLVLVWRTWNFYKGDIYAKFRESADAAEAEAEDLKRPKETAEAESEVNGRKPHSHCRHTVS

SEQ ID NO: 337669 - protein, 254 aa, Zea mays
  unsure (1)..(254): unsure at all Xaa locations
  Clone ID: MRT4577_71124C.1.pep
APKFKSAQPPSLPISSPFSCFSIPAGLSPAELLDSPVLLNYSHILASPTTGAIPARRYDWQASADLNTFQQDEPCRGDSGLFGFSFHAVKSNATVNAQANCLPLFKEQQXSSNNNXSGRSEQQEQQRRRQQQAXEDGYNWRKYGQKQVKGSENPRSYYKCTYNNCSMKKKVERSLADGRITQIVYKGAHDHPKPLSTRRNSSGCAAVVAEDHANGSEHSGPTPENSSVTFGDDEGDHGLQLSDGAEPVTSAGRS

SEQ ID NO: 337670 - protein, 429 aa, Zea mays
  unsure (1)..(429): unsure at all Xaa locations
  Clone ID: MRT4577_71125C.1.pep
MVFDASGSRSAAAASGNPLRVILTRGFARQVLVGRWLTVFASLLIMASSGATYIFGSYSGTLKSSLGYDQRTLNTVSFFKDLGANLGVFSGLINEVTPPWVVLAMGAAMNLSGYLMVYLAVSGRTAPPPLWLVCLYFFVGANSQSFANTGALVTCVKNFPDSRGVVLGILKGFVGLSGAVYTQLYLALYGGDDAESLILLVAWLPXAAVSVVFVHTIRYMPYPRRRGGGQETSSSDSDPFFCFLYLSIALACFLLVMIVVQKQVPFSRAAYGLAATPLLILLLMPLGVVVKQEYKIYRERQLDAADPPPPTIVSASATDAIKKTEQQPASSSFCGCVRTMFRPPARGEDYTILQALVSVDMLVLFVATICGVGGTLTAIDNMGQIGESLGYPARSVNTFVSLISIWNYAGRVTAGYASEAALARYRVPA

SEQ ID NO: 337671 - protein, 169 aa, Zea mays
  unsure (1)..(169): unsure at all Xaa locations
  Clone ID: MRT4577_71126C.1.pep
MAQLLHHQDSGFYDKELHGCRWGILQFFGFRRRQRSAKMQPDKKHGPEKNSRGSRRRSRSYAPLKNEDSEILDDDKNTEVTKKQKASQKNSGKXSLRSLILRKLXYGKEGQEEKMLPVAPKLLRTISVYYLENNXXYVLDGDPLXVXDGSSHSXLIDANATNMNLHHAR

SEQ ID NO: 337672 - protein, 213 aa, Zea mays
  unsure (1)..(213): unsure at all Xaa locations
  Clone ID: MRT4577_71127C.1.pep
MAKDGGFAKALLLHVAALWGGDRRKKQLPAPAMAEMPRLQLAESGRLEYLEKFSHYVARQLGFQDVSECPQLCRLANNYLSSSKTCMEDIYGFFAGAKDDAXECLLYVKLIEELGRCILGYFAFHWDHATYLITSALTADTGSKRKLRNMVLEATXKQRFERVTRDLKVTRVFSTLVEEMKAIGIIAPRSSGTAASWTAPGSTAPTPWAQPSS

SEQ ID NO: 337673 - protein, 172 aa, Zea mays
  unsure (1)..(172): unsure at all Xaa locations
  Clone ID: MRT4577_71128C.1.pep
GRVVGPVLPFESXQVTDQHIARQVARNPAVPPATNTSSAYCYHLKPDSADRQEQQLELDQDHMQYRTGQHPMDAKVAHEMGXQIRPPQYYVTRXAQSDLTDRANLHRSPLHGVAPFKGVAAVAGVLHRKSEGCPMTGLLDELQQICNGMVKLVQLTLGLELMFLNSKEFLEA

SEQ ID NO: 337674 - protein, 556 aa, Zea mays
  unsure (1)..(556): unsure at all Xaa locations
  Clone ID: MRT4577_71129C.1.pep
MVASPRRCCSTSPRCRRPAPSRPPWRGAGCGEETGGRSSCRRRPWLRCPGSSWRSPALCSTTYRGASEKFSHYVARQLGFQDVSECPQLCRLANNYLSSSKTCMEDIYGFFAGAKDDAAECLLYVKLIEELDRCILGYFAFHWDHATYLITSALTADTGSKRKLRNMVLEATRKQRFERVTRDLKVTRVFSTLVEEMKAIGIIAAGGGGGEASQCTDVMAPVAHSERSPVLLLMGGGMGAGKSTVLKELKQEAFWTNAEANAVVVESDAFKEADVIYRAISSMGHHNDMLQTAELVHQSSTDAASSLLVTALNEGRDVILDGTLSWEPFVEQTIAMARAVHRQRYRMGVGYKVADDGTVTENYWEPASDDATEQPPRRPYRIEVVGVVCDAYLAVARGIRRAIITRRAVRVRSQLQSHKRFAAAFQRYSRLVDGARLYSTNSMGSAKLIAWKDGIGNSLLVEPREFDCLEKVSGLNEHATSVHDLYPDGTTTCGSRSIWEDMIVSTARADTQRELREAIRSVEXRRPTGHTTNNAPARAPGLHPLPGGRQRRASCS

SEQ ID NO: 337675 - protein, 47 aa, Zea mays
  Clone ID: MRT4577_7112C.1.pep
GHELYVVAPGDDTITEKGGGKRRWAMKSYFMRLSILFFLGEKQKTHK

SEQ ID NO: 337676 - protein, 59 aa, Zea mays
  Clone ID: MRT4577_71130C.1.pep
KKKKKKKKKKKKKKKKTCTYGPPPTKGQILKLFIHPGRAFHPSFRRPSSPFGGPYYKLP

SEQ ID NO: 337677 - protein, 80 aa, Zea mays
  Clone ID: MRT4577_71131C.1.pep
KGVVFLGLRGFEHLSFYKPVSILKQALKRHVGSVWFGINEGWDGINLVPYLLRDDLIHHFLRIFLDSNFGPLNQTRIKLE

SEQ ID NO: 337678 - protein, 44 aa, Zea mays
  Clone ID: MRT4577_71132C.1.pep
GLRSDNIVALSNRFRGSRTFQTPHKYIVTRQVHLNSGVIRHGHP

SEQ ID NO: 337679 - protein, 125 aa, Zea mays
  Clone ID: MRT4577_71133C.1.pep
TRRTILLATQLSTWVTRKTCLLADLEEDDVKWCSCNLQSEIWTCVQENVEVEIAPEKNRDTMKTGGFVLQSSCRGDATVKATGVKTQMLSLEIWQRYGRVLRFTSIIVCNLIHTLLYIKIHDVIR

SEQ ID NO: 337680 - protein, 52 aa, Zea mays
  Clone ID: MRT4577_71134C.1.pep
GPLPPVCPFWFRSSFSFPFSVGLLSFSGLYVSVNINLCWFSLEPYSVLSGGA

SEQ ID NO: 337681 - protein, 109 aa, Zea mays
  Clone ID: MRT4577_71135C.1.pep
SREYDGCGAPDTRERIPRPPHRRRPQVPRGSRGRRTYVHADSRTHATLRSSTGCPRCLSLTVLMPPADSRPPVRPQPNDFVAQLLVYICLNNQEVRPVLLSMKLRMLMA

SEQ ID NO: 337682 - protein, 106 aa, Zea mays
  unsure (1)..(106): unsure at all Xaa locations
  Clone ID: MRT4577_71136C.1.pep
MSFFSYFSLLEDFAVKMLMLSFAWGMXFLDRQGVSYCCKTTNDDDGITNSLEIFEKPSGSLHFLASNNDCGLRDFDMEKFLICNHFHFAWPVNVSLQCLLNIQFSI

SEQ ID NO: 337683 - protein, 69 aa, Zea mays
  Clone ID: MRT4577_71137C.1.pep
TTSPKKKNSPPFIVSKQTAKIFFTLPLVIICETHSSICLTKTKNTIKTYFLTSQNPTFSNTSPQNLHSH

SEQ ID NO: 337684 - protein, 75 aa, Zea mays
  Clone ID: MRT4577_71138C.1.pep
MTVIKAAGAEPCGDGGAYGARRRQSLRARYAYGFVFFATNLLAWFVRDYGARALRGLHHVPVCGADSKCFQSGGV

SEQ ID NO: 337685 - protein, 131 aa, Zea mays
  Clone ID: MRT4577_71139C.1.pep
YSCEKTTDGFCCFKTTEGYGLGEVRQIGTAARRRQKGTAARRRQKGTAARRRQKGTAARRRQKGTAARRRQKGTAARRRQKGTAARRRQKGTAARRRQKGTAARRRQKGTAARRRQKGHSLKHLHKYLCTQ

SEQ ID NO: 337686 - protein, 111 aa, Zea mays
  Clone ID: MRT4577_7113C.1.pep
TTLFGRAKKERVYVPPPDPCCWILSLLLARCPFFYQTIRADPPSPVRRRLELAERACIASTETHTANGTTTTTTTVRRGREAAAPWVVITPLANIVSRALGKMQRRCVPSS

SEQ ID NO: 337687 - protein, 103 aa, Zea mays
  unsure (1)..(103): unsure at all Xaa locations
  Clone ID: MRT4577_71140C.1.pep
LALSDTPLLXXGLHFLSVPVWKVVGLGFVVQNCLANSPQRSGQLSEQSPITSLGAMGSRTASRMQAVTAVDILTRAAAREAILADMLATRSTSSWERGICARA

SEQ ID NO: 337688 - protein, 101 aa, Zea mays
  unsure (1)..(101): unsure at all Xaa locations
  Clone ID: MRT4577_71141C.1.pep
RDLYIVKIGLRALTRPMPERLPHIYRTLEENFTDRVPPLIIHETLNDAAAQFNASXXXTXRXTVSWXXWDILTERAXSQTLDADDMYITXLSCGKESTSCH

SEQ ID NO: 337689 - protein, 87 aa, Zea mays
  Clone ID: MRT4577_71142C.1.pep
PTRVHTHWLSLVSTRARLTLGAGAVCDTSTDTSCCNGRSTMTRPLKPFRGNSSLTYLYSRCALRNWRRSFSALLTSSIIICHWVKPV

SEQ ID NO: 337690 - protein, 106 aa, Zea mays
  Clone ID: MRT4577_71143C.1.pep
VPKDTGVLSNPMDGATEKGWEPQIDQRLKPQGRALFLKNKGIQAPNRIGTKEWVHPKEDWGQLSDDRPDTNVYAEAPWPQNEPSRKLFPGPAPLRGPTSPDLWSAH

SEQ ID NO: 337691 - protein, 64 aa, Zea mays
  Clone ID: MRT4577_71144C.1.pep
ASLRSVHLQPRFFIYTPNDEPQSALDVFEQTERNSEEIQDEGQSINVALPYMRRICIEDQAIER

SEQ ID NO: 337692 - protein, 71 aa, Zea mays
  Clone ID: MRT4577_71145C.1.pep
GSPCSPCQKWLLNTNVIDLLLESTKPGTRKKCKSKITCSQLPVMPLMPYAVSINGAHHGRDTSPKFRHVSP

SEQ ID NO: 337693 - protein, 89 aa, Zea mays
  Clone ID: MRT4577_71146C.1.pep
IEYKTQLLSVLKISKEKVDECYNAILQLSKANKYGHNNINNTSKRKYEQIPSSPSGVIDAAFCSDGSNDSWAVGSSLIYSPPEPLFKKS

SEQ ID NO: 337694 - protein, 136 aa, Zea mays
  Clone ID: MRT4577_71147C.1.pep
CFFFFFFIFFGGFFKEVWGNPPLSQNQGNGATKKGGGGKKQFNWEQPGGWEKTKKGGGGKKKYIGGNLGNFNGGHKENVVFLPAEGGPKGALTPRVEDRPFSPPKNKQQNSVRPGGKRVPRGPKTNFGPGPLRGGG

SEQ ID NO: 337695 - protein, 136 aa, Zea mays
  Clone ID: MRT4577_71148C.1.pep
ETAELRSESDRRVFSVGEKSEKTFTRFHLGVVLSGILQHHPGPQHQIDFTVGTRTISPNRRHVPTAVAYLRKSRLPVAGATLGAFRFSDLYSFSSSSETPLYVSLHFPPTKRFYREARQMMGDSVCLIPHLIASPL

SEQ ID NO: 337696 - protein, 32 aa, Zea mays
  Clone ID: MRT4577_71149C.1.pep
PGSTHFFLHSFNPKHQFLILNPLITARTFYNF

SEQ ID NO: 337697 - protein, 91 aa, Zea mays
  unsure (1)..(91): unsure at all Xaa locations
  Clone ID: MRT4577_7114C.1.pep
SFLLSLSVPRWVXCSGCLAVCXLRRVVCGSPAALSLLVSSFALWVRCLCLSVCGVLPLVRVPXXFACSSFLFGLVPFCFCLXCXAPCVLLL

SEQ ID NO: 337698 - protein, 159 aa, Zea mays
  unsure (1)..(159): unsure at all Xaa locations
  Clone ID: MRT4577_71150C.1.pep
LNPARVSYAVVGVYXKDLVVKMAKALQRFGMKRALVVHSCGLDEMSPLGGGLVYDVTPEKIEEFSFDPLDFGIPRCTLEDLRGGGPDYNADVLRRVLSGESGAIADSLILNAAAALLVSNRVQTLAEGVTVAREVQSSGKAIKTLDSWINISNLAQKSQ

SEQ ID NO: 337699 - protein, 149 aa, Zea mays
  unsure (1)..(149): unsure at all Xaa locations
  Clone ID: MRT4577_71151C.1.pep
PPPGPKXXXXXPXKPXKAARXRXGXGXXXPRXXPRRRXDXXPSAAXXPXXPXXPRARGARRARSPRAAARARTPRRXSXQRPXXAARRRAAXPXXSSSRRRRXPRPGAPXGRGPRRRXXTAAAGQRERXPXRRXGPRXHXPXRGQRARR

SEQ ID NO: 337700 - protein, 408 aa, Zea mays
  unsure (1)..(408): unsure at all Xaa locations
  Clone ID: MRT4577_71152C.1.pep
MGRLRACCRLHRFLAPPPAQVPSPGQSLARGSNTATAHVAPFSRLLSSAAAVAPHDTRDSGLGGSAYWAWIRAATESAPAPSPPQEEEDEGPARYIPVKAYFLSTSIDLKSMQAEHGNDIVPPSTRLLNYIALRYSEFPPEIMNIGVKDNRFCYRYVVVFQYGSAVLFNIADHEAEYYLDIIRKHASGWLPEMRKEIMXKVEXRRDSHNFKNYIIKSSFHPCCQGWFLNHCXSSLTTWMIGGLDYNSAKSRATDGIRIISSVLGQSIALDHYIRQVDDMVEEFTEINRVMEKTGNFTMQRKKLFQLVGKANSNLADVIIRLGLFDRSEIAWKNANYAQILEYLREEYELNQRFGSLDFKLKFVEHNIHFLQEVLQNRRSDLLEWGVIILLIIEIAISLYEIAKDSMID

SEQ ID NO: 337701 - protein, 59 aa, Zea mays
  Clone ID: MRT4577_71153C.1.pep
LGNIINRVFCRPSEREGPQHYSPLLFIIVTIHCYYFTVTICEGLCDLFICSYSLPVHPI

SEQ ID NO: 337702 - protein, 77 aa, Zea mays
  unsure (1)..(77): unsure at all Xaa locations
  Clone ID: MRT4577_71154C.1.pep
EHFKLMIPPKCNTMIERWFPGXGLRYKDNFNGTCNGYVIIQSTYNNAITXYGSPHEYXLSHVDYLLXHEDYGGKTDS

SEQ ID NO: 337703 - protein, 143 aa, Zea mays
  unsure (1)..(143): unsure at all Xaa locations
  Clone ID: MRT4577_71155C.1.pep
GAGGPPPHSSPPYFXPSHPPPPFSIPXPNSSPSTPLPLPSPLXKNPLLFKPPNNSPKTFNHFSKPPXIXXHPPQPFFSLQRKKFPXPPPKRTPPXQILNQIFPPPXPSPXPPLLFFPSPVISPPSVPNLLAPFVVLVLILEDI

SEQ ID NO: 337704 - protein, 40 aa, Zea mays
  unsure (1)..(40): unsure at all Xaa locations
  Clone ID: MRT4577_71156C.1.pep
CSCKLYLHSIHAYFHHNHLKLALSQXKILTEPKSVVCDNC

SEQ ID NO: 337705 - protein, 1661 aa, Zea mays
  unsure (1)..(1661): unsure at all Xaa locations
  Clone ID: MRT4577_71157C.1.pep
MKTLTTFYGYHPLEMVMHPLGLFPAKKKDDPMWCNRVSQVKDVWAMYPDLVGRVTVQCMSALYRLQALQSDAMALLANTAQTAKLTLDNREDFVVDLSTELVEKDLQVERLSQRITTLEQQVEIRDNTIDVLENQLHDVQRELEEANDHLDTHHLEMEANEAGSEGEEAPEELGPAPGAHGTTSAMPPSPEFLSTQPPLFTKAEDPLDADVWLRIVESKFPLLTGDCPDEAKARFAAQQLRGPARTWWDHFRAMLPADREVSWEEFKTAFRGHHIPAGILDRKLNEFLALNQGTRTVLQYAQAFNDLCQYAGYHADSDEKKRDRFRWGLNTKLQERLNTVRADSFNELVNMAISQEDCIVAHRAEKKRKAPMAAPSAQAXVLDCFSQSEQGFSAAGRQMGDQATSAAAAGTQXFPAPAPGNNQPPQQQQFRQGNGNKCFTCGNVGHYAKNCPRNQQRQMPAPNQDKGRKQKVQVRQGKLNFTTLEEVPEGAPIMTGIFSVYNQPALILFDSGASHSFISQKLSDKCELPFSHSKGVPIQLGSHIVKTTLLVLGLENVDIILGANWMTLHQVVLDVASRTVEVNSPFYGNFTLILPSQGSTQSCAFSMTELPLKKIPVVCEYADVFPDELPGMPPDRDIEFATELQPGTTPISKRPYRMPPVELAELKKQLQELLDKGFIRPSTSPWGCPALFVKKKDESLRLCIDYRPLNAVTIKNKYPLPRIDVLFDQLVEAKVFSKIDLRSGYHQIKIRASDIPKTTFSTRYGLYEFLVMSFGLTNAPAYFMYLMNSVFMPELDKFVVVFIDDILVYSKNEEEHAGHLHVVLQRLREHHLYAKLSKCDFWLKEIKFLGHTISQVGIAVDPDKVQEVMNWKPPPTVRQIRSFLGLAGYYRRFIPDFPRIAKPITELLKKEAKFVWRQKCKDAFHALRQHLTTAPVLAQPDNSKPFDVYCDASGTGLGCVLMQDNRVIAYASRALRPHEQNYPTHDLELAAVVHALKMWRHYLMGTHCNIFTDHTGLKYIFTQADLNMRQRRWLELIKDYDLEVHYHPRKANVVADALSRKLQCNCILMDSRINTLCDELSKMQIEVIPSGSLSHISVEPALQDQIIMAQLSDKGVQIIKKNLHQKVEKYNCFRQDEKGVLWFKSRLVIPKDQDLKRKILDEAHLSKFSMHPGSTKMYHDLKPLYWWTRMKREIAQYVLECDICQRIKASHLKSAGALQPLSIPSWKWDDISMDFIVGLPNTSRHHDSIWVIVDRLTKVAHFLPVHTTDKAQKYAELYIDRIVCLHGLPRTIVSDRGAQFVARFWEQLQESLGTKLIRSSAYHPQTDGQTERVNQILEDMLRACAIDCGKNWDKHLSLAEFAYNNSYQSSLRMAPFEALYGRRCRTPLNWSQPGEREVFGPDLVTKAERKVKLIRKNLEAAQARQKSYHDRRRKPLQFEVGSFVYLKVSPTKGVQRFGIKGKLAPRYIGPYEILEACGPVAYKLTLPSKMSTIHSVFHVSQLKKCVRLPTEIIAEPELEIEPDLSYQEYPSKILDCKERSTRAKSIKMYKVQWSNHSEEEATWETEEFLRSNFLDCLPKETVAKRMTFEEQFYLNNNNNHPFPISLTLRFTLGGLWPKSRDKIPLRGEGCDTSVSPRVSLKMPNQGPSFYVNQIKHEHQLT

SEQ ID NO: 337706 - protein, 97 aa, Zea mays
  Clone ID: MRT4577_71158C.1.pep
RLLLRISPQPQQLKMAARQRRGQNEQAPPPPPPAPTVQELMAQQNEILRQLLQRQPHPQHHGGGQHQRPPAMGNIPGVSEHAAALVHQAEDPLDADV

SEQ ID NO: 337707 - protein, 635 aa, Zea mays
  Clone ID: MRT4577_71159C.1.pep
MKTLTTFCGYHPLEMVMHPLGLFPAEKKDDPMWCNRVSHVKDVWAMYPDLVGRVTVQCMSALYRLQALQSDAMTLLANTAQAAKLTLDSREDFVVDLSTELVEKDLQVERLNQRITTLEQQVEIRDNTIDVLENQLHDMAARQRRGQNEQAPPPPPPAPTVQELMAQQNEILRQLLQRQPHQQHHGGGQHQRPPAMATYQEFLSTQPPLFTKAEDPLDADVWLRVVESKFPLLTGDCPDEAKARFAAQQLRGPARTWWDHFRAMLPADHEVSWEEFKTAFRGHHIPAGILDRKLNEFLALNQGTRTVLQYAQAFNDLCQYAGYHADSDEKKRDRFRRGLNTKLRERLNTVRANSFNELVNMAISQEDCIVAHRAEKKRKAPMAAPSAQAQRFRIVSHNQSRGFQQQAGRWVIRPPQQQQQPAPNRYPAPAPRNNQPPQQQHFRQGNGNKCFTCGNVGHYAKNCPRNQQRQMPAPNQDKGRKQKVQVRQGKLNFTALEEVPEGAPIMTGTFSVYNQPALILFDSGASHSFISQKFSANCKLPFSHSKGSFMIVTPGGKIATNQLNQSVPIQLGSHIVKTTLLVLGLENVDIILGANWMTLHQVVLDVASRTVESGFFSVVCFLYDGVAPEEDPSGL

SEQ ID NO: 337708 - protein, 86 aa, Zea mays
  Clone ID: MRT4577_7115C.1.pep
YRHQIKWGHQLSNSKNHEAGACGSCFHCFIIHCLLYTVRQLQLLLPPLPSSVHRSQLMIQQPPPLAITNTSAYSQPHPTISLHAIT

SEQ ID NO: 337709 - protein, 1179 aa, Zea mays
  unsure (1)..(1179): unsure at all Xaa locations
  Clone ID: MRT4577_71160C.1.pep
MATYQEFLSTQPPLFTKAEDPLDADVWLRVVESKFPLLTGDCPDEAKARFAAQQLRDPARTWWDHFRAMLPADREVSWEEFKTAFRGHHIPAGILDRKLNEFLALNQGTRTVLQYAQAFNDLCQYAGYHADSDEKKRDRFRRGLNTKLRERLNTVRADSFNELVNMAISQEECIVAHRAEKKRKAPMAAPSTQAQSFQIVSHNQSRGFQQQAGRWVIRPPPQQQPAPNRFPAPAPRNNQPLQQQQFRQGNGNKCFTCGNVGHYAKNCPRNQQRQMPAPNQDKGRKQKVQVRQGKLNFTTLEEVPEGAPIMTGIFSVYNQPALILFDSGASHSFISQKFSAKCELPFSHSKGSFLIVTPGGKISTNQLNQSVPIQLGSHIVKTTLLVLGLENVDIILGANWMTLHQVVLDVASRTVEVNSLFCGNFTLILPSRGSTQSCAFSMTELPLKKIPVVCEYADVFPDELPGMPPDRDIEFAIELQPGTAPISKRPYRMPPAELAELKKQLQELLDKGFIRPSTSPWGCPALFLKKKDESLRLCIDYRPLNAVTIKNKYPLPRIDVLFDQLVGAKVFSKIDLRSGYHQIKIRASDIPKTAFSTRYGLYEFLVMSFGLTNAPAYFMYLMNSVFMPELDKFVVVFIDDILVYSKNEEEHVGHLHVVLQRMREHHLYAKLSKCDFWLKEIKFLGHTISQAGIVVDPDKVQEVMNWKPPTTVRQIQSFLGLAGYYRRFIPDFSRIAKPITELLKKEAKFVWSQKCEDAFHALRQHLTTALVLAQPDNSKPFDVYCDASGTGLGCVLMQDNRVIAYASRALRPHEQNYPTHDLELAAVVHALKMWRHYLMGTHCNIFTDHKSLKYIFTQADLNMRQRRWLELIKDYDLEVHYHPGKANVVADSLSRKLQCNCILMDSRINTLCDELSKMQIEVIPSGSLSHIFVEPALQDQIIMAQLSDKGVQFIKKNLHQKVEKYNCFRQDEKGVLGTKLIRSSAYHPQTDGQTERVNQILEDMLRACAIDCGKNWDEPLSLAEFAYNNSYQSSLRMAPFEALYGRRCRTPLNWSQPGERGVFGPDLVNEAERKVKLIRKNLEAAQARQKSYHDRRRKPLQFEVGSFVYLKPKKCVRLPTEIIAEPELEIEPDLXYQEYPSKILDSRERSTRAKSIKMYKVQWSNHSEEEATWETEEFL

SEQ ID NO: 337710 - protein, 320 aa, Zea mays
  Clone ID: MRT4577_71161C.1.pep
SVRESDGRRAASRRCASRAPGEWGSRRTPSEATPSPPCPSTPAAPEPDGAKDQEPSSPTWGPSVATSVLVQVGDESSSLGNLRLRLSEESASVQQQRSCSQRSSRPPPAFRVKEEWDDSTVSSNVSRMRIQNRIEATTRRERALAYAFSQQLRSCGGGTSKKRSSARAEGQGEFNVGWSWLERWMATRQAEPADDCASRNADTGSATGRRVVVVRRRSDLAVEEKESCASNDVSVVSFDASSGLACHRPTGNKSRLKGGRSLPRRKQVAASASASDHRFQERSHKVSKKGHQRVEQEPHKDRFDAVAALDDDACQPPTDY

SEQ ID NO: 337711 - protein, 76 aa, Zea mays
  Clone ID: MRT4577_71162C.1.pep
RFVWECQLIRSRWSLHQRGGAFCVGSQSSMQEVLRFSNLIKCKVYVKLKTCHFPTRVRQNSRAYIPLWCFCEENRC

SEQ ID NO: 337712 - protein, 1355 aa, Zea mays
  unsure (1)..(1355): unsure at all Xaa locations
  Clone ID: MRT4577_71163C.1.pep
MATYQEFLSTQPPLFTKAENPLNADVWLRIVESKFPLLTEDCPDEAKARFAAQQLRGSARTWWDHFCAMLPADREVSWEEFKTAFRGHHIPAGILDRKLNEFLVLNQGTRTVLQYAQAFNDLCQYVGYHADSDEKKRGRFRRGLNTKLRERLNTVRADSFNELVNMAISQEDCIVAHRAEKKRKAPMAAPSAQAQRFQIVSHNQSRGFQQQADRWVIRPPQQQQQPAPNRFPAPAPRNNQPPQQQQFRQGNGNKCFTCGNVGHYAKNCPRNQQRQMPAPNQDKGRKQKVQVRQGKLNFTTLEEVPEGAPIMIGIFSVYNQPALILFDSGASHSFISQKFSARCKLPXLSLKRVIHDSXPGAIHIVEVNSPFCGNFTLVLPSQGSTQSCAFSMTELPLKKIPVVCEYADVFPDELPGMPPDRDIEFTIELQPGTAPISKRPYRMPPAELAELKKQLQELLDKGFIRPSTSPWGCPALFVKKKDESLRLCIDYRPLNAVTIKNKYPLPRIDVLFGQLVGAKIKIRASDIPKTTFSTRYGLYEFLVMSFGLTNAPAYFMYLMNSVFMPELDKFVVVFIDDILVYSKNEQEHAGHLHVVLQRLREHHLYAKLSKCDFWLKEIKFLGHTISQAGIAVDPDKVQEVMNWKPPTTVRQIQSFLGLAGYYRRFIPDFSRIAKPITELLKKEVKFVWSQKCEDAFHALRQHLTTAPVLAQPDNSKPFDVYCDASGTGLGCVLMQDNRVIAYASRALRPHEQNYPTHDLELAAVVHALKMWRHYLMGTHCNIFTDHKSLKYIFTQADLNMRQRRWLELIKNYDLEVHYHPGKANVVADALSRKLQCNCILIYSRINTLCDELSKMQIEVIPSGSLSHISVEPALQDQIIMAQLSDKGVQIIKKNLHQKVEKYNCFRQDEKGVLWFKSRLVIPKDQDLKRKILDEAHLSKFSMHPGSTKMYHDLKPLYWWTRMKREIAQYVSECDTCQRINASHLKSAGALQPLSIPSWKWDDISMDFIVGLPNTSRHHDSIWVIVDRLTKVAHFLPVHTTDKAQKYAELYIDRIVCLHGLPRTIVSDRGAQFVARFWEQLQESLGTKLIRSSVYHPQTDGQTERVNQILEDMLRACAIDCGKNWDKHLSLAEFAYNNSYQSSLKMAPFEALYGRRCRTPLNWSQPGEREVFGPDLVTEAERKVKLIRKNLEAAQARQKSYHDRRRKPLQFEVGSFVYLKVSPTKGVQRFGIKCKLAPRYIGPYEIIEACGPVAYKLKLPSKMSAIHSVFHVSQLKKCVRLPTEIIAEPELEIEPDLSYQEYPSKILDCKERSTRAKSIKMYKVQWSNHSEEEATWETEEFLRSNFPDCLPREAGT

SEQ ID NO: 337713 - protein, 183 aa, Zea mays
  unsure (1)..(183): unsure at all Xaa locations
  Clone ID: MRT4577_71164C.1.pep
MATYQEFLSTQPPLFTKAEDPLDADVWLRVIESKFPLLTGDCPDEAKARFAAQQLRGPARTWWDHFRAMLPADXGTRTVLQYAQAFNDLCQYAGYHADSDGKKRDRFRRGLNTKLRERLNTVRADSFNELVNMAISQEDCIVAHRAEKKRKAPMAAPSAQAQRFRIVSHNQSRGFQQQAGRWV

SEQ ID NO: 337714 - protein, 890 aa, Zea mays
  unsure (1)..(890): unsure at all Xaa locations
  Clone ID: MRT4577_71165C.1.pep
LVGAKVFSKIDLRSGYHQIKIRASDIPKTAFSTRYGLYEFLVMSFGLTNAPAYFMYLMNSVFMPELDKFEVVFIDDILVYSKNEEEHVGHLHVVLQRLREHHLYAKLSKCDFWLKEIKFLGHTISQAGIAVDPDKVQEVMNWRPPTTVRQIRSFLGLAGYYRRFIPDFSRIAKPITELLKKEVKFVWSQKCEDAFHALRQHLTTAPVLAQPDSSKPFDVYCDASGTGLGCVLMQDNRVIAYASRALRPHEQNYPTHDLELAAVVHALKMWRHYLMGTHCNIFTDHKSLKYIFTQADLNMRQRRWLELIKDYDLEVHYHPGKANVVADALSRKLQCTCILMDSRINTLCDELSKMQIEVIPSGSLSHISVEPALQDQIIMAQLSDKGVQIIKKNLHQKVEKYNCFRQDEKGVLWFKSRLVIPKDQDLKRKILDEAHLSKFSMHPGSTKMYHDLKPLYWWTKMKREIAQYVSECDTCQRIKASHLKSAGALQPLSIPSWKWDDISMDFIVGLPNTSRHHDSIWVIVDRLTKVAHFLPVHTTDKAQKYAELYIDRVVCLHGLPRTIVSDRGAQFVARFWQQLSSAYHPQTDGLTEMVYQILDGMLSFFAIYCCKKRDNHIYVIGFDYNGGHQGNLXFPPFEAHYGRRCRTPLYWSETGERDPVFAASVTGAGLKVTQLRKNKEAAQARQKSYHDKRRKPLQFEVGSFVYLKVSPTKGVQRFGIKGKLAPRYIGPYEIIEACGPVAYKLKLPSKMSAIHSVFHVSQLKKCVRLPTEIIAEPELEIEPDLSYQEYPSKILDCKERSTRAKSIKMYKVQWSNHSEEEATWETEEFLRSNFSDCLPKEADCNLTDGEYVLIPEQGPVQEEDQEQASEAAIEDLPAAPAIEGKPRFYA

SEQ ID NO: 337715 - protein, 73 aa, Zea mays
  Clone ID: MRT4577_71166C.1.pep
IGKGTLASTNQLLLRGFSLVELEELDLGTSGSPSLDRRFLEAQEQIAIYSRRAMNTNRHKQTYNCIRTLHHTR

SEQ ID NO: 337716 - protein, 78 aa, Zea mays
  Clone ID: MRT4577_71167C.1.pep
MTEADVNPKAYPLADAHLTKKLLDLVQQSCNYKQLRKGANEATKTLNRGISEFIVMAADAEPLEIILHLPLLCEDKNV

SEQ ID NO: 337717 - protein, 199 aa, Zea mays
  Clone ID: MRT4577_71168C.1.pep
MNSPTPASGGDTRFSSDFLSHDGFPSILWEVLNSAGYPTPPLYTVQLYEEHRVPHCRVWLTLEAHPLQPGWRSLDFKTIGFRADDTTKEAAMKTMTTFCGYHPLEMVMHPLGLFPAEKDDPMWCNCSLQSDAMAHFANLAQTTKLTLDSREDFVVDLSSELVEKDLQVERLSQRITTLEQQVEIRDNTIDVLENQLHDV

SEQ ID NO: 337718 - protein, 89 aa, Zea mays
  unsure (1)..(89): unsure at all Xaa locations
  Clone ID: MRT4577_71169C.1.pep
PDPRGRYNFHRSIYLLHSNPTKEGPGAIHKQSLLNPPPIMYSYNQFRVTFHSEVKNHFIPDAIIVKNNHAFXFFLKTITLNNVPCHDTI

SEQ ID NO: 337719 - protein, 52 aa, Zea mays
  Clone ID: MRT4577_7116C.1.pep
MDRRSWPWKKKSSDKSSNADVLQNFNHAEQEDKAPKFVQISPETYAHLTESE

SEQ ID NO: 337720 - protein, 832 aa, Zea mays
  unsure (1)..(832): unsure at all Xaa locations
  Clone ID: MRT4577_71170C.1.pep
MKTLTTFCGYHPLEMVMHPLGLFPAEKKDDPMWCNCLTLDSREDFVVDLSSELVEKDLQVEKLSQRITTLEQQVEVRDNTIDVLENQLYDVQRELEEANDHLDMHHLEMEANEAGREGEEAPEELGPTPGANGTTSAMPPSPLLQRQPHPQQHGGGQHQRPPAVATYQEFLSTQPPLFTKVDDPLDADVWLRVVESKFPLLTGDCPDEAKSRFAAQQLRGPARTWWDHFRAMLPADREVSWEEFKTTFRGHHIPAGILDRKLNEFLALNQGTRTYAGYHADSDEKKRDRFRRGLNTKLRERLNTVRADSFNELVNLAISQEDCIVAHRTEKKRKAPMAAPSAQAQRFRIVSHNQSRGFQQXRKMGDQATSAAAADTQPLSSSRSKEQSASXQQQFRQGNGNKCFTCGNVGHYAKNCPRNQQRQMSAPSQDKGRKQKVQVRQGKLNFTTLEEVPEGAPIMTGIFSVYNQPALIMFDSGASHSFISQKFSAKCELPXLSLKRVIXIVTPGGKISTNQLNQSVPIQLGSHIVKTTLLVLGLENVDIILGANWMTLHQVVLDVASLTVEINSPFCGNFTLILLSQGSTQSCAFSMIELPLKKTPVVCEYADVFRDELPGMPPDRDIEFAMELQPGTTPISKRPYRMPPVELAELKKQLQELLDKGFIRPSTSPWGCPALFVKKKDESLRLCIDYRPLNAVTIKNKYPLPRIDVLFDQLVGAKVFSKIDLRSGYHQIKIRASDIPKTTFSTRYGLYEFLVMSFGLTNAPTYFMYLMNSVFMPELDKFIVVFIDDILVYSKNEEEHVGHLHVVLQRLREHHLYAKLSKCKTTESLLMP

SEQ ID NO: 337721 - protein, 136 aa, Zea mays
  unsure (1)..(136): unsure at all Xaa locations
  Clone ID: MRT4577_71171C.1.pep
KNPGGFFPPPIVGPPKVFVLLPVKETKILPPPLYILVVLPPPLNVCPPPXKGQGNFVFGPPPPHHYPLPSYFPGGGFPPGDPPDGSAFKKPQGLGPGPSQSLLPPPPNFFCPAPRSDPFAKSPPGKTSLFVLPKKN

SEQ ID NO: 337722 - protein, 91 aa, Zea mays
  Clone ID: MRT4577_71172C.1.pep
QQTHTSKAQPGPSAATSRPRAARRQKGSMARKRKSDHGQKNTALDPPVRLSHPVSPKRRGSSTPSSACKTVAAVAYACAYCWLFVASGVFY

SEQ ID NO: 337723 - protein, 43 aa, Zea mays
  Clone ID: MRT4577_71173C.1.pep
ESTGSTDANDHSYAEHEFSLSIHKHFYMRTVDIGQFPGDPEHK

SEQ ID NO: 337724 - protein, 100 aa, Zea mays
  unsure (1)..(100): unsure at all Xaa locations
  Clone ID: MRT4577_71174C.1.pep
LHTAPARRCPASGHTTTTIPMTVPVDNIVELLMQXTSYLILCLGISWLPIAGVLFPRMIXMLLVPGWQYIHPXLFGGSHLTDLDAAEYEQSSAIPFSLVA

SEQ ID NO: 337725 - protein, 43 aa, Zea mays
  Clone ID: MRT4577_71175C.1.pep
TTFAPPPTTFNTTHFPSILIPKPPTLFFIIPSNSTITTPPITS

SEQ ID NO: 337726 - protein, 388 aa, Zea mays
  unsure (1)..(388): unsure at all Xaa locations
  Clone ID: MRT4577_71176C.1.pep
MDSTRSNQVAGRCSSTIASRAATVPPSLTMPRGELADAIVGGGGGGGADGDPRAALLRLSALGDRMAAVRGRISASISGEARPLSYADIQSVSSEISAAAQLVVLNAAELLASSVPFPAPPPPPPSAAPSPAPVREIPVVAASAQEQPLEAAKDDGGYEVVELDAAELLAEHVHFCEICGKGFRRDANLRMHMRAHGDRFKTLDALSRPGHGQPXSRPLAAXRFSCPFAGCNRNRTHRRFRPLKSAVCARNHFRRSHCPKLYACERCGGKKRFAVLADLRSHLRHCGEEAQWRCSCGTTFSRKDKLFGHLALFEGHTPAVNKPNKDVVTGPTESTIDAMEEGGFEEGIPDREEDEEGGYDPEFFKEWMDELRGGAGGSNWPGPAADGH

SEQ ID NO: 337727 - protein, 96 aa, Zea mays
  Clone ID: MRT4577_71177C.1.pep
PAGCGTTFSRKDKLFGHLALFEGHTPAVTKPNKDVVTGPTESTIDAMEEGGFEEGIPDREEDEEGGYDPEFFKEWMDELRGGAGGSNWPGPAADGH

SEQ ID NO: 337728 - protein, 260 aa, Zea mays
  unsure (1)..(260): unsure at all Xaa locations
  Clone ID: MRT4577_71178C.1.pep
PSPAPVREIPVVAASAQEQPLEAAKDDGGYEVVELDAAELLAEHVHFCEICGKGFRRDANLRMHMRAHGDRFKTLDALSRPGHGQPXSRPLAAXRFSCPFAGCNRNRTHRRFRPLKSAVCARNHFRRSHCPKLYACERCGGKKRFAVLADLRSHLRHCGEEAQWRCSCGTTFSRKDKLFGHLALFEGHTPAVTKPNKDVVTGPTESTIDAMEEGGFEEGIPDREEDEEGGYDPEFFKEWMDELRGGAGGSNWPGPAADGH

SEQ ID NO: 337729 - protein, 47 aa, Zea mays
  Clone ID: MRT4577_71179C.1.pep
QDGLMPLAAPSLSGPLRTPTTYFIFSALWATTLYFLRQRYNHRQTGA

SEQ ID NO: 337730 - protein, 93 aa, Zea mays
  Clone ID: MRT4577_7117C.1.pep
RCKYLRSSKSEQFTIFFTEYNDNTSKKERKKEKKSPKDRYRDCEREPLCYSSKCTKNAATHQARPVPVYPQPTTVLQEYSSFTTVSTLYPPSC

SEQ ID NO: 337731 - protein, 96 aa, Zea mays
  Clone ID: MRT4577_71180C.1.pep
TANTPMIDGLGKAADLVSANCETYEGHMRDIRDYLEERLEAEFGKRIHLNSRHPGVERLPNTCNFSIQGSQLRGYMVLTQCQTLLASVGASCHSDH

SEQ ID NO: 337732 - protein, 54 aa, Zea mays
  unsure (1)..(54): unsure at all Xaa locations
  Clone ID: MRT4577_71181C.1.pep
MAATIQSVKARQIFDSRGNPTVEVDVXCSDGTSARAPPPSGAPSGRYAPPLPPP

SEQ ID NO: 337733 - protein, 54 aa, Zea mays
  Clone ID: MRT4577_71182C.1.pep
VRSFLSDNVVKIGLVNFIVVYTRVDGDLYYIGVRGPGYFYFFCFNFFFFFFFFF

SEQ ID NO: 337734 - protein, 41 aa, Zea mays
  Clone ID: MRT4577_71183C.1.pep
YKLLVVLSVLYRCLLAYQAATTLFQAMAEYGLWHGRGGAHY

SEQ ID NO: 337735 - protein, 195 aa, Zea mays
  unsure (1)..(195): unsure at all Xaa locations
  Clone ID: MRT4577_71184C.1.pep
GHYHKFFPQILRGLNPIWRLKVNKGLGGERFPQPLIQLWQQILWHINIQTXATQQQQQSXPPLSQPYVVEPVAYLQQQGVVFNPLALADVAGCQQQQQLQQFXPALSQLAMVNPGGYLQQQQQLSSSPLVVGEGATYLQQQLLEQIVPALTQLAVGKPAAYLQQLLSFNQLTGXNSGVYLXQRQQVLNSSSMANP

SEQ ID NO: 337736 - protein, 85 aa, Zea mays
  Clone ID: MRT4577_71185C.1.pep
DWLTKIFKSDGLKGLYQGFSVSVQGIIIYRAAYFGVYDTAKGMLPDPKNVHIIVSWMIAQSVTAVAGLVSYPCCPVRRRMMMQSG

SEQ ID NO: 337737 - protein, 97 aa, Zea mays
  Clone ID: MRT4577_71186C.1.pep
SIFPKPGVPTRGPGGPPTKGFFYFKKIFPKKRGGKKKLRGKKLQGPKKANFWNGGVLPLGPPYEKKTQGGGPTLRKNPQTGAWWPKPQRAMGGTTPG

SEQ ID NO: 337738 - protein, 151 aa, Zea mays
  unsure (1)..(151): unsure at all Xaa locations
  Clone ID: MRT4577_71187C.1.pep
RVACQRGPGKKRARGGAQQSKPPLFFPEPPGRSNHKGQPQSKPPLFFLPNXNSLPGAPPPKQPRGQGPLGGPLGQPPALGKPFMGRPXGPPFVPPGGHGGEAQGGGEAPLGPGGQPRGGQSSPHTCVAGGRENCNPPHHGPPPQAEENPVK

SEQ ID NO: 337739 - protein, 93 aa, Zea mays
  unsure (1)..(93): unsure at all Xaa locations
  Clone ID: MRT4577_71188C.1.pep
PSXRANQDPVFFAQAYEKNGAVCPNEMTDEKNFYGRVDKLEAIRHGGVQCPVLSKEAMIDAWALYXGPDKGAETGALITGGLPEREMKNMLKI

SEQ ID NO: 337740 - protein, 162 aa, Zea mays
  Clone ID: MRT4577_71189C.1.pep
MGRQPCCEKIGIKKGPWTAEEDQKLVTFLLSHGHCCWRLVPKLAGLLRCGKSCRLRWTNYLRPDLKRGLLSEEEEALVIDLHAQLGNRWSKIAARLPGRTDNEIKNHWNTHIKKKLKKMGIDPVTHGPLAPATQPLALALAHQRDPPQVVREEERCDDDPSK

SEQ ID NO: 337741 - protein, 130 aa, Zea mays
  Clone ID: MRT4577_7118C.1.pep
PTVAIRVLFLDELLRRQFGFRFGRKGGGRAAGLGQVSSMGGGRLRWPLGTSFLVGGLCCFDRIRHWSLLHSEFPKSGLADACIFVLFNLLRVPCGASILHSFVLRKAFFPICKFIVESCLLVSACKDDGE

SEQ ID NO: 337742 - protein, 198 aa, Zea mays
  unsure (1)..(198): unsure at all Xaa locations
  Clone ID: MRT4577_71190C.1.pep
MPAGIACSCCRLPRILSSSGLTGSLSPSIAKLTTLQQLILDNNNITGGIPPEFGNLSSLTILNLGRNNLNGSIPDSLGQLSKLQNLDLSHNYLTGNIPSSFSNLLSLNDINLAYNNIRGAIPQHLLQVAQYNYAGNHLNCGQNLSACERGSTLTGGSKNSKLKVVIGSIAGAVTLSVTIVLXLLWWQRMRYRXEIFID

SEQ ID NO: 337743 - protein, 620 aa, Zea mays
  Clone ID: MRT4577_71191C.1.pep
NVMMDSVSMKLLAFVFLLLRCQRASLALAVDFQVEALVEMRTQLGDKRGVLSDWKDNQMSPCYWANVNCQDNKVTTIILSSSGLTGSLSPSIAKLTTLQQLILDNNNITGGIPPEFGNLSSLTILNLGRNNLNGSIPDSLGQLSKLQNLDLSHNYLTGNIPSSFSNLLSLSDINLAYNNIRGAIPQHLLQVAQYNYAGNHLNCGQNLSACERGSTLTGGSKNSKLKVVIGSIAGAVTLSVTIVLVLLWWQRMRYRPEIFIDVSGQNDHMLEFGQIKRFSWRELQIATSNFSEQNVLGKGGFGKVYKGVLPGPNSIKIAVKRLLNVDSRDGEMAFLREVELISIAVHKNILRLIGFCTTPTERLLVYPFMENLSVASRLRDIKLNEPALDWSTRMRIALGAACGLEYLHEHCNPKIIHRDVKAANVLLDGNFEAVVGDFGLAKMVDIGRNTVTTGVRGTMGHVAPEYIKTGRPSVKTDIFGYGVMLLEIVTGERAIAFHPDRIEEAGEILLTDQVKLWMEEGRLLDLVDRNLGGVYNLEELEKVTQIALLCTHMDPEQRPTMSEVVQMLEGEIVPAERWEEWQLAELQRRQQHEMRQQGKLFNFSEESQNIQEAIELSAGR

SEQ ID NO: 337744 - protein, 48 aa, Zea mays
  Clone ID: MRT4577_71192C.1.pep
EHIHSFLLTMFITSALSDTLSELTQSLLLWKELAQLHLPVATSLKINN

SEQ ID NO: 337745 - protein, 48 aa, Zea mays
  Clone ID: MRT4577_71193C.1.pep
SWNSRLQVLHTHNREFQSYPVIQNAIKMWNSLFLIYTWSELGVVLSLY

SEQ ID NO: 337746 - protein, 227 aa, Zea mays
  Clone ID: MRT4577_71194C.1.pep
MKLLFVVSVLCLTLANGFLFRIPTPEHPILATAAPAGVTEYFTAFFAHFDLDQPNQILNCFDDKNAVLFWKELDLTSDLAQNIEERNHVKVHLGWGELVLLEKALESLHGCMAATQDFSDLLHALGAEERNPKLFMIAQYVYFQANYGKLSQELPKVVEAIKNKDWKRAGELKASIVQSMADELKDKGLALQALDALWNGVHIELGLGDAQSVFGCWNKETAHVRLE

SEQ ID NO: 337747 - protein, 226 aa, Zea mays
  unsure (1)..(226): unsure at all Xaa locations
  Clone ID: MRT4577_71195C.1.pep
NRNVMMDSVSMKLLAFVFLLLRCQRASLALAVDFQVEALVEMRTQLGDNRGVLSDWKDNQMSPCYWANVNCQDNKVTTIILSSSGLTGSLSPSIAKLTTLQQLILDNNNITGGIPPEFGNLSGLTILNLGRNNLNGSIPDSLGQLSKLQNLDLSHNYLTGNIPSSFSNLLSLSDINLAYNNIRGAIPQHLLQVAQYNYAGNHLNCGQNYLXCEXSSTLTGGSKIFS

SEQ ID NO: 337748 - protein, 88 aa, Zea mays
  Clone ID: MRT4577_71196C.1.pep
TLLAMRKTQSARKTEEHFLHTLPDHIISLISASSFATLRTHSLIGGDTTETLSSPTHSALRYTKMILYITEYKCRRANNQEKHSAAKH

SEQ ID NO: 337749 - protein, 242 aa, Zea mays
  unsure (1)..(242): unsure at all Xaa locations
  Clone ID: MRT4577_71197C.1.pep
FGSRNEPAFYWSTRMRIALGASCGLGDLHEHCNPKIIHRDVKAANVLLDGNFEAVVGDFGLAKMVDIGRNTVTTGVRGTMGHVAPEYIKTGRPSVKTDIFGYGVMLLEIVTGERAIAFHPDRMEEAGXEIMLTDQVKLWMEEGRLLDLVDRNLGGVYNLEELEKVTQIALLCTHMEPSQRPTMSEVVQMLEGEIVPAERWEEWQLAELQRRQQHEMRQQGKLFNFSEESLNIQEAIELSTGR

SEQ ID NO: 337750 - protein, 71 aa, Zea mays
  Clone ID: MRT4577_71198C.1.pep
FVARSVQVMENAATNIEAHAIGEPDSANFSRLAYCDLDMRRTGPDSREMATVDGRRGYSDQTGDMMNVSDC

SEQ ID NO: 337751 - protein, 109 aa, Zea mays
  Clone ID: MRT4577_71199C.1.pep
GKADEGRHMITNLDRQVDPMSDIQCPSNGLEKCLHYVHLEWRHRLGRQHRERTPGTSIDIVWMEEKNMSILHDSLLCVNIWLRTMCSGGHGHAGLITILCILADDHMSG

SEQ ID NO: 337752 - protein, 61 aa, Zea mays
  Clone ID: MRT4577_7119C.1.pep
SLETKHPLKICLEGLLPKGSFCGSYKTAPLHRFFTKKMAPPTKLFGRPPSMKLEPERSPTI

SEQ ID NO: 337753 - protein, 55 aa, Zea mays
  unsure (1)..(55): unsure at all Xaa locations
  Clone ID: MRT4577_711C.1.pep
QLNFIFVYKVITTRFVHPILSLRDTXCVSRSLCVLREGGREGERTYGRGMTKEGG

SEQ ID NO: 337754 - protein, 85 aa, Zea mays
  unsure (1)..(85): unsure at all Xaa locations
  Clone ID: MRT4577_71200C.1.pep
PNPHXLIGLLSFCLARSPEVTGREHQPWQSGRAPCAASRFTSPPRSPAPSARFPRPPPRLPRPPPPRPPRGGGGSCASSPSIPTG

SEQ ID NO: 337755 - protein, 89 aa, Zea mays
  Clone ID: MRT4577_71201C.1.pep
GRPDHPSSPLSHGIETMYRGGEMRCTKRMSHIRMMLAAHVPLGPGTAISRMESYGFKMPHRPDLLQQPCKDMVKTGACIEAHRCLREPA

SEQ ID NO: 337756 - protein, 154 aa, Zea mays
  unsure (1)..(154): unsure at all Xaa locations
  Clone ID: MRT4577_71202C.1.pep
LALPNIFSGACQLGEREREREREREREREREREREKRREEKRRXDRRKEDRSDGRRSRDQQDSSQLDGRAEAEVERPARRGGDASAQPRPPRRRSKCGWWGSTRRLENAAGQRRGDALCCCCRHLPALSRLLRPSFLAPLTRQGKGVPSSSYRE

SEQ ID NO: 337757 - protein, 137 aa, Zea mays
  Clone ID: MRT4577_71203C.1.pep
FFFFFFFFFFFFFFFFFFFFFFFFFFFGNKGGLIDINFFIPVFGSNPLGEATKFQTWFFSKKIFWGLGGTCPDLKFRATIAPKFVGRSLLVKNNTFPYVLGSLADLCWGGGAFFAPNFLTWSVTLASLGEFWPFSPF

SEQ ID NO: 337758 - protein, 73 aa, Zea mays
  Clone ID: MRT4577_71204C.1.pep
PEGCLFPVSPGAVTSILFFRPLVLYVLSGKPALPIFGLMVLPCHLGGFGYVRSCNVRAPVLRTLNSLKITPGY

SEQ ID NO: 337759 - protein, 100 aa, Zea mays
  Clone ID: MRT4577_71205C.1.pep
NSQCKINSLPTFCLNHDSHCIQKYGPLSGRFLSFLAADTTNFPGKFLDLTLFCSPRTRAVLGPPNRVQQNLLLLHNTPRFSKFSRWCNLPPPISRNYAHG

SEQ ID NO: 337760 - protein, 48 aa, Zea mays
  Clone ID: MRT4577_71206C.1.pep
GFVMKGPGLAVQQHCEQGFRPTLIINCELLRSSGCIVETQAMFSFPPC

SEQ ID NO: 337761 - protein, 299 aa, Zea mays
  unsure (1)..(299): unsure at all Xaa locations
  Clone ID: MRT4577_71207C.1.pep
MEDERNTQQHQGGEQAQDQENEVKDRGLLDSLLGRNKHDDQEKKNQQQQQAEEELATGMEKVTVAEPDHKEEGHEAAEKKDSLLAKLHRTSSSSSSSSDDEEEEVIDENGGEIVKRKKKKKGLKEKVKEKXLAAHKAHDEGDHHQPGVPAPAPAPPVAVDTHAHHLQEGEHKPHFPAPAPPPHVETHHHPVVVHKIEDDDTKTQTPPQAPEEEKKGLXLDKIKEKLPGGHKKPEDAAAAAAAPAVHAPPPPAPHAEVDVSSPDGKKGLLGKIMDKIPGYHKSSGEEDRKDAAGEHKTSS

SEQ ID NO: 337762 - protein, 225 aa, Zea mays
  Clone ID: MRT4577_71208C.1.pep
MRRWVLAIAIPILAAASAAALFLGAEAQAVQQGHQTERISGSAGDVLEDNPVGRLKVYVYDLPSKYNKKLVKKDPRCLNHMFAAEIFMHRFLLSSAVRTFNPEEADWFYTPVYATCDLTPSGLPLPFKSPRMMRSAIELIATNWPYWNRSEGADHFFVTPHDFGACFHYQEEKAIGRGILPLLQRATLVRTFGQKNHVCLKGGSITIPPFAPPQKMQAHLIPLDT

SEQ ID NO: 337763 - protein, 122 aa, Zea mays
  Clone ID: MRT4577_71209C.1.pep
GHLAVAYLRIRGILFLFFHERTQGKVGIGKEGPWPFEGRSGYCTGSKMTPLPRRRWRLGWPRLKLAPVEGVLDLTSGPFGSTRSFPGEFFRPQLLRVGRRPLKAAKGAKAKVVIALRPRAEF

SEQ ID NO: 337764 - protein, 73 aa, Zea mays
  Clone ID: MRT4577_7120C.1.pep
YKLLYKRICRILNPYICCQKKKKKKKKKKKKKKKKKKKKKKKKKKKKKKKKGGEKKLGNIKKKKKKGPWAGPP

SEQ ID NO: 337765 - protein, 53 aa, Zea mays
  Clone ID: MRT4577_71210C.1.pep
KPTGVDHLTRDHRHRQLPLLLRHDPSNHWLNQAGVRPHEHLSVLHKPFGHHWC

SEQ ID NO: 337766 - protein, 72 aa, Zea mays
  unsure (1)..(72): unsure at all Xaa locations
  Clone ID: MRT4577_71211C.1.pep
EPRLLILXEPTTAPLPIKESGRENLPTLGYCGTDSPMRYADTEIPCHTHHKLTIAGLLWLVALMILLKTDTI

SEQ ID NO: 337767 - protein, 84 aa, Zea mays
  Clone ID: MRT4577_71212C.1.pep
GGWGLGGGGTPIFLLLLNTGNLQTKDWLIHKGIYNGGPTQTNMSSFGPPLHGGPFLVGEINPRPGHWWGIQVQRGIITLPGLGG

SEQ ID NO: 337768 - protein, 68 aa, Zea mays
  Clone ID: MRT4577_71213C.1.pep
KAKVPKQKTFRSSAPSVLFLNLIFSKLFLYKYHLFYFIFFLTICTLLIFSFFFFFFFFFFFFFFFFFF

SEQ ID NO: 337769 - protein, 86 aa, Zea mays
  Clone ID: MRT4577_71214C.1.pep
ATPHKVHREYLVLMTGKLKWLPFQKQKPKRWIKIQNRGWGFSSVVERLPRKRKALGSVPSSEKKKKKKKKKKKRKKKEEKKKGGGP

SEQ ID NO: 337770 - protein, 77 aa, Zea mays
  Clone ID: MRT4577_71215C.1.pep
SSTTTIRPTTERATLHTRSLQLPSERSQAAVLTAEGFQRKEGTNRTTSKETSLWLTMHARRTADANELVCFAYRHGL

SEQ ID NO: 337771 - protein, 110 aa, Zea mays
  Clone ID: MRT4577_71216C.1.pep
MALAPAPLQCFLTGSSRPVCTATATPPKHARRPSRISCRASGDDKDKVPSGGNDLGVKQLGKLAMVALAAGVLALGPVDGAVAAKSGGRVGGQAFRSAPRSSGPRINNSR

SEQ ID NO: 337772 - protein, 191 aa, Zea mays
  unsure (1)..(191): unsure at all Xaa locations
  Clone ID: MRT4577_71217C.1.pep
MALAPAPLQCFLTSSRPAVCTATPPNKRARRPSRISCRASGDDKDKVPSSGGNDLGVKQLGKLAMVALAAGVLALGPVDGAVAAKSGGRVGGQAFRSAPRSSGPRINNSXRTNIYINPPVAPPLGGYGYGSPFFGGYGYGWSPFSFFAPGPSVAVGVGGGFDTLVLFLVLGAVVGAVRRFLNRNNDDYDDY

SEQ ID NO: 337773 - protein, 95 aa, Zea mays
  Clone ID: MRT4577_71218C.1.pep
PPQFRKEGKTVRVVSFVSWELFDDPSDESKKRVLPVSVPGRISIEAGAPFGWQKFVGAQGKALGFAKFGGRVPPGAFSKGGGLPVESLLAAAKSF

SEQ ID NO: 337774 - protein, 45 aa, Zea mays
  Clone ID: MRT4577_71219C.1.pep
MKSDYLSHSLWHHRCFGKIICFFGTHSKFLYFKMLLKSVMIHCKA

SEQ ID NO: 337775 - protein, 466 aa, Zea mays
  unsure (1)..(466): unsure at all Xaa locations
  Clone ID: MRT4577_7121C.1.pep
GRCGGWKWQRRRRRFACCQGPPTPLGRLLTRWTQPRPLPCRAICVDVSLSLSLSPPVAPLQWDRLVYAALVDSRDNSTVVFAKGMNLRPGRVGXASRYQCVFGRDLWKPXQRVXRPPVISAAQEXVFRCVTPARVRRHLRMTTDPNGNGNGNDKPMLVSIRTKGQRDSTLTRLEEPEPLPPRHNYRHHRRRPKAHSMCVCTMLRNQARFLREWIIYHSRIGVERWFIYDNNIDDGIEQVLGTMDPSTHNVTRHLWPWTKSQEAGFAHCALRARESCEWVGFIDVDEFLHFPGNQTTLPDILRSYSNRPRVGELRTACHSFGPSGRTRIPKQGVTTGYTCRLAAPERHKSIVRPDALNPSLVNVVHHFHLREGARYVNVGQGAMLVNHYKYQVWEVFKDKFSGRVATYVADWRDEENVGSRDRAPGLGTRPVEPEDWPRRFCEVYDTGLKDFVQKAFADPATGSLPW

SEQ ID NO: 337776 - protein, 90 aa, Zea mays
  Clone ID: MRT4577_71220C.1.pep
PSPHPFFFPKVFHLGVVWPPHGGYTLPRVLLCPQGLGFFPLNWDLYWVFFLLRRVGFIPPRCLMQNMTPPTKNYASSSNNIPTQKKKVLS

SEQ ID NO: 337777 - protein, 121 aa, Zea mays
  unsure (1)..(121): unsure at all Xaa locations
  Clone ID: MRT4577_71221C.1.pep
PPPPAAPGFFSPPPRPXVPPXPPPRRWRXPLPXVPXPAAPRAXPXXGCRXXPPXGWARXRXGAXAXXXLXPPPPPSXXARXXPPXAPXGPRPXCPGAWRPWRRPWRSRGPPSGPAARAAWA

SEQ ID NO: 337778 - protein, 674 aa, Zea mays
  Clone ID: MRT4577_71222C.1.pep
ATAVKHGLDANVFVGSSLINLYVKHGCISDAKKVFDFSTEKNIVMWNAILYGFVQNELQEETIQMFQYMRRADLEADDFTFVSVLGACINLYSLDLGRQVHCITIKNGMDADLFVANAMLDMYSKLGAIDVAKALFSLIPVKDSVSWNALIVGLAHNEEEGEAINMLKRMKFYGIALDEVSFATAINACSNIWAIETGKQIHSASIKYNVCSNHAVGSSLIDLYSKFGDVESSRKVLAHVDASSIVPINALITGLVQNNREDEAIELFQQVLKDGFKPSNFTFTSILSGCTRPVSSVIGKQVHCYTLKSAILNQDTSLGISLVGIYLKCKLLEDANKLLEEVPDHKNLVEWTATISGYAQNGYSVQSLVMFWRMRSYDVRSDEATFTSVLKACSEMASLTDGKEIHGLIVKSGFVSYETATSALMDMYSKCGDVISSFEIFKELKNRQNIMPWNSMIVGFAKNGYANEALLLFQKMQESQIKPDDVTLLGVLIACSHAGLISEGLHFFDSMSQVYGIVPRVDHYACLIDLLGRGGHLQKAQEVIDQLPFRADGVIWATYLAACQMHKDEERGKVAAKKLVEMEPQSSSTYVFLSSLHAAAGNWVEAKVAREAMREKGVMKFPGCSWITVGNKQSVFVVQDTHHPDALSIYKMLDDLTGMMNKDGRIKECLLEGQ

SEQ ID NO: 337779 - protein, 149 aa, Zea mays
  Clone ID: MRT4577_71223C.1.pep
ASRRLHPVSIRGDLGAILALGVRSHQLRHWCLAQLHGKNTGVLKLEQAPKSQSTLASSVPLENHVNLHDATGACQAFDEIPHKDTLDYALLDDMAGFRPPGARPLLGCAPPPGQVCWRWGTVRHHQNLWVSARQSTGEAAACPVRQVRT

SEQ ID NO: 337780 - protein, 77 aa, Zea mays
  unsure (1)..(77): unsure at all Xaa locations
  Clone ID: MRT4577_71224C.1.pep
TQVDNTPVTPVSPCVCVPPFAPVEPLPQGIPLPFPCPICSLIKKPPSLFSEEXSSXFFXGKNRVILKKNPXXXGRPP

SEQ ID NO: 337781 - protein, 168 aa, Zea mays
  Clone ID: MRT4577_71225C.1.pep
RAPCFFILFVGSYCDKATRGIPSHGGWRGRCLSGGGVGDLGAILALGVRSHQLRHWCLAQLHGKNTGVLKLEQAPKSQSTLASSVPLENHVNLHDATGACQAFDEIPHKDTLDYALLDDMAGFRPPGARPLLGCAPPPGQVCCRWGTVRHHQNLWVSANRDWGSRCCP

SEQ ID NO: 337782 - protein, 52 aa, Zea mays
  unsure (1)..(52): unsure at all Xaa locations
  Clone ID: MRT4577_71226C.1.pep
ISVSKGIXSRDGGSGWASRSQASSIASHPIESLLXPFLKVNMYNIXYKRLIY

SEQ ID NO: 337783 - protein, 215 aa, Zea mays
  unsure (1)..(215): unsure at all Xaa locations
  Clone ID: MRT4577_71227C.1.pep
GFNQERYCRYRRFDDIEQVLRXTXKTNGVNVLLSGNCVLSKALSFLGLDHLGVKIKRDNVTGFPKAEFFDSVGNGLYLDTDSKMFEVSLSQVLDSALLPDINSELIRASQQGDVASALLVKDKAFQWGYDISPDSCSELFKALCVSPAYVIDVIDLMEEMPDILYKLDAQNLDLVAQTLSRNGMSAHAKLVLEKMLREDLSISHNTYTYLMIGLC

SEQ ID NO: 337784 - protein, 90 aa, Zea mays
  Clone ID: MRT4577_71228C.1.pep
KNPGWVQKGFKTMVFPPKQIGSSKATGQEAPHGGINGKKKKNLPWNGFFFLKNPFFKTRGMSPPSCIFLPGRGFGSCNVFEIWKNVAGPP

SEQ ID NO: 337785 - protein, 132 aa, Zea mays
  Clone ID: MRT4577_71229C.1.pep
FPRGGLPAFSSGPAGFGPSRVGRFPGSPFNCFGAQFASRLSPGVALFVSWVGPSGFRPFKLPVWPPPFLCVGFLFRPPRLLAFRFRLVWFLALLAGGLFPRLPSPPLITPGSYSPPLWAGWYAGRVRSGLAG

SEQ ID NO: 337786 - protein, 45 aa, Zea mays
  Clone ID: MRT4577_7122C.1.pep
LGAAATQDSALGPSWREPWAEPKSLMRALCPPYSSRPHERGAGSD

SEQ ID NO: 337787 - protein, 55 aa, Zea mays
  Clone ID: MRT4577_71230C.1.pep
NIAQTNYPRDCQATAEHSNDNKNFADDRYDIASISRNPDQSHQIMQYEVIHYQCR

SEQ ID NO: 337788 - protein, 40 aa, Zea mays
  Clone ID: MRT4577_71231C.1.pep
ANYIYVLLNKCMVSLKRIRFWEQGSIYNREKYPPLKSTPL

SEQ ID NO: 337789 - protein, 77 aa, Zea mays
  unsure (1)..(77): unsure at all Xaa locations
  Clone ID: MRT4577_71232C.1.pep
XSIGFNGPGXSLXTQPPXVDXPSPXXGQXLENVQXXXXPVRVXXLKMPVVXCKQAQLVVALFKTKFLLGAGGGGXLG

SEQ ID NO: 337790 - protein, 78 aa, Zea mays
  unsure (1)..(78): unsure at all Xaa locations
  Clone ID: MRT4577_71233C.1.pep
TIHKGKWYKKGSDMXFLDRVYFFSMKNRMXMKEVVSKHAGFMNKYDLAKKVGMVVDVWGIWTYVKWGAYPGFLYQQNR

SEQ ID NO: 337791 - protein, 61 aa, Zea mays
  Clone ID: MRT4577_71234C.1.pep
SGSRTALSSYSRMSTRSFSIKFIFLVSIRMHIKSPHLIVFRRSMKNTGRLGRSSKYVRSAY

SEQ ID NO: 337792 - protein, 56 aa, Zea mays
  unsure (1)..(56): unsure at all Xaa locations
  Clone ID: MRT4577_71235C.1.pep
EAIWQLDTLSXEESYKDSTLIMLLLRNTLTLWTSDISQDPAAYIREAPKXDLSDGQ

SEQ ID NO: 337793 - protein, 85 aa, Zea mays
  Clone ID: MRT4577_71236C.1.pep
GDGEKMLFPHKAPEKRNPSYKRGRGANPTNFICPNKTKKKRGKKAKQKKTSLKPLTTRDKKSEGKLYNQKKQLKTDPKGQGAAQT

SEQ ID NO: 337794 - protein, 67 aa, Zea mays
  unsure (1)..(67): unsure at all Xaa locations
  Clone ID: MRT4577_71237C.1.pep
EMLMEAFGRXGSVXGRRVMWYAQSGRSRGYGFVCYSTREKMYEALSSLSSMKMEGRKFRVNLSLGKK

SEQ ID NO: 337795 - protein, 83 aa, Zea mays
  unsure (1)..(83): unsure at all Xaa locations
  Clone ID: MRT4577_71238C.1.pep
NTKKKNARWDDNPKAKLLARAPIXKGKLVGEVAFIRNMAXVITKIKVEELKKHYGLRLVKSSLENPTHDRHHHSAKLDADSKR

SEQ ID NO: 337796 - protein, 90 aa, Zea mays
  Clone ID: MRT4577_71239C.1.pep
PSVTHDHSSDDKVDDEPHGVNDDVVVSTTWRRMTTTAQRHEQKGLARAQSEPVDGEPDRHRSRLTLTDSDRATSKLPQLMAWAMESKGWA

SEQ ID NO: 337797 - protein, 281 aa, Zea mays
  Clone ID: MRT4577_7123C.1.pep
MPPLHVPGSSTPRKFYHLVLFHVHPFWIQVLYFLLISVLGFLMLRVLPMKSSSVPRPSALDLLFTSVSATTVSSMIAVEMESFSNAQLLLMTLLMLLGGEVFTSMLGLHFTCTKLRNKRETPHNNLHGNSLEQSRRRHRPMEMEAQAAAVQMELAGFNKDGHGDFASMARLLMFIVLGYILVVHIAGYALILIYLSVVGSARAVLVRKRISLSTFSVFTVVSSFANCGFVPTNEGMVSFKSFPGMLLLVMAHILLGNTLFPIFLRLSISRGSQGGETSASC

SEQ ID NO: 337798 - protein, 81 aa, Zea mays
  Clone ID: MRT4577_71240C.1.pep
NSLASPRLAHPPACPSPKAGGHSCRAPLPFQPAKTNICRRRATCKGPKGSPRRLGSGTRRKGGRRSRRAAGRMFGRDPWGG

SEQ ID NO: 337799 - protein, 99 aa, Zea mays
  Clone ID: MRT4577_71241C.1.pep
PQDGGRTSQGGAPPKNKEEGPPKKPEEPPKKEEGEPPKKDGGEPKKGIVEKIKAKIPGEHGDKSGAPKEKKAKKKKDKKKPGKGHDHEGGPSSSSSARD

SEQ ID NO: 337800 - protein, 128 aa, Zea mays
  Clone ID: MRT4577_71242C.1.pep
VSLTSTTVLITPRSVTGLSVTSGIMHVTPGRSADSLARDVPLETPNSVVGPFARELETPNSVVGPFAREFSTVTSILEAPLEREAIHLTPCSIAASLTTKTPALVAGSAASSLAGAAPSGFAASFTTC

SEQ ID NO: 337801 - protein, 600 aa, Zea mays
  Clone ID: MRT4577_71243C.1.pep
KASIKTTVGELLPVLTARPIDSDSVTGDRATDADAGGQSLANKLRSLSSEGFVQLLSAIFRIVQVHLQQAAEVKRIVEWVMGNLDGTLGVDASNPTLQHGGTVIPDTQENDSSRGSNTLTRSTSKIPFVQGKTNDFSIINSLKNVRADVLRENTEAVFAACDAAHGRWAKLLGVRSALHPRLRLQEFLIIYNITEEFIAATEKIGGRLGYNIRGILHQQSKQFVDYQHNVRMTKIKAVLDQETWVAVDVPEEFQAIVLSLSSTYSSVNGMEMPSTDDNSKFSDHRSTSQEPTYSAKNIADNGKVTSGTGENKVEFTSQTENNVAGNLKSTLQTIVHGGVGYHMVNCGLILLKMLSEYVDISKCLPSLSLEVVQRVVEILKLFNTRTCQLVLGAGAMQVSGLKSITSKHLALASQIISFMHSLIPDIRRVLFLKIPEARKHLLMSELDRVAQDYKIHRDEIHNKLVQIMRERLLANLRKLPQIVEGWNAPQDNDVQPSQFAKAVTKEVTYLHRILSQTLLEVEVQTIFRQVVQIFHSHITEAFTKLEVSTPLAKDRLCRDVQHILACIRKLPADNFSSETIPNYGLLDEFLAENFGTKVGE

SEQ ID NO: 337802 - protein, 81 aa, Zea mays
  Clone ID: MRT4577_71244C.1.pep
VEPNPDGMHHTLGEPLIRESMTHLGYHVGRFEFAKLHVLNINAKTPKIGTPEFVKKFGGSTNGMFCPLMAKTQKLELRSLF

SEQ ID NO: 337803 - protein, 48 aa, Zea mays
  Clone ID: MRT4577_71245C.1.pep
STVCPHLGDLNSIPNFPYNNHGGGGGGRLGHLLSQTRADLHSDLSVGP

SEQ ID NO: 337804 - protein, 64 aa, Zea mays
  unsure (1)..(64): unsure at all Xaa locations
  Clone ID: MRT4577_71246C.1.pep
MLKAVAAPGSTHGAQATIFFTQEGDGPTAVTGSVYGLNPALHGVHVPALXDTTNGXMTTGLHYN

SEQ ID NO: 337805 - protein, 72 aa, Zea mays
  Clone ID: MRT4577_71247C.1.pep
KEKRGEKSRALGRYSTGFKSSLILHERLLNLLSWPQFSVHWTSYSPVGEQRKACHCQTFAPCTTLSHSEVGL

SEQ ID NO: 337806 - protein, 108 aa, Zea mays
  unsure (1)..(108): unsure at all Xaa locations
  Clone ID: MRT4577_71248C.1.pep
LSPAVSSVCEIPNLQPYRIQQAIAAGILPLSPLFLQLSSALLQQVPLVHVGGQNIWAQQLRLLGLANLAGYSQRPRFVAFHPLGALNSACYMGEXRLTIRRXPAGYPQ

SEQ ID NO: 337807 - protein, 48 aa, Zea mays
  Clone ID: MRT4577_71249C.1.pep
KGDDDHVLQKEKAQECVGLMYAVFIFLLVLKKKKKKKKKKVLCVVTTA

SEQ ID NO: 337808 - protein, 81 aa, Zea mays
  Clone ID: MRT4577_7124C.1.pep
HATCPLTNFVGRALWCLVGARDESPVSCLGIMCFFIKKMVRSASMQKNARVRLPVYTLSAPNTPYNHIKYFPSSRVILVLH

SEQ ID NO: 337809 - protein, 145 aa, Zea mays
  Clone ID: MRT4577_71250C.1.pep
MAAVPVYSITRAEIDEFWSRKEVEAEERRLAAEKEAARIRAKTLKMEDYVLYEQMVREILMEGNGGDGSAMAAAATGGTTEAQIVGIKHWWTRSAYAYLNTPALSMDGNGRSNKHAIPYVPQERCTAIFCSSTPRQPNVDALAIF

SEQ ID NO: 337810 - protein, 109 aa, Zea mays
  Clone ID: MRT4577_71251C.1.pep
MSAERAPVLVRHGGGGVEALRQLPPGFRFRPTDEELVVQYLRRKAIGVPLPAAVIPVFRDLYSRDPWDVVAVSAPDTRSEGEKYFFAVRPASGGKSSGAGTGSRAAADK

SEQ ID NO: 337811 - protein, 202 aa, Zea mays
  unsure (1)..(202): unsure at all Xaa locations
  Clone ID: MRT4577_71252C.1.pep
PLEFFFFFFFFFFFFFFFFFFFFFFWSYHPPLGRGGGRGGWGGPPLVKILVLPFPFTSPEHQLTKQPTEPAGGGQQTGPWTRPRGRTGAGGQGTPGLAGERPPSWPNPGGPPXPXGPRPRGPRQAPPPPQPQPPLGPLEDLPENRGAKGGQGDLEPCPGGPVPRXNGPWFPKNPKNRKLPLPPPPPRGGASPLGRQSFAIFG

SEQ ID NO: 337812 - protein, 103 aa, Zea mays
  Clone ID: MRT4577_71253C.1.pep
MSAERAPVLVRHGGGGVEALRQLPPGFRFRPTDEELVVQYLRCKAIGVPLPAAVIPVFRDLYSRDPWDVVAVSAPDTRSEGEKYFFAVRPASDGKSSGAGTGS

SEQ ID NO: 337813 - protein, 108 aa, Zea mays
  Clone ID: MRT4577_71254C.1.pep
KKPRSRGGGPSPPGGGPNGVPRPPGFFPKWPPGGKAPPKVRGGLSISGGGNPSFWRLLTRKRTPPQGWVVAQGIFRGGPNGVFFFPFPSKRFFFLGGPPRIQKVKGAP

SEQ ID NO: 337814 - protein, 107 aa, Zea mays
  unsure (1)..(107): unsure at all Xaa locations
  Clone ID: MRT4577_71255C.1.pep
ETALTKIGLADLLVIAQNLALNIAEKGFPIXVYNRTTFKVDETAQRTKVELNLPVIGFHDHAXCVSCIQKPAVDIMLLKTGAPVDQTIAXTWTEHLDXGDCIRDGVN

SEQ ID NO: 337815 - protein, 148 aa, Zea mays
  Clone ID: MRT4577_71256C.1.pep
FTPLFPLNPVVFLPPPLFPFGRVGFAFFYQQQFFPFNQWGALTLAGFLPRQIFFPFSQLVAATGVSFLTQQRLGPFFPRFGGNPAPLFQLQQLLPFGPLVLTNPGASSQQPILGGALSFRWVFGGNSKKKFFGWGGGPPRNKRFPFPV

SEQ ID NO: 337816 - protein, 83 aa, Zea mays
  Clone ID: MRT4577_71257C.1.pep
HLHKKNIRPQSDPKENYVELPKNIEFSMQVNASCIKDLQVYDYLDNKMKDDAIKELPLVRHNHHEYKNLSKELIIQGLLRLKE

SEQ ID NO: 337817 - protein, 55 aa, Zea mays
  Clone ID: MRT4577_71258C.1.pep
RSPPQRSPRTCPRGTGRCPRHRTKSGRSDVIYAPLLLRDQQDPFHHQNLAIRPEA

SEQ ID NO: 337818 - protein, 147 aa, Zea mays
  Clone ID: MRT4577_71259C.1.pep
MRAHNFDGSELDNKTNSIHDQFSTQLSLSSSSDGEEIATSSCPDKGCPLAILHLCLKSFKQDATEEDAAKWRLDGTFVLSDTEWGDSSYASSLSEQSSTISAPSTPFTQPEDLDRTDIWISSLDLDAEDCALLPEPDKEQFPDILGF

SEQ ID NO: 337819 - protein, 79 aa, Zea mays
  Clone ID: MRT4577_7125C.1.pep
FHFSRARPRNCRALGFHLLLLGEDREEFNFSHGFCFSQKYDGVFSRPRKCMTGVWTKPDSNYLVYPRGPGLQQSNGEIN

SEQ ID NO: 337820 - protein, 74 aa, Zea mays
  Clone ID: MRT4577_71260C.1.pep
SARGPADHQLLTNPLVAPSNVTASKGTIYPTRKDTFGGHNVHVPDVLGMKTGRPIKASIASADNEPYAVFKGMN

SEQ ID NO: 337821 - protein, 113 aa, Zea mays
  unsure (1)..(113): unsure at all Xaa locations
  Clone ID: MRT4577_71261C.1.pep
PDRNPGRPSVRXLHGQHWVHISQAGSDDNSTIPCNLALESRAMPCFGEARRAHACCSYVLDHLHDHKASRVTVHRGNRQQLSAVRLCLSGLGPRKLSVYIRTLFGCDPILGLK

SEQ ID NO: 337822 - protein, 128 aa, Zea mays
  Clone ID: MRT4577_71262C.1.pep
RRPAASLEAPPRLLLPGRAQLPSPRLRVTPASGWGRGGFCIRGSVVVSNVRAPRTLLLCLSGVVKRGWLSLHGPRGVEGSQAVKGVGCWEEEEGWKFPPPVLGLPVPVNIGEVRVKKPRHRGQCVGVL

SEQ ID NO: 337823 - protein, 114 aa, Zea mays
  Clone ID: MRT4577_71263C.1.pep
GLGRAAVDQESVLGAVPPKSLEPYVFFRAARRVSLTVLLCFRSVAPRAGRQEAAGVVCAVPVRAQGRGAAQVGVGPVAQHMPALWVTLLCSPHSLKTICTVSDQHWCKLCDLWH

SEQ ID NO: 337824 - protein, 191 aa, Zea mays
  unsure (1)..(191): unsure at all Xaa locations
  Clone ID: MRT4577_71264C.1.pep
SPRPAKTVSESSARRALTDSSATVEPAMTPSTTPVVPNTFPGAGHSISVISCATPAHHPPRPSAASASFRALSTSFSSAATASGLFSPGDAAPTSVTFSGPPSCGADGAGSWSCSCPLLLAVSLEAAARRWLRQSGREWERETESAGWRKXRARRARGAXEGAGVRRRIAVVAVVAMASATLEAALVVAEG

SEQ ID NO: 337825 - protein, 103 aa, Zea mays
  Clone ID: MRT4577_71265C.1.pep
GAIIYSTGQKPILKQPQRLHSVEEPDGIHGTHASSLLDGRGSYAYCWSDLCGSTTSYGTAWFPLPKTTEHRNPCGPPGAPFIDGHVPEDHPTPDIESLLNSLE

SEQ ID NO: 337826 - protein, 69 aa, Zea mays
  Clone ID: MRT4577_71266C.1.pep
FFFISSTFRFRAQKKKKKKKKKKKKKKKKKKKKQTKKKKKKKKRTFFFYHCLRANSEKMNKTGGRSNMH

SEQ ID NO: 337827 - protein, 50 aa, Zea mays
  Clone ID: MRT4577_71267C.1.pep
ELNGLIDFICIDRLSVMIRIQDSIISDSSQYETNPIDKVVTSPDDLCPPD

SEQ ID NO: 337828 - protein, 96 aa, Zea mays
  unsure (1)..(96): unsure at all Xaa locations
  Clone ID: MRT4577_71268C.1.pep
GAILELCLGHFPLLPKGQRPEWAALMCAICFGEAPEPPTVASDEFRDFVARCLKKKAWRRASVTXLLEHPFLAEPDAAGAQQALAALVAKAEQRGQ

SEQ ID NO: 337829 - protein, 45 aa, Zea mays
  Clone ID: MRT4577_71269C.1.pep
KIKINTLTIILRTCTSYSFDIIWPASQNIYTNNASSALEQSNGPG

SEQ ID NO: 337830 - protein, 131 aa, Zea mays
  Clone ID: MRT4577_7126C.1.pep
CLELWTELLTPGTGKTTLTTDHNRLLIGDDERCWTDDGVSNIWGGCSAKCMDLAREKEPDIWLALKVGAVLDNVVFGEHTRDVDYACTSGTGSTRAAYPVECIRLAGIPCGGPHPRGALLLACDSFAVLPP

SEQ ID NO: 337831 - protein, 53 aa, Zea mays
  Clone ID: MRT4577_71270C.1.pep
ITVLFVISRKLRPLFFHALSWPCKCSFFFGLNYFLSPLPNVLAPYALTNYSPF

SEQ ID NO: 337832 - protein, 103 aa, Zea mays
  unsure (1)..(103): unsure at all Xaa locations
  Clone ID: MRT4577_71271C.1.pep
GFSVLGCRPPLPGLGPRGGAXAVCFSRFGFSRSRWAGGVLSCRSPPCXSPGPCCGAFPARPRPLCKKVLGGFVSPSLVVGGLPVVWRVGVPFPVLGVVCLGGP

SEQ ID NO: 337833 - protein, 140 aa, Zea mays
  unsure (1)..(140): unsure at all Xaa locations
  Clone ID: MRT4577_71272C.1.pep
KKGQLRFXFPPGEFFPHVIQRVGPVLLQLKPPGAPVGVFFSPAVFRALFAFFPGRPFKKVPQIKMPLPPLIEIPMGVPGVEXKKGPTPGLNEYLKTAGWVFFSARAPYPEALFLFFFFPPGVQGYFFGKKTFFPLLKKNL

SEQ ID NO: 337834 - protein, 115 aa, Zea mays
  Clone ID: MRT4577_71273C.1.pep
SFYPQQPPSFFFFFIFFFFFLRGFFSLKPEISRGLSFCGFVLHMLCFKPIFIKNCMKPQTLQPHSSMGPVFPEASSDSNSPFRWSLHISFAKKVKNLVAQLIHLPEPPQIILDTF

SEQ ID NO: 337835 - protein, 151 aa, Zea mays
  unsure (1)..(151): unsure at all Xaa locations
  Clone ID: MRT4577_71274C.1.pep
WQNNIFCLIMLLGLYRKGSLQASIFPQSSHAPINSLLPTXLSPAMSXKCENPILXLPYRIQQXAFAVGIIPLXPSLLQQSXGLLQQLPSEHLXAQNIRAQQLQQLVLANLAAYSNEQQLPLLHXLAQNIKAHQLQQLXVLANLAAYSQQQQ

SEQ ID NO: 337836 - protein, 105 aa, Zea mays
  Clone ID: MRT4577_71275C.1.pep
EQLFFLGGGTSLKQTPNPKNPNRARGETTFPFLRTGGAKTHKKALQKPRPKNFLPPHNAGPRPYLTTKVKSPSSCLNRGTTPNVVTGAIKGTTCPPPPPPPLGGR

SEQ ID NO: 337837 - protein, 127 aa, Zea mays
  Clone ID: MRT4577_71276C.1.pep
MGATLLQAVASLLTRLQRAARRMAAGTAGGGGGKGSPRAQAAVAQWKKTFSSLAPASGTTTNKEAAEPGVWTKEILMGERCQPLDFSGVIYYDAEGRRLAQPPPPRSPMRSPLPASHGLAAAHARAY

SEQ ID NO: 337838 - protein, 90 aa, Zea mays
  unsure (1)..(90): unsure at all Xaa locations
  Clone ID: MRT4577_71277C.1.pep
AHPPRREAESVAPWCPPRCSRRVPXQVDELFLEDFQAPPHELFQEFDYQPIAAASLAQVHRARLHDGTVVAVKVQYIDLRDRFDGDIHTL

SEQ ID NO: 337839 - protein, 51 aa, Zea mays
  Clone ID: MRT4577_71278C.1.pep
VCSTICQLSPTPCSQTAAVAFNRGDFLSSSTIKICPPFAVLVKDCSVPSSR

SEQ ID NO: 337840 - protein, 103 aa, Zea mays
  unsure (1)..(103): unsure at all Xaa locations
  Clone ID: MRT4577_71279C.1.pep
AVSCMHGMATPVAPLLHDEPQAAGILLPGTTQHSDQTNSDSRVGELILPNGXYLSWRVIGQHATWPRLXISGPMXCVYERVIGGXXPLSNGRGQNACGQQGAT

SEQ ID NO: 337841 - protein, 83 aa, Zea mays
  Clone ID: MRT4577_7127C.1.pep
KEAMLRTFVGMKATSTSKTSRSTGCHNINNLRRRLGRQHQRQYHQLDGEGGEHKEHPDAEVGGPHDPFAVEIPLKLSAGAYAA

SEQ ID NO: 337842 - protein, 297 aa, Zea mays
  Clone ID: MRT4577_71280C.1.pep
SLCWTVSTKKKKKKKKKKKKTLMVYGSLGLFNKYNEVPSIMAIKIACCFLSVILIWEIPGVFESLWAPFTFLLGYKDPSPSKAHLPLLHEWHFRSGLDRYIWIIGMIYAYFHPNVERWMEKLEESETKVRLSIKGTIVTLSLTVGFLWYEYIYKLDKVTYNKYHPYTSWIPITVYICLRNCTQQLRSASLALFAWLGKITLETYISQIHIWLRSSMPNGQPKWLLCFIPDYPMLNFMLTTAIYLLLSYRVFEITNVLKSAFIPSRDNSRLYQNLIAGIAISVCLYLCSLILLKIPGV

SEQ ID NO: 337843 - protein, 145 aa, Zea mays
  Clone ID: MRT4577_71281C.1.pep
GVLEAGRGPKYHPYTSWIPITVYICLRNCSQQLRSASLVLFAWLGKITLETYISQIHIWLRSSMPNGQPKWLLCFIPEYPMLNFMLTTAIYLLLSYRVFEITNVLKSAFIPSRDNSRLYQNFVAGIAISVCLYLCSLILLKIPVV

SEQ ID NO: 337844 - protein, 59 aa, Zea mays
  Clone ID: MRT4577_71282C.1.pep
VPPASVKWQFDGVLARSDLMIRAVLIQFAPGHFCVNLGLADAIHMGRMAVWVLIGGSGV

SEQ ID NO: 337845 - protein, 537 aa, Zea mays
  Clone ID: MRT4577_71283C.1.pep
MEVFGPVTPGQVSFLLGLFPVLIAWIYSEVLEYRRSLSHGKIHSDANGTIKEDDKSVLLEGGQLKSPSTKFRNLSTKANLLRFITMDESFLLENRAVLRAMAEFGVVLVYFYICDRTNIFPESKKSYNRDLFLFLYILLIIASALTSLKKHHEKSAFSGKSILYLNRHQTEEWKGWMQVLFLMYHYFAASEIYNAIRVFIACYVWMTGFGNFSYYYIKKDFSIARFAQMMWRLNFFVVFCCVVLDNDIMLYYICPMHTLFTVMVYGSLGLFNKYNEIPSVMAIKIACCFLSVILIWEIPGVFELLWAPFTFLLGYKDPSPSKAHLPLLHEWHFRSGLDRYIWIIGMIYAYSTRPVERWMEKLEESETKVRLSIKGTIVTLSLMTGFLWYEYIYKLDKVTYNKYHPYTSWIPITVYICLRNCSQQLRSASLVLFAWLGKITLETYISQIHIWLRSSMPNGQPKWLLCFIPEYPMLNFMLTTAIYLLLSYRVFEITNVLKSAFIPSRDNSRLYQNFVAGIAISVCLYLCSLILLKIPVV

SEQ ID NO: 337846 - protein, 59 aa, Zea mays
  Clone ID: MRT4577_71284C.1.pep
FQFKELAQAYEVLSDPEKREIYDQYGEDALKEGMGGGGSHVDPFDIFSSFFGPSFGGGG

SEQ ID NO: 337847 - protein, 115 aa, Zea mays
  Clone ID: MRT4577_71285C.1.pep
SYTAYRNQTPKPNELFTEKSKNPPLPKPPFPPLLQFFLCTWPINFFSLKLAITPSQFFLFSSLFMPPSLFIFFFRLLFFLQFLPHNIFPQKTPFSIITPNLAPNPNPLKTNPQFF

SEQ ID NO: 337848 - protein, 38 aa, Zea mays
  Clone ID: MRT4577_71286C.1.pep
ILFNRLRRYLIALTGRYLITVDWMKQKPHGLGNFICEQ

SEQ ID NO: 337849 - protein, 209 aa, Zea mays
  Clone ID: MRT4577_71287C.1.pep
MVRMKQVKISVKKDVDSYTIRGTNKVVHVGDCVLMRASDSDKQPYVARVEKMEADGRGSVRVQVRWYYRPEESKGGRRQFHGAKELFLSDHFDLQSAHTIEGKCVVHSFKNYTKLDNVGPEDYFSRFEYKAATGSFTPDRVAVYCKCEMPYNPDDLMVQCEACKDWFHPSCMAMTIEQAKKLDHFVCSDCLKENGSKRLSNVYATSSNS

SEQ ID NO: 337850 - protein, 72 aa, Zea mays
  Clone ID: MRT4577_71288C.1.pep
ITYFEISDVLFCPKSYRIIEVLMNKKNISSPKSAPLRPPAPPPRDCGGSGGGSYATGYITFKVIYHNGIKSY

SEQ ID NO: 337851 - protein, 120 aa, Zea mays
  unsure (1)..(120): unsure at all Xaa locations
  Clone ID: MRT4577_71289C.1.pep
ATVHGGAVVGTSIAGAGSKILGTHLADHAPQNGRIVRGLGRGLSGEATPASKKVAKTSTSCDRCVXFHGAEWHHYLSRSLHVNYGTRTLGLGKPVANLKFELDSLDQILPKNGAGGIFST

SEQ ID NO: 337852 - protein, 67 aa, Zea mays
  Clone ID: MRT4577_7128C.1.pep
PGKISIPQKNLILANWVGPKFHPPNVWAFFNRTSCVLTCPQKKTCFSRPKLCWPGKVPICFWLMPSP

SEQ ID NO: 337853 - protein, 273 aa, Zea mays
  unsure (1)..(273): unsure at all Xaa locations
  Clone ID: MRT4577_71290C.1.pep
HWVPRGRPGNPSAHFFSISPAATVKKNTAARELRRMASGRSSLPFFYSHFFISITCSLFLLFLYIAVSCSLCIIFTSKVRSQVPVLYSCHRDAQEREWFLVSISSLLSCVWPNVCFFFLFFFRPAHLHTTARKHRWLASGGPRRPAQSRTAAHLFAVFLFLVEAQGSLSTQQTARTQRLGPLGVRLGRHCARRTGPRRLSPPAVATPRVGARPSVDRFVGWSVEPVTLGRSFLLNQSVHLCTDLACSCFLFVDSWXRESLDPEPWAPFSVTMD

SEQ ID NO: 337854 - protein, 81 aa, Zea mays
  Clone ID: MRT4577_71291C.1.pep
GKRQRRGENVVSPLKVFLEDFFNGPSKKLFFLRNFIFSQCKGKGFKFGASIRCPGFPGSGIKVPFCSLGPSLIHQIQHPFH

SEQ ID NO: 337855 - protein, 82 aa, Zea mays
  Clone ID: MRT4577_71292C.1.pep
PISVKLSLLTMAIQSAHSARDHTMVLYCTEYDSMDAHVTKLTDLAEDKLTMRMTVHKDQPTTTSRNMLYDRHRMLNIVQLFG

SEQ ID NO: 337856 - protein, 188 aa, Zea mays
  Clone ID: MRT4577_71293C.1.pep
GGHSDNRMLRTVAGRLARRPWRFVFPGLLFFFFFYSLSHRTGSRTQGPVHKAKTKSFFPPLETKAANSIELDYCKNFPTKLLEEVQVVLKGASDGAHETKAHLNTVSSCITNLIIVGDRDERLGDRQVIDILAELPKSYQKDNLDFEAYGAQKKHTKGARQSRDNSGRSSSTVSSTWPWLIRDTSPTQ

SEQ ID NO: 337857 - protein, 54 aa, Zea mays
  Clone ID: MRT4577_71294C.1.pep
KVHCWTQRCYWRMRQWLSVWFQAVFTHVCVSTDVDYLRQNITRVMSKPVFGGHF

SEQ ID NO: 337858 - protein, 69 aa, Zea mays
  Clone ID: MRT4577_71295C.1.pep
LQIDFYQKRDHGNVCTTVHTGTNLQVSTLQQVCVWQLSQNIYAVTVTNELSAHRKLRNPKQLTAHLYNI

SEQ ID NO: 337859 - protein, 84 aa, Zea mays
  Clone ID: MRT4577_71296C.1.pep
NGSTCPRKVWLAPPLETAPAAPSLTRESAHSALRACRPPPHVPDADVEFGIGVACAQTRSVASRSCQLPPWRQADGQGCHPQAE

SEQ ID NO: 337860 - protein, 55 aa, Zea mays
  Clone ID: MRT4577_71297C.1.pep
RKRLLCKRILYFLPPERVLGFTPKGFPWGRISPFGGGGLNNRAKGFHGIFIFRTV

SEQ ID NO: 337861 - protein, 68 aa, Zea mays
  Clone ID: MRT4577_71298C.1.pep
MTTVSGWDDESVLLNVMVIEATLVYESHRKRRASTCSNDDDTRSNTKYGDTVDRAPLFHAAKVTCRCT

SEQ ID NO: 337862 - protein, 51 aa, Zea mays
  unsure (1)..(51): unsure at all Xaa locations
  Clone ID: MRT4577_71299C.1.pep
PPYIELTMVQIAGLIACRSXFRPSNPFARARISGSLHMTIQTAVLTETLTA

SEQ ID NO: 337863 - protein, 243 aa, Zea mays
  Clone ID: MRT4577_7129C.1.pep
SPWYASPRSTLPAATPPPGEADPLVVAASEIALGLPFHPAPLPAAAPAPLLRLLPAFTPTHFLSLLRRNPLALQPLPLLSLFRVLLASPPGLFRHTPASFLSMSHLLIAHRLSHLALPLLRLLVSRLGRDSPPRLLPLLVSAASTDDPAPLVSAVAKVYADEGLLPDGCSLLLLALRRGIRVPMPAWTDLMNRLPSVPEAYAFYLHLLDDGVPPEARQVNMLMRDMIRSGKLASARNVFDEML

SEQ ID NO: 337864 - protein, 66 aa, Zea mays
  Clone ID: MRT4577_712C.1.pep
CLNVDPIGCPRLVSSNSTYSEFVYNSLGRSPTTDVTGKPCRNKWIVQKAFRSHTWGNKNLVFRGGY

SEQ ID NO: 337865 - protein, 86 aa, Zea mays
  Clone ID: MRT4577_71300C.1.pep
ISRAAPFLVFFGSSNLPNKFAPWHKIVTATRRREPVLSADVDMHILLSTPQKGRRYHILVSQTTCSCSTTFHYVVLQTSLVSPMAS

SEQ ID NO: 337866 - protein, 143 aa, Zea mays
  Clone ID: MRT4577_71301C.1.pep
VRSTITGSTHASTPGDMHSTSCEATSSMLAMSPEQAALFHITESFRYAALLYTERLAQPTLPASALNFQNLVSQGLYHISQIGMTSCVNKFLLWPLFIIGTECVDPEHRAVVRQRCVEIQRESGFFNNLSGLEVLERVWREDD

SEQ ID NO: 337867 - protein, 146 aa, Zea mays
  Clone ID: MRT4577_71302C.1.pep
WSSVVSTRSCQSCGSSPGLARLVLSLSSVPISAPLSVWFFCFGPVFAPRPFVCVFFQCLDPPCVVPCCGLSGCVVSFAFFSCPPSVSSALAVLLSSCPLVVCAVVLIILFAVLGSSGGFRIYALAASVFCCVLPDAWAGRDFRPVR

SEQ ID NO: 337868 - protein, 65 aa, Zea mays
  Clone ID: MRT4577_71303C.1.pep
VLVMHVCHKPATTFQNDFGQKNTKVPPPLNISGARKVHPVNNILPLPLTTNKSASVPSFQRALLF

SEQ ID NO: 337869 - protein, 86 aa, Zea mays
  Clone ID: MRT4577_71304C.1.pep
SRAEFGTRLDDHKGLHYFKGWLIRGSVDFIFGFGRSFYEDCRIESVVKEVAVLTAQQRSKSIEGAIDTGFSFKNCSIGGVKGGQIY

SEQ ID NO: 337870 - protein, 23 aa, Zea mays
  unsure (1)..(23): unsure at all Xaa locations
  Clone ID: MRT4577_71305C.1.pep
LFYQFNIPSKRSFFNYLTXLTNL

SEQ ID NO: 337871 - protein, 115 aa, Zea mays
  unsure (1)..(115): unsure at all Xaa locations
  Clone ID: MRT4577_71306C.1.pep
HVPPTSPFTKATLLPPTFHSPCPKNNLLPXPPFALVHKLHXPTHWVPVYHXHDWXLRFRWSSPFPVSPISFPTLEWTVPEXATSRLYRLRHFGASKPLPAPINYFTRTSSAFVVR

SEQ ID NO: 337872 - protein, 81 aa, Zea mays
  Clone ID: MRT4577_71307C.1.pep
TVNKIWHAATKPHCTPGLEPTRYPRAGQSRPTPPPHHTPPLNETPRGSPRRELPRQTKREAGTSTNRIPTEQLTLSHIRGS

SEQ ID NO: 337873 - protein, 66 aa, Zea mays
  Clone ID: MRT4577_71308C.1.pep
NPSDNMQSTLFHNFDLSRDSILPDGEELLNLFLPFRFKKKLELGQTVEDCTVLLKAEVEGEQFFFF

SEQ ID NO: 337874 - protein, 72 aa, Zea mays
  unsure (1)..(72): unsure at all Xaa locations
  Clone ID: MRT4577_71309C.1.pep
TMPGQGEXXXSCFGGPXRSWTCXSVVRPXYXXXRXKXAXXXLVPSEVSLRLAGALANAYARXPXVXSGXAND

SEQ ID NO: 337875 - protein, 99 aa, Zea mays
  Clone ID: MRT4577_7130C.1.pep
AVAEMYLLGMTDKIVTSGWSTFGYVGHGLGGLTPWIMFRPENHTTPYPPCRRAKSMEPCMHGPPFYDCRAKHGADTGKLVPHVQHCEDMSWGLKLVHPE

SEQ ID NO: 337876 - protein, 34 aa, Zea mays
  Clone ID: MRT4577_71310C.1.pep
CESPSPCRPTWCVIGTVSCRPDGRGVVPGNSETG

SEQ ID NO: 337877 - protein, 60 aa, Zea mays
  Clone ID: MRT4577_71311C.1.pep
MDSVMAVLESAPQTDVLVSVSTSHSCSLLTGNALCSRCTGEDWQLGHGDAEDRLVPLVIN

SEQ ID NO: 337878 - protein, 58 aa, Zea mays
  Clone ID: MRT4577_71312C.1.pep
GSGIIARQGVHRALSLKPLSIRGPRLTSVTVYGREMCELSGPTGRRTSSLSQALDTIW

SEQ ID NO: 337879 - protein, 246 aa, Zea mays
  Clone ID: MRT4577_71313C.1.pep
MAAASFTAAKFLAPAAARSGGDRAPFPAPSAFSMRSLRHRPARRLSSVLAVSSDVLKAAPAAAAYPAVTREEALELYEDMILGRNFEDMCAQMYYRGKMFGFVHLYNGQEAVSTGFIKQLNQPDCVVSTYRDHVHALSKGVPARAVMAELFGKATGCCRGQGGSMHMFSEPHNLLGGFAFIGEGIPVATGAAFAAKYRHEVLKQSSPDGLDVTLAFFGDGTCNNRQFFECLNMAQLWKLPIIFVGE

SEQ ID NO: 337880 - protein, 74 aa, Zea mays
  Clone ID: MRT4577_71314C.1.pep
YVMSTRNEWGASSVEVVGAHLVFVVGLGILFLYVSACPTFGLCYPFLQSVASPKSFWFAILLLVFGRILVSPLL

SEQ ID NO: 337881 - protein, 52 aa, Zea mays
  Clone ID: MRT4577_71315C.1.pep
MWCASCLASACAGCACNLCSSAAASVTRRSARLAYCGLFAASLILSFLLRQF

SEQ ID NO: 337882 - protein, 77 aa, Zea mays
  unsure (1)..(77): unsure at all Xaa locations
  Clone ID: MRT4577_71316C.1.pep
VKVKIDGSNKGSGHSXALRNYNLGRTLCIRTFXKVNIAQHKLTGHRVAIKIINCRQMRNIEMEEKAKRELKIFKLFI

SEQ ID NO: 337883 - protein, 130 aa, Zea mays
  unsure (1)..(130): unsure at all Xaa locations
  Clone ID: MRT4577_71317C.1.pep
AWPPVQPQAAAPPPPARLRPSTRRPPPQCPTTPRRRSSSRKMPRKVVSGPDYDDDYDDYDEYDDDDDDDDEYDETRYGNNTPVMTGKETLKNSSSTVSVHWTCSMCTFSNHESMVYCEMCGXFRETFVKS

SEQ ID NO: 337884 - protein, 90 aa, Zea mays
  unsure (1)..(90): unsure at all Xaa locations
  Clone ID: MRT4577_71318C.1.pep
DTYYARVELARAHQERASDGTSTAPLHLRMCTSPQGCGGARHRWPACHLQSPRGSTCWGGHRXAVQIEYAVNVLHDIAVITILRPTKGYT

SEQ ID NO: 337885 - protein, 99 aa, Zea mays
  Clone ID: MRT4577_71319C.1.pep
GEQKESCVKNKLNREKVQYQQCTGSQSYIAKAIILKQEKYKDAEPNAIDLFKEKCFSENVQKDIVHMEEMVAAPFQDGQQPTSPTEVCSNVLPGFNVFL

SEQ ID NO: 337886 - protein, 212 aa, Zea mays
  Clone ID: MRT4577_7131C.1.pep
MPIEMPRGLPFAVDTWTPASALKRHRFLTHAHRDHLAGITATSAVSASSSPVYASRLTILIALRIFPQLDRAAFVELDVGQPPLRVPDPDGDFTVTAVDANHCPGAVMFLFEGPFGDVLHTGDCRLTPDCLSALTSHLARRIDYLFLDCTFARCSLRFPATQDSIRQVIDCVWKHPSAPVVYLVCDMLGQEDVLVEVSKAFGSKIYVDREKN

SEQ ID NO: 337887 - protein, 85 aa, Zea mays
  Clone ID: MRT4577_71320C.1.pep
TSPERSVSTHQISIAYKEPSAAYIDPAFDAIHDSFPRECNICLLCNISRKCLTCCTNTNFRWGISIASCEMKFWPHFADLLEVLT

SEQ ID NO: 337888 - protein, 95 aa, Zea mays
  Clone ID: MRT4577_71321C.1.pep
ELCSCCAGRSLECPWPRSRLDAWAWTSPPLPSTVPGAEPGLFGSYCQDDEGQAWFLGSPLLCAGGGGCPGHTQMASGIAGAENEDRMYRLRSSLG

SEQ ID NO: 337889 - protein, 169 aa, Zea mays
  Clone ID: MRT4577_71322C.1.pep
MGERKVLNKYYPPDFDPAKIPRRKQPKNKQITVRMMLPMSIRCGTCGTYIYKGTKFNSRKEDCIGETYLGIQLFRFYFKCTRCSAEMTFKTDPQNSDYTVESGASRNFEPWRKEDEVVDKEKRKREAEEMGDAMKALENRAMDSKQDMDILAALEEMRSMKSRHAGVSV

SEQ ID NO: 337890 - protein, 92 aa, Zea mays
  Clone ID: MRT4577_71323C.1.pep
MASSVAAAASTFLGTRLADPVPQNGRIVARFGFGGGRPKAAVPKKVAKTSISSDRPLWFPGAVAPDYLDGSLVGDYGFDAFVILKAVLFLVT

SEQ ID NO: 337891 - protein, 68 aa, Zea mays
  Clone ID: MRT4577_71324C.1.pep
IPDFLYLLGENSPSRFIFLETSGTTQRWGKKGTPLAYTRMDFWAPLDQIWAAKNKIPGGKRSQILGGF

SEQ ID NO: 337892 - protein, 115 aa, Zea mays
  unsure (1)..(115): unsure at all Xaa locations
  Clone ID: MRT4577_71325C.1.pep
MGLDYYSVLKVNRSATEDDLKKSYRRLAMKWHPDKNPGDNKAEAEAKFKKISEAYEVLSDPQKRTIYDQYGEEGLKASAEAGSSSSSMNGSTNHRFNPRNAEDVFAEFFGSSKPX

SEQ ID NO: 337893 - protein, 198 aa, Zea mays
  unsure (1)..(198): unsure at all Xaa locations
  Clone ID: MRT4577_71326C.1.pep
PSPRTHTPPPPPPRPPPPPPPPPPPRPPTXPPPHPTPPXPPPPPPNPXAPTPPPPPPXQTPPTPPTGPTTQGAQDDPPPPQGGAPGQAPPXASPRPRAGPVEXXSTDXRTPARRTERMEPQVVXPTPPXPPTKPPPTXPGPGGSAPWAPARRRRPPPPQTPCSDTHAVIGVGEKGMRSGGVERRQPAVARPRVHKSVG

SEQ ID NO: 337894 - protein, 64 aa, Zea mays
  unsure (1)..(64): unsure at all Xaa locations
  Clone ID: MRT4577_71327C.1.pep
TVLSPVRVGADALSWAAKKIEPNKVGLPTSPSTTAVKTXVXQAAAKHESQPSDADESSVQTAEA

SEQ ID NO: 337895 - protein, 120 aa, Zea mays
  Clone ID: MRT4577_71328C.1.pep
GRPGSLWLLISLVGHHLVFSSRPSTKPTSSSRWSSLPISFSPLSPLVSDVLPTYLCWLAPTTLYSMVGSMLYLRMLAMVSASSALQTLPMASTSPRAGASPSGGFVRRSSAIGEISHRWA

SEQ ID NO: 337896 - protein, 127 aa, Zea mays
  Clone ID: MRT4577_71329C.1.pep
MSPPAMLLPVCSAAPSCSPLCPVTASHVVARVARRVDVGAALRSYADPLVAQVPDRPPLADSSILSPYIAAPDDIARAFGAPASELPPLPSADPSPGLCCTGTDQPLAAVADLAATAVVNSAPTDAA

SEQ ID NO: 337897 - protein, 137 aa, Zea mays
  Clone ID: MRT4577_7132C.1.pep
TRPRAPKGGPPPTGFVWKPRGFPLARLAVFPPAPLLVWRLIPAAAAVSFAFAVSAAANSLPLVSPANPVVALFDLPFFFYTRANLHGPITFFHGFFFFFKQKKSPILFLGILSFRFQKKKKKKKKKKKKKKKLFKNP

SEQ ID NO: 337898 - protein, 31 aa, Zea mays
  Clone ID: MRT4577_71330C.1.pep
PAYSFLKSHHFKNLLLPSESIYIITVIHTQL

SEQ ID NO: 337899 - protein, 612 aa, Zea mays
  Clone ID: MRT4577_71331C.1.pep
MSPPAMLLPVCSAAPSCSPLCPVTASHVVARVARRVDVGAALRSYADSLVAQVPDRPPLADSSILSPYIAAPDDIARAFGAPASELPPLPSADPSPGLCCTGTDQPLAAVADLAATAVVNSAPTDAAERALSDAPFPSTFPSDASEVEDSVARLIDKVGKQVFQAEDALTEAYDKLRLSAYDALGAWRKTVRDAIGGLKASVDAGKQQAAGGVTDASGALHEKVAGAGTVAVDVLRKAIVAAEDSLGSAATFVVYSYGSAKESLPPNVRDLLSSSEEKASLVLRPIGNALQQVYVVVEGVEKNVGLDPSDPIVQLAVVLGGSVTIGTTYWLFTYSGYSGDLSPESAFDLLKNDDKAVLIDVRPEDLREKDGVPDLRLGARSKYASVASPEIKDPVKSMLKDEREFDDALLAVVIRNLKLVKGDSKVIVMDSNGARSKAIARLLKKLGVQRPYLVKGGFQAWSKNLRVKELKPETALTSINEDVEEILEQIKPTPTLVFGSLLGLSALSYALLEWEMTLQYIAVLSVGLTIYLRFSTYEDSEDLEKDLKLLLSPVRVGADALSWAAKKIEPNKVGLPTSPSTTAVKDRVLQAAAKHESQPSDADESSVQTAEA

SEQ ID NO: 337900 - protein, 71 aa, Zea mays
  Clone ID: MRT4577_71332C.1.pep
MDMEDSSCSSSSPAPAADLVDYLGPDTSVTVFTMLHHPADLARASAVSRSFLQLAIDNQFSKLQCLRACPE

SEQ ID NO: 337901 - protein, 54 aa, Zea mays
  Clone ID: MRT4577_71333C.1.pep
LLKSQEEHVIEEVKSINDFILVTLTYVYCIIISYVIENISHGREILFAKNENIL

SEQ ID NO: 337902 - protein, 74 aa, Zea mays
  Clone ID: MRT4577_71334C.1.pep
VSGHIGGTLKMGARGAYLKLSLTHLRSSVFRGSCQFTYNTLTGLHHLHTTRLEGALSKICQTCRNGRSKMGGAD

SEQ ID NO: 337903 - protein, 145 aa, Zea mays
  unsure (1)..(145): unsure at all Xaa locations
  Clone ID: MRT4577_71335C.1.pep
PPKGKVGPPAGPGPKSPGPPTGPXKESDPPKPSQGKKKKGEEKKASAPCRRGLPTGWTPGWPTPGPPWGCSPRTGAAPSFGFAPPPPSRGKSPASFTPFTPSPRTPSXSPLPTTIHVSAPPPVKKPKAPLCCMKLLKTSGVPVLP

SEQ ID NO: 337904 - protein, 103 aa, Zea mays
  Clone ID: MRT4577_71336C.1.pep
MAVRSPGAPANLLDLAAALHHMSSANRPDSDPNRSVPEEIYLHNFDRSMRESHSTNEAARTFHILDLENNKSLTDKSFMFADDNHVFPVYTSKDLMHAVQSPG

SEQ ID NO: 337905 - protein, 85 aa, Zea mays
  Clone ID: MRT4577_71337C.1.pep
GWFHRYLFAKKICPFNQLIVFPPGGPVQLPPSFQSPLGPPCLAPPPLGFGPVKFFTYPGLCVKIQIQGLAPTPKFKFKKKPPLFF

SEQ ID NO: 337906 - protein, 118 aa, Zea mays
  Clone ID: MRT4577_71338C.1.pep
QMYCDSYYVMHDILHAFAQSLSREDCFKLEDDNVTEIPCTVRHLSVHVQSMQKHKHIICKLYHLRTIMCIDPLMDGPSDIFDGMLRNQTKLRVLSLSFYSSSKLPESIGELKHLRYLC

SEQ ID NO: 337907 - protein, 53 aa, Zea mays
  unsure (1)..(53): unsure at all Xaa locations
  Clone ID: MRT4577_71339C.1.pep
SSYLGQQNRQSYLGIYGFKFTSAKSCHLVFCSPDQLPLLFWTHXWCQWQPEHM

SEQ ID NO: 337908 - protein, 83 aa, Zea mays
  Clone ID: MRT4577_7133C.1.pep
ATINYLVRMLPRSDCLLFAGKQLIRRALPCLLDDAKMQNPPRCTPSSLRDADHHSCPHCLDYHPSTTQALLTPSYTYPDKIPA

SEQ ID NO: 337909 - protein, 248 aa, Zea mays
  Clone ID: MRT4577_71340C.1.pep
NDSQSRKPTQIQQNPTKSPPPRTQTPNPHLRLRRHPYLQRADELQKHEPLVAYYCRLYAMEKGLVIPQKERTKMTSSILVSLINQLEKDKKSLTLGPDDHLHLEGFASSVFAKADKQDRAGRADINTAKTFYAASIFFEILSQFGELQPDLEQKQKYAIWKAAEIRKALKEGRKPEAGPPGGDKDEAPASTTTIDHDMGRSQSFGSRQNGNEASPHPIDKDFSRRDSFSAVQPGNISSRQAEHDHVSA

SEQ ID NO: 337910 - protein, 102 aa, Zea mays
  Clone ID: MRT4577_71341C.1.pep
GPGPPMFPGGFCYPPQKEKFFFKPPWMLNSRWFLKKNSPKFFKPFWAGNWVPHFLKQNGAPPSFGGPPQCPGKTLAPPQSVFSPFWPPNIFWGTFFRGREPF

SEQ ID NO: 337911 - protein, 414 aa, Zea mays
  unsure (1)..(414): unsure at all Xaa locations
  Clone ID: MRT4577_71342C.1.pep
MGSESEPAKGLLPYLQRADELQKHEPLVAYYCGRRFSLLVGNTAKTFYAASIFFEILNQFGELQPDIEQKQKYAIWKAAEIRKALKEGRKPEAGPPGGDKDEXLSVPXISQDMGQSPSFSSVHQGSEXTSTCQHXFSRRDSFSAVQPGNNVPHQSTEFNDHPSTQLPYSPPPPSQSQHPSPSQSYSSPSYQATTDYPSSDFHKPSPNYSTPGYTSTDFPTNEVHKPPSNYSPPPYTRTDRPSNDGYNPHSNGKPDVSAYPQAYQPSPYTFDPQHNSQNYYSTEAPAVPYNYPNFQSYPSFQDNTSASVLTHQSSFYPESDDPAATSHTPASNSSVPTHYHPTADCSPQVTPPAAPPASQYRYDSSYQPEVEKIAEAHKAARFAVGALAFDDVSVAVDHLKRALDLLTNPSAEPH

SEQ ID NO: 337912 - protein, 173 aa, Zea mays
  unsure (1)..(173): unsure at all Xaa locations
  Clone ID: MRT4577_71343C.1.pep
MGSESEPAKGLLPYLQRADELQKHEPLVAYYCGRRFSLLVGFVPNRSYWLGFXRFGFGRVWAGRLYAMEKGLRIPQKERTKTTNSILISLMNQLEKDKKSLTLGPDDNLHLEGFALNVFVKADKQDRAGRADINTAKTFYAASIFFEILNQFGELQPDVSLLMLLPINVFITN

SEQ ID NO: 337913 - protein, 514 aa, Zea mays
  unsure (1)..(514): unsure at all Xaa locations
  Clone ID: MRT4577_71344C.1.pep
MGSGTEPAKGLLPYLQRADELQKHEPLVAYYCRLYAMEKGLVIPQKERTKMTNSILVSLINQLEKDKKSLTLGPDDHLHLEGFASSVFAKAGKQDRAGRADINTAKTFYAASIFFEILSQFGELQPDLEQKQKYAIWKAAEIRKALKEGRKPEAGPPGGDKDEXLSVPXISQDMGQSPSFSSVHQGSEASXDLSTWLFPSFSLVFAICNILTWLHXSSNKTALLLFFLKYNFVHRXSRRDSFSAVQPGNNVPHQSTEFNDHPSTQLPYSPPPPSQSQHTSPSQSYSSPSYQATTDYPSSDFHKPSPNYSTPGYTSTDFPTNEVHKPPSNYSPPPYTRTDRPSNDGYNPHSNGKPDVSAYPQAYQPSPYTFDPQHNSQNYYSTEAPAVPYNYPNFQSYPSFQDNTSASVLTHQSSFYPESDDPAATSHTPASNSSVPTHYHPTADCSPQVTPPAAPPASQYRYYSSYQPEVEKIAEAHKAARFAVGALAFDDVSVAVDHLKRALDLLTNPSAEPH

SEQ ID NO: 337914 - protein, 44 aa, Zea mays
  Clone ID: MRT4577_71345C.1.pep
LHLRHIELQALFSSTTPCPFGWTTCCVSIASVNYPAASPRSSNF

SEQ ID NO: 337915 - protein, 96 aa, Zea mays
  Clone ID: MRT4577_71346C.1.pep
PQFCSKEFPPPILFNPGWTPKKPRSPGRAPPPALLFSSRKKPISPPPLTVKVPSPKTFFFNPPFVINYVLEKTPDPRFFVFKKKFKFGRGSPFYPH

SEQ ID NO: 337916 - protein, 80 aa, Zea mays
  unsure (1)..(80): unsure at all Xaa locations
  Clone ID: MRT4577_71347C.1.pep
FFYQLLSGILYHGLAXLPAGFRITSFLYVPTSLPTHIPRAIHLQFSPPSLFLPTMPFRFSHIPYTYVNELSRFHLFYFRN

SEQ ID NO: 337917 - protein, 105 aa, Zea mays
  Clone ID: MRT4577_71348C.1.pep
ISLLTHNNYYKTPYKQFKQKHLILIVPFKKNFISCNSKKKITPFKKTYYPTIFFFLHEYIQINTLDYKKKKPFYFQHPQNKLGKNNKFLELPCSPLIPKPNPFFI

SEQ ID NO: 337918 - protein, 74 aa, Zea mays
  unsure (1)..(74): unsure at all Xaa locations
  Clone ID: MRT4577_71349C.1.pep
MHAATNSHGCEPSTKAPMARTKETARKPTGGQAPFSRWRTNAEHKSAPATGGVKKPTRXPPATVGLREIRQCHK

SEQ ID NO: 337919 - protein, 50 aa, Zea mays
  Clone ID: MRT4577_7134C.1.pep
VQQHVPVTISHRVDTWANKLEFYINPYGEINICRYGARPYSRCNILFASD

SEQ ID NO: 337920 - protein, 103 aa, Zea mays
  unsure (1)..(103): unsure at all Xaa locations
  Clone ID: MRT4577_71350C.1.pep
GKNQQEAAAERAGPPPQPPPHAQAQPGQAAKEDTXRSQASRPPGGGGGQRNQPGRRTRSTGTKRXPAXQDGGGKKKLIISXNHRVDGKRPDDLLVGPSSTNNQ

SEQ ID NO: 337921 - protein, 122 aa, Zea mays
  Clone ID: MRT4577_71351C.1.pep
EMRKRLGEHLEASSRLSEPGLEQVGPRTWVPSAGTRRKKKRQRAARLNNCFRLAPIFSSLRFRFRAPERFPVSDACSNGTERSKVSSSTLLASSSLLPRQIQREFFFFFFFFNCLCVFFFFL

SEQ ID NO: 337922 - protein, 45 aa, Zea mays
  Clone ID: MRT4577_71352C.1.pep
LTDLSSYLSVTIIIHLLGTLMHLFYPNSIVVNLYQSYLTVHLNIP

SEQ ID NO: 337923 - protein, 74 aa, Zea mays
  Clone ID: MRT4577_71353C.1.pep
SRTSLVVPLLISSRPWLMYVVPSRGSARISRPRGLVQGSSYGGGRRVEIGGVFFIVGWQRNLLLQGNTRPFSLS

SEQ ID NO: 337924 - protein, 106 aa, Zea mays
  Clone ID: MRT4577_71354C.1.pep
CSALLDALDHCIFDPLVVNTLLKSFRVILQLATEHTLPSFESLGVIIGVLKAACRQAQELRNFSNFLCCNLNTSQDSSQFKNIEGGKKKKKKKKKLALSLFMEYVP

SEQ ID NO: 337925 - protein, 81 aa, Zea mays
  Clone ID: MRT4577_71355C.1.pep
HFVGASDDPELETSLLETPKAWLDGQRCALIRSDQKAEVEEEINRLGRWRCFGKNARDPMSSNVECGIFCCLVEKLVKDLC

SEQ ID NO: 337926 - protein, 101 aa, Zea mays
  Clone ID: MRT4577_71356C.1.pep
RSRRRRSQRRMAMELRARRTEATKGPCFWRRNSGWWKRGNRVWSIVQLEVGLYGQFWAPEKIGCRARVTITLWSLLGECPCVATVTYNITITYVQMYIILK

SEQ ID NO: 337927 - protein, 59 aa, Zea mays
  Clone ID: MRT4577_71357C.1.pep
AERRHPHPRATRPTTQPTREDQGSRGQPATRAWPVPPVRLKKRDSTKRKHRWEEGRRPG

SEQ ID NO: 337928 - protein, 99 aa, Zea mays
  unsure (1)..(99): unsure at all Xaa locations
  Clone ID: MRT4577_71358C.1.pep
SSFQPKVPXDPHGLHRRRRGPLLTQSRPLTQHIFSTSITPSKKTNIPTSLTTTYYICSLLSQNAYTTQVFLHFKQAPPSSSPYSYLTKTKMLCSWSTFS

SEQ ID NO: 337929 - protein, 40 aa, Zea mays
  Clone ID: MRT4577_71359C.1.pep
IIHHVLTTACSSSTAMCIWRQAPSHIVMCIMLAYTFFGSY

SEQ ID NO: 337930 - protein, 126 aa, Zea mays
  Clone ID: MRT4577_7135C.1.pep
MTEEKMTKEKKLTEEKKLYEEKKVVDPYIDGFYESMAKTNTEKIIKEIMEGLSEDSDDSDSYDVESGDEDSEDRPWRPSHTIFGKSTIKQSHIDAMRGRYFRDMSIVRVGGDNTAPAPEENEVVIY

SEQ ID NO: 337931 - protein, 83 aa, Zea mays
  Clone ID: MRT4577_71360C.1.pep
KKAARFSDLVTKGGRPQFNGVNQGAQKRCKTGGKAPSQVKKRGTQMRGTRASKGLKIWALDSDLPPTGHYRAGAQTRKQPSDD

SEQ ID NO: 337932 - protein, 152 aa, Zea mays
  Clone ID: MRT4577_71361C.1.pep
MFYGAMVWDPWLIVSQIVCLQCLYYLSLGVAMALLVGTRVPRLTLLYFFDFSTLTPRTPTGWCAIASFLLAAVTGAGFMLYVIERAKKCLDFAATLYIIHLFICIVYGGWPASVTWWVLNITGLATMALLGEYLCIRRELKEIPISRLRASV

SEQ ID NO: 337933 - protein, 81 aa, Zea mays
  unsure (1)..(81): unsure at all Xaa locations
  Clone ID: MRT4577_71362C.1.pep
PARARNNRFSSPXHAAKNRIQHPSIDLNFFNAPLEVTEENFLEICDELGVKRPSSVKVFSGKSERXSSGLLXWESXSDALE

SEQ ID NO: 337934 - protein, 117 aa, Zea mays
  Clone ID: MRT4577_71363C.1.pep
ILQRLFPCKAIQTVPVLLSHETNAKGKTSARWIKEKVISSGKAKHIRRLAFDSYPLSKAYSGETTKPWAGYDVRLIPIPQNGTVVVFRLAVPRKERVLNGCYKPLWNSVLPSFNILY

SEQ ID NO: 337935 - protein, 84 aa, Zea mays
  Clone ID: MRT4577_71364C.1.pep
EITGADMSILVNWTSGGLIRPILQPQDLLSVIRGVVQSHILQNSGGGHVHLCIEIICVFTRGILRPLDVRSEFLGEFQFHIFKK

SEQ ID NO: 337936 - protein, 282 aa, Zea mays
  Clone ID: MRT4577_71365C.1.pep
PAGKKKKKKKTEEGFLSLVIKEWSFKPQIASVGSCCLVGVICAGTLYVANLGDSRAVLGRLVKATGEVLATQLSAEHNACYEEVRQELQSSHPDDPRIVVLKHNVWRVKGLIQISRSIGDVYLKKPEYNREPLHSKFRLRETVQKPILSSEPQITEHRIQPNDQFVIFASDGLWEHLSNQEAVDLVQSSPRNGIARRLVKAAMQEAAKKREMRYSDLKKIDRGVRRHFHDDITVVVVFLDSDAMSKASWSKSPSVSLRGGGVTLPAKSLAPFSAPAQLNGTH

SEQ ID NO: 337937 - protein, 51 aa, Zea mays
  Clone ID: MRT4577_71366C.1.pep
IVDDVVDLIFADVPRHTTGLLLVTNHLRGASARAIDGTRLLSAVSRLPLLN

SEQ ID NO: 337938 - protein, 62 aa, Zea mays
  Clone ID: MRT4577_71367C.1.pep
LLIIYLEASKFFNSGRSIYKPRTNEVGLGNSGQPIAERSTLACYSFTMYQPLCMCVCVCCSR

SEQ ID NO: 337939 - protein, 154 aa, Zea mays
  unsure (1)..(154): unsure at all Xaa locations
  Clone ID: MRT4577_71368C.1.pep
MARCLALVALLVLGLAATASAADAPFVVAHKKISLSRPKPGVERVAVSLDLYNQGSATAYDVSINDDSWPTEVFELVTGEKSKKXKTALQEAYSTPIFPLDILAERPPEKKFEWAKRLVMKYGSLVSVVSFVGLFIYLVASPSKSSSKASKKRR

SEQ ID NO: 337940 - protein, 168 aa, Zea mays
  Clone ID: MRT4577_71369C.1.pep
MGCLFFPDEESEGARRDPFPTSAAPRLVARTLATKPEAREQPWRGASRSSPSSYSASPPPPPRPTRPSSSRTRRFRSPAPSRASSASPSPSTSTYRVPTKTALQEAYSTPIFPLDILAERPPEKKFEWAKRLVMKYGSLVSVVSFVGLFIYLVASPSKSSSKASKKRR

SEQ ID NO: 337941 - protein, 66 aa, Zea mays
  Clone ID: MRT4577_7136C.1.pep
IRFEGPLELLPTSELADSGENNHTQSCTGTNGDYCQDANRIRRRMAILIACRKWLNDIIDRQHRSG

SEQ ID NO: 337942 - protein, 69 aa, Zea mays
  Clone ID: MRT4577_71370C.1.pep
MGCVSSALLEEDGAEDDRRRIISHHHIVSLTSSTYGMRFLPCFDCSGSRKLAVALPVVASSRGRVGESV

SEQ ID NO: 337943 - protein, 198 aa, Zea mays
  Clone ID: MRT4577_71371C.1.pep
QVGGERAAMARCLALVSLLVLGLASAASAADAPFVVAHKKVSLSRPKPGVERVAVSLDLYNQGSATAYDVSLNDDSWPTQAFELVTGEKSKTLERLDPGATASHTYVLETKTQGRFQGSPAIITYRVPTKTALQEAYSTPIFPLDILAERPPEKKFEWAKRLVMKYGSLVSVVSFVGLFIYLVASPSKSSSKASKKRR

SEQ ID NO: 337944 - protein, 222 aa, Zea mays
  Clone ID: MRT4577_71372C.1.pep
VSLCISTPAVCIPSKCLYGLLSFSGAAKKKKKTVLPRRGERGSETRSIHNFSCASTRSPNPSHQAGGERAAMARCLALVALLVLGLAAAASAADAPFVVAHKKISLSRPKPGVERVAVSLDLYNQGSATAYDVSINDDSWPTEVFELVTGEKSKTLERLDPGATASHTYVLETKTQGRFQGSPAIITYRGSTKTALQEAYSTPIFPLDILAERPPEKKVEWR

SEQ ID NO: 337945 - protein, 68 aa, Zea mays
  Clone ID: MRT4577_71373C.1.pep
HLILFECHQLVNENTSDSLPQDISFSRNYYTTISPPCLSRTFDDTANNYIDKLWMTSLYSHLGHDLFQ

SEQ ID NO: 337946 - protein, 97 aa, Zea mays
  Clone ID: MRT4577_71374C.1.pep
KKTPVCQVDHSFKKKPAEFYRGLFGPSCHTTRTVLGVALDPLFFRNYTIVGVMKTKFVIWGGGGEISLAGPQRLVGLCHSFPRCWILGVAWGNDSTG

SEQ ID NO: 337947 - protein, 190 aa, Zea mays
  Clone ID: MRT4577_71375C.1.pep
MARCLALVSLLLLGLASAASAADAPFVVAHKKVSLSRPKPGVERVAVSLDLYNQGSATAYDVSLNDDSWPTQAFELVTGEKSKTLERLDPGATATHTYVLETKTQGRFQGSPAIITYRVPTKTALQEAYSTPIFPLDILAERLPEKKFEWAKRLVAKYGSLVSVVSFVGLFIYLVASPSKSSSKGSKKRR

SEQ ID NO: 337948 - protein, 130 aa, Zea mays
  Clone ID: MRT4577_71376C.1.pep
KTTNILLTRRKTKNICWKPLPHGHMPKEVRGSERNPGKKIKQGPKNTKYYQTLRGAVPTASKHEKFKRGVPTVPGRRNRFWFAYKGPLLTRLFLGGRGALANQAKDFFACEGDTTQHKMLVHKIANPIDP

SEQ ID NO: 337949 - protein, 85 aa, Zea mays
  unsure (1)..(85): unsure at all Xaa locations
  Clone ID: MRT4577_71377C.1.pep
YTSMHARVQLACLSRQPPFLFFFFYXYFPQKGPFFYFRAAKLLHINYEGTLNTFTRFRFQNYAPLNCEKTTKTPPTPQTLWATIK

SEQ ID NO: 337950 - protein, 141 aa, Zea mays
  Clone ID: MRT4577_71378C.1.pep
WNQIRSLRFWISCPPKVLLEFGKLWGFTKAPRSFLDFGGKGRPKGPRVIFPGEQNGRSKNKSRVGTKPCRGAKQVSPREPVQSFTPLLVQGGGTKKNFFCPRAKRAPPSWRYFFVPDLPQPKQGPPNNPKMELKKMRAVPR

SEQ ID NO: 337951 - protein, 91 aa, Zea mays
  Clone ID: MRT4577_71379C.1.pep
IDKKTLGASTYWCSPTSYNTNATWYNEMDIDMDGGKQRPASLQLHSCHSQAEGLVALRQPRGVLVPKNPVAFSSKGKRNGPLARPPRRRPV

SEQ ID NO: 337952 - protein, 162 aa, Zea mays
  unsure (1)..(162): unsure at all Xaa locations
  Clone ID: MRT4577_7137C.1.pep
EHQGPPAPAGGATGPSERPADRRHAGPPPRRQAPATQRXTEPDXQNPXAXEPXAEAKAGDXXAAAGTKDXXHXRXQQRKGRKSXXTXQGXKKEXSXSKNHKDXKKEXRXKGTXXQDPEXGQXXQPQXXQRKNDTXXHDQAGTAKKEHTKTQGGATGGAKANQ

SEQ ID NO: 337953 - protein, 160 aa, Zea mays
  unsure (1)..(160): unsure at all Xaa locations
  Clone ID: MRT4577_71380C.1.pep
KQIWARQLAHPSADAQQGYIGEIDTRTPIHSXVKLALRLFAEXARFSSDKSDERKPQXPETERSLANETQLHMAQRELNTYKEQLSYAETXREXALSELDKAKKTADRLAVKLDLINKAKQLDIQATEDARPQIAQLRGASMSACLGTDGALKQELESAR

SEQ ID NO: 337954 - protein, 91 aa, Zea mays
  Clone ID: MRT4577_71381C.1.pep
LIPARHHLCGSPAVRLVGPFDDKKGAPSSCGIPLPLLSLLGHGPKRRRRYLTRRHGLHAHVAGQDNPPQPRTTCQHQDTYGSGDVRRRRPT

SEQ ID NO: 337955 - protein, 93 aa, Zea mays
  unsure (1)..(93): unsure at all Xaa locations
  Clone ID: MRT4577_71382C.1.pep
ASTNSVCSRHFGLSQVCRRXXKDHSXRYNESRTKYEXXVXXVSKLNLKESRSFGHTVLPLFFYTTARAHSLRRLTTSQVSKLRSEACGCRRXR

SEQ ID NO: 337956 - protein, 120 aa, Zea mays
  unsure (1)..(120): unsure at all Xaa locations
  Clone ID: MRT4577_71383C.1.pep
SGRPTRSYGEERSRRGGPLSETLRCERRSTLTSADEKDGMKLXMMSDYKADMVNDGTQDCXPECNGPYXSLYQGGAWMARLELSDAYPYKSXPLSFINKIHDSNVDDMSVCVSIHVINQT

SEQ ID NO: 337957 - protein, 44 aa, Zea mays
  Clone ID: MRT4577_71384C.1.pep
VSSLVMLVWLVLRVSPSVVSLCHEKMPEIRVVLRSTLFPRVGSM

SEQ ID NO: 337958 - protein, 61 aa, Zea mays
  Clone ID: MRT4577_71385C.1.pep
KDVARYHTTCEGTYNNCTTQLIITFDNRNTLTLQLYNEHHTEFIYSLPFLLKTIEKAIHVH

SEQ ID NO: 337959 - protein, 62 aa, Zea mays
  Clone ID: MRT4577_71386C.1.pep
RKCVERAFSAMSLVKTKLRNKMCDSLLDDCLVTYIERDIFFEVNEEDIIETFMALRKRRPDK

SEQ ID NO: 337960 - protein, 172 aa, Zea mays
  Clone ID: MRT4577_71387C.1.pep
MERSRVQKNVEELRDSKERCYETSLEYAKKLKDSFAKVGAYSSEQKIIRGDPEGVIQWIGEEAEAFDEIFDDRGDFCAFAGARGVPTILEKACCEHVKAVAQPEYIFSAGDTKDPSIKAFLLGERFYSDIWMKGGREMADEVIKKSEKESHDAREEAKRAEEATRRTMIIGT

SEQ ID NO: 337961 - protein, 126 aa, Zea mays
  Clone ID: MRT4577_71388C.1.pep
RGPPGKKIKKKKKKKKKKKKKKKKKKKKKLHSTAQVEKYLGRAKTKKQEEAKRKTEFGRERMERVLLPLLLSALIVSGVAKSPASSPSGSKVPPVSASVPRGSVAPPTTGVSGPKASVGEPTKVGD

SEQ ID NO: 337962 - protein, 83 aa, Zea mays
  Clone ID: MRT4577_71389C.1.pep
SKMDLQYYLHDNSNQVYTTNNDTLFRVPTHHVQQAHFSPYDEYSHPLYLTMKRLAFLAKEKPVTRELSPSNFQPWMCTMCHVT

SEQ ID NO: 337963 - protein, 50 aa, Zea mays
  Clone ID: MRT4577_7138C.1.pep
SIYDWKRRRHVMYGLVVKLESDISVCQMIVGGMSSVVWLTHVCGDLHVCL

SEQ ID NO: 337964 - protein, 71 aa, Zea mays
  Clone ID: MRT4577_71390C.1.pep
SSNETRVLPSSSFLPPFITCQNTLGLFHLTLINSSTFHPGMYSLSILHFVPIKNKHVHLIFSKYLYDQSPF

SEQ ID NO: 337965 - protein, 91 aa, Zea mays
  Clone ID: MRT4577_71391C.1.pep
MRRSSSSRRRRGAASHSVLATMGRGLKKHLKRLNAPKHWMLHKLGGAFAPKPSSGPHKSTECLPLILIIKNRVNFALKYREVLSILMPRHV

SEQ ID NO: 337966 - protein, 106 aa, Zea mays
  unsure (1)..(106): unsure at all Xaa locations
  Clone ID: MRT4577_71392C.1.pep
MDGQWLGEEMPTSILKCFLYCTQPHRHXHILARTNERLPTRRXHHSEMNRXQNFNLADLWXQYYECSVYRAAATVQLPRGDRVDQYYAAYLSRMXVYTNKALTASR

SEQ ID NO: 337967 - protein, 43 aa, Zea mays
  Clone ID: MRT4577_71393C.1.pep
QCVQRVHKLFRMIVIFSLLEGLHWYEFFLKFSVFLSIITNLDL

SEQ ID NO: 337968 - protein, 66 aa, Zea mays
  Clone ID: MRT4577_71394C.1.pep
AYKSSRTRGKFSQRGLHNLPGLIFQQFGRFTKLFVHRISRSSTKYGEVTILPGNYRCYSNNIHRYC

SEQ ID NO: 337969 - protein, 254 aa, Zea mays
  Clone ID: MRT4577_71395C.1.pep
IGYLEAGREAFPERSDPIRNCAGQPWRLGFCSPPSSSPSSSSPPLSPPEVSSDGPLSPAPGVETVVVFPKNAGKIVLAGEETELLVGLQNEGESTLNVVAVHSTLHLPFDHNMYGQNLTVQNFFNASVPVSVQATFPYKFVVSKFLQPGAYDLVGYIVYEIDQHPYQNVFYNGTIEVVEAGGLLSVESVFLITLGIALLGLFGLWAYGQVQQLSKKTKKAPKVELGTGTTDANIDEWLEGTSFVQRSKSKKKQT

SEQ ID NO: 337970 - protein, 89 aa, Zea mays
  Clone ID: MRT4577_71396C.1.pep
PAFAGGKNGLPNWEPHTKLANDPHPDDGYSGAPLQVGIRLNLLPELWMPGGMPFMVMNNRPSNEGQDCLSRLARQSRGLVLLENSLYSA

SEQ ID NO: 337971 - protein, 336 aa, Zea mays
  Clone ID: MRT4577_71397C.1.pep
MFQAVPDKNEGKENPKPAAVCVAVGFLSYCVRGPRCAHAATGGSSYCYNYLYSRPSLAHATQAQTRAIRSDPELCRPAMATRVLLTALLLAFLLVATPFTARVARADSEEDAAAAEVVEGADLGIVGDDTQVSSDGPLSPAPGVETVVVFPKNAGKIVLAGEETELLVGLQNEGESTLNVVAVHSTLHLPFDHNMYGQNLTVQNFFNASVPVSVQATFPYKFVVSKFLQPGAYDLVGYIVYEIDQHPYQNVFYNGTIEVVEAGGLLSVESVFLITLGIALLGLFGLWAYGQVQQLSKKTKKAPKVELGTGTTDANIDEWLEGTSFVQRSKSKKKQT

SEQ ID NO: 337972 - protein, 82 aa, Zea mays
  Clone ID: MRT4577_71398C.1.pep
QYIIRGTPVFNTLSPPYDVNVYHLGDGDGTCRCFAQEIEAYVCLWDLSSRSGASVLDAQHVFEVMPVGCPFAFFFVQYHGVN

SEQ ID NO: 337973 - protein, 239 aa, Zea mays
  unsure (1)..(239): unsure at all Xaa locations
  Clone ID: MRT4577_71399C.1.pep
MATRVWLTALLLGFLVAASPFTGRVARAESEEDAAAAEVVEGADLGIVGDDTQVSSDGPLSPAPGVETVVVFPKNAGKIVLAGEETELLVGLQNDGESILNVVAVHSTLHLPFDHNMYGQNLTVQNFFNSSVPVSVQATFPYKFVVSKFLQPGAYDLVGYIVYEIDQHPYQNVFYNGTIEVVEAGGLLSVESVFLITLGFALLGLFGLWAYGQVSSXLEETKKAPQVELGTGTTDANID

SEQ ID NO: 337974 - protein, 47 aa, Zea mays
  Clone ID: MRT4577_7139C.1.pep
LDVFFYNVSYFLSYKLWGQCIQIFRETTAQNDWATCITVKRNREGGR

SEQ ID NO: 337975 - protein, 102 aa, Zea mays
  unsure (1)..(102): unsure at all Xaa locations
  Clone ID: MRT4577_713C.1.pep
RVWNSGSDHSRPPTLPGPLGHRLKFREEFGIKPWTFVQRLGNPVLIPVGGPNKDRNLRVCTKIVLDFVXPENIHKCFTLTEVFRRLQGGPRAKKEKLEVIKI

SEQ ID NO: 337976 - protein, 265 aa, Zea mays
  Clone ID: MRT4577_71400C.1.pep
MEWAMDTLLQEEEPAALYDGCGEAVAVFPSLQGLRDASHAAEMVRELMAAVETDDAANSWTTSGSGGEVTDGGSSGATDPAAPAAAEAADFYGGSGPPHSPNSFPSGKTNTSLPTVRVSWNFVTGSAAAQPRSDGVLEKGAVPIRRVPPELAHRRRSPPPPPRRAHHPTRGMGAASCTPEHIVAERKRREKINNRLIELSTVIPGLKKMDKATILSDAAKYVKELQQRLRPLERAAAAAAGSSRTKAPTTTDENGGSRSPTSASS

SEQ ID NO: 337977 - protein, 94 aa, Zea mays
  Clone ID: MRT4577_71401C.1.pep
QNTSPPPPPPLLVCIGSLLGSNSYSQSSGLIGEGGGGLFISPTHLIYSTPPRREVRCNIHSPRGEAGDSLLQSGSTEKKAPHAISPEPDWSPPT

SEQ ID NO: 337978 - protein, 258 aa, Zea mays
  Clone ID: MRT4577_71402C.1.pep
MATRVWLTALLLGFLVAASPFTGRVARAESEEDAAAAEVVEGADLGIVGDDTQVSSDGPLSPAPGVETVVVFPKNAGKIVLAGEETELLVGLQNDGESILNVVAVHSTLHLPFDHNMYGQNLTVQNFFNSSVPVSVQATFPYKFVVSKFLQPGAYDLVGYIVYEIDQHPYQNVFYNGTIEVVEAGGLLSVESVFLITLGFALLGLFGLWAYGQVQQLSKKTKKAPKVELGTGTTDANIDEWLEGTSFVQRSKSKKKQT

SEQ ID NO: 337979 - protein, 139 aa, Zea mays
  Clone ID: MRT4577_71403C.1.pep
LIRITYFVADIFVCTHFSFYYMFGDLEYIDLWLRVNCSELCFCYYCTCLLMAWLQLNNSPLFCLGSANNYDQLQLAALSFHCTLWFTHTHSCTHSFVIVCCFVVRTQVSNLTFLQLLQDHRNRQFGTNEGGQLTYLALN

SEQ ID NO: 337980 - protein, 43 aa, Zea mays
  Clone ID: MRT4577_71404C.1.pep
NLKSNEFCNTSSSLKSNTLSESYLWVYFPQPKRILTNGHNLNS

SEQ ID NO: 337981 - protein, 48 aa, Zea mays
  Clone ID: MRT4577_71405C.1.pep
SARRKPESISQDAYSLSGDRLPELGNTLEPLAYQPKKRRAHMFSPIKG

SEQ ID NO: 337982 - protein, 86 aa, Zea mays
  Clone ID: MRT4577_71406C.1.pep
TRIELYLCLALGWSFGSFYVLCLYFVDYWPATTFAYYSSIVSFCSSLSDAHQYKQPRHAYLTFSRTIQEVCFFPPCFILAYYYILH

SEQ ID NO: 337983 - protein, 91 aa, Zea mays
  unsure (1)..(91): unsure at all Xaa locations
  Clone ID: MRT4577_71407C.1.pep
FPIKLFGLIVDPVGSVQFSNRTGYPTFRGQVFNGRPLWHLIEGCVQTSHHSFPSSAAGYIASVPCXSHVLQSVNNLRSVSPHLLYGSGPLV

SEQ ID NO: 337984 - protein, 114 aa, Zea mays
  Clone ID: MRT4577_71408C.1.pep
TTTFPAFCWANDVFNSSKRLGKQRNNVLWCITMFSFKTVVRADLGSIWYLVGPIREHPIHTQGHRRSTSLRQFMPTPEIWPCAGQGASCTAPGKACRLATPCRCLRAVGLFFFF

SEQ ID NO: 337985 - protein, 75 aa, Zea mays
  Clone ID: MRT4577_71409C.1.pep
FGSRVDVLIFSLHCKACAGGVINHLCKMEGATCLNIHFASKKVTVVVDLTPMGVLSNASKVNTAQLLAAPPAIAA

SEQ ID NO: 337986 - protein, 53 aa, Zea mays
  Clone ID: MRT4577_7140C.1.pep
PELLRNKDFDVEPLARCSLTGGRHWSSRRHCGSPPRGSLLLTSFNRSVVFLRP

SEQ ID NO: 337987 - protein, 149 aa, Zea mays
  unsure (1)..(149): unsure at all Xaa locations
  Clone ID: MRT4577_71410C.1.pep
MARTTTRRTLSTVGKATRKHLATKAARKTATATCDLKKSHRFRPVTGMLRDIRKYQNXTELLIRKLPFXQRLVLEIAQESXTDLLFQXTSDVTALHEDAYVYLLGLFEDTNLCXCHADGDAIMIEDIQLAHPHPMRGRLDGSFDHPAHY

SEQ ID NO: 337988 - protein, 125 aa, Zea mays
  unsure (1)..(125): unsure at all Xaa locations
  Clone ID: MRT4577_71411C.1.pep
KILVKAWFLPNDPXKRWVRPHEFRPKPFLKKKKPVKAPGNDFRFVPFGVAPRNSPGITPALPIMGIPLGRLVQNFQLLPPPGLDKIPPPEKPGQFTNQIPKHPPMVCNPPEPKKTIPVSCTPPPK

SEQ ID NO: 337989 - protein, 95 aa, Zea mays
  Clone ID: MRT4577_71412C.1.pep
GSPITGPIGKEGVDFWPRISSPPNPFVLNLFGKCPAFKRALLLPGAKRAIGLKGPLMFFPPILEETKFGNPRGFKNQCIPKIFWPPFSIKSFFFF

SEQ ID NO: 337990 - protein, 94 aa, Zea mays
  Clone ID: MRT4577_71413C.1.pep
MTMQKGKRADRLSALPDDILVNILDRLNLREAARTSVLSRRWTQLCAKLSRLIISAQHFLPKGVLCTDISDNELVRINAAVAQAMESILTRRNP

SEQ ID NO: 337991 - protein, 94 aa, Zea mays
  Clone ID: MRT4577_71414C.1.pep
WGGGGGGGRGKTILEHTPALFVILGEAFPSTSMSGQHHDHGRGNQFPCGRHTGHLLWASNTTARKKHTPDGSLQEAIRSFGHWGALCLPLIYHR

SEQ ID NO: 337992 - protein, 141 aa, Zea mays
  Clone ID: MRT4577_71415C.1.pep
APPAGRGAGAGAGCGSGGGGVGSEAAGESSEREGKSRSEKERSPSGSRSRSASEKHRNDSEWARRWCTRPAPPPMAAGSVKRGSISVGTGSGARASLHPRGSRRQLRRAGLRLRRPARGERAANVGMVASCRWASHTTPGR

SEQ ID NO: 337993 - protein, 89 aa, Zea mays
  Clone ID: MRT4577_71416C.1.pep
REPPSPTLWMQTILVCLTFIIFGECGETFAAAAPPGESIWAPPAPSAGFSAHTSTRLHANRRPTLAKTLRKASMAAPLAMHPPALGASA

SEQ ID NO: 337994 - protein, 82 aa, Zea mays
  unsure (1)..(82): unsure at all Xaa locations
  Clone ID: MRT4577_71417C.1.pep
AHAPVALPILVSRLVCPTSAADEMGHTFLAXALAALTSAPQYDMRSGAFNHGCIETGDVDSSILPNDSCGGECTLAFGPAET

SEQ ID NO: 337995 - protein, 42 aa, Zea mays
  Clone ID: MRT4577_71418C.1.pep
KATLFCISQAVMVYLLRSGTHAWLFLVFGKTRRALHIPPFPL

SEQ ID NO: 337996 - protein, 240 aa, Zea mays
  Clone ID: MRT4577_71419C.1.pep
MEYDFRGGRSSSGPGPYGAPPGGAPGGGSSLYPRVGQPSHGGGGASTASPRAAPYHHGSGSGSGSGSSAPVVTPLAPTSFSSSSSSSSKVGIQVAIKPEFRITPPPQLPPEMVEIPRSTFNFDFEYERMILAEAEKENPNWTKFVVERQAAPLVPQQARPASSGSGDPVVDKYVSMGLGRQAVSFAVLNYGDNPTKVKEFVKSYSILHEMGFTSPNVPELLAIHDNDPDKVIQRLLSSPS

SEQ ID NO: 337997 - protein, 53 aa, Zea mays
  Clone ID: MRT4577_7141C.1.pep
FLYRCYLFVTFCLQRIQVVSTKNVIFLLEILHGMHTDPISSYLALGGDLRPLP

SEQ ID NO: 337998 - protein, 52 aa, Zea mays
  Clone ID: MRT4577_71420C.1.pep
MSYVEKCASADICFHPFLPDILDSQAAGRNKYLELLLSVAETFNKSPYSFVW

SEQ ID NO: 337999 - protein, 113 aa, Zea mays
  Clone ID: MRT4577_71421C.1.pep
PCEHAAVSAGACGRAEYGEEYTVEDQRAGDEAASSAARSESVFMLSKVFGGGSYVLVVTGGECLVVTVDVHDLARGRRSVQVTSGDCSCDAADAEIISRRRGGVLYVTRTACG

SEQ ID NO: 338000 - protein, 61 aa, Zea mays
  unsure (1)..(61): unsure at all Xaa locations
  Clone ID: MRT4577_71422C.1.pep
ERXFVLLFLLTSLINESIGMYVVTIITLVAQARIYLTLVGIRGYLQHGNCVPGCEVVMLHC

SEQ ID NO: 338001 - protein, 202 aa, Zea mays
  unsure (1)..(202): unsure at all Xaa locations
  Clone ID: MRT4577_71423C.1.pep
GEGCGEPAGAGDAGAHPGGGRGHHNHAEPKEANHRGGNKKERLTNREARKRGPXEYLIXEEEEHKNHKTETKNTKKPERKKKKKQQIRKNKQNKNKKKKKPKKKENKKKKKTKKKKKINKKKKKKKNNTKTTKQKQKQIHTKEKKTKIKTKPKKHNLKKQKSKQKNKQHKTKKKTKNKTTKRNQKKTKHKKTKNKKKTNKRT

SEQ ID NO: 338002 - protein, 82 aa, Zea mays
  unsure (1)..(82): unsure at all Xaa locations
  Clone ID: MRT4577_71424C.1.pep
RTHFFFITRQGRKPPDXGSQGKTRXGLVHPYRGQREEGRKPTFGXRPRGGNALNSALLQTKDLKGGSCTIDHXSXKHWXTMH

SEQ ID NO: 338003 - protein, 100 aa, Zea mays
  Clone ID: MRT4577_71425C.1.pep
GWEVQVLALPLPDVDEQLTCSGPPETVTALPWLLGGVTESFVTPAALPRAHPIPPHLLFPSLPPSGQVAVPGLSPWLITLPQAVEICVWTPSDPVIACPE

SEQ ID NO: 338004 - protein, 854 aa, Zea mays
  unsure (1)..(854): unsure at all Xaa locations
  Clone ID: MRT4577_71426C.1.pep
VPSGSPGSPVPEENEVVIYRSFXKARLRFPLSSFVVEVLKXYXIFLHQITPEAIIRMGIFVWAVRSQGLEPNAKGFCSMHELLYETKXRXKEQYHNNFGCYSFVACSGSSCPVPTFWKRWPGDWMKEWFYVKNDLKAREDIKEIIMRPIWQRFGLRKPKVEIDEAAEGCQRAFGTVCSFIGTRDLIQEHIAFRVWPLVEKWEMPMETVTKTGEGELVRLKYTFRYEGKFVKPDDDWLKCIEARSDELVGPYSRAEDNALSAAFGNRKKKRLNRVFDAIGFMYPDYCYPSRGQKRKSAAPVKDVASAASSEPTPKRKKVKVLTHRPRYIETATVPEFGGETSSATEAKEPVLTQKTEEPTAMPKASPAKSEAEVERTKILEVISPSAEVTMLKAQKDLTMTPKRKRMVNVLDVLETIKTSSSTPKKTVEASKTQIEAKLSEAEAAKSQAETEAGPSEPTKEKSLEIGEEETKKEAAGQILSEKTAIPIPEASSEALDYIVRHVSGKRLFAEEKREAQYYAQRLKYPKGALIFNGSGEEDFLYCLPDSKEISVCREMSKSFGFPTLEDGLLVLSKDELADSLTYNSLKGLILSNALRAQKSAEDEGCTIALNNLRSEVIELRNEGLEKDKILNSLVSKIKENEAXQKPKLKPRNAKLXRSSEAAGRSKIKMXAIAEADRGANDXLEKLLXKTAVELRSSKERCYVKSIECVGKIKTSFANVGAYSSEDNFVRCDPEGPIEWISSEANAFDEILNGRGDVCAFSGARGVAAILEKIGCEHVKSLAQNEAALSIEDTKDPSAEASLVGGKFFTDIWENGGRGMAHEIIKKSEKDTHDAREATKAAEKTAELERRIDIA

SEQ ID NO: 338005 - protein, 62 aa, Zea mays
  Clone ID: MRT4577_71427C.1.pep
KFGSRCMYLVGMVGTEEQMMIYKKRCLPIQADTPDRANVTTLSDVENALPHCIHSKNHKNIL

SEQ ID NO: 338006 - protein, 368 aa, Zea mays
  Clone ID: MRT4577_71428C.1.pep
MATVMQKIKDIEDEMARTQKNKATAHHLGLLKAKLAKLRRELLTPTSKGGGGAGEGFDVTKSGDARVGLVGFPSVGKSTLLNKLTGTFSEVASYEFTTLTCIPGVIMYKGAKIQLLDLPGIIEGAKDGKGRGRQVISTARTCNVILIVLDAIKPITHKRLIEKELEGFGIRLNKTPPNLTFRRKDKGGINFTSTVTNTHLDLDTVKAICSEYRIHNADVSLRYDATADDLIDVIEGSRIYTPCVYVVNKIDQITLEELEILDKLPHYCPVSAHLEWNLDGLLEKVWEYLDLVRIYTKPKGLNPDYEDPVIVSSKKKTVEDFCDRIHKDMVKQFKYALVWGSSVKHKPQRVGKEHELDDEDVVQIIKKI

SEQ ID NO: 338007 - protein, 98 aa, Zea mays
  Clone ID: MRT4577_71429C.1.pep
MHRFFVYRVDGAQLPQVSNEILAGMGINDPQYRELLLKIFEKLLKEGPDVFTPPATTTQAQPTSATEQPTQQQQQQAPQQPDLAKDVPTLRDRVQPEL

SEQ ID NO: 338008 - protein, 32 aa, Zea mays
  Clone ID: MRT4577_7142C.1.pep
FHFMCSLKDGPYNDRVDGRHGSSKKNGSPATV

SEQ ID NO: 338009 - protein, 80 aa, Zea mays
  Clone ID: MRT4577_71430C.1.pep
MPLVVPGIQSKDGNSKEEWMTKLMGKKIGEQHDEVTFAKTDLPEQHRVLGPDSMKTMDFKPDRLNVHVDEDGTVKDITHG

SEQ ID NO: 338010 - protein, 161 aa, Zea mays
  Clone ID: MRT4577_71431C.1.pep
IMSGSIRILVVLCLGLLRTRKSPAKQTARNLFRGGDDEDDSADADTNDPVVPWSLGRVGVGHMVYISGLTCALSSTNMKVLREVASRGRHVERVKNFFRNMYICAKLFRNLTPFYFLCYSRLCFLSFPMTCYAFALYLACLKLLHKTCYIFCPKILYPCYD

SEQ ID NO: 338011 - protein, 140 aa, Zea mays
  unsure (1)..(140): unsure at all Xaa locations
  Clone ID: MRT4577_71432C.1.pep
MVVTALSMXILRASPPCFSSPLRVRLAAAKPLVDPMRGQLVRAKGTYNAKLITTEGEEELHEPDDVYILDFAEDEGINLPFSCRAESCSSCDDKDNSGCVDQADXAFLNDNHVCDGWEVTCAGDPTSDVXYETHKEDDLL

SEQ ID NO: 338012 - protein, 255 aa, Zea mays
  Clone ID: MRT4577_71433C.1.pep
PTRPPTRPPTRPPTRPVVSDMMSPKFAAELKKTIYDNMTFAPKHYGGRWNILEDHGTSHLSIVDSERNAVSMTSTVNAYFGSLILSPRTGVLLNNEMDDFSMPANASENSPPPAPANFVSPLKRPLSSMAPTVVVKDGKLVAAVGASGGGMIPAGTIEVFINHFVKNMDPLASVMAPRVYHQLIPNEVRYENWTTVTGDHFELDAATRADLHRRGHVLTPIAGGTISQLVVHNVGRQGDLTAVSDPRKGGVPAGY

SEQ ID NO: 338013 - protein, 128 aa, Zea mays
  Clone ID: MRT4577_71434C.1.pep
SDYDSWQIRNILAPNGSYPGQEWSSCKADIRNCSCAQLDVLHGFKKKLVSELKVAEDNKDWGLFIDSCFTHCQTPFDITWNSPISPRLGNKSISEAVGDWYFDRRQNAKQIDCEYPCNPTCSSLLPTA

SEQ ID NO: 338014 - protein, 73 aa, Zea mays
  Clone ID: MRT4577_71435C.1.pep
TSPSLGAREGSNIGRCELHHRRTHSRRDSSPGLRLLINVKPCATFRSRWPPLRYIRPDARLQQQELHWLLLMH

SEQ ID NO: 338015 - protein, 91 aa, Zea mays
  Clone ID: MRT4577_71436C.1.pep
TRRGAARFALQKLEEAKKDYRRVLELEPNNFEATNELRKISQALASKENSYPKEADIVIKSTEGERKQIEAQQNKQQAISEKDRGNGFFKE

SEQ ID NO: 338016 - protein, 80 aa, Zea mays
  Clone ID: MRT4577_71437C.1.pep
FGTRRSLNHGDTTILATGPSDIQGCLLPGSRAGEIHLLALQACLSEAQCIRAAGLTSQLWTLSHGDMPIWLIWGQDAWLH

SEQ ID NO: 338017 - protein, 46 aa, Zea mays
  Clone ID: MRT4577_71438C.1.pep
IFFFFFFFFVGNSRSTCGNSGLRSTSCILIQFRTTLKNSGITCIGC

SEQ ID NO: 338018 - protein, 57 aa, Zea mays
  Clone ID: MRT4577_71439C.1.pep
LVFSKQISFDVITLLRIGQSKGSRLWEMVSQWHFFGEQGARVQVCEDINGQRHICIF

SEQ ID NO: 338019 - protein, 519 aa, Zea mays
  Clone ID: MRT4577_7143C.1.pep
MIKQFLGRLPKKPSKSGDKDPIGRPSPSVSHQPLGPRAGDRATNLSSHPPVISSSGLSYGSGMHVGNAYTKAHVNGDSAASAFRSLPSFKDVPNTEKQNLFNEKLNLCCAQFDFTDPTKNIKEKEIKRQTLVELVDYIASASGKFSEASMQEITKMVSANLFRTLSTPPRDNKVDGFDVDEEEPVMDPAWPHLQIVYELFLRFIQSQETDAKLAKRYIDHSFVLRLLDLFDSEDPREREYLKMILHRVYGKFMVHRPYIRKAINNIFYQFIYETEKHNGIAELLEILGSIINGFALPLKEEHKLFLVRALIPLHKPKCIAMYHQQLSYCITQFVEKDCKLADTVIRGLLKYWPITNSSKEVLFLGELEEILEATQPAEFQKCMVPLFRQIARCLNSSHFQVAERALFLWNNDHIESLIKQNSRVILPIIFPALERNASGHWNQAVQSLTLNVRKLFSDNDPGLFTESLRKYEEEKAREKEVKSKQEATWRRLEEMASAKATSGAAVLVSRPLSRQSSAV

SEQ ID NO: 338020 - protein, 41 aa, Zea mays
  Clone ID: MRT4577_71440C.1.pep
RKQQAKRTSIYLTAMDTRILGLLALIALFESATDAFIITQC

SEQ ID NO: 338021 - protein, 134 aa, Zea mays
  Clone ID: MRT4577_71441C.1.pep
PAQTVVLKLVLPPLPDEGWVKFLGQCRKGIPSRKDGGKILIGDFLIGPFGPFLETPLLMALGMMALPKGRRGDEKEWGGFFPKTGFREFKILKEFGARVSFEVFPGDCPWAFHIFFPPYMYGGGGLAGLGGMIS

SEQ ID NO: 338022 - protein, 47 aa, Zea mays
  Clone ID: MRT4577_71442C.1.pep
SPCRSCVFYRRHSRYQDMTAGPLITMTSLASGPKICCWLASMVRFRL

SEQ ID NO: 338023 - protein, 116 aa, Zea mays
  Clone ID: MRT4577_71443C.1.pep
HVHELHHDDVDGISILKKPTAIVSSSLKLCKDGGKYGFTTSFGQSIITSLVNYYCASTPSSAVVVVSSSTNFGSLLSLRIFISGSSTSSPRCSKFGKLSNTSLVRWENSDGFIISS

SEQ ID NO: 338024 - protein, 181 aa, Zea mays
  unsure (1)..(181): unsure at all Xaa locations
  Clone ID: MRT4577_71444C.1.pep
MAMGAACSRVFWECRAXATLKISTFPRGCLTGLNDLKYADTHEWVKVDGEXGTAGIICHAHDHQGEDDTEGLPEIAVKGSHGNNFGAXERVKVSSVVNXHRLDRKLMGNXKQSEEPESKYASASEKGWMIMVKRNDXGELNWLMDDEKYSXYCERSIQRLMQSLCPASTMTCSRSSMSGPG

SEQ ID NO: 338025 - protein, 96 aa, Zea mays
  Clone ID: MRT4577_71445C.1.pep
VKGSPDRSRTKATTVGAIRLSTVFKNHTVRRERLRNSRSSGFLSCFGPYVVPLGNNLTSKFGGLRRRGFGAQLCVYENAETVQFGDIPSTQRRRIW

SEQ ID NO: 338026 - protein, 261 aa, Zea mays
  unsure (1)..(261): unsure at all Xaa locations
  Clone ID: MRT4577_71446C.1.pep
MEHPAPAPEPMLLDEQPPTAVACEKKQQDGEAPYAEGNDAMTGHIISTTIGGKNGEPKQTISYMAERVVGTGSFGIVFQAKCLETGETVAIKKVLQDRRYKNRELQLMRSMIHSNVVSLKHCFFSTTSRDELFLNLVMEYVPETLYRVLKHYSNAKQGMPLIYVKLYTYQLFRGLAYIHTVPGVCHRDVKPQNVLVDPLTHQVKICDFGSAKVLXVAGEPNISYICSRYYRAPELIFGATEYTXSIDIWXSAGCVLAELLL

SEQ ID NO: 338027 - protein, 56 aa, Zea mays
  Clone ID: MRT4577_71447C.1.pep
GLRPHPNDPFLSGQVCILAVCLGSLITSAHRTSPNAYGVNAVVPNEGINPDQVGRL

SEQ ID NO: 338028 - protein, 139 aa, Zea mays
  unsure (1)..(139): unsure at all Xaa locations
  Clone ID: MRT4577_71448C.1.pep
DPXPXAAXKPAAKKPAEEEPAAPAEKAPAGKKPKAEKRPPAGKPAGKEGGGDKKGRKKAKKSGETXKTXXXKGXKQGHPDXGTXXKARAXXNXHSNDXXEKPAGEAAKXARDNKKPTXTXRENQTXXRPXQPGEXAKHA

SEQ ID NO: 338029 - protein, 147 aa, Zea mays
  unsure (1)..(147): unsure at all Xaa locations
  Clone ID: MRT4577_71449C.1.pep
MGGYKYDXXVWXRKSIXVMXLCRXALWEYRRAXIVRLXRTVGAERXXXGXKXXEGYVVYRXRVRXGGGRGCXKGIXYXKXKVKGMXXVKXXRXKRFVVEERXGXKFGGXRVVNWXWVNEDXXXKXFENIVVDVGXIKMGNDIRIKWI

SEQ ID NO: 338030 - protein, 98 aa, Zea mays
  Clone ID: MRT4577_7144C.1.pep
PPESASAAEPPLRHRGRTSWKARPGQRRGTRHLRMRGRQACRVAGEGRDPLKEEEEHDQEQSRRRRRTIRAAGEGLKHLQATTAGGGRRRKPNPIAAA

SEQ ID NO: 338031 - protein, 70 aa, Zea mays
  unsure (1)..(70): unsure at all Xaa locations
  Clone ID: MRT4577_71450C.1.pep
HVLRCRPNQLDWPCFYTVLSGQTLALPNXITLQEIPLRPPAVISRRPAPFHLPNICAGCMAHGAPPRSPH

SEQ ID NO: 338032 - protein, 81 aa, Zea mays
  Clone ID: MRT4577_71451C.1.pep
GSIRRTFPPGPPGVAPAHGTQAMTMHFEAQTLGPLRQCRWPKKEQGGGPPYSLRLLTKYPIKRTFTFLKDKKCGFYYSPNE

SEQ ID NO: 338033 - protein, 88 aa, Zea mays
  Clone ID: MRT4577_71452C.1.pep
ITYRQALHVLLSSVPSASWLFAAAGPFQTLIGSVPHSVSCYRDRQPHVSLERGASACMRLRGPPFCCLLMKFYRHGSFWDPPIVVFLS

SEQ ID NO: 338034 - protein, 181 aa, Zea mays
  Clone ID: MRT4577_71453C.1.pep
MLRRSRHGGVRLGRNLLSLWRRALCGRRRRRGGYRRLQQQQQKPCAGSGCTPGRTATATARKLAPVLRWGRSLARRLRLGWRPAGGGGHRMLPDGDGEPAVSTPKGQVAVYVGGEGEASQSLRYVVPVVYFNHPTFGELLREAEEEFGFQHPGVISIPCPAARFERAAALAAAAKKGFGRW

SEQ ID NO: 338035 - protein, 51 aa, Zea mays
  unsure (1)..(51): unsure at all Xaa locations
  Clone ID: MRT4577_71454C.1.pep
TNSCALRGGAARCGDGAATRXVDWWRKHEVHAMDSNFQSRMLFLLRMNDSG

SEQ ID NO: 338036 - protein, 58 aa, Zea mays
  unsure (1)..(58): unsure at all Xaa locations
  Clone ID: MRT4577_71455C.1.pep
LQASWKIFPPFLHTIYPGKFKAPPFXPATRGPKETPQFSPKVGYVQPPGFIWGPPPPP

SEQ ID NO: 338037 - protein, 81 aa, Zea mays
  Clone ID: MRT4577_71456C.1.pep
PCFNVVFHLMLLGAVVLFRFECSILSVFWISFSVSSVGVFFCFFFFISMPRGSYRLLFKVQANIHTLASAHASAHASAHAS

SEQ ID NO: 338038 - protein, 85 aa, Zea mays
  Clone ID: MRT4577_71457C.1.pep
GEFGFLLYKRQPPILYHAAIDATHPCLCYLSSSGRQDYILTGKLNLTHHYLASATLLSPHISLFMTKTMLTASACGVLSFCSLLL

SEQ ID NO: 338039 - protein, 71 aa, Zea mays
  Clone ID: MRT4577_71458C.1.pep
AGRFRGGVADAGFCPRPAGGDAVPFMIRPPIANENLDLSVTPRSCDTFLSKPHGIPPRMVSASMPSATTSS

SEQ ID NO: 338040 - protein, 283 aa, Zea mays
  unsure (1)..(283): unsure at all Xaa locations
  Clone ID: MRT4577_71459C.1.pep
MAGRYDRNPFEEDDVNPFAGGSVPPASNSRMSALPHEPAGFYNDRGATVDIPLDSTKDLSKKEKELQAKEAELNKRERELKRKEEAAARAGIVIEDKNWPPFMPIIHHDISNEIPIHLQRMQYLAFSSLLGLTACLFWNIIATTAAWIKSEGVMIWLLAIIYFISGVPGAYVLWYRPLYNAMRTXSALKLGFLFLHILFCVWSAVAPPFPFKGKSLAGILPAIDIIGRSAIVGIFYFIGFGMFCLESLLSIVVIQQVYMYFRGSGKAAEMKREAARGAMRNAF

SEQ ID NO: 338041 - protein, 220 aa, Zea mays
  Clone ID: MRT4577_7145C.1.pep
MGQQRTLVYSFVARGTIVLADHAEVSGNFASVAAQCLQKLPANNNRFNYNCDGHTFNYHIYDGFTYCVVATESAGRQLPVGFIERVKEDFSKKYSGGKAKNASANGLKREYGPKLKEHMRYCDQHPEEIDKLAKVKAQVTEVKGVMMQNIEKVLDRGEKIELLVDKTEDLRSQAQDFRQQGTKIRRKMWWENMKMKLIVFGIVVALILLIVLTVCKDLNC

SEQ ID NO: 338042 - protein, 59 aa, Zea mays
  Clone ID: MRT4577_71460C.1.pep
NGLMVKMSIKMELTNNSVKAPPVNHFLLKGIDLHQMDCKICLKNSAGRGKPAPPLFFFF

SEQ ID NO: 338043 - protein, 136 aa, Zea mays
  unsure (1)..(136): unsure at all Xaa locations
  Clone ID: MRT4577_71461C.1.pep
CWEGVMIWLLAIIYFISGAPGAYVLXVYNAMRTESALKFGWFFLFYLLHILFCVWSAVAPPFPFKGKSLAGILPAIDIIGRSAIVGIFYFIGFGMFCLESLLSIVVIQQVYMYFRGSGKAAEMKREAARGAMRNAF

SEQ ID NO: 338044 - protein, 50 aa, Zea mays
  unsure (1)..(50): unsure at all Xaa locations
  Clone ID: MRT4577_71462C.1.pep
CMFSKRSPPKRCKKLPLPASTLINHLLIGPKKKKKKKKKKKKKKKKKKXK

SEQ ID NO: 338045 - protein, 56 aa, Zea mays
  Clone ID: MRT4577_71463C.1.pep
CLQGLVGRLASSNKKTIHILQNVNGIIKPSRMTLSLGPPSSGKSTLMRALTGKLDK

SEQ ID NO: 338046 - protein, 222 aa, Zea mays
  unsure (1)..(222): unsure at all Xaa locations
  Clone ID: MRT4577_71464C.1.pep
MAGRYDRNPFEEDDVNPFAGGSVPPASNSRMSALPHEPAGFYNDRGATVDIPLDSTKXHTMLLIKGGGHAIYFRRWIENKFQRFFHWCVYGCLIMWXMLVCEXDLSKKEKELQAKEAELNKRERELKRKEEAAARAGIVIEDKNWPPFMPIIHHDISNEIPIHLQRMQYLAFSSLLGLTACLFWNIIATTAAWIKSEGVMIWXLAIIYFISGVPGAYVLXWY

SEQ ID NO: 338047 - protein, 43 aa, Zea mays
  Clone ID: MRT4577_71465C.1.pep
GIITQADLYCLCLFEACLLIFCALVVLGPIMCVHVRVGGPSPP

SEQ ID NO: 338048 - protein, 279 aa, Zea mays
  Clone ID: MRT4577_71466C.1.pep
MDFLQEQSVETTVAVAVAVAAVAAGGAFLLLRSRKPKGCLDPENFRKFKLVEKKQISHNVARFKFALPTPTSVLGLPIGQHISCRGQDATGEEVIKPYTPTTLDSDLGYFELVIKMYPQGRMSHHFREMKVGDYLSVKGPKGRFKYHVGQVRAFGMLAGGSGITPMFQVARAILENPNDNTKVHLIYANVTYEDILLKDELDDMAKTYPGRFKIYYVLNQPPENWNGGVGFVSKEMIQSHCPAPAEDIQILRCGPPPMNKAMAAHLDELNYTKEMQFQF

SEQ ID NO: 338049 - protein, 203 aa, Zea mays
  unsure (1)..(203): unsure at all Xaa locations
  Clone ID: MRT4577_71467C.1.pep
MACHLRSVSLPSRPHTKVEEELHSLEASISSPSMTIETISDGLRRLGDIYSTIEEILCLPSNQICSSQQRKMLEGETECSLELLDLCNAMHEDFTELKAIIQDLQVATRKGDDTAAQVKIQSYTRLVKKAKKHFKKAAKKVTSNKEDXQDGQAVDXEAREITTSLLESTVHLLSKRIAVPKWSLVSKAFQKKNSVVCKEEQLQ

SEQ ID NO: 338050 - protein, 35 aa, Zea mays
  Clone ID: MRT4577_71468C.1.pep
MCVMLMSLGAHIRQKRAGPKIVITSRAAAKKSLDD

SEQ ID NO: 338051 - protein, 225 aa, Zea mays
  unsure (1)..(225): unsure at all Xaa locations
  Clone ID: MRT4577_71469C.1.pep
MAALEKFLVEYKSAVEKKLAEYKCNTNTAIELKLVRFPEDLENDIRTFFPEYTHQLFGDDETAFGYKGLKILLYYIAGSLSTLFRVEYSSKVDENFDCVEADDVEGKIRQIIPPGFCTNTNDFLSLLEKETNFKPFGTLLHTYTVPSQTGGETFTFQIHKADMTCRGFREYHERLQTFLMWFIETASXIDVDDERWHYFLVFEKYNKDGATLFATXSYMTVXYYY

SEQ ID NO: 338052 - protein, 68 aa, Zea mays
  Clone ID: MRT4577_7146C.1.pep
VRKLFSDNDPGLFTESLRKYEEEKAREKEVKSKQEATWRRLEEIASAKATSGAAVLVSRPLSRQSSAV

SEQ ID NO: 338053 - protein, 96 aa, Zea mays
  Clone ID: MRT4577_71470C.1.pep
YAISRPMLSTAHATLTYNGSFLGNVRVMMGVVHAAAWACSLPMEWTGMPPVGWTGRCLGGPDCISRGPGPTLGVRTTVDAMEYITFSGHGAASDPP

SEQ ID NO: 338054 - protein, 50 aa, Zea mays
  unsure (1)..(50): unsure at all Xaa locations
  Clone ID: MRT4577_71471C.1.pep
RSRVCARAPTRVCIYPVHSXRGALEYSAENTVAYICVSHSVYIHLWSAEW

SEQ ID NO: 338055 - protein, 128 aa, Zea mays
  Clone ID: MRT4577_71472C.1.pep
YIYIQSHNIINSFYIIMERQKSLLLIKAAIVVGHSAFCHFLFCSFRVLPFRFPPPRAQSIPMLCHQYSRRLAKIKKVHMAPKGFKPTTSQANASGSYHYTTCVFMSISITKHIYYISPQAHLLPLHNA

SEQ ID NO: 338056 - protein, 60 aa, Zea mays
  Clone ID: MRT4577_71473C.1.pep
SFLAKKKVLYFSWKVPFGWFVPAWPFALFNFLGRGLAIFNGYFSFSGFPVWGTKICKFKH

SEQ ID NO: 338057 - protein, 122 aa, Zea mays
  unsure (1)..(122): unsure at all Xaa locations
  Clone ID: MRT4577_71474C.1.pep
VVFTCXHTXGFGWSWGPLGWVIPTEIFPVDIRSAGQAMNVSIGFCLTFVQTQSFLAMLCRFKYATFAYYAAWVAVMTVFIALFLPETKGIPLESMGIIWVKHWYXYWKRFVHDGKQSNVALT

SEQ ID NO: 338058 - protein, 53 aa, Zea mays
  Clone ID: MRT4577_71475C.1.pep
SLNLLCCTHPVDPCSAGADGFAHIRAVKTEKLHRHWNSPKRTNERANVSTTSH

SEQ ID NO: 338059 - protein, 106 aa, Zea mays
  Clone ID: MRT4577_71476C.1.pep
EVRIIKRVQIIWFRVEGTLRLLHKNLSSSAAYARRWCPQYIGAGHVIVVKHCRVKNDLAVPLIEVVALHIGHPELGLVLHHLLFPSAALGRAALVGRHGSQIRSHA

SEQ ID NO: 338060 - protein, 102 aa, Zea mays
  Clone ID: MRT4577_71477C.1.pep
RNGITGALFWAGPLNFFQVAGKGVTTLSNPLESKKEKGVFQPEGLAEKCELMIYAGGQDTGRTISKGIGTFTTFFDNPLKRPERDRGRVNSGGPGEGSQRTK

SEQ ID NO: 338061 - protein, 108 aa, Zea mays
  Clone ID: MRT4577_71478C.1.pep
GWKTTQEPITGLERPTVEQHTSTHGKRDGCGPLHAECATWKFVSTVQTSTAAPGLPLTAATPPTTTSTYVTSVHIDPCRMVVYCALSKDSARACVKKSVFHSVLTSLI

SEQ ID NO: 338062 - protein, 122 aa, Zea mays
  unsure (1)..(122): unsure at all Xaa locations
  Clone ID: MRT4577_71479C.1.pep
VPVCPALSRRLATSDDTAVKXPEIGDTFLLQNEPPFNTKSLVSYIRRXYILNLTVEMDKQKANHMIIYVEGATDSLLNSLNVLQXMVAISMFHEDYEVVAYYQEAATNPTVLYFSPGHEEIE

SEQ ID NO: 338063 - protein, 133 aa, Zea mays
  Clone ID: MRT4577_7147C.1.pep
VTVSTSFPILFFSDDRGAHHRYPSPRARRRAYRLQCLQRLPVSLLGGFPMSDMESLAPLMNYQSSKIHHHQEPFPDLESQSTASMNLKRKHLEYHFRGHQQDLKKKLVAAKYITIIDLQETVLKTGEKSGVVV

SEQ ID NO: 338064 - protein, 110 aa, Zea mays
  unsure (1)..(110): unsure at all Xaa locations
  Clone ID: MRT4577_71480C.1.pep
GSPGIGFVGERIEMAASDVEDRCFVGGLXLATDDHSLHNAXSTYGDVLEXKIILTRETKTSHGFWFLTFSTXEAMQNAIDXNDLWELDGRKITRHEDYSPVATQPRLMRG

SEQ ID NO: 338065 - protein, 123 aa, Zea mays
  Clone ID: MRT4577_71481C.1.pep
PVFPFLNPLSCKSSFVRTNFPAGNFLVHFLHGRAQYPPVWLLGRVQPSDQERSVQSSLIPSDQEPSWPSAPTSASGISSPSPFLNQDLVLPAAGQNAHFSLFSFQVIKKPAEAAANPSTRDPA

SEQ ID NO: 338066 - protein, 54 aa, Zea mays
  Clone ID: MRT4577_71482C.1.pep
KTHHLVLAKEIWPCSSGAPDYAERSLPHDDVCKDDISHCLYDGQPFSGCIVHSS

SEQ ID NO: 338067 - protein, 42 aa, Zea mays
  Clone ID: MRT4577_71483C.1.pep
MAYEKIKASNPIVKMDGDEMTKAILAGYQGQAYAPITGPGTS

SEQ ID NO: 338068 - protein, 56 aa, Zea mays
  Clone ID: MRT4577_71484C.1.pep
MGVAPDPADGGAGTGTGTGDDWFLDCGILDDLPAVDCGAFPWDAYPFSFNPIVVVC

SEQ ID NO: 338069 - protein, 66 aa, Zea mays
  Clone ID: MRT4577_71485C.1.pep
DTQTTNYERNQLRTTYHISVPDQLSRIRSWVGSWVQLIKINRQWVTVLSQLVDVLYISYDSSYRYG

SEQ ID NO: 338070 - protein, 67 aa, Zea mays
  unsure (1)..(67): unsure at all Xaa locations
  Clone ID: MRT4577_71486C.1.pep
KKKKGGXXGRQKAPPALQGEWGRLSPSKHRIMMDVIIRVLCSLEIGPQKMAGTVQQRISEPGPAGLE

SEQ ID NO: 338071 - protein, 68 aa, Zea mays
  Clone ID: MRT4577_71487C.1.pep
PRRATFDFVEPRRFNRGIQPTSRFLKGLQSSLVILKVSGEKVFRSNFKRASSKGGTQAHGGVKAPHRL

SEQ ID NO: 338072 - protein, 293 aa, Zea mays
  Clone ID: MRT4577_71488C.1.pep
NFSSQSTKGLIRDDNRSEAFVFMISTRAGGVGLNLIGADTVIFYEQDWNPQADKQALQRAHRIGQLNHVLSINLVSQRTMKKVIMRRADRKLKLSHNIIGEEDGTDGKGGDPGIEASDMRSIIFGLHLFDPADTATETIDEDITAETFSVEKLAKLKTMSEKVVMMRSHESSEKDERAFEINPNMTDDSGTVIRRASDSIRIDPGLNEAAYLSWVKKFKEASISSEDATVGFGRQRAAPEEKLLKHDVNKQKIEEKRLAKWESLGYQTLAVKEPDITASQNISDARIHSFGYG

SEQ ID NO: 338073 - protein, 59 aa, Zea mays
  Clone ID: MRT4577_71489C.1.pep
RLRVPVSDCNGRADLCVFFFWPTTNNNYLLAQESYWVDYDQDLWRRLHGPIDEADVYAS

SEQ ID NO: 338074 - protein, 131 aa, Zea mays
  unsure (1)..(131): unsure at all Xaa locations
  Clone ID: MRT4577_7148C.1.pep
RARNPRADHTLPGRLKARGKGVCPDNRPWKVKAQFTQEAHSXQGLFNSNSKGGAFGAHFQMGTIAFFGANFFQGVPPNLSRGPERSWLGHQRKPGIGFAFRFTTTKMVGPLQVAGPGLVALSIVQKISKRV

SEQ ID NO: 338075 - protein, 54 aa, Zea mays
  Clone ID: MRT4577_71490C.1.pep
NQKTKLGARSQDLLGGITRVATPCFLDWTNRIMVYNSWGPRPFKKQYRSFFLTG

SEQ ID NO: 338076 - protein, 194 aa, Zea mays
  Clone ID: MRT4577_71491C.1.pep
MQPKSICIYRSLLWESFVWFRNIALLASPHRDSCSETLIKNRPSLASLVITIRFVSVSVGTMDEENDGSTQSITVEMKVYMHCDACERKVRRTISKVEGVGTVEVDREENKVTVTGDFEPEKVVRKIRKKTGKKAEILVREENEEDEGNGKETYVPYPLLYPDADIPDEFQTYRPERWNFHYFDDENSQACTVM

SEQ ID NO: 338077 - protein, 164 aa, Zea mays
  unsure (1)..(164): unsure at all Xaa locations
  Clone ID: MRT4577_71492C.1.pep
RLEIPEGVKVTIKTRNVVVEGPRGTLEKSLGHLAVSFTHPKKNLIKIELHHGSRKSVATLRTVRTLINNLIIGVTKGYLYKMRYVYAHFPINVNVEKNGETDQFEVEIRNFIGEKLVRRVVMRPGVHVEAAKNQRDELHLSGNSLEDGSQSXRDIQQICKGRNK

SEQ ID NO: 338078 - protein, 73 aa, Zea mays
  Clone ID: MRT4577_71493C.1.pep
GSEFRARPTRAPTRPSTRPPSRPPTPGAGLGSNESRDAHCTGDCVAAHFEHNHYRCGLNVPYPRKLSNQPYKS

SEQ ID NO: 338079 - protein, 96 aa, Zea mays
  Clone ID: MRT4577_71494C.1.pep
MGSLGVPVISWPFFADQQTNCRYQCNEWGVGMEIDSNVRRDAVASLIAELMEGEQGKEMRRRALEWRDKAIEVAKPGGTSYRNFDELVRNVLLPKN

SEQ ID NO: 338080 - protein, 78 aa, Zea mays
  unsure (1)..(78): unsure at all Xaa locations
  Clone ID: MRT4577_71495C.1.pep
LYLLKKYRRLVVVKSVISATPNHLMIDLDLPKWFFKAMDKKRRGFLXKGHEQANGGNCLVSWAKVQRPLFFYFLLLNI

SEQ ID NO: 338081 - protein, 84 aa, Zea mays
  unsure (1)..(84): unsure at all Xaa locations
  Clone ID: MRT4577_71496C.1.pep
FCXAAXXAAPAAHGLILSTSNPLAALSLVAQXXFGSPAXAFGSXSCSSRSLGPSGRRGSLRAPSASPGGRRSYGFATSAQALQQ

SEQ ID NO: 338082 - protein, 483 aa, Zea mays
  Clone ID: MRT4577_71497C.1.pep
MGSLGSAAQQQQQPHAVCLPYPAQGHITPMLNVAKLLHARGFHVTFVNTEYNQARLVRTRGAAAVAGLPGFRFATIPDGLPPSEDDDVTQDIPSLCKSTTETCLGPFRRLLADLSDPPVTCVVSDVVMGFSIDATKELGLPYVQLWTASTISFLGYRHYHLLKSRGLAPLKSVEQLTNGFLDTAVEDVPGLRNMRFRDFPSFIRSTDPDEYMVGYVLQETGRSAGASAVILNTFDELEGEAVAAMRSLGLARKVYTLGPLPLLAREDPPTPRSAISLSLWKEEEECLRWLDGRDPGSVVYVNFGSITVMTSDQLVEFAWGLANSGRPFLWIIRRDLVRGDTAVLPPEFLSETAGRGLMATWCPQQAVLDHPAVAAFLTHSGWNSTLEAMCGGVPVISWPFFADQQTNCRYQCNEWGVGMEIDSNVRRDAVASLIAELMEGEQGKEMRRRALEWRDKAIEVAKPGGTSYRNFDELVRNVLLPKN

SEQ ID NO: 338083 - protein, 85 aa, Zea mays
  Clone ID: MRT4577_71498C.1.pep
QAPFWAFNGGVPPALTQLNTPPSRLCRGAIHVSTIRGEIPPLQFFNDGRRFLWVIPRWLTQLGDLLCLLRNNLTGLSIKLWVGLS

SEQ ID NO: 338084 - protein, 98 aa, Zea mays
  Clone ID: MRT4577_71499C.1.pep
TGATPRLQNMIPRNEIETTTRQLQLMLEKGPCATPFLKRQAYLYCTSCWYSGLVLFYTGVYRLKPRLLGTDLSMLDANSLGVAEVEPALHKERLDHQT

SEQ ID NO: 338085 - protein, 67 aa, Zea mays
  unsure (1)..(67): unsure at all Xaa locations
  Clone ID: MRT4577_7149C.1.pep
QSLRVREHRVTVPYVDGLSQLAVTSFEDIESLMSEGNRXSTVAVXHMTRSRRPCCVNIIITQTLYDL

SEQ ID NO: 338086 - protein, 82 aa, Zea mays
  Clone ID: MRT4577_714C.1.pep
GKKPAPVLTDNGGGFEKQGFEPWGSWEVLPDGGKKGQGIGAFMSPGPRKGHKAGVWKKTGGHHIPQQRAIRGPRGGRPQTSP

SEQ ID NO: 338087 - protein, 369 aa, Zea mays
  Clone ID: MRT4577_71500C.1.pep
MAHSTTLALVIVVVLALTFGATVSVSAPVNKSCVSGSAGASVSIGYGGARASAGAGVSLGADAYRSTCPRAEEIIRAAVERAVAADPRMAASLLRLHFHDCFVNGCDGSVVLDDKPFFIGEKTAVPNANSIRGFEVIDAIKTELERECPDTVSCADLLAIAARDSVVVSGGPSWEIEVGRKDSRTASLQGANTNLPAPTSGVDTLVQKFRNVGLSTKDMVALSGAHTIGKARCTSFSARLAGAGGVSEGGAGAFKDLTFLQSLQQLCTGSAGSALAHLDLATPATFDNQYYINLLSGDGLLPSDQALASSAAVPGVEADVASLVATYAFDASVFFQDFAESMLRMGRLAPGVGTSGEVRRNCRVVNSSE

SEQ ID NO: 338088 - protein, 51 aa, Zea mays
  unsure (1)..(51): unsure at all Xaa locations
  Clone ID: MRT4577_71501C.1.pep
PAGRRPFCGXCAAVXRXRRRRXVSGLGXAPCVSLXWAGSVCPGSGPRKXMP

SEQ ID NO: 338089 - protein, 72 aa, Zea mays
  unsure (1)..(72): unsure at all Xaa locations
  Clone ID: MRT4577_71502C.1.pep
PPRPPPRPPPRPPPPGPXRRPNRPKAKSSKAPGLINPFPPGNPPRGGKVVLPSPGGLNSPPPEDPCQARGRF

SEQ ID NO: 338090 - protein, 136 aa, Zea mays
  Clone ID: MRT4577_71503C.1.pep
PLFFEVFLLSFGSRKNWENMFLGGGGGPKKEISFYTFKPRGGPKPLFMASEQGPGPAQQYSRSPPTGQKKGKIFKKLTGGPHQDQNGGAPGGANPSRSPTYYGGLKSTPCPKAHGKPKKALEEGGAEKTRPGGGTK

SEQ ID NO: 338091 - protein, 78 aa, Zea mays
  Clone ID: MRT4577_71504C.1.pep
TLVGLQCHQQALQLRWAPCSSASAQSRRNFSLSWYSHNSVVCDLEDMSQASDHSVSPWVTCMVSGVMRRNQPQQKTQG

SEQ ID NO: 338092 - protein, 65 aa, Zea mays
  unsure (1)..(65): unsure at all Xaa locations
  Clone ID: MRT4577_71505C.1.pep
KPVLQEDLYFTHPYIAHNPNNEXASFFLSINPNLFRMLNIGMVVFFKTVDIGKMFYFLRVSIVQI

SEQ ID NO: 338093 - protein, 201 aa, Zea mays
  unsure (1)..(201): unsure at all Xaa locations
  Clone ID: MRT4577_71506C.1.pep
MAAALYLPANPNPTPNPTSSLRPPLPRPSTSGELHFRPRPVPRRARARTHLPAAFGRRPPAAAAAERGGKDYYATLNVRRDATLKEVKSAYRTLARKYHPDMNKSPGAEEKFKEISAAYEVLSDKEKRSLYDRFGETGLHAXYXGGDFGAHGVDPYELFNAFFGSSNKFFGDSMGPGRFHYSSNVKDNRALDIRYDLLLPF

SEQ ID NO: 338094 - protein, 77 aa, Zea mays
  Clone ID: MRT4577_71507C.1.pep
VKFLNALRYKGIALIMTTHRGKSHNELGKNSIIIANVIQKNKLLHDLCKKDHEQNKNHMHAQIERNFFIPDNQQRKV

SEQ ID NO: 338095 - protein, 68 aa, Zea mays
  Clone ID: MRT4577_71508C.1.pep
TSIVTKSHIIKSLATTHWIGWIMCSSCVLTQVPPTAYIFGSTLSTSKNYSSSSTSVAVNFVAVSLVAA

SEQ ID NO: 338096 - protein, 166 aa, Zea mays
  Clone ID: MRT4577_71509C.1.pep
MDSYYLYWQGKWYWWSGYWNDPNDSRRYPAVNIVILTNASFNYALGMGALAEPPQDSSADGVILIKDMAEWQKHWDQTAPYNKLLVYEFYEKNSSLCKAMDKPFEKLATQYKGRADFCKLDVDNFELLARICGVEGAYPTFVLFKKCAQVAAVGLLQLQSIERKIL

SEQ ID NO: 338097 - protein, 73 aa, Zea mays
  Clone ID: MRT4577_7150C.1.pep
VGIHVAYECPGGLRYHGFGLIIQAHLLSRMGFCHDPMGNIIILLYRSVFALLLGLSRLSHKMGAHIELLVGIA

SEQ ID NO: 338098 - protein, 189 aa, Zea mays
  Clone ID: MRT4577_71510C.1.pep
SSSKPLELLLDRSGETPRYVKAKSDYVQEPIPRHVWERTWSWLEKPEAGLLILDPYGGRMGSGSLEAGRVPHRKGNLYNLQYYSYWFENGTAALEKRMSWVRGLYEEMEPYVSKNPRTGYVNYRDLDLGTNELEDNVTSYARARIWGEKYFKGNFERLAAVKAMADPDDFFRNEQSIPPLPAAKGWGSI

SEQ ID NO: 338099 - protein, 289 aa, Zea mays
  Clone ID: MRT4577_71511C.1.pep
RGAGRARTQKNSIANSNLPMMMQQAVQMQQMQFQQSLMMQTSIAAQQAAVRAATMKNATDAAAARAAEISRKLKAEGFGGETAEEKDAKEKSRSPSPPSRRSKSRSRSPIKYRRSRRDRSYSPPVRRSRDHRSRSPSRSHHSKYGSDRSYRDDRDKYSRSGRRESDRSRDHYSSSSRRNRSRSISPRSKKPSRADSRSPKRQREESLSPSKSRRSARAGSRSPRHHKGSKSSPTRDQRSSRRSRHSRSRSQERKHRSSDKKDVKKSEGQDDKKRSDRGTRGGKDESLVK

SEQ ID NO: 338100 - protein, 134 aa, Zea mays
  Clone ID: MRT4577_71512C.1.pep
PPVSSLIYVHVGRRYPAVNIVILTNASFNYALGMGALAEPPQDSSADGVILIKDMAEWQKHWDQTAPYNKLNSSLCKAMDKPFEKLATQYKGRADFCKLDVDNFELLARICGVEGAYPTFVLFKKCAQVGKVVG

SEQ ID NO: 338101 - protein, 172 aa, Zea mays
  Clone ID: MRT4577_71513C.1.pep
MYSYYLYWEGKWYWWSSGYWSEPNDSRRYPAVNIVILTNASFNYALGMGALAEPPQDSSADGVILIKDMAEWQKHWDQTAPYNKLLVYEFYEKNSSLCKAMDKPFEKLATQYKGRADFCKLDVDNFELLARICGVEGAYPTFVLFKKCAQVGKVVGLKEDDLERIVQRAIIS

SEQ ID NO: 338102 - protein, 171 aa, Zea mays
  Clone ID: MRT4577_71514C.1.pep
MDSYYLYWQGKWYWWSGYWNDPNDSRRYPAVNIVILTNASFNYALGMGALAEPPQDSSADGVILIKDMAEWQKHWDQTAPYNKLLVYEFYEKNSSLCKAMDKPFEKLATQYKGRADFCKLDVDNFELLARICGVEGAYPTFVLFKKCAQVGKVVGLKEDDLERIVQRAIIS

SEQ ID NO: 338103 - protein, 62 aa, Zea mays
  Clone ID: MRT4577_71515C.1.pep
EVVFKFWSTRLSSFFSLSNPLTFRDRSMSLLVQLSAYHNAPIQLKYLFLRHYQKLFVIGSND

SEQ ID NO: 338104 - protein, 79 aa, Zea mays
  Clone ID: MRT4577_71516C.1.pep
QMLRAAIGQTLSAAAPGNQSHGFLYRLLISRPGPYLCESDMYSSLSRLASTDYHMAAWGLPLPGKDGLLIRMIADRIKA

SEQ ID NO: 338105 - protein, 101 aa, Zea mays
  Clone ID: MRT4577_71517C.1.pep
PPVSSLIYVHVGRRYPAVNIVILTNASFNYALGMGALAEPPQDSSADGVILIKDMAEWQKHWDQTAPYNKLVPNLYLYIHIASRSNTFAFLLISRNYSSDL

SEQ ID NO: 338106 - protein, 537 aa, Zea mays
  unsure (1)..(537): unsure at all Xaa locations
  Clone ID: MRT4577_71518C.1.pep
WRCVHVRQVFDTYLSEARAALAAAAQDTDDAAAAAAALGLVTAALEMSPRAEAALELRARALLALRRYRDVADMLRDYIPSYARSCSGDDDATCASSSSSCSSASGDRDRSDACAGAARFLCCLHVSDLKRRLVASFCRSSSTEAQWRYLVLGRACFHLGLMEDAVVLLQTARRLATAAFRRESVCWSEDSFSPSNPLTANSAAASEAESVSQLLAHVKLLLRRRAAAVAALDAGLPGEAVRHFNKVLDTRRSVLPHPFATACLVGRAAAFRSAGRPADAIADCNRALALDPASIPALRARADLLESVGALPDCLRDLDHLKLLYDAALRGGKLRPQGGVQFGEIAGAHRTLTARIQLLRGRVAAGEGCGVDYYALLGVRRGCTRSELERAHLVLTLKLKPERSASFAERLELVDEHRDLEAVRDQARMSALFLYRMLQKGYSCIMSAVLDAERQRAKDAAAAIAEQEEEVATVQENATRKDGGNVVVTTKPXDSNAXTAVAAATPLSQPFVFCRDTLLSRGGFDRPIPVKCEAMSC

SEQ ID NO: 338107 - protein, 172 aa, Zea mays; identical to SEQ ID NO: 338101
  Clone ID: MRT4577_71519C.1.pep

SEQ ID NO: 338108 - protein, 115 aa, Zea mays
  unsure (1)..(115): unsure at all Xaa locations
  Clone ID: MRT4577_71520C.1.pep
PVLPAYYRCRVLKLLCIGLFFALCMCLWQLSGLPHEQVRHSLMLGPPHPPPRGYLHDLRVLTDVLMPAMVRSCPLPCRPSFIISPRSRSPLGFFGGMDPPPLFXXXXXGGVVKRG

SEQ ID NO: 338109 - protein, 116 aa, Zea mays
  unsure (1)..(116): unsure at all Xaa locations
  Clone ID: MRT4577_71521C.1.pep
LSWGAAMLASQARRGGSFFVAYFPGLRVAVGLLTFFIWLRSFFPVSWRLFRPFFLCGSVAWFVSPCLFCLVVVVPLCVVSVGGLLLRSVVCSRPPLFWCGRVFPLLSPAPWVCXGL

SEQ ID NO: 338110 - protein, 81 aa, Zea mays
  Clone ID: MRT4577_71522C.1.pep
FRIRGENPGFFPELNFFTSLEYASVPGPHRLFKASFRLNLETMCSLSLLASFRPYIAQKQALAQCCPLCWSCRAQLGKNPR

SEQ ID NO: 338111 - protein, 83 aa, Zea mays
  unsure (1)..(83): unsure at all Xaa locations
  Clone ID: MRT4577_71523C.1.pep
QRQSISAPNFYRVRESNPPPPHKTKXQLHICSXMKIMQPNCNLHQTATIDLELLLSRLSSKSFFFAPLRPPRLNYCQTKLVTG

SEQ ID NO: 338112 - protein, 100 aa, Zea mays
  unsure (1)..(100): unsure at all Xaa locations
  Clone ID: MRT4577_71524C.1.pep
KIFSSGLKKEDPPLLVHPKKKKPLSVLLSNPPPSIGSFPPVNPSLKINCWKKLSMLPPKTQTTEFWRXAPPNFFRPIRVTAKICFLSIEKNEAQPNFLWG

SEQ ID NO: 338113 - protein, 64 aa, Zea mays
  unsure (1)..(64): unsure at all Xaa locations
  Clone ID: MRT4577_71525C.1.pep
KKPAPPGYVATPAPRAQGRLVTRGPQWESVLRRRHTRPRRGGGAGRLATATGXPWCTQQGVADG

SEQ ID NO: 338114 - protein, 185 aa, Zea mays
  unsure (1)..(185): unsure at all Xaa locations
  Clone ID: MRT4577_71526C.1.pep
GAGLGATPGAILRAKRAHAGIQPSPGHPLLGRSRLGFLAERPHAGPPRAPERHYQGPTEPAPGASHSLVPSTRAGRARSPRSRRVGFLHRAMAAMPRSASVPETAVGAIATCHGPVLRRTKRHGPTGSCPHRRCSKWRPRRGCIPAPPPLPPTXPSWRQPPPAGQRAIRPSHLGKVXPPRLGGGQ

SEQ ID NO: 338115 - protein, 262 aa, Zea mays
  Clone ID: MRT4577_71527C.1.pep
MLLLLFVFFSLQLLWLLRKGNGPILQARPVWKYDHSSSRLSETSRNCLRKKKKKKKTGIPHCTTAANKRITMASFAKPQHLLLAATVAVVLLLVAAADASQRPVHLRLYMHDIIGGPGQTAIHLIRNVGPPHTSLKGAYFGDTVAIDDLVTEGPAADSRAVGRALGTYMLSSQREQVLVVAVTVVLADGPYNGSTFAVAGRVKIFDDTTELAVVSGTGGLRRAAGHLLWRTAEVVSEVYMVLELVVRMSVPATASTAAPVDG

SEQ ID NO: 338116 - protein, 234 aa, Zea mays
  Clone ID: MRT4577_71528C.1.pep
MDPQAGGLNFPSVYVPGDGTRAGHFAPRWTVPDFYANYTPQPPLPGTRAGHFLPRGTAPEFYANYTPQPPPPGCEEKTQHVPGPSYTSSNLRPPSMPTSASYLPSTCMPPWLCPPDFQCPGDLLGRPLTPSLGPPFLHRKQPEWGMDFCIRVDRAGCYHTYPHVGGPFEGLQEAERAIERHLDNRRDPKMFTMDNVSAVDIAVRHYLYLPDGTRKHSGIYDKISDNQRQLVLAL

SEQ ID NO: 338117 - protein, 50 aa, Zea mays
  Clone ID: MRT4577_71529C.1.pep
QASSSTTSSPHRIGSQALLNYTQSQHLGAPARFSLEFPDEVGVVNQNHFP

SEQ ID NO: 338118 - protein, 57 aa, Zea mays
  Clone ID: MRT4577_7152C.1.pep
RPLSAKSNLGRTISPKFRATIKKGLPLGVGARQPWSQLLNYCPPLRTNLGFKRRLLL

SEQ ID NO: 338119 - protein, 370 aa, Zea mays
  unsure (1)..(370): unsure at all Xaa locations
  Clone ID: MRT4577_71530C.1.pep
MASPSSSPPPKLPIPGRRNILITSALPYVNNVPHLGNIIGCVLSADVFARYCRLRGYNALYICGTDEYGTATETKAMEXEECSPKEICDKYHAIHSEVXKWFDIEFDKFGRTSSPQQTTICQAIFHKLMENNWLSENTMQQLYCDTCXXRVLADRLVEGACPTEGCTNKAARGDQCDNCSHMLNPTELIDPKCKVCKNTPHIRETDHLFLDLPRIEDKLVNYINDTSVAGMWSQNAIQATNAWLKEGLKSRCITRDLKWGVPVPIEKYKDKVFYVWFDAPIGYVSITSSYTPEWERWWKNPDNVELFQFMGKDNVPFHTIMFPSTLLGTGENWTMMKTICVTEYLNYEGGKFSKSKGIGVFGNDAKDTNI

SEQ ID NO: 338120 - protein, 105 aa, Zea mays
  Clone ID: MRT4577_71531C.1.pep
MGASSNSERCSLASVMLAAVRKCPNSTYMGNLKDCIDHNLRDLYPYDCAYEVAMLAKQCVDEDPVLRPDMKQVVITLSQILLSSIEWEATQAGNSQVFSGLVAGR

SEQ ID NO: 338121 - protein, 223 aa, Zea mays
  Clone ID: MRT4577_71532C.1.pep
MDTFFNSQSSSSSRSRWSYDTLKNFREISPLVQNHIKRVYFTLCCAVVAAAVGAFLHVLWNIGGFLTTLASIGSMVWLLSTPPVEEQKRLSLLMASALFQGASIGPLIDLAIAIDPSLIVSAFVATSLAFACFSAAALVARRREYLYLGGLLSSGLSILMWLHFASSLFGGSITLFKFELYFGLLVFVGYVIVDTQEIIERAHFGDLDYVEHALTLFTDLAAI

SEQ ID NO: 338122 - protein, 71 aa, Zea mays
  unsure (1)..(71): unsure at all Xaa locations
  Clone ID: MRT4577_71533C.1.pep
WGFLPSHRRGETGAPFISYLAVGLSPGQIKTGAPSKXKRVLPXNQLFIIKKEFGVISVYAGAKFRAPVEPF

SEQ ID NO: 338123 - protein, 316 aa, Zea mays
  Clone ID: MRT4577_71534C.1.pep
MSSSGPLPATGTHHGSQRAECKSQGSTSARKVQKADREKMRRDKLNEQFQDLGNALDPDRPRNDKATILGDTIQMLKDLTTQVNKLKAEYTSLSEEACELTQEKNELRDEKASLKSEVDNLNNQYQQRMRVLYPWVGMEPSVVMGPPPAYPYPVPVPIPSGAVPMHPQLQTYHFFHSQASGTIPNTCIPYMAYTQPCHPPTDQPSNQLNTPVAHSSSHRSNSPAQDCRSKSSTLQQPSCGVRSSDAGDIATDLELKTPGSSCQSHAEIANNDSSSDLKTKKHCIKQINDCTLTESSSSSRCSSNGPPDVSNSAIDE

SEQ ID NO: 338124 - protein, 182 aa, Zea mays
  Clone ID: MRT4577_71535C.1.pep
IRHEARQYRNSSSTKLQRHPTAGEESKTRPPTRSGSQRLCSSRCPCRRRPLPPRRRRPRRPASLPSRSRRYEPPRPAPPRAYLLGFGRRAWLGPPAALARFAKKRTGTSPRVAGSCARRASSLLCRARAPPTRPFCPSSYGCVGFRGWFQSKIGSFRLAVWLGRDWASLCLFPLSQIAGLSA

SEQ ID NO: 338125 - protein, 118 aa, Zea mays
  unsure (1)..(118): unsure at all Xaa locations
  Clone ID: MRT4577_71536C.1.pep
SSHIHPPRSQIPRTNPPPHGTKXLNAPRPPKRGPKANTLIGATPKGPTPGPRQARHKGVPPNKETPTETPKXKIGKPRPPKKPSPRGPPSGRKPPTPGKKKGPKDPKGGIPGPQKTRG

SEQ ID NO: 338126 - protein, 105 aa, Zea mays
  unsure (1)..(105): unsure at all Xaa locations
  Clone ID: MRT4577_71537C.1.pep
LPEIGMLDQIDPVWQHRDNIYPGFKCKYCKKQWKDVVLYVSSNTLHRVGGMCKVVASFHRTLSITFSRSLTRSMMLVVVVLVVAVLVLVVLVLXVTVVVAVVVLG

SEQ ID NO: 338127 - protein, 223 aa, Zea mays
  unsure (1)..(223): unsure at all Xaa locations
  Clone ID: MRT4577_71538C.1.pep
FPTSSDPISAPLPLLISRLRRLLSCPLLCGRANSSILILLSLTDGEVRRPVSALVPTDAIDSFAAHDPFITSNYLSYMLRYNTAQWQCHYTDCILMNAKTLLFMHKPCTTSAITNPEKIPRTRSXVHHVVXAHRAYSDMRTXVCASTHXRCSPRQTCVSLCPIKNAPMCVVDDTENRHSSDRNFVSDASCTSNCLAHLATDIXDTYXIIESLMTTVHVITATL

SEQ ID NO: 338128 - protein, 40 aa, Zea mays
  unsure (1)..(40): unsure at all Xaa locations
  Clone ID: MRT4577_71539C.1.pep
TXXLTKXTLETLKGNSASLKSTRYKLTLLTKTVLVSLHVF

SEQ ID NO: 338129 - protein, 83 aa, Zea mays
  Clone ID: MRT4577_7153C.1.pep
SLLFYILRSNTIRLSAAVPSNFSPYITFLCHIINISPPIFHLPQRFPINTPPISHYNYKISFSISTINLISTNNYLLTHSTVS

SEQ ID NO: 338130 - protein, 65 aa, Zea mays
  Clone ID: MRT4577_71540C.1.pep
KKKKKKKKKKKKKKKKKKKKKKKKKKKKKKKKKKKKKKKKKRPQRPGPIKKKGNPRDKKNQKQIY

SEQ ID NO: 338131 - protein, 62 aa, Zea mays
  Clone ID: MRT4577_71541C.1.pep
GRTLHPYSVLAEHPQLPVRVPRRTIASCAEGPGCSRHSEARRHLCRCPRHTSTVAYSRRASR

SEQ ID NO: 338132 - protein, 117 aa, Zea mays
  unsure (1)..(117): unsure at all Xaa locations
  Clone ID: MRT4577_71542C.1.pep
HRGSTDIAASSSXSDQLFHXLMSLPPTVXCLRSCGILKQDMWNSLGWMQPTSXDDKIVILQYFCNLPKPPRIMIQHLGYITKSPSTSSDLNWSTRIDIFSLHVHGCKLCLSSQMWKT

SEQ ID NO: 338133 - protein, 331 aa, Zea mays
  unsure (1)..(331): unsure at all Xaa locations
  Clone ID: MRT4577_71543C.1.pep
MMKLKSGRRPFYKDVKLVDCRSGSSLPHLAAQAKFAAMNMKTEDVNPRRPVQVRRSRWALGDVTEVLDHNSWRLGKITEVLKNDYFVIRLVGCIQPREFHISCLRIPHDCKQLTVGGRDHQAYEEVDHYAKRKAANICASTGARAVKRKLEASRIPPNGLVRRTGKEQKVSTYEFRQLTKNELPPKVSARNAIDEDDHFHRPLSSRYNDLPEKPLRTREEDECSVASCSANYXQSTVPVMMTINQSEPAXCFPDDVMSACEYGQETEDAYGSGLFQNVHELELRAYRSTVRALHAAGPLTWEQESLLTNLRLSLNISNEEHLLQLRHLLAL

SEQ ID NO: 338134 - protein, 44 aa, Zea mays
  Clone ID: MRT4577_71544C.1.pep
RWNGWRTVGDREEDGGGDAHTTWGRNRKFRARYRQATQLSLSKS

SEQ ID NO: 338135 - protein, 95 aa, Zea mays
  Clone ID: MRT4577_71545C.1.pep
RAASRRRCGRTCASPSSSPILVRTLLTFHCRHRTRHIRRSSRDKPYPAYSRYPPKAAYGTTRLFLWIRQPVLLVRILRSNASPTSRATLTLLCSP

SEQ ID NO: 338136 - protein, 87 aa, Zea mays
  Clone ID: MRT4577_71546C.1.pep
PGVVELVPPSEDVRCSFLLLFAAQLLGSFSTIAATSMRGISHRRAGAWATAIAFAGVDAKQLCRRGPTRMCGKIREAGPSLCLCCPG

SEQ ID NO: 338137 - protein, 81 aa, Zea mays
  Clone ID: MRT4577_71547C.1.pep
QDVLHSQCTTPMNMMLAQSKLTIRATIFLLVEQLPYLLMLDDGRNYNIILMYDIIELLSIHDSLAIYVIMPLDDIHYHREG

SEQ ID NO: 338138 - protein, 53 aa, Zea mays
  Clone ID: MRT4577_71548C.1.pep
IIGSKIRVVWLDLIKQRMWCCDLVFCWLVIYENKGRCLNVFGHGKLFFVFKIC

SEQ ID NO: 338139 - protein, 124 aa, Zea mays
  unsure (1)..(124): unsure at all Xaa locations
  Clone ID: MRT4577_71549C.1.pep
KNTRVGGGSFKGRFKKTPPPKKVGAGFKRRSFGGGVKKGIYFSILGQKSWAGDKNGGNERTQKVRGIKINXGAKXTKGPGRVNFNGAGGVXNGXFQIDVDATREILGNLPNPPFLRGGNFGGKI

SEQ ID NO: 338140 - protein, 85 aa, Zea mays
  Clone ID: MRT4577_7154C.1.pep
ENYYIRVHILITTEYHREIDTYIRVLEYATGETRGYNPVLLIRDMYDSPLLYMYELGVLYTLTHSILGSGEYTDVHPKCTTLLTF

SEQ ID NO: 338141 - protein, 112 aa, Zea mays
  Clone ID: MRT4577_71550C.1.pep
CHQEHNHTESGKDEEPVIAERSNFRERDGIVFLTEPRRTAVKRAHGCISILLYALALVFFLSSKVLTIWGSPCGAYPMRLRSDQSTLPMAGTRKRLMEYGIRRRREHCKRRG

SEQ ID NO: 338142 - protein, 84 aa, Zea mays
  Clone ID: MRT4577_71551C.1.pep
RRCFRRRARRCRHGGQVDVTDPCSCHLWIDRALYIPSRPAGQYYIYLLVGRPTGASAKKNLLYHIVTDYQAVLSFCSCCSATAI

SEQ ID NO: 338143 - protein, 106 aa, Zea mays
  unsure (1)..(106): unsure at all Xaa locations
  Clone ID: MRT4577_71552C.1.pep
MGGGNXQKFKMARERNAQKNKGGKGSQLEANKKAMNIQCKICMQTFICPPFEAKCKEHSEGRHSKNDLFQCFPPLKNLLAAEAFSLVSLKTSSSFFFFPCGAINGV

SEQ ID NO: 338144 - protein, 172 aa, Zea mays
  unsure (1)..(172): unsure at all Xaa locations
  Clone ID: MRT4577_71553C.1.pep
KVPTSAKLRSCEKLHRHLRQYRAFSTAEPVPRLEATLTGKQRRLPCSDCCATRQGEADXQPSPALGAIGSSASPAPRARTQPRLRKTVSALPDPRAQTQPRLRKTVSTSPNPRAWTQPRPRKTVSASPDPRAQTQPRLRKMVSASPDPRARTPPRPRKTVSASPNPRARTQP

SEQ ID NO: 338145 - protein, 126 aa, Zea mays
  unsure (1)..(126): unsure at all Xaa locations
  Clone ID: MRT4577_71554C.1.pep
PFLGFLAFLVSATKCVSIISNXLTLLPSALXIAQFLPXPGTSMGFEHPAVQAYRLQQALAASVLQQPIAQLQQQSLAHLTIQTIATQQQQQFLPALSQLAVVNPVAYLQQQLLASNPLALANIVAY

SEQ ID NO: 338146 - protein, 196 aa, Zea mays
  unsure (1)..(196): unsure at all Xaa locations
  Clone ID: MRT4577_71555C.1.pep
RTLLNRQGRSDRSHFAAPLTDLTGKQRRLPYSDCCATRQSEADSSXSPASGAIGSSASPDPRARPPSRPRTTDSALPDPRARTQPRRRKTVSASPDPRARTQPRRRKTVSASPDPRAWTQPRPWTTVSASPDPRARTQPRLRKTVSASPDPRARTQPRLRKTXLRLARPQGSDSASTSEESPPRPTSGGVPSGSPR

SEQ ID NO: 338147 - protein, 82 aa, Zea mays
  Clone ID: MRT4577_71556C.1.pep
MGSLQQPLQPGTMLHFRSLEFMSLDGSYDTVLLSPPRDNDNDGRQPARRRRNRRRLPRVMEEQHLGLSRHLPRRRRRRRGNH

SEQ ID NO: 338148 - protein, 60 aa, Zea mays
  Clone ID: MRT4577_71557C.1.pep
QQSLVLLGGVYQTRGTPSFFRRIPGPPDFKPLIKPPFFNIPFLMGHSLVITKQGFPRASP

SEQ ID NO: 338149 - protein, 56 aa, Zea mays
  Clone ID: MRT4577_71558C.1.pep
KKRPFHLGFFVSAGCLESCSLALGYFCSRLWFSIYVRCGPSFWRAKKKTTARARHV

SEQ ID NO: 338150 - protein, 53 aa, Zea mays
  Clone ID: MRT4577_71559C.1.pep
SSLSCPRARLPLAETVSPRGRPRPVIWYVGWTTLVLLLSQIGVFQKMWVRDIG

SEQ ID NO: 338151 - protein, 434 aa, Zea mays
  Clone ID: MRT4577_7155C.1.pep
YRHLNISELIYCDEEDSRVNQYVNTRKVELVQVPFGSDATQVADMLLDIIRPHINRLRDAGVIDHRDYSNWTQFELLKFKDKFKEVPPPNIHEIERGEIERSFVILGPLCHTRKLLLSHGTQFAHGYLDKRLKGGSLNLMHKNEFFWRLKQKMKLSSSHSITPKVQELKRLMVEHFNTDSNLKDSRIIIFSHYRESVNEIYCSLQDIDDKLVRPVEFIGQSSAGNQLKGQSQKTQQAILKKFRSGVYNVLVATSIGEEGLDIIEVDLVICFDANVSPLRMIQRMGRTGRKNEGRVVVLAYEGQELQGYRKKQGDCRTMRKLLHNSERFEYHASPRMVPHVYKPEVKYVKLTIDKYIPHAKKMRVAAKEASPIPWKMSEADGQMITRYFSVCKEEVWRPSLVAFPRFQLYPSVGHKVPHSFRTTDMLTDAMKHFK

SEQ ID NO: 338152 - protein, 86 aa, Zea mays
  Clone ID: MRT4577_71560C.1.pep
LLLDRGHDYQLGRPPIVRNPRLVNSSEKLVAATVLISVLTSPTKPSNRAGEKHIALLDGCLLLGRPLDWVAIIVAKRYDYACITQR

SEQ ID NO: 338153 - protein, 57 aa, Zea mays
  Clone ID: MRT4577_71561C.1.pep
EGCTVAWDWLGAFPAHLRWMAKKDPFRGGPEPSVRYHSGRARILTLRQTRGPRDSVR

SEQ ID NO: 338154 - protein, 202 aa, Zea mays
  Clone ID: MRT4577_71562C.1.pep
MSTFEPVIVIDGKGHLLGRLASTVAKQLLNGQKIVVVRCEALNISGEFFRAKLKYSAFLRKQTRFNPTRGGPFHFRAPSKMFWRTVRGMIPHKTARGAAAMERLKTFEGIPAPYDKKKRVVVPQALRVLRLKPGRKYCTVGRLGHEFGWKYQDVVARLEERRKVKGAAYYERKKALRRQLAEAKKTANVDSKTQEQLTALGY

SEQ ID NO: 338155 - protein, 138 aa, Zea mays
  unsure (1)..(138): unsure at all Xaa locations
  Clone ID: MRT4577_71563C.1.pep
AVSFANLYSEAGVKKLDGHLLTPRYITEXQASKDDLSVDTSLSXAPSSRYINITRWLNHIEAIERLSGITAEAQCVKVGSSGGTSAPTPDVAEAQAATAEEEDDDDGDLFGEESEDAKNGDEEGAAAANASGEKKESG

SEQ ID NO: 338156 - protein, 117 aa, Zea mays
  unsure (1)..(117): unsure at all Xaa locations
  Clone ID: MRT4577_71564C.1.pep
MLLWDRYCGVLASLRLWQKEATTLLLWLYNTSKTTLLHMLKDERLVHYQPAQQPSSEELTIRXIKIKGFDLSGHQIARRVWKDYYAQGDAVVYLXVDAYNKERFAESKKELDALLSD

SEQ ID NO: 338157 - protein, 68 aa, Zea mays
  Clone ID: MRT4577_71565C.1.pep
FKKLKNLNTYRHKNKRWLVNAFFPWNIRCFKKGGESFNEQRFVIHLKHLDRKLANLVHGSRSETLQIL

SEQ ID NO: 338158 - protein, 58 aa, Zea mays
  Clone ID: MRT4577_71566C.1.pep
RRRSSSHARRVSRPGNSGPAHAGVQAVPIVRRISSLFNSVQVLCVSCLAIRVIILRMW

SEQ ID NO: 338159 - protein, 105 aa, Zea mays
  unsure (1)..(105): unsure at all Xaa locations
  Clone ID: MRT4577_71567C.1.pep
SQWHHMEDVWRLRSXSYREPYXEWCCSTARRVLALRWVPASRRSPMVRTHRDAAGRCYLPINKILHCSVDCPTYRRKVEDVMVRGFNLAIVHGGDKVVHHEFALV

SEQ ID NO: 338160 - protein, 81 aa, Zea mays
  unsure (1)..(81): unsure at all Xaa locations
  Clone ID: MRT4577_71568C.1.pep
MIMIVATHKLLQQPHRHAEAELNLAPGFRFHPTDEELVAHYLCXRAEMRRPPVSIIADVDLYRFDPWDLSERALFGRREWY

SEQ ID NO: 338161 - protein, 50 aa, Zea mays
  Clone ID: MRT4577_71569C.1.pep
TLLFLNNKPHTMQTISKLFRPHTTNNTITYYLSTPPPTHTILKPTLTYKF

SEQ ID NO: 338162 - protein, 121 aa, Zea mays
  Clone ID: MRT4577_7156C.1.pep
DMTHMLTTGLYTYRSTRQHSLGPYAYTHGSCIHSLLLPKLMRTGTNNCTISCSLGLSQQFALIIWMITSCHKTINSYISILHTKLKHKAYRNPCLLTQITPFICFSLTGRSYSKKATPLTT

SEQ ID NO: 338163 - protein, 53 aa, Zea mays
  Clone ID: MRT4577_71570C.1.pep
GETPRKTRQGDRKHDCSKIVMGHIFCPLSQNKKGEGFLWKIKYKNRKTGTMNK

SEQ ID NO: 338164 - protein, 189 aa, Zea mays
  unsure (1)..(189): unsure at all Xaa locations
  Clone ID: MRT4577_71571C.1.pep
MEDDNDCPPLSGEIPLVFAIPSRVXSLSHPSTAGVNVITDYLRAGKPTLSNYILNENRXVNIIVVNDVNELAEEYLIPKGWKIHEVQEGXALIEEXVKLANVCVCCSVKHKLYQGLDQIVHRNDRMNHILLETTRMSYPAXPLESVXLWIDXDQXLETTIELNSIITAIDAKNFWLQIDEYKNSSSLPE

SEQ ID NO: 338165 - protein, 70 aa, Zea mays
  Clone ID: MRT4577_71572C.1.pep
PPGGGPGQVQTKEKEPRAPHPPPPGPQAAVLSTPPPPPLLWFPQVIARAATLGDGCHCVTHRRWMSNLAS

SEQ ID NO: 338166 - protein, 80 aa, Zea mays
  Clone ID: MRT4577_71573C.1.pep
TLSQKTLKGYLHPSQGLKFLQWGNHWETGPLFALQKKTILKWHPGKRGEPTLWAFLKGGLQFAGLTQWGPHPLFKPFDPP

SEQ ID NO: 338167 - protein, 43 aa, Zea mays
  Clone ID: MRT4577_71574C.1.pep
AGSRPSELGLSQAYYTYSCGYTCDSNRRARSLPEHRAFQSYPW

SEQ ID NO: 338168 - protein, 68 aa, Zea mays
  Clone ID: MRT4577_71575C.1.pep
KKTGPAFFSPHWFCYFPNFFFPLLTHSFFSFFIGVGSGKTHGFCVFFFFQNLFGPNHPFFLLFNLFII

SEQ ID NO: 338169 - protein, 87 aa, Zea mays
  Clone ID: MRT4577_71576C.1.pep
WFFCFFFFFFGHQTPKLNTTLITCASRFARQTLDNQFCCCTCSVTSSFSLSYPRKKENSTPKYGCLRPRKYSCIASVNCRTLLHRPT

SEQ ID NO: 338170 - protein, 369 aa, Zea mays
  unsure (1)..(369): unsure at all Xaa locations
  Clone ID: MRT4577_71577C.1.pep
QRAWWRAIFADWNDDEASLAGFRANGELLKEIGADQELSEKAKFEEWRRKAEAIVELREAQQDAFNAXAVVGGLDRRWRRWWRGVWGGWGRTRRGQLVGADNRXDPAEIVWDKGVVEVFRGTIDEDYEDMLFEDRVFMYASTNSAKFLALLIVVPWVIDFLVHDYAMMPFLERYVQKVPLAAELLDVRRSQKLQMVKDLNIEKARYRLEVEIGKSPPLSDEEVWFELREKALELRDDWRLENRQAFANVWSDMVYGVVLFLLLCFNQSKVAMLKFTGYKLLNNISDTGKAFLIILVSDILLGYHSESGWHTMVEVILEHYGLESDEAAVTFFVCLVPVALDVYIKFWVYKYLPRLSPSVGNVLDEIKRH

SEQ ID NO: 338171 - protein, 64 aa, Zea mays
  unsure (1)..(64): unsure at all Xaa locations
  Clone ID: MRT4577_71578C.1.pep
AXSRFXPRLPWPFPGPPVVFXGSCRVSPWXRRLPXXPPVSFSFFLSXXGLFGXGXXFGXWXXAV

SEQ ID NO: 338172 - protein, 179 aa, Zea mays
  unsure (1)..(179): unsure at all Xaa locations
  Clone ID: MRT4577_71579C.1.pep
KNADTDWVVPLCTGTDCTAKRNIAKLLANSIIYRYLSSEELLEDVLGGKDALRAFKESDEKGYLEVEVLSFFLPHVFLTSFLALNVTAPALPSTNFPIFLSXXTEGLKQLTSMGSLVLCCGDGAVMNSTNLYVXVYPVSIIFFMHVKSLVKSINAXLLFNXFRGLLRHGXVSFWIDVPP

SEQ ID NO: 338173 - protein, 117 aa, Zea mays
  Clone ID: MRT4577_7157C.1.pep
NSKMLMKNGVEVKELQSLELPLTPTLLSERIPGLDRGLSERIWTVFREEAFVDDKGYMKEDGRETPWKDALVKRGLWEEVSALADHIQEELNLAYGYHEMTSLHADEMFDWVDKHLR

SEQ ID NO: 338174 - protein, 42 aa, Zea mays
  Clone ID: MRT4577_71580C.1.pep
LLSFLLLCDSLGGSLVSCMRSLYKFTDSLGTDYYWLFAIMSI

SEQ ID NO: 338175 - protein, 76 aa, Zea mays
  Clone ID: MRT4577_71581C.1.pep
PGQGKLEKTFLFFYRAGKRKLGKFPKTTYPCGGFRLFFRRTPFFGDLRNSGKGGPPPFFFYKTKGTGLFLGGGGGP

SEQ ID NO: 338176 - protein, 62 aa, Zea mays
  unsure (1)..(62): unsure at all Xaa locations
  Clone ID: MRT4577_71582C.1.pep
LKSVDFALKGKKPVPLHTLRVRGNNIRKXILLDSRILKSLIVQETPRVQLKKPVSWNPLGHG

SEQ ID NO: 338177 - protein, 133 aa, Zea mays
  Clone ID: MRT4577_71583C.1.pep
HDIPPTHTHTHGGPVRVAVSIRCLWPPISERVAAGSRLTRGRSSALRRRPPLRLRFCLCRRALVASSACPSTSSSTSTCSSVVVACPTLAATVRRQKQAGLLEWMGLGMNCGWTEVACGSWFAQREEVEDFRF

SEQ ID NO: 338178 - protein, 50 aa, Zea mays
  Clone ID: MRT4577_71584C.1.pep
GAPSTEALSESESARAVSWLSMNSIGCGAGRRRWRGRRVGVQVKRSGCWD

SEQ ID NO: 338179 - protein, 305 aa, Zea mays
  unsure (1)..(305): unsure at all Xaa locations
  Clone ID: MRT4577_71585C.1.pep
MGELAAASSPPPPAVLQVVFVDGEQSVDLGTVAVQPSLSGVKRLQAVVADRVGVAPYQISASLARPRRARRVPLDDATDLAAAVAREGSECYVVAGLRRSRRERRGGRSRRDRKGAKDAGAPAEXHPEAPPANGSGVPGRHSPSAASLPPRRCRGPAARARRVGLRRLRGPAAGAAASARLVHVEHRGSGSGSGPSLPPSGGWRAPGARGSGGAVVPGAAPVSVPRVRGGGGGHAPAGVPLVRARRGGLRCVPLPRGSHRAPSEEDPLSASASASAAEPWSPPRHARLRVHRPAPALPSSSPAPL

SEQ ID NO: 338180 - protein, 98 aa, Zea mays
  Clone ID: MRT4577_71586C.1.pep
INLSHILDLVIINNDATEKPKITPLNGPPTKQASPPPKPKRGGHNPVGKKKGRRTEHAETQHPQPEGPHPQQTTWGILLMPSREQHPQGKRKERPWGG

SEQ ID NO: 338181 - protein, 88 aa, Zea mays
  Clone ID: MRT4577_71587C.1.pep
GATNDGRAATMLRLSRFLPSTFRGVTDLKDVLWSGSLTFKHALATSAANVDENASVKKCASYTVLKGKAALSIRTMLSLLTKGESGGS

SEQ ID NO: 338182 - protein, 57 aa, Zea mays
  Clone ID: MRT4577_71588C.1.pep
KYVPNGGPSCDNGRPNGHVYVHVDGEMNLLLPILMCVHLHAGLGAHGMGQQQAVATG

SEQ ID NO: 338183 - protein, 112 aa, Zea mays
  Clone ID: MRT4577_71589C.1.pep
MSEGATATSPALETEVAPLPDNDDLHREIFLRLPPFPSSLPRASLVCKRWRRLISDPAFLRRFHVHHRAPPLLGFFADEDGDIEFVPTLRRPDRILGARFFLPRCDNYYLSF

SEQ ID NO: 338184 - protein, 90 aa, Zea mays
  Clone ID: MRT4577_7158C.1.pep
PLGSPSAGVCSGWVRRGLLRVPPLLGPRCLRRPRARALLFRLRVPSSSRPRCGSLSRCPSSCGCSCSSVAAPCCGSSGGGSARRSLIFPL

SEQ ID NO: 338185 - protein, 41 aa, Zea mays
  Clone ID: MRT4577_71590C.1.pep
ERDNYHVTSPFNLQAFINMYIFLYGNDTFIRCWNTHLMIRR

SEQ ID NO: 338186 - protein, 91 aa, Zea mays
  Clone ID: MRT4577_71591C.1.pep
KHRALYSCYEKLCLNKKSLVLLVNDKTLVTDSERFPFLNSVVKGYWRYCTAFGLLLGFPWGGRRAKIKCPPNSRYKGRPPYNGLGTSARAE

SEQ ID NO: 338187 - protein, 138 aa, Zea mays
  Clone ID: MRT4577_71592C.1.pep
MDLLERSATIKAEAGEAQRKEAERKEQQQEQETQQQGQGLTARPPLANGRSGMLPMSSPPANPGQLTIFYGGSVCVYDSVPPEKAQAIMLIAAAAAAASKSNGTAAVKPPAMSATNAIQAMLTRSLSLQSTSVANGQP

SEQ ID NO: 338188 - protein, 80 aa, Zea mays
  Clone ID: MRT4577_71593C.1.pep
YRAGLFKCPSFTSPSFRLITSFLLPPNLISWPVFFQLASWKNRGFPKFFPLAALPFLSNLLYLYRPFTFCPSKHFPHLIA

SEQ ID NO: 338189 - protein, 48 aa, Zea mays
  Clone ID: MRT4577_71594C.1.pep
SGRPASAARGGRWHPRIFIFNFSNKNFYFLIQSSTKLYLYLHTLNTNL

SEQ ID NO: 338190 - protein, 57 aa, Zea mays
  Clone ID: MRT4577_71595C.1.pep
MDVYRPERGDDFTKTDTNCKDQSIDRKVDVIEEDALEQLLCKLCECERDTDKAVVML

SEQ ID NO: 338191 - protein, 145 aa, Zea mays
  Clone ID: MRT4577_71596C.1.pep
FEPDSPYERIPFADKVYELCYSCPSLSSLSSAELSPSSWMSVFWYPASHVPMKNRKDLNTCFLTYHSLSTCKDIVALDSMQAFNHMSLAPFGLATYKLDAKVWASPNSGDQEHISSLFDASQSWLKEHNIHHYDFNYFAHRCSSK

SEQ ID NO: 338192 - protein, 65 aa, Zea mays
  Clone ID: MRT4577_71597C.1.pep
GRLKQKCYAMFTRYKGWAKDSKPFENMGFQHILKAPGGGLMLEYIPDERDQGFDVAFPRGHQLYR

SEQ ID NO: 338193 - protein, 171 aa, Zea mays
  Clone ID: MRT4577_71598C.1.pep
PASAPTRPPTRPDNYGLKNPITLMSHVTPVMAIATMILSLLLDPWSEFQKNSYFDSPWHVMRSCLLMLIGGSLAFFMVLTEYILISATSAITVTIAGVVKEAVTILVAVFYFHDEFTWLKGFGLFTIMVGVSLFNWYKYERFKRGQINEDDVSSPFTGDVKYIIIDDLEYQ

SEQ ID NO: 338194 - protein, 103 aa, Zea mays
  Clone ID: MRT4577_71599C.1.pep
IQEEYSKHLDLYAPNNCTPLVNFLTKRHFHLLNIQRAYARLWGINNLASVTEITKLGCIILRPHHQRTNNETTSVSSVPTSQATLLLTSLRISCRNQTRHDNV

SEQ ID NO: 338195 - protein, 77 aa, Zea mays
  unsure (1)..(77): unsure at all Xaa locations
  Clone ID: MRT4577_7159C.1.pep
STLGLNTIKLLIFVLALLSLAVMAASSTIEGCGCETQLLYLPSXYYMPPLLYLPSEXQPWSWXXPTQPPHVSACQRF

SEQ ID NO: 338196 - protein, 169 aa, Zea mays
  Clone ID: MRT4577_715C.1.pep
FFFFFLYGKTAQLLLRVRNLIRLALIRIGFYFTLFCLYKLQAKRFEQVSLTMALCWPQRSPLSIPLPLLAATTPSPWPAALPPTRRPSSLSPSIQRFTVHPLRHRLHCRHVYSLALLAVSSRVSPCRCAHLCTMHISRKARIIRIRNKGIGYICFASIEYAKQLIQNYK

SEQ ID NO: 338197 - protein, 101 aa, Zea mays
  Clone ID: MRT4577_71600C.1.pep
MATPQQPANGILYACVAEGKTIVAQHGDKDQFKKVAKVILERIPNEDIKKSYVHQSYAFNYISQKGRVFLCVTSTDFQTRVAFAYLQKIQGEYRPSGDLDF

SEQ ID NO: 338198 - protein, 129 aa, Zea mays
  Clone ID: MRT4577_71601C.1.pep
IYACFSHEQCYYYYCCCTTASMKQFSKQCYGRDEKRRQNIHRCLKTRNPRSRWFLESNTLQHQDLSSSTDQYSAYTAGCSLTQRDANWRKHSFTSNWFWNMSSKQTHPSSLLTYKKNSKYTVAITQNDE

SEQ ID NO: 338199 - protein, 197 aa, Zea mays
  unsure (1)..(197): unsure at all Xaa locations
  Clone ID: MRT4577_71602C.1.pep
WHPGARASSLLGRLXSSIIAIEIXLNGHKSVIXRCXRSRMSMSPQPANYETTSLSFLRKRMNTTSTHGPIHFXAPPIVLXRTIXAMIPHWTKRVYAALARLMTYEGVPPPYYKTKRMVIPDSLKVLMLAPVHKYCLLXELSKEDRWNYHDTIMELEENMSYNAXVAYEXKKLLCKLRDQVDXTAEDEYPPHLEILAP

SEQ ID NO: 338200 - protein, 115 aa, Zea mays
  Clone ID: MRT4577_71603C.1.pep
NKKKKKKKKKKKKKKKKEKKKGKKKYWGRRSNKYQLSSSCTPKLYLFFRVTQIHFSGRPFINPFSWKTPAFPNLMPLENIPLFPGGPLSKRPLPFVLSNISPICLFNGTPPFSSL

SEQ ID NO: 338201 - protein, 96 aa, Zea mays
  unsure (1)..(96): unsure at all Xaa locations
  Clone ID: MRT4577_71604C.1.pep
NTGASTESYEDFLRCLPKTDCRYALNEFDFVTGXETVQKSNIWMIVWFTSTSAILATMMNCTSRDRNSHHLDRFYDEIHSTGQFEVDIEVILDRAH

SEQ ID NO: 338202 - protein, 144 aa, Zea mays
  unsure (1)..(144): unsure at all Xaa locations
  Clone ID: MRT4577_71605C.1.pep
KPILRIFFFTVWPLPPAAKAPNSAFCGPLFKPLGGGLHRPKWENLFVTHLIHFGGHACYSWGPNSXRAXTDHPSLHLCRLNGEWXTPCFGPFNPPSERVTXPVFGAFFRALSPCPSRIFPFFVANFIRFPRGALTRLLLCGPPF

SEQ ID NO: 338203 - protein, 186 aa, Zea mays
  Clone ID: MRT4577_71606C.1.pep
GPFFFFFFFFFFFFFFFFFFFFFFKWKKNDTDQTREEKKKRVKNLMAQQYRTKQKQNPTRNTGGKKQGGKKKRGGKKRGNKMKNNPAPTITPPNRCRPPPLQPPPPLGPPTEPKGTTMKKKGGNPFRSFPLEQGGSTPWNHHPPEGPASLRKKNRSGPPRGPKKNIFNQKDGAPENCAYLSNLPSG

SEQ ID NO: 338204 - protein, 161 aa, Zea mays
  Clone ID: MRT4577_71607C.1.pep
EPCREQQAPSPSMAAVPELLSLFLVPSTAVVLLSHGEPLESIASCASCSTQHRFSTSTTRCPLFSSVELAVERKLEPAVGPMVIPGQYCSPLVVRAPVVAGTSVAAHSHPSHGTCLCSCTSPCSRPDCWGSQGGLKPYAVTGPTSSRPPRPRHGTRPRRRP

SEQ ID NO: 338205 - protein, 86 aa, Zea mays
  unsure (1)..(86): unsure at all Xaa locations
  Clone ID: MRT4577_71608C.1.pep
RAYFRLPALLCLAVVAVVVTADAGAFVREGGLLLPRDATFPAAQAERLILALNLLPKEKEAAPAAGGCYGPSVVPGELLXRRVRLP

SEQ ID NO: 338206 - protein, 66 aa, Zea mays
  Clone ID: MRT4577_71609C.1.pep
PTTQILPQAAPISSSSTNKPSGNRAPLDHEIEKVATNRFSREQARATAPKLTENPQNLNPNKDLHK

SEQ ID NO: 338207 - protein, 79 aa, Zea mays
  Clone ID: MRT4577_7160C.1.pep
PMLRLRVPPIKSYRLHDMNVLYIILHHCEKKYPRIATLTFHSNYQHLYMDDDHVLDFTLGLFLGVSSGKANAINAPLQP

SEQ ID NO: 338208 - protein, 155 aa, Zea mays
  Clone ID: MRT4577_71610C.1.pep
VVVFFFFFFFCFFFFFFFFFYAGGLHGSYISVRQGQIIGGLFFLFMGAHWGGGGLQLDLGGSKKRGLLSNWRELGCIFPAGKYNILPKLGTLGGFLPTPGVVWGPRGRRAMHIRAHFFWLFPRPQGLEVPFFSSKGEQGAKREGAHVQKGRLAMP

SEQ ID NO: 338209 - protein, 45 aa, Zea mays
  Clone ID: MRT4577_71611C.1.pep
WSFQLSLLEQKEKIYIDISVPYLTPKSMATIALIYHLYMYVVSLN

SEQ ID NO: 338210 - protein, 58 aa, Zea mays
  Clone ID: MRT4577_71612C.1.pep
PRAFRAPRGASQETCNRLRRGPESRRKQEGLEGFRRRYHAGDGIVVSVAERSPGARVA

SEQ ID NO: 338211 - protein, 154 aa, Zea mays
  Clone ID: MRT4577_71613C.1.pep
MGAGTTAGATSRLAVVPLLLLPLLLARGAEAVSLWRPPPEAGLLGSAPGRFLTQEEHWMSQTLDHFSPTDHRQFKQRYYEFLDYHRAPNGPVFLNICGEASCTGISNNYLAVMAKKFGAALVSPEHRYYGKSSPFEDLTTENLRFLSSKQALSD

SEQ ID NO: 338212 - protein, 46 aa, Zea mays
  Clone ID: MRT4577_71614C.1.pep
SHHSTCGAETSPSAGPRSRRSRGIRIGTLWNTAVITDVQEACAYDG

SEQ ID NO: 338213 - protein, 104 aa, Zea mays
  Clone ID: MRT4577_71615C.1.pep
SCRSQSSPCIVITAPPNTKSKSTEMDTTQQLNKYVQPQLQLWVEQISPFLSKAQSLAAEGRGGCLVAAHLADPAAAERRDAEKPKTRHTVAVGRQFLIPEVIFL

SEQ ID NO: 338214 - protein, 174 aa, Zea mays
  Clone ID: MRT4577_71616C.1.pep
RHAFHYNSIIAERACSSSSNSSEETIEDGSEQQQQAAAAGAAATTRGSDRSIDRYLRILRVDGHWTDRRTHIADMACLQATRRQARSSREAAAGSRDAGGRRPRAGRRASSKDGKLPITNLMILQSSVGPPVSLSSSATKKITSGIKNCYCVACFWFFSIAALCCCWICEMCCD

SEQ ID NO: 338215 - protein, 168 aa, Zea mays
  Clone ID: MRT4577_71617C.1.pep
MEACCCSSSSAPSASILAAAPDVALRRRIPAAAGGRTPARPLRVSAVMLATAVPRRRGPGVIRAVFERFTERAVKAVVFSQREARGMGDDTVAPHHLLLGLIAEDRTLVGFLGSGLRVERAREACRDALGKAGPAQAATGLATDVPFSAASKRVFEAAVEFSRNIGCN

SEQ ID NO: 338216 - protein, 593 aa, Zea mays
  Clone ID: MRT4577_71618C.1.pep
MAFWWPLLVLAAAYALCRLLLFLIPPTVPSIDVDASDVLAKEDSFIYIPRRGKSTQTDKVQCYEPATMKYLGYFPVVTPDEVKEHVAQSRKAQRIWAKSSFKQRRQFLRILLKYILEHQDLICEVSSRDTGKTMVDASLGEIMTTCEKITWLLDEGEKWLKPEYRSTGRSMLHKRAKVEFYPLGVIGAIVSWNYPFHNVFNPVLAAVFSGNAAVIKVSEHATWSGCFYFRIIQAALSAVGAPENLVHIITGFAETGQALVSSVDKIIFVGSPGVGKMIMKRASETLIPVTLELGGKDSFIVCEDVDLPSVVQVATRAALQSSGQNCAGAERFYVHDDIYSAFVSQIVKTVKSISVGPPLSGRYDMGAICMIEHSEKLQNLVNDALDKGAEIAVRGSFGNLGEDAVDQFFPPTVLVNVDHTMKIMQEETFGPIIPIMKFSSDEEAIKLANDSKYGLGCAVFSGNQKRAIRIASQLHCGVAAINDFASSYMCQSLPFGGVKDSGFGRFAGVEGLRACCLVKSVVEDRLWPYIRTVIPKPIQYPVSEHGFEFQQLLVETLYGYSVWDRLRSLVNLIKMVTEQNFAPTSNATTKKRR

SEQ ID NO: 338217 - protein, 594 aa, Zea mays
  unsure (1)..(594): unsure at all Xaa locations
  Clone ID: MRT4577_71619C.1.pep
MAFWWPLLVLAAAYALCRLLLFLIPPTVPSIDVDASDVLAKEDSFIYIPRRGKSTQTDKVQCYEPATMKYLGYFPVVTPDEVKEHVAQSRKAQRIWAKSSFKQRRQFLRIVLKYILEHQDLICEVSSRDTGKTMVDASLGEIMTTCEKITWLLDEGEKWLKPEYRSTGRSMLHKRAKVEFYPLGVIGAIVSWNYPFHNVFNPVLAAVFSGNAAVIKVSEHATWSGCFYFRIIQAALSAVGAXPENLVHIITGFAETGQALVSSVDKIIFVGSPGVGKMIMKRASETLIPVTLELGGKDSFIVCEDVDLPSVVQVATRAALQSSGQNCAGAERFYVHDDIYSAFVSQIVKTVKSISVGPPLSGRYDMGAICMIEHSEKLQNLVNDALDRGAEIAVRGSFGNLGEDAVDQFFPPTVLVNVDHTMKIMQEETFGPIIPIMKFSSDEEAIKLANDSKYGLGCAVFSGNQKRAIRIASQLHCGVAAINDFASSYMCQSLPFGGVKDSGFGRFAGVEGLRACCLVKSVVEDRLWPYIRTVIPKPIQYPVSEHGFEFQQLLVETLYGYSVWDRLRSLVNLIKMVTEQNSAPASNATTKKRR

SEQ ID NO: 338218 - protein, 64 aa, Zea mays
  Clone ID: MRT4577_7161C.1.pep
WLTSSPLLNSLISSFSCSYLFFTFRPFVRNPKPRLQLVHTSRSDNNRVQTPNNNTHTSIHSPPS

SEQ ID NO: 338219 - protein, 568 aa, Zea mays
  Clone ID: MRT4577_71620C.1.pep
MTSCSGNATVACRDDAQPHGDAPCVIVYPLLAKTGEVHIPVAGDEAPAVPVLTSKSPGRLATAVKEALSVSLGAAFPMTPLVSSSDAHAEARSILGLALPMILTGLLLYLRSMISMLFLGRLGGLALAGGSLAIGFANITGYSVLSGLAMGMEPICGQAFGAGNFSLLGITMQRTVLLLIAAAVPIGGLWMHMRPLLLLCGQDAGIAAVAETYILASLPDLLLQAFLHPVRIYLRTQSINLPLTLCATLAIAIHLPINYVLVTVLGLGIRGVAFASVLANLNLLLFLVAYILFKSVHKRTGGFLLSRESFRGWGELVSLALPSCVSVCLEWWWYEIMILLCGLLANPQATVACMGILIQTTSLIYIFPSSLSFGVSTRVSNELGANRPEEASRAAAVGLMLGFAFGGLASAFAFLVRNVWASMFTADPAIIALTASVLPILGLCELGNCPQTTGCGVLRGSARPKDAASINLRSFYLVGTPVALVLAFWLHYDFKGLWLGLLAAQATCMVRMLLVIGRTDWACEAKRSRQLTGGLVAEDSDDKAGGDEKSRLLGDTDIEQANAHSDRC

SEQ ID NO: 338220 - protein, 68 aa, Zea mays
  Clone ID: MRT4577_71621C.1.pep
IPVMQTCRHSSQHNTMHIPQGSVTEHRFMPHGLYTNTISLRLFSLYSLVCSNGASTKKNNITRKIKPC

SEQ ID NO: 338221 - protein, 88 aa, Zea mays
  unsure (1)..(88): unsure at all Xaa locations
  Clone ID: MRT4577_71622C.1.pep
TAPCAVLPKVPPGKNITATYGKDWLDAKAPWFGKPTVAGPDDIGGGCGSKDLTXPPFNIHARAGKYPYLKVGSVLGAAFRSNALSLWS

SEQ ID NO: 338222 - protein, 48 aa, Zea mays
  Clone ID: MRT4577_71623C.1.pep
SCREHSYTELVLKVEVGRRTIVIMCSKLGRETEVLASLNPAPTMEKPL

SEQ ID NO: 338223 - protein, 47 aa, Zea mays
  Clone ID: MRT4577_71624C.1.pep
FTVLMFVSTYCCAFSPRGEYILILIWLHGKWAWSGLTFRISSTRGSF

SEQ ID NO: 338224 - protein, 87 aa, Zea mays
  Clone ID: MRT4577_71625C.1.pep
MEKKVMKTRLAVAAVVLLFGLLLAVREAAAAEEAAEAAPTTPGNSKADCEVPGTCDRNLNQAADPKRPGAAANPYTRGCSKITGCRG

SEQ ID NO: 338225 - protein, 115 aa, Zea mays
  Clone ID: MRT4577_71626C.1.pep
LLLEVVCLASLSRWLPAVSDLPKDKERAMGSEDARMTAGLGKLTDAVPSPAVVWVRGVQKPLRGRPGRQGASCRAPTAATSYLMLLAARADRARSETEIPGWSYRCHSRLGLDAL

SEQ ID NO: 338226 - protein, 73 aa, Zea mays
  Clone ID: MRT4577_71627C.1.pep
RPGRPSILRLSRMILPCTGSFKKSLRPIIRRFHPKFFMSCLHYRAVGANSGLGSDGSDIGFVLKTANNQNLLT

SEQ ID NO: 338227 - protein, 101 aa, Zea mays
  Clone ID: MRT4577_71628C.1.pep
VVVAHNQRGIPNVLGHNPGKCLLVQYPSSNLVLDRGLTLARFLSWGLYNTAQPPRLRDCPICPRKGRICTHVAGQSPPPRLQPPPMLPPSSPDWVLVKRKT

SEQ ID NO: 338228 - protein, 60 aa, Zea mays
  Clone ID: MRT4577_71629C.1.pep
WSFGPCRRLVEWNNILKFRLLEGALQMMLPAKRFIGPISSAVNVPDYKVTMAYNASCSDT

SEQ ID NO: 338229 - protein, 150 aa, Zea mays
  Clone ID: MRT4577_7162C.1.pep
MAEAIVGSMLWKLQQVAVSEARTLVAVNEDIRSLRDKLMWMQAFLHDVQPSRRVQPNELIKVWLQQTRDAVFDAEDAVDQYFVQIDLSRFPSWSRAILGFFASFTTQVVVRRDLSSRIRLINGRLEGIIANKDRYRLGRVYYAGSNLEAI

SEQ ID NO: 338230 - protein, 84 aa, Zea mays
  Clone ID: MRT4577_71630C.1.pep
NGFQKVGEESKKGGPPPLYKKNPVGSSNYEAPCTNLGHGGPCLFSGTEGSTFARKLDPGFSFFKLNPAQAAAGLFGPFKCFRPG

SEQ ID NO: 338231 - protein, 120 aa, Zea mays
  unsure (1)..(120): unsure at all Xaa locations
  Clone ID: MRT4577_71631C.1.pep
FSPNPTPVRGVFFPAHPPCLKKTPPPDRFFXPEKKPRPKPPPGGPGXLIIPRSPLPPPDXPTPGQMCKFPAFRHLKGPPPPPPPXPELPPPEVRRPFSPNPALKSVGPEHPPLGLFNMGS

SEQ ID NO: 338232 - protein, 77 aa, Zea mays
  Clone ID: MRT4577_71632C.1.pep
RGEPAGQFFLGEPVGFFFFLPGRILYLGGDNFEGFLGTINWTKTILGLKMGKTSWKTLIQGGGPLFFFLGFFLRARG

SEQ ID NO: 338233 - protein, 119 aa, Zea mays
  Clone ID: MRT4577_71633C.1.pep
LQIWDTGGQERFRTITSSFYQGANGVIVMYDITNQETWASVQKWVQEADRYAPDAAKLLIGNKVDLASERQVQADEANEYCESLDIPYIETSAKDGTNIEAAFLKMAEVIRVNAEASAS

SEQ ID NO: 338234 - protein, 108 aa, Zea mays
  unsure (1)..(108): unsure at all Xaa locations
  Clone ID: MRT4577_71634C.1.pep
MLTAVATTILTVVALRAPFASETHASISPDCSLAPISISLHFIPSFTSVAIEEPPVHPYTVQEAIAASVIVQAVAELQVXALRHLIVNAIAMHXVHEYRPALNHLTMV

SEQ ID NO: 338235 - protein, 30 aa, Zea mays
  Clone ID: MRT4577_71635C.1.pep
FLIQDTWYVYGLLPRFIVSQLYPLLPSGSC

SEQ ID NO: 338236 - protein, 61 aa, Zea mays
  Clone ID: MRT4577_71636C.1.pep
MEEERLWKFRKPEWLNSMWARNAGVYGAGALFSIAFYVMLDSAVWSKSAKNGSNVHVKFVD

SEQ ID NO: 338237 - protein, 43 aa, Zea mays
  Clone ID: MRT4577_71637C.1.pep
PNYISQKHLEPKKNYNSTNTTRLIPSNKQTKKPSSRHFLLNKT

SEQ ID NO: 338238 - protein, 118 aa, Zea mays
  Clone ID: MRT4577_71638C.1.pep
ASVAKSCNIGCSLSFGSSNLCGTLVSTYASGSEGTVLNEPIVLRKEYSRILLEFEAGSFKKYQLPRINGSYILQCPSRSFTCTMGNCGCLQGGKVSIDAQDRLWSFAITIGGNINIKG

SEQ ID NO: 338239 - protein, 76 aa, Zea mays
  Clone ID: MRT4577_71639C.1.pep
FFFFFFYFFFDLNWAFFFFYYLFKYFFFFIYTNKCFIKLSNIIYKLFSFRTKRNKKNAGANSKKIRKLTDYTRSTK

SEQ ID NO: 338240 - protein, 87 aa, Zea mays
  Clone ID: MRT4577_7163C.1.pep
AGRFNKESFLVSGIFYMFICRYKLRSNRCNIHKNLFLSPSIVYGQHDRHRSLPEGLYGGARMRACRTFLAERVGFRSNTGPGLWCRR

SEQ ID NO: 338241 - protein, 147 aa, Zea mays
  Clone ID: MRT4577_71640C.1.pep
MESSDDGGSGPAAGSPGPPSAPAAVGGASSAPGASGSGGKPPVKRVMKTPYQLEVLERTYAEDSYPNETKRAELSVQLNLTDRQLQMWFCHRRLKDRKPPAKRQLRDEEVSVPVIGPPPPVLPPPLPPSEMMVGTVGTYGEQLLPVF

SEQ ID NO: 338242 - protein, 51 aa, Zea mays
  Clone ID: MRT4577_71641C.1.pep
AFMSGVSTKFVICCSVITAAAFSGGRWVAAIFCVLSGQCFIWCDRLMHYVC

SEQ ID NO: 338243 - protein, 124 aa, Zea mays
  unsure (1)..(124): unsure at all Xaa locations
  Clone ID: MRT4577_71642C.1.pep
RLYTSPLEGPPQFPGLGTTGASSAQRELAXFFGRLPETTGXWVLFXGGPXAWGWGGGRNRNRRTHPTRGXGPIQLTHKYNYRLAGQALNLNLVGDPDLVVRDPVGALMSAIWFWMTPLLFKPLC

SEQ ID NO: 338244 - protein, 98 aa, Zea mays
  Clone ID: MRT4577_71643C.1.pep
KTLPAMGCPLEGGGGDFHKEKRTTPHTPPHLGGPIQPKGNGGDGGGTIWGHTRGQGLFFMVFPPFPFFLLRPWADGKMGGGPRGFLIDVEGQRVGGPL

SEQ ID NO: 338245 - protein, 89 aa, Zea mays
  Clone ID: MRT4577_71644C.1.pep
RAFTPFLIRVRYRRSTMPLLLLRTLIRTAPLPCRDKNPTESTLRSTYDDLHVGTTSAEKRLRIAQCLENLHRRSSYLPESTIGTSPIPT

SEQ ID NO: 338246 - protein, 112 aa, Zea mays
  Clone ID: MRT4577_71645C.1.pep
CTGHVTIHCLVHRTGHYSLSCAPDTATIHCPVHRTLLLFTVLCTGRCDYSLSCAPDTVTIHCPVHRTGHYSLSCAPDSYYSLSCAPANSTLSAFSFVLSPFDFNFWEDFPET

SEQ ID NO: 338247 - protein, 85 aa, Zea mays
  Clone ID: MRT4577_71646C.1.pep
PARNLCLKKTRRALIPLAGIFGGAATGQFFSQEKLKQPLYSKRVLPGRLNLQQGEREETYLIRGGPRHHNSQENLLALGGPLGTI

SEQ ID NO: 338248 - protein, 98 aa, Zea mays
  Clone ID: MRT4577_71647C.1.pep
IVTCPVHRTVNSNLSGAPTASYSREGNCQSDPLLFTVRCATGQSGAPATREGWELPNEAPTAPRPFGAIKGTPRRLKQEHKCSQQLYTSLESILSLLV

SEQ ID NO: 338249 - protein, 113 aa, Zea mays
  Clone ID: MRT4577_71649C.1.pep
IDEGHYKDIRNNGSQEFLAPCPTGVSRTTCSLYFHSPMLTQYPSTSTDGGFQYPKTQGYNAPESIRESILRSFPLNLRHSQRSIALLILRPLVYSLNQRHNDSKTTTTQPSIT

SEQ ID NO: 338250 - protein, 92 aa, Zea mays
  Clone ID: MRT4577_7164C.1.pep
APKLGGLGLKKIPSGGFGMTPRRKKTPTPRGAGGGETWNCRKKGGVPKGDFFYKICLFANWFKCRRTSLPNPWTFPWGFCKRPWFCCRIHLA

SEQ ID NO: 338251 - protein, 99 aa, Zea mays
  Clone ID: MRT4577_71650C.1.pep
SCLDPSHHCLPSCRRNLIRGTVNNLRKRMISLILRAPVSPYVPCPHFLPLFYPHRLLCAIKCVATKPFAVEDYLVCTCGLTQAQALKASKHDSHLKDTS

SEQ ID NO: 338252 - protein, 73 aa, Zea mays
  Clone ID: MRT4577_71651C.1.pep
TQIYFTFFLVRECTYFFSVHVPSAITYSRILQHLLISFEKKTYSRTNFLYHRKLTANLGRIITYQWPNCKTLL

SEQ ID NO: 338253 - protein, 42 aa, Zea mays
  Clone ID: MRT4577_71652C.1.pep
PGQIHHMSHLHGEARLRAMQLLTLIMKPDRVGARALRDPARA

SEQ ID NO: 338254 - protein, 101 aa, Zea mays
  Clone ID: MRT4577_71653C.1.pep
CNAVIRAPLTSSHFLARDGDIHRTQDRSESPYGASPPPEELQRQSLRSRPLQGTMGPSGYSACLIFFGAPSLVTSVYNGEASRVGLGTRMFSVAYLDGASL

SEQ ID NO: 338255 - protein, 136 aa, Zea mays
  Clone ID: MRT4577_71654C.1.pep
PRVVTASGIVPDLDVDAASASASASAADQSSHAPRERVIIVANQLPVRASRRDGGANGGGWDFAWDQDSLLLQVKDSLRDDVPPAEHDQVAHDLLEGFRCVPTFLPADLRSRFYHGFCKQQLWPLFHYMLPLSPEL

SEQ ID NO: 338256 - protein, 91 aa, Zea mays
  Clone ID: MRT4577_71655C.1.pep
QMLPLDLARQKGRGARRRAPHSPDQERSRIGRGRAPPRSRDQRAAGGSGTRGGEATDQWIRGSRQRTGRRPRTRGSTIEDPSLRRRAGDVL

SEQ ID NO: 338257 - protein, 50 aa, Zea mays
  Clone ID: MRT4577_71656C.1.pep
LSLRAREILCRWIHVRGRFCVDCSLDDRLCRRGCIESNNLKPPLCCSHWH

SEQ ID NO: 338258 - protein, 39 aa, Zea mays
  Clone ID: MRT4577_71657C.1.pep
LRAWFLRPIIDIDAINNRLNTVSLFTFSILDAQLATRHH

SEQ ID NO: 338259 - protein, 93 aa, Zea mays
  Clone ID: MRT4577_71658C.1.pep
FGTRLYRRSIVVLPRCNRERYVRRQCPPPPPSSQICRPPPPSLPSVCCPPPSSSVARLGGCLQDLVHGLLQDPVQGRLLQDPNPNASESGGST

SEQ ID NO: 338260 - protein, 203 aa, Zea mays
  unsure (1)..(203): unsure at all Xaa locations
  Clone ID: MRT4577_71659C.1.pep
NGEVFGXXTDRGRGGTXKXXTGREKXAKXXXXXXSKDGEXHXXKXXXXGPXAXXEXTXDXXKAGXGDXXXDGNRGXRGXNAXGRDXXTXXGEXXKXKXRXXNXKRHRTRXXXNXDENXAXXEEXGXEGXXDEANXSXXXXKXAAXXNTXDXXXGXXGXGXTNRXXXPQNATPXQKXPXGGXEGXXRTDXGNPAEPXGPHHKQD

SEQ ID NO: 338261 - protein, 63 aa, Zea mays
  Clone ID: MRT4577_7165C.1.pep
RALRGEPMQWRYMGGTGSGWSRRCLNRPVERATQGPNVFLPQLILRGRHGGKEQLHLFMMLPV

SEQ ID NO: 338262 - protein, 61 aa, Zea mays
  Clone ID: MRT4577_71660C.1.pep
IWSPLTPMIMNATGPDRKDDILTIVDYDREAKKEHSIPSGARGPLPMDFMKIQIWAMLELL

SEQ ID NO: 338263 - protein, 45 aa, Zea mays
  Clone ID: MRT4577_71661C.1.pep
IDNLTLKLAWAMRQPDRGTGIECGTGSPQGRTVQLDACKCPSACV

SEQ ID NO: 338264 - protein, 85 aa, Zea mays
  Clone ID: MRT4577_71662C.1.pep
EIEDLYVNEINKLTDFSQATNSELVWKHFRKMIEHVLSDNHFYYLLNEYDWRVLASFGSLTIASQQLLVRLLSRKNRWLHRRSIQ

SEQ ID NO: 338265 - protein, 89 aa, Zea mays
  Clone ID: MRT4577_71663C.1.pep
PSTSIQSLESRIYDFLFSLLLLGCVLQNTKRKIRFKFSAFLICILGGQLKPKDARENGKGRRALKKLHRLFNTGRLVCPHALYLKSHCF

SEQ ID NO: 338266 - protein, 115 aa, Zea mays
  Clone ID: MRT4577_71664C.1.pep
RYLGIGGRSHHLELLRPSAASVHPSCPRPIAIRSFRWRKLHRADVVRRLVRRFAIHGVSREHIQGGCGVSHNTSFRRIGRRQSKEEIVSTSGRRGQRRQPQPTRGLCSRGRVGPA

SEQ ID NO: 338267 - protein, 143 aa, Zea mays
  Clone ID: MRT4577_71665C.1.pep
MSIEERKISVISKSIALNPNAGELVPSSLRSVNDSSKRSYATTVVSGISKESSTDKPESILRSNSDEEAHQYWQQQLPDDITPDFKVMGQDESPGPDSLSLTDLSINDGIGTSIFSPPQTLRMHNRSPTPGYDNIKRPPPQQG

SEQ ID NO: 338268 - protein, 116 aa, Zea mays
  Clone ID: MRT4577_71666C.1.pep
SIIYSLEHEGVLAETLVLSCCCCVGDELVVTRPGAGTKSKRVARMAVLSARPRRRAISTPCSPASCFRWLGLASFALFFFCCLLWPAGLGVGGDLLGAPPGVRFVALVQRTDYSLV

SEQ ID NO: 338269 - protein, 118 aa, Zea mays
  Clone ID: MRT4577_71667C.1.pep
PVCVVLGRCGFWLAGGFLGSALGCAGLVGRCCSGRLGGVPRSSLLARGLRARCRACVFWVPLLRCGLGCRRARCGRGCPPSSSSSPRGLPRAGPSAVCRVWRAVAPVVGLGPSGSVGL

SEQ ID NO: 338270 - protein, 44 aa, Zea mays
  Clone ID: MRT4577_71668C.1.pep
KKKTHFLKDILSVVTWHWAPVSGTVAETACCGSASSLHSLAGVW

SEQ ID NO: 338271 - protein, 80 aa, Zea mays
  Clone ID: MRT4577_71669C.1.pep
CHSLVTSALAVYAYGLYVVRFCEVDIRFSASRPPGVMYLIAVYSTETSYMSFVCLLVRQRMATAFLGCRVRVSRLVVRSR

SEQ ID NO: 338272 - protein, 53 aa, Zea mays
  Clone ID: MRT4577_7166C.1.pep
RRKFFNILPKRHASGQPNCLFKFVYPGPFFYLFRAFGFSCLLNDVLIDLTVLL

SEQ ID NO: 338273 - protein, 113 aa, Zea mays
  unsure (1)..(113): unsure at all Xaa locations
  Clone ID: MRT4577_71670C.1.pep
KRENDAFFWGGHQLPSKKFFFANPKKKKLKGGNQKGGLNRGGYLLFKKLLPXSQKVGENREGLWAQQQLLAXNQQFGGNPKNILQLQQLGAFGQLALTDQKNCCQQHIIGGAL

SEQ ID NO: 338274 - protein, 138 aa, Zea mays
  Clone ID: MRT4577_71671C.1.pep
NSCAMAFYPIPSPFLSRRFPEREKGCPSARNLAAPPRAHDCVLLGEIKGARVCRRGSLSTSVVCGGRKSTRLLGISRRRSFPSRRRGQPCAHRLLCNEVTSHLKTNLVPGISSLRQVVPLITFLYPIMFMLITVTCSG

SEQ ID NO: 338275 - protein, 243 aa, Zea mays
  Clone ID: MRT4577_71672C.1.pep
MLSFSRSAILSYLLWCLLFLTLASSNGAVATAKPKAGCGYKLVSLVQLPNGGGLVGYLQVKQRTSTYGPDIPRLRLFVKHETRERVRVQITDADKQRWEVPYNLLPREPAPPVTGGKVTGAPVTGAEYPGEELVFTYGRDPFWFAVHRRSTRQPLFNTSAGALVFKDQYLEVSTALPKNAALYGLGENTQPGGIRLRPNDPYTIYTTDISAINLNTDLYGSHPVYMDLRSLGGRGVAHAVLLL

SEQ ID NO: 338276 - protein, 59 aa, Zea mays
  Clone ID: MRT4577_71673C.1.pep
PRQHRIELGVENTLADELLLRADLGRHGCTDVVWGSSLRRRRRAGESSRVLIDWVVRGA

SEQ ID NO: 338277 - protein, 368 aa, Zea mays
  unsure (1)..(368): unsure at all Xaa locations
  Clone ID: MRT4577_71674C.1.pep
TFVVFVPDVFQIKYFIRLCWDAHKSSFQEARHSDLWSKYKFICSCRRCIASPEPYTDLILNCDVRDLDKAEAEGTVTPPAIENLGDVLQQAISEYTSNDDPEACCNMIETMLSNRFLSGLKQEDISGRKHILQPLHHICLTAYMTLASAYRFRALSLEEAVRSDGENTDDFFRMAKAAAAYSLVLAGSAHHLFLSECSLMIPLSHFLLNTGQSLLYLAESIKGKTRQNISEARLSFSSCPASSTDNDXHRTMCSDQPVKRLASXMLSLSLRCWSFLVRGLPCLEKIKSPMEFSMPGTTIFQSVLSEEDHANLSAHEPVGFTERQAGCILSLALCCITYCKYLATICYGPHHYLADHAKYLLEGIDPAQ

SEQ ID NO: 338278 - protein, 75 aa, Zea mays
  Clone ID: MRT4577_71675C.1.pep
VRSQLSQPLASWLPLRFQSGEEVPVMYPTCGLPRCGITGEQRSGRVVEERGEEKSSRRRSLPEQRAAAAASVKSL

SEQ ID NO: 338279 - protein, 126 aa, Zea mays
  unsure (1)..(126): unsure at all Xaa locations
  Clone ID: MRT4577_71676C.1.pep
MSLATAKDVVGRKIFVVFYMTSDGSDIEHINAQNDGHTDSAHDRHGAPVEGKITHHRVKLQHDVNRHDKALCTHYINVADSIHAYMYEDLLXIVSLQYQTIHIRQILDTCNLVEVHNIGACWREDD

SEQ ID NO: 338280 - protein, 42 aa, Zea mays
  Clone ID: MRT4577_71677C.1.pep
VRKRGTFRGGAPSIWRNDPPGSIFRVGYVQLGKYEFCVWPNQ

SEQ ID NO: 338281 - protein, 55 aa, Zea mays
  unsure (1)..(55): unsure at all Xaa locations
  Clone ID: MRT4577_71678C.1.pep
DAWXKKKKKKKKKKKKKKKKKKKKKKKKKKKKRRGKKKGTNLAGRGPCVRFSVPL

SEQ ID NO: 338282 - protein, 375 aa, Zea mays
  Clone ID: MRT4577_71679C.1.pep
MITALQVSGGGLPLLFARRRRRAFRPPQAVASDAAAAAEGTAREDGGKVALGGSGVAVTKLGVGAWSWGDTTYWNEFRWDDTKLKAAKGAFDASIDCGITFFDTAEVYGAGVSGAINSESLLGRFIKERQRKEQVDVAVATKFAALPWRFGRGSVICALKASLDRLGVSSVELYQLHWPGIWGNEDYLDGLGDAVEQGLVKAVGVSNYSEKRLRDAYERLRKRGVPLASNQVNYSLIYRNPEENGVKAACDELGVTLIAYSPIAQGALTGKYTPESPPKGPRGRIYTPEFLTKLQPLINRIKEIGGSYGRTSTQVVLNWLVCQGNVVPIPGAKNAEQAREFAGALGWSLAPDEVEELRSMARQVKPVIGFPVEKL

SEQ ID NO: 338283 - protein, 50 aa, Zea mays
  Clone ID: MRT4577_7167C.1.pep
ATRCRIYVVCPFTELCTTWVEVNTSLIGIHASAVRPNLANPLSLEAPNYR

SEQ ID NO: 338284 - protein, 121 aa, Zea mays
  unsure (1)..(121): unsure at all Xaa locations
  Clone ID: MRT4577_71680C.1.pep
ESLLGRVIKERQRKEQVDVAVATKFAALPWRFGRGSVICALKASLDRLGVSSVELYQLHWXLISLFSTDFSISLSLFLCVCGLWTLSVNSWHILFRPGIWGNEDYLDGLGDAVEQGLVKAV

SEQ ID NO: 338285 - protein, 358 aa, Zea mays
  Clone ID: MRT4577_71681C.1.pep
MSRRLYQHAAVMSAWAPAAYTLVLLLHLLAGAVVTAKTNNGVDPGPRQQEPSMPVDSSGDEALSALTWMATGSEASKAAEAVVDWHKHDSKRMLHAVYRVGDLDRTIKYYTECFGMKLLRKRDVPDEKYTNAFLGFGPENTNFAVELTYNYGVDKYDIGTGFGHFAIANDDVYKLAENIKSKGGKITREPGPVKGGSTVIAFAQDPDGYMFELIQRADTPEPLCQVMLRVGDLERSIKFYEKALGMKLLRKKDVPDYKYTIAMLGYADEDKTTVLELTYNYGVTEYSKGNAYAQVAIGTNDVYKSTEAVDLATKELGGKILRQPGPLPGINTKIASFVDPDGWKVVLVDNTDFLKELH

SEQ ID NO: 338286 - protein, 175 aa, Zea mays
  Clone ID: MRT4577_71682C.1.pep
GRGSTTPPNDKLIEMMVGLSIYNQQAAVALPLSIYNQQTTAAQPRLCEVHDAAAADSFSSAFLEARRSIIDPRAYVPPPPIGQKAGPSAPSQMHPGLVRMPLPPYDRSVPDARSFAEGRLRRSISRGPRNEAAGMLSPGAIGAACGAHPGGHAYMGAAALPTQGDGRKTCSSRCP

SEQ ID NO: 338287 - protein, 226 aa, Zea mays
  unsure (1)..(226): unsure at all Xaa locations
  Clone ID: MRT4577_71683C.1.pep
MYPLLAADMNYAACHPGLRSHLIRPNNDSFSRNHLPFSSTQTTKRTRNLSFTTRSAIILRQNGVQMIXSPSKIPQRDXXPTDFTXFGDDTSLYQIERACNEDEKGXSHTGMHFSHNHPERILDRSNSNIVTESHHMXMTXVRLIDXEMLMYVYRVSISCARIQANXTNKDVLTAHGIKYYRNLIILMLENGIQSYATMFHCDAPHALEQKYYVFLDCSHMSIVEDY

SEQ ID NO: 338288 - protein, 144 aa, Zea mays
  Clone ID: MRT4577_71684C.1.pep
MVCFGMKLLRKRDVPDEKYTNAFLGFGPENTNFAVELTYNYGVDKYDIGTGFGHFAIANDDVYKLAENIKSKGGKITREPGPVKGGSTVIAFAQDPDGYMLRVGDLERSIKFYEKALGMKLLKKKDVPDYQYTIAMLGYADEDK

SEQ ID NO: 338289 - protein, 290 aa, Zea mays
  Clone ID: MRT4577_71685C.1.pep
MATGSEASKAAEAVVDWHKHDSKRMLHAVYRVGDLDRTIKYYTECFGMKLLRKRDVPDEKYTNAFLGFGPENTNFAVELTYNYGVDKYDIGTGFGHFAIANDDVYKLAENIKSKGGKITREPGPVKGGSTVIAFAQDPDGYMFELIQRADTPEPLCQVMLRVGDLERSIKFYEKALGMKLLRKKDVPDYKYTIAMLGYADEDKTTVLELTYNYGVTEYSKGNAYAQVAIGTNDVYKSAEAVDLATKELGGKILRQPGPLPGINTKIASFVDPDGWKVVLVDNTDFLKELH

SEQ ID NO: 338290 - protein, 290 aa, Zea mays
  Clone ID: MRT4577_71686C.1.pep
MATGSEASKAAETVVDWHKQDSKRMLHAVYRVGDLDRTIKYYTECFGMKLLRKRDVPDEKYTNAFLGFGPENTNFAVELTYNYGVDKYDIGTGFGHFAIANDDVYKLAENIKSKGGKITREPGPVKGGSTVIAFAQDPDGYMFELIQRADTPEPLCQVMLRVGDLERSIKFYEKALGMKLLRKKDVPDYKYTIAMLGYADEDKTTVLELTYNYGVTEYSKGNAYAQVAIGTNDVYKSAEAVDLATKELGGKILRQPGPLPGINTKIASFVDPDGWKVVLVDNTDFLKELQ

SEQ ID NO: 338291 - protein, 290 aa, Zea mays
  Clone ID: MRT4577_71687C.1.pep
MATGSEASKAAEAVVDWHKQDSKRMLHAVYRVGDLDRTIKYYTECFGMKLLRKRDVPDEKYTNAFLGFGPENTNFAVELTYNYGVDKYDIGTGFGHFAIANDDVYKLAENIKSKGGKITREPGPVKGGSTVIAFAQDPDGYMFELIQRADTPEPLCQVMLRVGDLERSIKFYEKALGMKLLRKKDVPDYKYTIAMLGYADEDKTTVLELTYNYGVTEYSKGNAYAQVAIGTNDVYKSAEAVDLATKELGGKILRQPGPLPGINTKIASFVDPDGWKVVLVDNTDFLKELH

SEQ ID NO: 338292 - protein, 315 aa, Zea mays
  Clone ID: MRT4577_71688C.1.pep
MTCLFMGGAFVSTPHRRKEARRPEGMATGSEASKAAEAVVDWHKHDSKRMLHAVYRVGDLDRTIKYYTECFGMKLLRKRDVPDEKYTNAFLGFGPENTNFAVELTYNYGVDKYDIGTGFGHFAIANDDVYKLAENIKSKGGKITREPGPVKGGSTVIAFAQDPDGYMFELIQRADTPEPLCQVMLRVGDLERSIKFYEKALGMKLLRKKDVPDYKYTIAMLGYADEDKTTVLELTYNYGVTEYSKGNAYAQVAIGTNDVYKSAEAVDLATKELGGKILRQPGPLPGINTKIASFVDPDGWKVVLVDNTDFLKELH

SEQ ID NO: 338293 - protein, 188 aa, Zea mays
  Clone ID: MRT4577_71689C.1.pep
MSEYEGGRPQHDGIIRYGDHVSLKHVATNRYLTSRPGSYDGGSYQQKIFTVECSPEEESTWIVLPPAETEEEPGYEVGWDDPVRLKHVPTRVNLHTHGIQSPVSGQQEVSGFGDDETSDENDVWKVQQYNEDDEQYDDFWRVGQPFVLRHVETDRLLHSHEMLLEEGANEVTGYEENDENSMWVVTFD

SEQ ID NO: 338294 - protein, 83 aa, Zea mays
  unsure (1)..(83): unsure at all Xaa locations
  Clone ID: MRT4577_71690C.1.pep
PNEHAMLIPLYASAMLISLRLPWTSLXKNXAKAALTGYFLMLGVVALSTPLLSCIRRGIPKDRSDHLIARRARSLHSISCELR

SEQ ID NO: 338295 - protein, 72 aa, Zea mays
  Clone ID: MRT4577_71691C.1.pep
LLAFRGVVLMVNLSNKLVTTCGLQQLFCLSECLYYTCAIIHMHPIRSVTGALYHILSLDTHNARTINSNPMS

SEQ ID NO: 338296 - protein, 546 aa, Zea mays
  Clone ID: MRT4577_71692C.1.pep
MGLGLGALLKSGGLSVSDHDAIVSINIFIALLCSCIVIGHLLEGNRWVNESITALVMGLITGGVILLVTNGTNSRILVFSEDLFFIYLLPPIIFNAGFQVKKKQFFRNFITIILFGAIGTLISFVIISLGAMGLFKKLDVGPLELGDYLAIGAIFSATDSVCTLQVLNQDETPLLYSLVFGEGVVNDATSVVLFNAIENLDIDNFDAIVLLNFVGKFLYLFFTSTILGVATGLLSAYIIKKLCFARHSTDREVSIMILMAYLSYMISMLLDLSGILTVFFCGIVMSHYTWHNVTESSRVTTKHTFATLSFIAEIFLFLYVGMDALDIEKWKLASSSPKKPIALSAIILGLVMVGRAAFVFPLSFLSNLSKKEARPKISFKQQVIIWWAGLMRGAVSIALAYNKFTASGHTEVRVNAIMITSTVIVVLFSTMVFGLLTKPLLSLLIPPRTGLNTSSLLSSQSMLDPLLTSMMGSDFDVGQINSPQYNLQFILTAPARSVHRLWRKFDDRFMRPVFGGRGFVPFVPGSPVERSVPESHLGTVTEAEGS

SEQ ID NO: 338297 - protein, 46 aa, Zea mays
  Clone ID: MRT4577_71693C.1.pep
YWTATGWIIQYTCSPSSICPFLNLKSASRQKTVMMITRSQQTIEKE

SEQ ID NO: 338298 - protein, 70 aa, Zea mays
  Clone ID: MRT4577_71694C.1.pep
HPGLSQLNSLPAQAIFVSIHNRQGGRSYRLYQPRYILNGQRHPLCSPTLKAVGGLTTHSVIDAPLIALAP

SEQ ID NO: 338299 - protein, 119 aa, Zea mays
  Clone ID: MRT4577_71695C.1.pep
LLFNLYTISLVYMPSVYKLEARIFTVFFSKKSKQYNKSRKILLDSNHKKATIMQANKWYITKKIQSFVTLKRRNFQSNTYFLKAAIMLVVMICFHCILMLCWWSHHSSYGFFLEGDLDR

SEQ ID NO: 338300 - protein, 516 aa, Zea mays
  unsure (1)..(516): unsure at all Xaa locations
  Clone ID: MRT4577_71696C.1.pep
MPHFVVGIAAALLLLQQLMASSSSYPSSAVLADSVLGRKAGIVVDEASARESSPPGAGTGRYAVIFDAGSTGTRVHVFRFDRKLELLEIGDDGIEVFAKVKPGLSSYAGHPQEAANSMLPLLDKAKSAVPKQLTKRTPLRLGATAGLRLIGEEQSEQILEAVRNLIHTKSKFQYKPEWINVIEGSQEGSYLWVXLIIKHKQTNKKDLSGNAIFGHLILIYVPLTLYMCLSALSMGCLLGXLNYLLDKLGGDYSQTVAVLDMGGGSVQMAYAVSANAAASAPAPPHGEDPYVTREYLKGKDYNIYTHSYLHYGAFASRAEILKAKDGPFSSCMLRGFIGQYTYNEEQYDATAAPEGAVYGKCREEIGRALNLNAPCEMKNCTFNGIWNGGGGAGQGSIYVASSFYFVASEVGIVDGNAPSGNTTPGAFGASAEKACQMSVEEAKIEYPNVNDVDVPYLCMDLAYQYTLLVDGFGVERTKEITVVDKVKHGEYYVEAAWPLGSAIEAVSSTKEWRQDK

SEQ ID NO: 338301 - protein, 58 aa, Zea mays
  Clone ID: MRT4577_71697C.1.pep
QICIVRLTISYIASVDACVTKMNLLELLGCQRWGPLFGRALADGKFYESIRLGFVRLF

SEQ ID NO: 338302 - protein, 62 aa, Zea mays
  Clone ID: MRT4577_71698C.1.pep
GRHQRITLPLHQGHIQLPQLYTHVTLHTLRTHKHSEHKRQLHTQKLTIINLQLFQQLFAQER

SEQ ID NO: 338303 - protein, 386 aa, Zea mays
  unsure (1)..(386): unsure at all Xaa locations
  Clone ID: MRT4577_71699C.1.pep
PRGRPRELLGDLRXIRSGDCVVAFSRKEIXXEVKLXALEKFTKHKCCVIYGALPPETRRQQAKLFNEQDNEYDVLIASDAVGMGLNLNIRRVVFYSLAKYNGERMVPVPASQVKQIAGRAGRRGSVYPDGLTTTFLKDDLDYLIQCLQQPFEEAQKAGIFPCFEQVEMFASQFPNLSFNDLLDKFRDSCRIDKTYFMCQQDSIKKVANMLERVQGLCLKDRYNFCFAPVNIRDPKAMYHLLRFATNYSHSRRVGIAMGIPRGSAKNDAELLDLETKHQVLSMYLWLSHHFEEDNFPHVQQAENMAINIADLLGKSLAKACWKPESRQQVRGRREGKDEYNEEQASNESANDVPTNGYERPRALDKTLRKWQDKVSQNCPPSLNFVA

SEQ ID NO: 338304 - protein, 96 aa, Zea mays
  unsure (1)..(96): unsure at all Xaa locations
  Clone ID: MRT4577_7169C.1.pep
ARRMDLNTTSVFDLRKPCPPTWYAPTSAGGRAQLPKRRKSDGTHARSHTVRSMQAKINNQERSVGLSGQTQCTAVYFFSRVXLPSFFCSWGCFTSS

SEQ ID NO: 338305 - protein, 61 aa, Zea mays
  unsure (1)..(61): unsure at all Xaa locations
  Clone ID: MRT4577_716C.1.pep
NCPASLKLSCFAPLFQISNKPNTQTAKVRVTCCAARDGNGSRSKCSSLVINFSSRXKGAEF

SEQ ID NO: 338306 - protein, 135 aa, Zea mays
  Clone ID: MRT4577_71700C.1.pep
RTPRVRFSGRERDPPISIDRNTIYRPINLYPRGQSPPMISAPWLFRSAIRRLIPGHMPDRRQISANAENTAIIASYWAASDSGGKGQASRQTRPAINLIREDISSSEKDLIVTLGSYHGKQQRRKPTAHSCRAWV

SEQ ID NO: 338307 - protein, 55 aa, Zea mays
  Clone ID: MRT4577_71701C.1.pep
SFFLFLFFTFILSFPSLRTVFFLSLSTTLNPTLQYNDPLQKLPHFNDCKFFCLYY

SEQ ID NO: 338308 - protein, 123 aa, Zea mays
  Clone ID: MRT4577_71702C.1.pep
YDKIFNLLDLFSFVSSDLFAVSESSDEVEAEHHSAIVENRRHPTVEAEGGISTTPTAGRSSQRSESRSCSDCTTNDHHLPLISARFYEFKSSSAAIGIIRRGVRGLDESDTRNEMMPMAMATS

SEQ ID NO: 338309 - protein, 104 aa, Zea mays
  unsure (1)..(104): unsure at all Xaa locations
  Clone ID: MRT4577_71703C.1.pep
YASADKSNDLALKMXPGHTARDVYLGARLAWTNAGGDARLVLHVRRHDRTRVLGPYLQHMQSVADEMEARRRELRVHANAARGAPRWACPPFTHPGTLYTGGRD

SEQ ID NO: 338310 - protein, 100 aa, Zea mays
  Clone ID: MRT4577_71704C.1.pep
IAEWRGGRHNTCMSWAAGTWRGRLGHHRRRSANGWDAIRDREGSLAALRARRCSATSNNVILDRPPLPCGASSSAVLPFLVIVGGLGFGGGGETVSSEDG

SEQ ID NO: 338311 - protein, 72 aa, Zea mays
  unsure (1)..(72): unsure at all Xaa locations
  Clone ID: MRT4577_71705C.1.pep
FHSNLSALWIYHHLQRSYGGXSCFNIRAWFDALPLENVXIVPSWKFXDWALQIGLLNQFISAXXFCVIQSIC

SEQ ID NO: 338312 - protein, 208 aa, Zea mays
  unsure (1)..(208): unsure at all Xaa locations
  Clone ID: MRT4577_71706C.1.pep
MRRHTPGLLAANLLRASSLLRPPSVLAARAALLHHAPDDAHRLLDETPRGRAAAIVRALTSAPSSSSGDTACIACLHCAALKSGAVLDPPVRTSLLAAYARAGRGAGAGAGAGAALALFREAVAPDVILWNAAVGALTTSCRYDDAAALFRRMARELXEFDSTTVVVMLSGASRAGNLRRGMELHGMAAKSCLGAHCLGAWNALVDMY

SEQ ID NO: 338313 - protein, 165 aa, Zea mays
  unsure (1)..(165): unsure at all Xaa locations
  Clone ID: MRT4577_71707C.1.pep
MGCISSKLLPPGPGGDGRRATVRGRVEHVVSLTSTTYGVLDLHPKHGGAVLPASAAADEEAENEQQQQQPPPPPQDKPISKEWKRASMRPPPIAVPSAAQKPAGKPESGLEVINAXEIMARLEESYVAGSPAKKPSKPARWSPXRVLXMALPSHKKXGDKAXNTP

SEQ ID NO: 338314 - protein, 203 aa, Zea mays
  Clone ID: MRT4577_71708C.1.pep
VTDQSSFVNSTPTTLANFPGKLNFQNGLATEEDAPDSVYNTARRLQNSTRSVSNMTWQFDVDARSSYLIRFHLCDIVSKAPYQLLFDVYVDSWSVVKDLDLSDKAFGNLATPYYIDAVLLSSDPSGKLSVSIGPSAVKIAAPDGILNGLEIMKMNISTGSVSIVAPPSVARSHLGVILGSVLGVVAACVIAIGILIFFQEKKQ

SEQ ID NO: 338315 - protein, 69 aa, Zea mays
  Clone ID: MRT4577_71709C.1.pep
MQFTISAAALMAFAAKALAQVADFDPVLTPTNWEEVSAGTTLDITWQAKPKYSGEKISISLIGGATQNT

SEQ ID NO: 338316 - protein, 47 aa, Zea mays
  Clone ID: MRT4577_7170C.1.pep
LLSCVPSPPFPWPPRRCGSGCFPKNAEGVHCRFHEAHSSSTHSGEGH

SEQ ID NO: 338317 - protein, 120 aa, Zea mays
  Clone ID: MRT4577_71710C.1.pep
GRVSVSNNPQLAGKPLNPCILRHLPFCTYSSSSSHSLLRLVCDPSSLHGPLLLQLADKRMYVSYVIIYHCPMSIDITTSTRRFGTVPTRWLWISPAPTAPQKLHSTNLKQGHAKGEVAGI

SEQ ID NO: 338318 - protein, 148 aa, Zea mays
  Clone ID: MRT4577_71711C.1.pep
MGVHLLKKQHSSAPSSLGRGSGSGSGSASGSSASASSMPPKGCMAVRVVGPSSAAAGGGRKEQQEEEEEERFVVPVGYLKHPLFVALLQAAEEEYGFEQKGAITIPCGVDHFRRVQGIIHHHGSGGGHHHGHHSSSSNHFHIAGCFRA

SEQ ID NO: 338319 - protein, 58 aa, Zea mays
  unsure (1)..(58): unsure at all Xaa locations
  Clone ID: MRT4577_71712C.1.pep
LPLWSCIYLVFYNRARIVTNMYVIHGTSDITIIIAEXLCLKLKLTXFNQDKDVAELHV

SEQ ID NO: 338320 - protein, 82 aa, Zea mays
  Clone ID: MRT4577_71713C.1.pep
MVLAVDLLNPSPAAEAKKHKLKTLVPAPRSFFMDVKCPGCFTITTVFSHAQTVVICQGCTTVLCQPTGGKARLTEGCSFRRK

SEQ ID NO: 338321 - protein, 88 aa, Zea mays
  Clone ID: MRT4577_71714C.1.pep
SGPTKKAVLSVLTEACRTKVPQNTEKPRKERNIISISEAVLKKCRIALRRAISSDESKQFANLLGTTLTNSNENEDEGILGFPGMVSR

SEQ ID NO: 338322 - protein, 61 aa, Zea mays
  Clone ID: MRT4577_71715C.1.pep
PLEVILSAHKKDFHFFGRIRRFQQRHMPPVERPLTKHGPKACCALIPDSWTSAVSWGCLSD

SEQ ID NO: 338323 - protein, 74 aa, Zea mays
  Clone ID: MRT4577_71716C.1.pep
RRTRSPGTPPAPPPPGSSKLSQEEAQRIRQPPIILRWGLARDGPPVSDKDVTTNKEEETQADAAEENDGRGGGW

SEQ ID NO: 338324 - protein, 77 aa, Zea mays
  Clone ID: MRT4577_71717C.1.pep
LCPDLVLTKQRIPIDFSTAPKDNTHLCHRWIFITLTLKEQWHPHQNYVQMSIQHPFYQLLVKRKDKAPKHCHPSIRT

SEQ ID NO: 338325 - protein, 188 aa, Zea mays
  unsure (1)..(188): unsure at all Xaa locations
  Clone ID: MRT4577_71718C.1.pep
LSLAAKGGDELKLLGVWDRPYXNRVQIXLNLKGLSHXYVEDDLXLTTSATLTHSQPAVXRAPGLIHXAAYTVPESQTMAHHLXSLHPHAHXPWALPSAPYRGATARFWALLCSLQGXSSCYTTVPARYHGKTAHXVTFRLVPANTVXASPKDCSTXRDYFCAPSIGFADVVLGSYLCSFTXLEKTAGV

SEQ ID NO: 338326 - protein, 91 aa, Zea mays
  Clone ID: MRT4577_71719C.1.pep
MASGQESRKELDRKAREGETVVPGGTGGKSVEAQEHLAEGRSRGGQTRREQLGQQGYSEMGKKGGLSTTDESGGERAAREGVSIDESKFTK

SEQ ID NO: 338327 - protein, 50 aa, Zea mays
  Clone ID: MRT4577_7171C.1.pep
WKVFKTKKFPECSPAPNCLLVSYISRWGFFQPRTPKGKLRLSLVGILLFK

SEQ ID NO: 338328 - protein, 124 aa, Zea mays
  unsure (1)..(124): unsure at all Xaa locations
  Clone ID: MRT4577_71720C.1.pep
RNSGGDHHEDYSAGRILGPVRDLYGNYWTKLLQKDSKGLNDRGGGDIFMXRPTVGSRXQAFRPQEGDCSYTLVYHGLHQPPWEVPLPFQRPGMKSSPDQLAGSDGHSCIRSEAADNVHGTIHSF

SEQ ID NO: 338329 - protein, 48 aa, Zea mays
  Clone ID: MRT4577_71721C.1.pep
TSFFFFCVFFFFLKSTFLFLGSPNSSKKFIFETYNFIKTMLKIGALDQ

SEQ ID NO: 338330 - protein, 136 aa, Zea mays
  unsure (1)..(136): unsure at all Xaa locations
  Clone ID: MRT4577_71722C.1.pep
MASGQESRKELDRKAREGETVVPGGTGGKSVEAQEHLAEGIYSRLRLTICICXSLSLALITRVVWLPDMFXCCLHVLSDCLYVCXRSRGGQTRREQLGQQGYSEMGKKGGLSTTDESGGERAAREGVSIDESKFTK

SEQ ID NO: 338331 - protein, 502 aa, Zea mays
  unsure (1)..(502): unsure at all Xaa locations
  Clone ID: MRT4577_71723C.1.pep
MGLAPPELGQFDGWESSGEEERERERWGWCRRSRRGSSRRRAAPKGTDDDTAVDTGCCIRLXRRDMPSAAAXRSKVDTSTSSASTHGEKSTENGSRNQPVALVVSGSTTTSNAESSSSASKVGEEIKVASQPGPASNXFSCSTRNFRPESLLGEGGFGCVFKGWIEENGTAPVKPGTGLTVAVKTLNHDGLQGHKEWVAEVDFLGNLHHPNLVRLIGYCVEDDQRLLVYEFMPRGSLDNHLFRRSLPLPWAIRMKVALGAAKGLAFLHEEAERPVIYRDFKTSNILLDAEYNAKLSDFGLAKDGPVGDKTHVSTRVMGTYGYAAPEYVMTGHLTSKSDVYSFGVVLLEMMSGRRSMDKNRPNGEHNLVEWARPLLGERQRFYKLIDPRLEGNFSVKGAQKAAQLARVCLSRDPKARPLMSQVVEVLKPLQNLKDMASASYFFQTMQAERMAHSSSMNGRSSMNGGFKTQSPFGRHGQPPPVRSLSDGPRASPFRYSPKPNVK

SEQ ID NO: 338332 - protein, 205 aa, Zea mays
  Clone ID: MRT4577_71724C.1.pep
LPCSLKIQTPFYSTVYTSGLCLTCTFVFLFHFSGHLTSKSDVYSFGVVLLEMMSGRRSMDKNRPNGEHNLVEWARPLLGERQRFYKLIDPRLEGNFSVKGAQKAAQLARVCLSRDPKARPLMSQVVEVLKPLQNLKDMASASYFFQTMQAERMAHSSSMNGRSSMNGGFKTQSPFGRHGQPPPVRSLSDGPRASPFRYSPKPNVK

SEQ ID NO: 338333 - protein, 96 aa, Zea mays
  Clone ID: MRT4577_71726C.1.pep
NSKEVANAPGLVWDNTKSLLLDDDHLATSLVCWHGFSLSILKFVHQHHLANRPTLNTILWSTQFRSSTSRDHLTYLNDIHNAHTHGHKKHNIDKLY

SEQ ID NO: 338334 - protein, 116 aa, Zea mays
  Clone ID: MRT4577_71727C.1.pep
SRVRGSTGVSPGQGKKPPPGFVGFGNSNPLGKGFFKLIWNRIGLGWNKKGPVHLKLGVIARAPPEKISLSSPKSLLFILTSPRIGLIPPLCDWNPPLGKKKKKKKKKGRPLKGTQP

SEQ ID NO: 338335 - protein, 92 aa, Zea mays
  unsure (1)..(92): unsure at all Xaa locations
  Clone ID: MRT4577_71728C.1.pep
ALFXLPLVVGVLVRSRVRAGLLLVVVVSXLSLWLWCFLPFLVFWWSFCGFXSLFRCSRVFVWLLXLXLLLAGSLVRXVLLRGLLLLPPAVFV

SEQ ID NO: 338336 - protein, 447 aa, Zea mays
  Clone ID: MRT4577_71729C.1.pep
MDARSSSSMHVVMLPWLAFGHILPFTEFAKRIARQGHRVTLFSTPRNTRRLIRIPPELAGNIRVVDITLPRVERLPEDSEASIDLPSDDLRPYLRVAYDAAFADKLSAILQEPGPERPDWVVIDYAAYWAPAAAARHGVPCAFLSLFGAAALSFYGPPEGLMGRGKYARTKPEDLTVVPDYVPFPTTVAYRGLEAREFFTPVLAPDESGVSEGYRFGKCIEESQLVGIRSSAEFEPEWLQVVGGLYQKPVIPVGLFPPPPTQDIGGHKAALQWLDGQAPRSVVYAAFGSEAKLTSAQLQAIALGLEASGLPFLWAFRQPVDANEGESGLPEGFEERIDGRGLVCRGWVPQTRLVLLPLVFDQGLNARHLTEKKISVEVPRDDEDGSFAPKDIAAALRKVLVEEGCEVFGDKAKELAMLFGNDDMNDQCVRDFLKCMLEYSRQRQVAL

SEQ ID NO: 338337 - protein, 91 aa, Zea mays
  Clone ID: MRT4577_7172C.1.pep
GSSPGGSTPGGSSPGGSTPGGSSPGSGSPSGSSPGGGSSNGGAPGGGVSGSSPSGDNTSPGGLVPNVGGTSTTLGTTGSGTETGSSVPIYT

SEQ ID NO: 338338 - protein, 476 aa, Zea mays
  Clone ID: MRT4577_71730C.1.pep
MDARSSSSMHVVMLPWLAFGHILPFTEFAKRIARQGHRVTLFSTPRNTRRLIRIPPELAGNIRVVDITLPRVERLPEDSEASIDLPSDDLRPYLRVAYDAAFANKLSAILQEPGPERPDWVVIDYAAYWAPAAAARHGVPCAFLSLFGAAALSFYGPPEGLMGRGKYARTKPEDLTVVPDYVPFPTTVAYRGLEAREFFTPVLAPDESGVSEGYRFGKCIEQSQLVGIRSSAEFEPEWLQVVSGLYQKPVIPVGLFPPPPPTQDIGSHKAALEWLDGQAPRSVVYAAFGSEAKLTSAQLQAIALGLEASGLPFLWAFRQPTDANEGKSGLPEGFEERINGRGLVCRGWVPQARFLAHESVGGFLTHAGWNSIIEGLARGVRLVLLPLMFDQGLNARHLTEKKISVEVPRDEEDGSFAPKDIAAALRRVLVDEECEVFGDKAKELAKLFGNDEMNDQCVRDFLKCMSEYSRQRQVAL

SEQ ID NO: 338339 - protein, 198 aa, Zea mays
  Clone ID: MRT4577_71731C.1.pep
HSAARAGHSCSGSRREPLSLITTVSLSLKLLPVQRSHSLRVCCSLFLPLARPAPSLSSVCAQLAPSARRAPGMLAGAQLCPFSLCSPTRRHASPSSPLHVLLSPAPLWSCALLCSPRPLLCALSGQPRSRQPQFRSKFSAQFPCVRPGGCACYSLPSSVLSISPRSVSSSLGAHLFMAVVILWGGDVERGMEVVLAVK

SEQ ID NO: 338340 - protein, 254 aa, Zea mays
  Clone ID: MRT4577_71732C.1.pep
GSARPEQRPLFPVYDGSGCGSGGESPRCLRLRRRRRRDGVRVSSASSSGVAARLRRRLREGGGGGDSSASPSVSESPPSSSFSPPVSAASSSLSPSVSAVAPSSSSPSVSAVAPSSSSPSDSSALAFESTSLASASRSEHVSPASSSSASETSGFASASVATASGSALASGSASISSAPFSTASSLASASMDSASLADSSSFASPDSSAFASPASISESAASSSSGSGSVAFALGFALPFPFLLPRRGGMAAAG

SEQ ID NO: 338341 - protein, 55 aa, Zea mays
  Clone ID: MRT4577_71733C.1.pep
ESKLAAGACAGRPLGPKLGRYRPKRVYHFFSLPDQRTVAGRLEAPFPTDGVLTPF

SEQ ID NO: 338342 - protein, 163 aa, Zea mays
  unsure (1)..(163): unsure at all Xaa locations
  Clone ID: MRT4577_71734C.1.pep
KGERSNKRATRADQEGARRPPXXXTXXXNATXXPQGAQXXXXTXXPPNXPTXRAAGGENPXXQPKRXQQAXAASNKXXXPXGGQQTPAQXXGQXXXQTXRAQQXQQPGPXPXNQGARANXTPNPQQQQXXPXNQRXTXNXXXXXQQQPXPKSQXXTANXQQQQ

SEQ ID NO: 338343 - protein, 119 aa, Zea mays
  Clone ID: MRT4577_71735C.1.pep
TNGRENEKRLKNLKNTAKEGMQFLFVELWILFLHFHFLCCLRHGFWTFSPLQLALDEAPERLRSQPASRSRRVAGGPHLGVDPASAAEDGRRGDELRAKLGGKNTPTCSSGRSPHLAAA

SEQ ID NO: 338344 - protein, 73 aa, Zea mays
  Clone ID: MRT4577_71736C.1.pep
NNPVEARTKSLDDIPLLGNGLTDDGKSDYHYLDSNAFYEENDLLIDDRHAELHYVLDDTASGDQGSHNDEHIA

SEQ ID NO: 338345 - protein, 99 aa, Zea mays
  Clone ID: MRT4577_71737C.1.pep
IAPIHFAAFQIKQNFNLQWTCKLQKTIIAWASQGVFYFNNRGIKNPPKCKAGTPPPVFSFLVKKKKKPPQPLFGFQGIKNQCTGWALNINLIKRGLVCF

SEQ ID NO: 338346 - protein, 256 aa, Zea mays
  unsure (1)..(256): unsure at all Xaa locations
  Clone ID: MRT4577_71738C.1.pep
MKEDDKAKTSFITPFGTYCFVRMPEGMENVGSTFSRLTKTILKSQMGRNIFTYVNNIVVASRNKDDHLSDLAETFANMCEAKLRLNSEKFKIDSKIVVGQIEKDCTTGESVLMLYLLAVWSLEKQFKGFTLQHIDKSKNEDADMLAKAAAQGDSMSLDVFFHMIGTPMGHYHPTDQVEAKRLKYRSYEFAIIQGQLYKIGLSQPXLKHITEVEGIKLLREVHKGICGSRLGPRSLTSKVMRQGFYXPAIMCAANRV

SEQ ID NO: 338347 - protein, 110 aa, Zea mays
  Clone ID: MRT4577_71739C.1.pep
KIKHSNVEAGKKMKRERGEKKVIEPIAPISYCYTATSGQDASGQASRGDQISCPHPTPSSSDSSSSSFPPSPSSPSSSCCSCNAAIATSNASSHNVGLWWQEHLIPTRPA

SEQ ID NO: 338348 - protein, 143 aa, Zea mays
  unsure (1)..(143): unsure at all Xaa locations
  Clone ID: MRT4577_7173C.1.pep
PPPHMGFKFGGPFSKFPRGFGKEFXKDPKFFKTGYFGLVKFFPPRPLGGGPFSGVPPLGGFPARPIRQPVFVGVFKGVGKRAPPGPRVPKVSPKKNFWVPGPAFPNPGFLLSKFFLWALPFFCELLAPVSLGPFFYFFGPPLL

SEQ ID NO: 338349 - protein, 47 aa, Zea mays
  Clone ID: MRT4577_71740C.1.pep
YRNLTTCYYLVRARHDITAHITHEGPLGTIGQQGCKLNHSLPNFRMT

SEQ ID NO: 338350 - protein, 108 aa, Zea mays
  Clone ID: MRT4577_71741C.1.pep
MERSSVLILLIFAFAGGNLLVGIASNARSTKNTDPGHGSIDLNDRKLKERYTFTIRKTRGLENVRTDDYQPVDPSPSSKATIRPGPIEHGAPLLPYVPRYPPPPPASC

SEQ ID NO: 338351 - protein, 59 aa, Zea mays
  Clone ID: MRT4577_71742C.1.pep
RPGTVQFSYEPISRTQSPNSARGIPQQTTPVPRIAQNLPSTSLTTSQLDNTRPKNSNTN

SEQ ID NO: 338352 - protein, 65 aa, Zea mays
  unsure (1)..(65): unsure at all Xaa locations
  Clone ID: MRT4577_71743C.1.pep
XXTXEIDLXVKRRAXEKXLXSXNLLMXTVPXXPTGTRLPNLHXXXRLGRPXSXXQPXRQXMLWXX

SEQ ID NO: 338353 - protein, 234 aa, Zea mays
  unsure (1)..(234): unsure at all Xaa locations
  Clone ID: MRT4577_71744C.1.pep
GHRISLIDSPGHIDFCSEVSSAARLSDSALILVDAVEGVHIQTHAALRQAFIERLRPCLVLNKIDRLITELSLTPAEAYVRLHRIVSDVNSIYSALRSHSYFSLLSALDDNPSTSSSSSAEDLPEDFEDDDDNEDAFQPLKGNVIFACALDGWGFRPQQFANLYARKIXVNPSAFLKGLWGPRYLDKKTXKVVGKKAIKSSDPQPMFVEFVLSALWKMYELVLKDGGESKGVKK

SEQ ID NO: 338354 - protein, 43 aa, Zea mays
  Clone ID: MRT4577_71745C.1.pep
LHRIRVWFCLMPICNMYTTMLYPFCLLKPYKFGVSTNGPNNKY

SEQ ID NO: 338355 - protein, 50 aa, Zea mays
  Clone ID: MRT4577_71746C.1.pep
LRRNQFRERKTVRLSFSKGEIKERAFLKRQLKAIRHSSLPFGLFLPWWVS

SEQ ID NO: 338356 - protein, 179 aa, Zea mays
  unsure (1)..(179): unsure at all Xaa locations
  Clone ID: MRT4577_71747C.1.pep
MRCSAAAISSVASASPPAISISVGVGASASCSSLSFASGRPRPAAVSISTTAXMKMMIHRKKQAPPGLYSYSHDIKKNKLVSGAGGLDLNTKNINSIYENDEDETDKNMMNMIXILKATSDTYSANTKTMIMELDQHDINKENYIYDKYFPAPAPARXTXQVLALTVNVQIESDCISDL

SEQ ID NO: 338357 - protein, 68 aa, Zea mays
  Clone ID: MRT4577_71748C.1.pep
VPESPCHHTHHRHRNQPCVAALDRSGSTTEIMPCTTIESSGVHPSSERRPGCHLPPGDHHCHPPQEHD

SEQ ID NO: 338358 - protein, 65 aa, Zea mays
  Clone ID: MRT4577_71749C.1.pep
HFGTFQGVSPNFGTSRLKGFWGKTSGLAPYANFPIENRPNGVGFFSPLKPKGGGIFKPLPQKRGQ

SEQ ID NO: 338359 - protein, 82 aa, Zea mays
  Clone ID: MRT4577_7174C.1.pep
PATIARRSRAHAKAPPPSLPKGALSASPSPPPPHTYGKISCHQQNVSSFINIPRATLWFRTANYESVTWWSPPPTSFYAPPP

SEQ ID NO: 338360 - protein, 48 aa, Zea mays
  Clone ID: MRT4577_71750C.1.pep
KIRVRDIFYLRAWSSWLINRLMRVIWPINKPLLAGHHFRQNRRLFMLL

SEQ ID NO: 338361 - protein, 51 aa, Zea mays
  Clone ID: MRT4577_71751C.1.pep
KNPLVLNRWVFKLPQLFFHSRFFKIFSALGPVICPLFNLCFNAKVGRFSVV

SEQ ID NO: 338362 - protein, 74 aa, Zea mays
  unsure (1)..(74): unsure at all Xaa locations
  Clone ID: MRT4577_71752C.1.pep
MAGGVAHTSTRMANGGAPRGELTMSETCCQLRKQGKRASMPFITAGDPDLXTTWKASKILNSCGSDDINMTRPY

SEQ ID NO: 338363 - protein, 66 aa, Zea mays
  Clone ID: MRT4577_71753C.1.pep
GNQNTGAHTYQRVLHTIIFLIGLHSERPKSHIHILITLHAFTCCRFQHKKSQYCGSFHTQLYLYAT

SEQ ID NO: 338364 - protein, 270 aa, Zea mays
  Clone ID: MRT4577_71754C.1.pep
MAVSNNITACVTLLALICAVPVIASGVWFASAQGEECARLARWPVAILGGLLLLAALAGFVGAYWNRRGLLAFYLFAMASLVVLLIALLAFAFAVTRGSGAYPVLGRAYDDYRLDGFSMWLRGYVSDDPGRWDKVRACLAVSDTCKKLARQAAFTSADQFYQSHLSPLQSGCCKPPSVCGFSYVSPTVWSAPAARPAADADCGLWSNDPGQLCYGCESCKAGLLEALRDQWHKANVALVVATVALVILYLVGCSAYKNAQAAAIFGRRKY

SEQ ID NO: 338365 - protein, 41 aa, Zea mays
  unsure (1)..(41): unsure at all Xaa locations
  Clone ID: MRT4577_71755C.1.pep
SSAASPGLSRQGTSPXRGALHGRGPRDLTRAVSGERRTSPP

SEQ ID NO: 338366 - protein, 270 aa, Zea mays
  Clone ID: MRT4577_71756C.1.pep
MAVSNNITACVTLLALICAVPVIASGVWFASAQGEECARLARWPVAILGGLLLLAALAGFVGAYWNRRGLLAFYLFAMASLVVLLIALLAFAFAVTRGSGAYPVLGRAYDDYRLDGFSMWLRGYVSDDPGRWDKVRACLAVSDTCKKLARQAAFTSADQFYQSHLSPLQSGCCKPPSVCGFSYVSRTVWSAPAARPAADADCGLWSNDPGQLCYGCESCKAGLLEALRDQWHKANVALVVATVALVILYLVGCSAYKNAQAAAIFGRRKY

SEQ ID NO: 338367 - protein, 287 aa, Zea mays
  Clone ID: MRT4577_71757C.1.pep
MAAAAILPELATQVLIPVAAAVGIAFAVVQWVLVSKVPVIASGVWFASAQGEECARLARWPVAILGGLLLLAALAGFVGAYWNRRGLLAFYLFAMASLVVLLIALLAFAFAVTRGSGAYPVLGRAYDDYRLDGFSMWLRGYVSDDPGRWDKVRACLAVSDTCKKLARQAAFTSADQFYQSHLSPLQSGCCKPPSVCGFSYVSPTVWSAPAARPAADADCGLWSNDPGQLCYGCESCKAGLLEALRDQWHKANVALVVATVALVILYLVGCSAYKNAQAAAIFGRRKY

SEQ ID NO: 338368 - protein, 91 aa, Zea mays
  unsure (1)..(91): unsure at all Xaa locations
  Clone ID: MRT4577_71758C.1.pep
PAAVSRYAQVMKTVRKXADHLSDSQRIRCTIENFTKGIPEARTYLXILLQQLRIKRGLXDHLGIEPLMKEAHEKIEKDIKKPLLRSDKKNM

SEQ ID NO: 338369 - protein, 47 aa, Zea mays
  Clone ID: MRT4577_71759C.1.pep
FYLWGFFFVQFFVVNIFTMVHTCSSVNGGCLSVPVLGQWGVPVGRVL

SEQ ID NO: 338370 - protein, 55 aa, Zea mays
  Clone ID: MRT4577_7175C.1.pep
YNIPPITILQTQTAHSNQPFQKKRVRYQRGRLHKFIRLDHLSTAAKGAPTPFPGS

SEQ ID NO: 338371 - protein, 125 aa, Zea mays
  Clone ID: MRT4577_71760C.1.pep
FHSRLHQRTSRYSVKMHFTNSIAQAILCLSVTILPVAQSSIAIGNQIREGGTHFNVAWVEGVNPCQSDVEIAPESSRECDQNFSLNGEEYYLVGCTDRNTGYAQKPQRLRRVKDNSLYGTCAPVS

SEQ ID NO: 338372 - protein, 60 aa, Zea mays
  Clone ID: MRT4577_71761C.1.pep
HGFRLMKIHPCYRMTMLHHSVLHESPYKFLRYLVHNECSCWFVSLHIRKCELMNMRKPLL

SEQ ID NO: 338373 - protein, 307 aa, Zea mays
  Clone ID: MRT4577_71762C.1.pep
RIGSPYQTLVGVAARVARRRMRRRAWETKAKPEGVARCCDSSSTHARGEGAGCCGVQLAAQVGGGARCWNFMGALDSELGGHWPLARGGARMGEKCCHGRGVWLSSMAVQISGAAGIVLGAETWRGAKGGRGKIAGRHGRKRWASCCSPWTTAARCDCCFMGKRGGEGPWRHGSYCCPWKINRTQEQQGKGGRPSTPAAAMGKLESAMPLHADVAEQERDVELQVSHGRKTAGSLELLLGADGCGTATCTWGGGGRGWGSRPWRAGGEGAGLGAMERSTAPCCCCRGMPAARWRRRQGGCCGGWKQK

SEQ ID NO: 338374 - protein, 72 aa, Zea mays
  Clone ID: MRT4577_71763C.1.pep
LGLLPHRPFMCLALRRWGLYLYCPHFHGPCHLCARLPSSLCTIPPVPSTSLVLMRSSPYKGPPGGCFLPHTR

SEQ ID NO: 338375 - protein, 125 aa, Zea mays
  Clone ID: MRT4577_71764C.1.pep
LFLEKFLFHFFTRFKPSNKQCNKPGTIKGSHLGSPFLKWYCTIHGAPFFFGFDKLPFGLNFGKTLGKTISRRISRLWKPFWKTFPETVAGLLEAFPKELPLGKNMGKNLKTLLQSLMQNPWGTPF

SEQ ID NO: 338376 - protein, 128 aa, Zea mays
  unsure (1)..(128): unsure at all Xaa locations
  Clone ID: MRT4577_71765C.1.pep
APHTPSSEPPHTTPLPXPKTPSXTPSXHTYSPQPTTXPPYYTSARPKPTAPKDSVQAPHSLPPKYHQNQTTPTGNHHPARITPXPKXPAESKRAQPGRAPLTPPPPSLKPHKRTTTPSNKHINQPKGS

SEQ ID NO: 338377 - protein, 64 aa, Zea mays
  Clone ID: MRT4577_71766C.1.pep
QEDANTLFDVGTSINLDMPRTETGIGPTRRTPTDSMAPTDVACTAASDDRGSNKSRKRAPRSKV

SEQ ID NO: 338378 - protein, 93 aa, Zea mays
  Clone ID: MRT4577_71767C.1.pep
QKLPSGGTPQMFPTTKARLLLISKSRIRGWARFFHIIFSGEHTGISPHYSSKTQQLSWGGPIGVGFGEGGVLQTWGGPLQFWSYKTSSPPGVS

SEQ ID NO: 338379 - protein, 43 aa, Zea mays
  Clone ID: MRT4577_71768C.1.pep
SPARCINNCTSYLIYVQPLVCSSIPGVALSRVLLRAAIRVSSY

SEQ ID NO: 338380 - protein, 186 aa, Zea mays
  Clone ID: MRT4577_71769C.1.pep
MLPRRQSIFHLGEEGGAAAVHHRVSVVGAASSSMAMGGGRRARERERLVVGLQILVHHHHHGRHGHGHAHAANVVLKQMVRPRAAAGSRHGHGSHAFSCSFLKACYLCKRELSPDKDVYMYRGDQGFCSEECRWQQILVDEAREREAAAVMSNKELQRRAQARHHSPHRTPMPIRGRPPRKTLAVA

SEQ ID NO: 338381 - protein, 85 aa, Zea mays
  Clone ID: MRT4577_7176C.1.pep
APLGDEVRAAVAQLFVSAHPAAPVLLLLVILLRRWAYGRPSMFPCSAVLSAGAPRHADTAFLRSAPRSSTRSTRPPVWASTPVAS

SEQ ID NO: 338382 - protein, 117 aa, Zea mays
  Clone ID: MRT4577_71770C.1.pep
PNHEVASIFAAAFFSFFNFFSGFFIPRPRIPGWWIWYYWICPLAWPVYGLIVPQYGDLEDLISVPGKSEQPISFYVTHHFGYPRDFFPVIAPVLVLFPVFFGFLYPVCIKKLNFQHR

SEQ ID NO: 338383 - protein, 55 aa, Zea mays
  Clone ID: MRT4577_71771C.1.pep
MRKGLARKKFIGTPSATPPDLPIVHHGAVVPEPLRIERARLAGGVRQVLVHWHDE

SEQ ID NO: 338384 - protein, 72 aa, Zea mays
  Clone ID: MRT4577_71772C.1.pep
ERELKRKQAPLKATFVQNLMLFPLLGHVCPTKATLSYFPWKGGGPRKPARRSRNPLVRCKVDVGVKNPFKKL

SEQ ID NO: 338385 - protein, 89 aa, Zea mays
  Clone ID: MRT4577_71773C.1.pep
LISAWIGIIMIETQIEIAAPPSKVREILLDFSNYPQWHSALIKLLEPEDSSKSLSSLKPGDKVKCNIDDMKFVATITANSEKLFQWQGP

SEQ ID NO: 338386 - protein, 49 aa, Zea mays
  Clone ID: MRT4577_71774C.1.pep
QGLQDLYVPVGNLQMRVQHGVINSSEQFHRQQEPELEHQLREIHIRTRG

SEQ ID NO: 338387 - protein, 83 aa, Zea mays
  Clone ID: MRT4577_71775C.1.pep
PRTPKTKTGSRLGTRPKQGTWGKLMPKTTQGPPKKKSAGRKKQIHRTCANKKTLATPPLKKAPQGHGNWHPPKQQKPQALLKT

SEQ ID NO: 338388 - protein, 64 aa, Zea mays
  Clone ID: MRT4577_71776C.1.pep
TKLIHPDGGTELAPSFEDQAIHRGAVPNEMMHLSSAIPERGVDFTVFDPTCFQKAERTGPLDSL

SEQ ID NO: 338389 - protein, 86 aa, Zea mays
  Clone ID: MRT4577_71777C.1.pep
HLGTVQECFRRPESEECVQQVNQMADDNWASYVSPQMADMKGHLMKYPVRVEQDGRVGPLHGQESFPDVGGKVLGTHSSLPNALTT

SEQ ID NO: 338390 - protein, 66 aa, Zea mays
  Clone ID: MRT4577_71778C.1.pep
TTTSDHHPSYSDPKERTQGESTMTEGGRPIRPDQRDLGELSAVSDLDHLGGGAVAGAPRTLGCYHC

SEQ ID NO: 338391 - protein, 86 aa, Zea mays
  Clone ID: MRT4577_71779C.1.pep
VVWNCSGYNNRWGTLRTALVVVTTPLGARLRAHWRSGPQDLASVAEIDSSSSSHQRRQCHITEYRITIGLERNSSFVRATAQGPRQ

SEQ ID NO: 338392 - protein, 328 aa, Zea mays
  unsure (1)..(328): unsure at all Xaa locations
  Clone ID: MRT4577_7177C.1.pep
GFWYLSASPFQICYSSVFYCSALRGHGLLFHLTEDSPVLAVDRSNVAAIKTWQINDGKVMAANNTKPTMIMSLSKFTTAKAIWSHLKDRFVQDSGALLHTLMQQTHVIEQHDMSIDEYYPAFDRLMSALTSMLPACTXCLAQPISSLRSFYLLICMGVRPEFDSLRARLLHRITXDTLTMAHALSELLAAETRLKSMSSITGVSSHSVLAAAQRSRNTSFQPCEHCKKTTHQSENCFAKFPEKLADFRVRRATRGRGTRPSPRGSVAVATTSSAGALSSSWVLDSGASFHVTSDQSRLASTKPVTEDTSVQTTDGSQNRGCDWDWPSP

SEQ ID NO: 338393 - protein, 41 aa, Zea mays
  Clone ID: MRT4577_71780C.1.pep
CFCSAPLLGLVDLCAAETDTNVESVVYNKQIVTLLKISDRF

SEQ ID NO: 338394 - protein, 97 aa, Zea mays
  unsure (1)..(97): unsure at all Xaa locations
  Clone ID: MRT4577_71781C.1.pep
KKNVLVVSVKKDYXNPHVDKIKESLKAPNNFFFPPPVPVGNSGPTVAPKKKKKAPNPKKKSDKKMGLTLFKKKNCCFGQTPPSLGFLKNNKNCSQNF

SEQ ID NO: 338395 - protein, 166 aa, Zea mays
  Clone ID: MRT4577_71782C.1.pep
PRVRETPLQVKLNGVATIIGKIGLAFAVVTFAVLTQGLFWRKLADGSYFSWTGDDALELLEVFAIAVTIVVVAVPEGLPLAVTLSLAFAMKKMMNDKALVRHLAACETMGSATTICSDKTGTLTTNHMTVVKACICGKVKDVNSSAETKTLPSDLPASVVAMLLQS

SEQ ID NO: 338396 - protein, 58 aa, Zea mays
  Clone ID: MRT4577_71783C.1.pep
FNVPFVSLVIPVFILGSLSGMQQMAFGCGLMYPVPPVGLYPKLIFKEKKKKKKKKTPT

SEQ ID NO: 338397 - protein, 162 aa, Zea mays
  Clone ID: MRT4577_71784C.1.pep
RPRVRPRVRPRVRNNLLRREPLKLVDGGQSQRTFVYIKDAIEAVVLMIENPARANGHIFNVGNPNNEVTVRELAQMMTEVYANVSGEAPLDEPMIDVSSSQFYGEGYDDSDKRIPDMTIINKQLGWNPKTPLKDLLETTLTYQHKTYKEAVKRQMSQASAST

SEQ ID NO: 338398 - protein, 244 aa, Zea mays
  unsure (1)..(244): unsure at all Xaa locations
  Clone ID: MRT4577_71785C.1.pep
CIPSFVVLVGLIAESCYILLFECRTSCSVICYWFMRLAPFNWIGPRMDFIPGVDGPSEGVPRVLACFSNNLLRREPLKLVDGGQSQRTFVYIKDAIEAVVLMIENPARANGHIFNVGNPDNEVTVRELAQMMTEVLPLDLYDMTPSSNGRVLPVSVVFVPRXYANVSGEAPLDEPMIDVSSSQFYGEGYDDSDKRIPDMTIINKQLGWNPKTPLKDLLETTLTYQHKTYKEAVKRQMSQASATS

SEQ ID NO: 338399 - protein, 94 aa, Zea mays
  Clone ID: MRT4577_71786C.1.pep
HTTVYYTPPNMSRKDESKASDAVATVNIADFTRTRDAIIVCLANLQANIFDLSRAYINHANTVLRGGPINLESSLGSGLAGGFAASLLENSLVG

SEQ ID NO: 338400 - protein, 82 aa, Zea mays
  Clone ID: MRT4577_71787C.1.pep
SRVDHASATRPEKIMFKVQAMGKLDSENHLSAATEVRLHQITGSCHWTYLALLESDTLRFGPSFCLSARIQEHALMPSSKLA

SEQ ID NO: 338401 - protein, 80 aa, Zea mays
  Clone ID: MRT4577_71788C.1.pep
KGGAPDRKKEGVPQGFPNPKVGKDEAVKLYKGRKKKNKTGESRGKKTWSIIEGRPAIKRGCFILSPPPESFLPFYFNIFF

SEQ ID NO: 338402 - protein, 75 aa, Zea mays
  Clone ID: MRT4577_71789C.1.pep
ITGSKISYPPQIFFFFFGGGRWINKEREVNYLLPGWEASSFNMTGQEWAFSSLNMSPKPSPGGKKALLWGGALNK

SEQ ID NO: 338403 - protein, 585 aa, Zea mays
  Clone ID: MRT4577_7178C.1.pep
VGEALTNLVWAIVTPLADVKASGNWMYAAKLDGEGADMYDAAVALADCMIELGIAIDGGKDSLSMAAQCDGEVIKAPGNLVISTYVTCPDITLTVTPDLKLGKDGILLHIDLAKGNRRLGGSALAQAFDQIGNDCPDIDDVLYLKKVFEAIQELLSQRLISAGHDISDGGLIVSVLEMAFAGNCGFKLDIDLEDRSLIEGLFAEELGLIIEVHSKYLNIVKQKLEIAGISANVIGEVTNSPEIEVFIDGNLHLKEKTSDLRDLWEETSFQLEELQRLKSCVKLEKEGLKCRTSPSWSLSFTPKFTDGKLLTASLKPKVAIIREEGSNGDREMAAAFHAAGFEPWDITMSDLLAGKSSLKEFRGIAFVGGFSYADVLDSAKGWAASIRFNQPLIQQFQDFYHRPDTFSLGVCNGCQLMALLGWVPGSGVGGSLGTGGDMSQPRFIHNESGRFECRFTSVSIGDSPAIMFKGMEGSTLGVWSAHGEGRAFFPDENVLATVVKSNLAPVRYCDDSNNITETYPFNPNGSPLGIAALCSPDGRHLAMMPHPERCFMMWQYPWYPKEWQVEKSGPSPWLRMFQNAREWCS

SEQ ID NO: 338404 - protein, 66 aa, Zea mays
  unsure (1)..(66): unsure at all Xaa locations
  Clone ID: MRT4577_71790C.1.pep
HNAESCSIISTLYISIYMMGRNHIFFFFVKIYLALRIVALRVAGTGWIFTCTXCTGNAFSPEXGPV

SEQ ID NO: 338405 - protein, 297 aa, Zea mays
  Clone ID: MRT4577_71791C.1.pep
MFHLYCLWIMQTIKNDDLEEIRELGSGTYGAVYHGKWRGCDVAVKRIKASCFVGRPSERERLIADFWKEALILSSLHHPNVVSFYGVVRDGPDGSLATVTEFMINGSLKQFLRKKDRTIDRRKRVILAMDAAFGMEYLHGKNIVHFDLKCENLLVNMRDPQRPICKIGDLGLSKVKQHTLVSGGVRGTLPWMAPELLSGKSNMVSDKVRLPCLIDVYSFGIVMWELLTGEEPYSGMRAAEIIGGIVNDSLRPQIPSWCDPEWKGLMESCWSSDPAERPSFTDISQRLRKMAAAMNVK

SEQ ID NO: 338406 - protein, 82 aa, Zea mays
  Clone ID: MRT4577_71792C.1.pep
VYSFGIVMWELLTREEPYSGMRAAEIIGGIVNDSLRPQIPSWCDPEWKGLMESCWSSDPAERPSFTDISQRLRKMAAAMNVK

SEQ ID NO: 338407 - protein, 564 aa, Zea mays
  unsure (1)..(564): unsure at all Xaa locations
  Clone ID: MRT4577_71793C.1.pep
MNSVRNTGDASPRIAGLIGYDRMPNPFTPPNGSILYRVGGHDVPAAMENTSAFGPRSNPTAAQYVQPFIAPESIQHQPGVPLREVYPERAYPEPMPSSYADGKVAVSALPLTDQLFRLDINTMKKLEGQDDGNSTRNVNETTLLHAVDEPSTLPHHVGSVHEVDPKQEKLTEKESRQKQHEAGATALQECGDISEDMLNFLPELIASVKKVTLEDAAETQIAQSDANAAVSPVPDDDDNGKKLDEATSGNTNANQDPDLQGSLDRQKSFKIESTTAEAEALSKGLQTIKNDDLEEIRELGSGTYGAVYHGKWRGCDVAIKRIKASCFAGRPSERERLITDFWKEALILSSLHHPNVVAFYGVVRDGPDGSLATVTEFMVNGSLKQFLRKKDXDRRKRVILAMDAAFGMEYLHGKNIVHFDLKCENLLVNMRDPQRPICKIGDLGLSKVKQHTLVSGGVRGTLPWMAPELLSGKNNMVSEKIDVYSFGIVMWELLTGEEPYSDMRAAEIIGAIVNDSLRPQIPSWCDPEWKGLMESCWSSDPAERPSFTDISQRLRKMAAAMNVK

SEQ ID NO: 338408 - protein, 98 aa, Zea mays
  Clone ID: MRT4577_71794C.1.pep
QTFMGVPVQGPNLGMARGKPSYHRLEINMVASGGTPTLARCGFGHPQGIFGSTTQIQCSGVLLEGHQLGSGKCGNGSPRTSIQVLCRERRKCSGWFRV

SEQ ID NO: 338409 - protein, 268 aa, Zea mays
  Clone ID: MRT4577_71795C.1.pep
MFEIVDMEFPYNAIIRRGTLNIFEAILHSAYLCMKIPSNNGSYQSMVAKKQQEGQKEDELKNSFITPSGTYYYLRLPEGLKNAGGSFSRMSDKVLSSQLDKNVLTYIDDIIEIVDEGVKRHMPSYFVFKVLGTSKRNYTEMEKVLYAVLMASKKLRHYFQSHNIIVPSSQPLKDIITNREASSQIGKWVVEIKEFVIDFVHRSSIQSQALADFIAGWTPSSQDKATQSDEVVWTVFCDGSWGSFGDGAANVIVSPPEVRTLYAVKLQF

SEQ ID NO: 338410 - protein, 111 aa, Zea mays
  unsure (1)..(111): unsure at all Xaa locations
  Clone ID: MRT4577_71796C.1.pep
XPLXNPPLVGVFLKKKNLYNVFLLSSKSKNLQILSKHTNTDIPFFFSFYSKNLQIFFVGGDTYPXXXTTPNNNTYYPTXIXPXXTHXTHTHLPXXLILQFIXPYXLFSHNX

SEQ ID NO: 338411 - protein, 188 aa, Zea mays
  unsure (1)..(188): unsure at all Xaa locations
  Clone ID: MRT4577_71797C.1.pep
KSPTQAGGALXDQNKPNTESXFVNEEDLQTLGAGRTLSPMIEELTLPSVTVAQTCNQTETTCRKRDSWVLHGGADXLYSNDLTDEDPEGAALDFPKNGDPFGPAKHASDTRARSANQPPQPAGGFGVDSRVESTLDGLTDLPYIGIYLXGGPNDHREITKDALLXSKLGXQQFEDNPAIINDPKLGVK

SEQ ID NO: 338412 - protein, 62 aa, Zea mays
  Clone ID: MRT4577_71798C.1.pep
AVVTTQSTFFFFFFFFFFGFFFFFFFFFFFFLLEILEMNRVQNIKYQIPIFKCCSTNKSKQQ

SEQ ID NO: 338413 - protein, 1051 aa, Zea mays
  Clone ID: MRT4577_71799C.1.pep
MLNENNSLVKAFRYARERLEREGNQKITLRLLGCNTRHDVQYNLPSNGEIAAIVVGDYTTGEYTYDVLVHDRECGLKRVSCLHPAYMPLQYPLLFPYGEHGFHIGIRYFGANEVGSSKRKYVTMLEFVRRHLHYRLDEPNPYTCYGRLSDQIDVDAYSTIEGNMLQFIASHQSELRSETIQGIADAIDKGFLNADSIGGRVVVPASFIGGRRYHVMNYQDAMAICRVYGPPDLFVTFTCNTKWREIADALRFEPGQQPCDRSDLVVRVFHMKVNEFIADIREGKTFGSILAVLYTVEFQKRGLPHIHCLVWLTDGSKEFSASIVDRFICAEIPDIVADPLGFSLVDEFMMHGPCGVDNKRCPCMKNDKCSKKFPKPFQEETILDGFGFTIYRRRPDDRHVLKNGVRLDNRNVVPYNMHLLKKYNAHINVEWCNKSNMIKYLFKYVTKGIDRAKVYFEITANTSNASPALQVAPPNEIQEYIDARTFNGQVYDTFRAACEARGLLESNNEWKLLFDEAIVSASSYQLRQLFVTVVMFCPVANVRALFDTYWLSFTDDIVRQLRDTLGNPNYNIPHEQLMSLLIRKLSAAFANSGGNINDYGLPRIDVQCAFMDENRLINDEIDPEPLMLSMHADSLVTQLNAKQRTIYDTIIGRVYKLIQVSSLIIWDEAPMTHRWCFEALDKTMRDILSEHTPSNALLPFGGKLVVLGGDFCQILPVVRKGSRSSIVNASITNSNLWHHVVLLRLRTNMRLFDPSLQEDAQKELDMFAKWVLSIGDGTLPAERRGSECEATWITIPVDLLPRVEGDKVAALVSEVYPNFLLNYQDPTYLSSRAIVCPNNATVDDVNKYVLSLVPRETIQYLSCDVIAKSSEHIPDFDVLYPTEFLNSIDASNFPTHKLELKKGAIVMLLRNLNQNKGLCNGTRLLVTELGQRILHCVALTGSNVGEEVLIPRIALNTTDVKWPFTLQRRQFPVRLCYAMTINKSQGQTLSRVGLYLKGPVFMHGQLYVAVSRSTSRNGLIILIENEDASCGSQTRNVVYKEVLAAADATAT

SEQ ID NO: 338414 - protein, 36 aa, Zea mays
  Clone ID: MRT4577_7179C.1.pep
KFHLIKNTPELHKATNPSQLKSYTVLTYRINIQHLF

SEQ ID NO: 338415 - protein, 76 aa, Zea mays
  unsure (1)..(76): unsure at all Xaa locations
  Clone ID: MRT4577_717C.1.pep
FIGLDEHDLLGATLFHHHSPTHVQSSALLLDCLRQVLTDQCXAFWTVKPFTPLKRGPEIFFFWGGTRGDLLLWGFW

SEQ ID NO: 338416 - protein, 167 aa, Zea mays
  Clone ID: MRT4577_71800C.1.pep
KKKKKKKKKKKKKKKKKKKKKKKKKKKKKKKNKRGGAFWPGPPLGAFFWGFPSPWGPFDLFFRGPISPFWGCFYISLAVFLQLWDWKNLGFPQFIPFAQLPFFSSWVNSKKARTVPLSKIFFTLIGDWPPPLALYSRRLWGFPSLGPFLLRWPLPPLFSFFFLSFFP

SEQ ID NO: 338417 - protein, 58 aa, Zea mays
  Clone ID: MRT4577_71801C.1.pep
VVPGSGPGKTRKVNLPLCIPKVLFNIDAGGDKTVDVVMVPRPNFKIPLNARPPLKNRN

SEQ ID NO: 338418 - protein, 54 aa, Zea mays
  Clone ID: MRT4577_71802C.1.pep
IIQTHRRLLVTDLLSAAYKVSPSPTCVTRQTTPYRRRRPRSNAFSSSSASTSIS

SEQ ID NO: 338419 - protein, 104 aa, Zea mays
  Clone ID: MRT4577_71803C.1.pep
PGSRSEARLGQNPTQPINASAAAVSDLQPDAVAEPLLQILERLNENKLRMPDTLDLPMALKTYDPPNDTLAERVCDPDPHPQAQDHCDLPRGSPHSAGGPYDCS

SEQ ID NO: 338420 - protein, 377 aa, Zea mays
  unsure (1)..(377): unsure at all Xaa locations
  Clone ID: MRT4577_71804C.1.pep
MAHSNGAAATATAGGGDMDDEXXXXXXXXXXXXXVALITGITGQNGSYLTEXLLSKGYEVHGLILRSSNFNTQRLDHIYHDPHXVPSXPRXXXRLFYADLSXXXXXXXXXDATXXDEVYNPAAQSHVAVSFEIPHYSADVTAXXXLRLLEAVRLSRKPMRYYQAGSSEMFGSTPPPQXEDSPFHPRSPYAAAKVAAHWYTVNYREAYGVFACNGVLFNHESPRRGENFVTRNITRAVGRIKVGLQTRVFLGNLSAARDWGFAGDYVEAMWLMLQQEQPGDYVVATEESHTVEEFLQAAFGYAGLSWKDHVVIDKKYFRPAEVDSLKGDATKARKVLKWKPKVGFQELVEMMVDHDIELAKKEKVLVDAGYRDPKQQP

SEQ ID NO: 338421 - protein, 377 aa, Zea mays
  Clone ID: MRT4577_71805C.1.pep
MAHSNGAAATATAGGGDVDDETAPVPRALAPARKVALITGITGQDGSYLTELLLSKGYEVHGLIRRSSNFNTQRLDHIYHDPHAVPSAPRPPMRLHYADLSDSSSLRRALDAISPDEVYNLAAQSHVAVSFEIPDYTADVTATGALRLLEAVRLSRKPMRYYQAGSSEMFGSTPPPQREDTPFHPRSPYAAAKVAAHWYTVNYREAYGVFACNGVLFNHESPRRGENFVTRKITRAVGRIKLGLQTKVFLGNLSAARDWGFAGDYVEAMWLMLQQDQPADYVVATEESHTVEEFLQAAFGYAGLNWKDHVVIDKKYFRPAEVDSLQGDSTKARKLLKWKPKVGFQQLVEMMVDRDVELAKKEKVLVDAGYRDPKQQP

SEQ ID NO: 338422 - protein, 77 aa, Zea mays
  Clone ID: MRT4577_71806C.1.pep
ERRKSFFLAPQAGEKTGTIPKRGGRESHSGRTFQKPQERQPGEVFRQGRAQPPQYPDYARNERPTELAPAVTKQPTA

SEQ ID NO: 338423 - protein, 53 aa, Zea mays
  Clone ID: MRT4577_71807C.1.pep
VRPQHNAFFAESKGMLTWFLLDRPPLFFPFISFFFFYFFFFIFFFFFILFFFF

SEQ ID NO: 338424 - protein, 140 aa, Zea mays
  unsure (1)..(140): unsure at all Xaa locations
  Clone ID: MRT4577_71808C.1.pep
STKYQVNNLDESRLVTWAVHKAWRFVEWAKREARRRPLARVDGIADGAVHNTLFLTGIPSNSQGALKRTARALSYGREAGAPWRLLPLLGVLKGGLLFFPALEGFPAHEQRGXGGAMAATEGVGQGNCSLRAGEXLAPCS

SEQ ID NO: 338425 - protein, 62 aa, Zea mays
  Clone ID: MRT4577_71809C.1.pep
LFSPPKSPESVGHRNWIPLPSPVPFPSPPVIVNRGGRPKRERKSTVGVALVHVFTLSKATHV

SEQ ID NO: 338426 - protein, 113 aa, Zea mays
  Clone ID: MRT4577_7180C.1.pep
ERRESEEDPPRAPLHLTGNQPIIEAKKGGSLGSARTLDQGRQTEDSIISSRTWVSSPVRPAAWRNRRRGHLMCTPLRHPWRATRDLCHWFWVLRLPFWGRMGPRVVDDCSPES

SEQ ID NO: 338427 - protein, 100 aa, Zea mays
  Clone ID: MRT4577_71810C.1.pep
CRFILFSIRFAAPCRRRNRSTVRHHHVVGHHIVVSSREDECWERPRYLHRWLDCLPREETPTLAAPMSESFILMASLLRLGHGIASTSPKIACLSDRDLS

SEQ ID NO: 338428 - protein, 126 aa, Zea mays
  Clone ID: MRT4577_71811C.1.pep
QRSSCHCTRRGDLFPSKATNFLPRFICCSACLRTRHSPNSLHPRCVVASTVPGDGSADISAAVQHEQATREMDRVHEQHLDRNWTDVDRNRMEMDRVREQHGSTGCQGEKNGLAPMKTDLVAKYYI

SEQ ID NO: 338429 - protein, 70 aa, Zea mays
  Clone ID: MRT4577_71812C.1.pep
TSKIQTAGRSISYTLINGGGASACATSIPLVSAPSACPSKKTTVARFLCSTATCMAISGGGCGRCCENDG

SEQ ID NO: 338430 - protein, 553 aa, Zea mays
  Clone ID: MRT4577_71813C.1.pep
RRRDQPAASQPHQEGVDSSDAAPPADAAAPDHPAAEKPEKVKRERRSRSSRSASTAAAAHAEVRLGGSFANKARGARGAAGWPAWLSAVAGEAIDGWTPRRADSFEKIDKIGQGTYSNVYKARDSLSGKIVALKKVRFDNLEPESVRFMAREIRILRRLDHPNVIKLDGLVTSRMSCSLYLVFDYMVHDLAGLAASPDIKFTLPRVKCYVRQLLSGLEHCHNRGVLHRDIKGSNLLLDNNGVLKIGDFGLASFFDPNHKQPMTSRVVTLWYRPPELLLGATDYGVGVDLWSAGCILAELLAGKPIMPGRTEVEQLHKIFKLCGSPTEEYWKKSKLPHATIFKPQQPYKRRIADTFKDFPQSALRLIETLLAIDPSDRLTATSALNSDFFKTEPYACEPSSLPQYPPSKEMDAKRRDEEARRLKAAGGRANGDGTRKTRTRDRPRAVPAPEANAELQANIDKRRLITHANAKSKSEKFPPPHQDGALGFPLGCSNHMEPSFEPPDPSSFSTVFPYEKSTVPTWSGPLADSAAGNQKRKHKSGRSSKQPATARAR

SEQ ID NO: 338431 - protein, 48 aa, Zea mays
  Clone ID: MRT4577_71814C.1.pep
STLFWPVYHKGGESRFWGHKSSSYYTIGTNELQVCFLIKEPPNFERGM

SEQ ID NO: 338432 - protein, 571 aa, Zea mays
  unsure (1)..(571): unsure at all Xaa locations
  Clone ID: MRT4577_71815C.1.pep
MGCVHGRPATSSPAPAATSSSRRDHPTASQTHKDGVDSAAAAPXRWTPRRRSSRRPRSPRRSSGSGGRGRRAPPPXAHTEVRLGGSFANKARGEQVAAGWPAWLSAVAGEAIEGWTPRRADGFEKIDKIGQGTYSNVYKARDSLSGKIVALKKVRFDNLEPESVRFMAREILILRRLDHPNVVKLDGLVTSRMSCSLYLVFDYMVHDLAGLAASPDIKFTLPQVKCYVHQLLSGLEHCHNRGVLHRDIKGSNLLLDNNGVLKIADFGLASFFDPNHKQPMTSRVVTLWYRPPELLLGATDYGVGVDLWSAGCILAELLAGKPIMPGRTEVEQLHKIFKLCGSPTEEYWKKSKLPHATIFKPQQPYKRRIADTFKDFPQSALRLIETLLAIDPADRLTATSALNSDFFATEPYACEPSSLPQYPPSKEMDAKRRDEEARRLRAAGGRGNGDGTRKTRTRDRPRAVPAPEANAELQANIDKRRLITHANAKSKSEKFPPPHQDGALGFPLGCSNHMEPSFEPPDPSSFSTVFPFEKSAVPTWSGPLADSAAGNQKRKHKSARSSKQPATARAR

SEQ ID NO: 338433 - protein, 81 aa, Zea mays
  Clone ID: MRT4577_71816C.1.pep
EAHKRRPSEMFRSTGGWTPTGFLWSLTSANSWKSACRKSCAPFPKGEKENIRTEVFLVSLESATRRSLLDAWLAFRLGCRS

SEQ ID NO: 338434 - protein, 40 aa, Zea mays
  Clone ID: MRT4577_71817C.1.pep
VRNRSSLVAIMIRVIAREVSFREQGHVRQLVQCRSIFSLD

SEQ ID NO: 338435 - protein, 87 aa, Zea mays
  unsure (1)..(87): unsure at all Xaa locations
  Clone ID: MRT4577_71818C.1.pep
GRARVHEEARPSFPFPPPADPKRPFGSPGRTPPPWPNGSLPGNFXXFDPWGLRFDPESLRWNVQAELVHCRWAMLGAAGIFIPEFLT

SEQ ID NO: 338436 - protein, 170 aa, Zea mays
  Clone ID: MRT4577_71819C.1.pep
GWASQSTDRPSVASTLTLRASSAAPEPPHLRPPHGRRSIAAMVGPTIERTQARLQACSGQTTRSTAWPSSSYPPPDGCARSPDLNREATQRLRTISRSKQEAAWSSLAGTVALLRPNCASSTVWEPHGTDPPSPSAWEPVCRCYGGPWLYADPRVAAASRGCSPLCDPRR

SEQ ID NO: 338437 - protein, 130 aa, Zea mays
  Clone ID: MRT4577_7181C.1.pep
MAGRANIPTNNSALIAIIADEDTVTGFLMAGVGNVDLRKKTNYLLVDNKTTVKQIEDAFKEFTTREDIAIVLISQYIANMIRFLVDSYNKPVPAILEIPSKDHPYDPAHDSVLSRVKYLFSAESVASDRR

SEQ ID NO: 338438 - protein, 254 aa, Zea mays
  unsure (1)..(254): unsure at all Xaa locations
  Clone ID: MRT4577_71820C.1.pep
NLLKRNVVGAPRPPXGRKWGMGPRPAPPPXGCPPPPPPFSFSXILGPXPARPPKKAPPRPLHWGARPPPPFPPGRDPAFPGVGGGGPPPRVPGRGLPPXFWARPFPIPPLLRPPPPXFFRPLFPGPLPPPPPRGGGPGARPPPGPXNPPPLGPPPPPPGGGPPPPPPPDPPPPPXPPPPFTPPPPGGLPSQKSFGPGGPPPXSRPPVKRPPLRPTGAPAPPPGPFPFFSPPPXVCFFPPPPPPFFFFFFFFFVK

SEQ ID NO: 338439 - protein, 74 aa, Zea mays
  Clone ID: MRT4577_71821C.1.pep
LFVYLWNNSLCVTPNYYISTCQHQSSSFRLAWSIIVEVGSALDSSFTNMLRSPDMANGTRSCSGRINARSGVGG

SEQ ID NO: 338440 - protein, 87 aa, Zea mays
  Clone ID: MRT4577_71822C.1.pep
MGRYGPFPAAAGDGGGCLPLPIVAAEGALAVLDGAIATAAFVQLARIHRHNQLQGWTRQKLAYIGKKRLALPGKPNWFSIIYMRVVI

SEQ ID NO: 338441 - protein, 91 aa, Zea mays
  Clone ID: MRT4577_71823C.1.pep
LTQTRHASPEVPETIFNSSFLASALPFFPIRTINRTTKLDFVMLRRASNYPLKSPVRLQVWGVLTTYFSRVFDALLVLYENTLRCVWLTVS

SEQ ID NO: 338442 - protein, 91 aa, Zea mays
  Clone ID: MRT4577_71824C.1.pep
DSIVTGRGVFCLSGGRPGSLTLLPERRPNSQWADHFGREHGPVGHGRLGFPRLRPEGVDQHRCERFYLPVLEHCSQAGAWPGMESPELVGA

SEQ ID NO: 338443 - protein, 115 aa, Zea mays
  Clone ID: MRT4577_71825C.1.pep
YGEVLESTIILDRETQRSRGFSFGTFCTEDAMRSAIEGMNGKELDGRNMTANEAQFRGCRRGSGGGYSGRRRDGGGYGGGGGRYRMGRGGYGRGGGYGGANRGGGYGYNDGNWMN

SEQ ID NO: 338444 - protein, 84 aa, Zea mays
  Clone ID: MRT4577_71826C.1.pep
EFAEDGAIEIIIIKTTGDMILDKPLADIGGKGLFTKEIDDALLQGSIVIGVHSVKDVPTYLPGGMILALGLPREGGGGAWVCVA

SEQ ID NO: 338445 - protein, 107 aa, Zea mays
  Clone ID: MRT4577_71827C.1.pep
LVVYRKTRQDNSKRRWNPKTSWPAPAASLSESNGEKTQRPLAPQCQPPVAPSFIRGSWPGLSALPSPVTFSLIPQTAHLPPRQSEVACSSPSTARQRDIAVKRRLRV

SEQ ID NO: 338446 - protein, 67 aa, Zea mays
  Clone ID: MRT4577_71828C.1.pep
NQHTQSQRTHASQVIIFIRQCLGWPSNMMPEPISTRRDHKELGAHNFSSIQHASLAETVSSAITSGH

SEQ ID NO: 338447 - protein, 355 aa, Zea mays
  Clone ID: MRT4577_71829C.1.pep
MSRTLVQPVGQKRLTNVAVVRLRKHGQRFEIACFPNKVLSWRSRVEKDIDEVLQSHTVYSNVSKGILANSKELAKAFGTDDLTQICIEILEKGELQVSGKEREAQLSSQFRDIATIVMEKTINPETRRPYTITMIERLMHEIHFAVDPNLTSKEQALKVIKKLTEHFPIKRAPLRVRFTAPKPNFPGLTEKIGGWNATIISKDELSTQPSIVCEIEPSLLRSCEERLKDVQGRVEVLSVSTHVESGPSVEQHNSVEVPHAAPVKEPDAVAQISETMQKQSISTESQGNAQGKQQRRCKECDVLVEDKLYREHCKSGWHKHNYTRHKNGLPPLSQEECMVEMELADSKKDLKDYDF

SEQ ID NO: 338448 - protein, 86 aa, Zea mays
  unsure (1)..(86): unsure at all Xaa locations
  Clone ID: MRT4577_7182C.1.pep
MALPNQGTVDYPSFKLVIVGDGGTGKTTFVKRHLTGEFEKKYEPTIGVEVHPVDFATNCGKRRIYXWNTAGXENLGDITNEYYIYV

SEQ ID NO: 338449 - protein, 38 aa, Zea mays
  Clone ID: MRT4577_71830C.1.pep
HKHTRSSNSNEHTMANQHSPFRILRTTSRATRGYYLSL

SEQ ID NO: 338450 - protein, 122 aa, Zea mays
  unsure (1)..(122): unsure at all Xaa locations
  Clone ID: MRT4577_71831C.1.pep
MARTQSDGAVAAVAAALLLAAAATTSEXVITCGQVSSAIAPCLSYARGTWTGPSATCCTGERNLXKSAASTGTNRPTDCNCLKNASRGVRSLNACNAVSIPSKRVVNIPYTMSTCTDCCNVN

SEQ ID NO: 338451 - protein, 148 aa, Zea mays
  unsure (1)..(148): unsure at all Xaa locations
  Clone ID: MRT4577_71832C.1.pep
CPIRSCCLLPFCSPAPCSVPCVGAAKGAERIXDYIAIDPDGAXREEDGLYGDTLLQGLAKEGLIQAGYHGLEDMDACSDECDEHMEHEWLDKLPQPSXEEGYVLTRESRNRELNKHARLGCQGVLEPELQGDGRNKYTMLVGEDSIKY

SEQ ID NO: 338452 - protein, 77 aa, Zea mays
  unsure (1)..(77): unsure at all Xaa locations
  Clone ID: MRT4577_71833C.1.pep
MATKILALLGLIGLFGNAKKGVNISQRXFVPRAFIPKFLQPVTXRGFEHLVVQANLQQQALAASVLHQPIAKLEQQS

SEQ ID NO: 338453 - protein, 87 aa, Zea mays
  Clone ID: MRT4577_71834C.1.pep
GQTNHTFLSNSLTEGNTPHKGKGTIYLHYPRLEQKHGAQGWNWIYWTKYDGVYWAPDDKQGLKRVGRNRQGAGAFNAFPWGTPRGQG

SEQ ID NO: 338454 - protein, 45 aa, Zea mays
  Clone ID: MRT4577_71835C.1.pep
YVFYRVQNHDGRSCLLATYRNDRSTHTSIIRRRTCTLGMSESFIL

SEQ ID NO: 338455 - protein, 24 aa, Zea mays
  Clone ID: MRT4577_71836C.1.pep
LYTYMKLQFYGILSNSFKYILAFK

SEQ ID NO: 338456 - protein, 101 aa, Zea mays
  Clone ID: MRT4577_71837C.1.pep
PIYMPQDQTKIPHKGSNTSNARHLPSAQPTASPLPEQGGGASRAPLLGRCFNCAHLFNVILSAADCFNKWAGADPVRQEVGCLRPHPAVPTVAETFSRGCG

SEQ ID NO: 338457 - protein, 167 aa, Zea mays
  Clone ID: MRT4577_71838C.1.pep
MAAPAVKVHGWAMSPFVARALLCLEEAGVEYELVPMSREAGDHRQPDFLARNPFGQVPVLEDGDLTIFESRAVARHVLRKHKPELLGSGSPESAAMVDVWLEVEAHQHQTPAGTIVMQCILTPFLGCQRDQAAIDENAAKLTNLFDVYEARLSASRYLAGEAVSLAD

SEQ ID NO: 338458 - protein, 68 aa, Zea mays
  Clone ID: MRT4577_71839C.1.pep
GGAKQSWAINKQTLFWGLPHEFGWGKNQNKVYPCFLLKNFFEGLKPKTFGLRKSFFTINRALFLKGGQ

SEQ ID NO: 338459 - protein, 425 aa, Zea mays
  Clone ID: MRT4577_7183C.1.pep
WPCRGVGDGEGNGNEPAAPATPKPRPTSMAIHLRAHAFAANPLRGVSAATTSMSPSAAAEALRYLLDPSSAAAAANPSQYLSKILPFRRGRPLARSTDPPAVPAWRLAWLPPSRVPGVALDAFVFLGALVEGDGKEASAYWAVDVSEGEGARVGGPADGDGPSAFVDLRTLMVATDWSDKDAMAELAIAGHARALLEWHSTAKFCGACGAKAVPTEAGRRKQCSNDSCKKRIYPRIDPVVIMLVIDKENDRALLSRQSRFVPRMWSCLAGFIEPGESLEEAVRRETWEETGIEVGQVVYHSSQPWPVGPNTMPCQLMVGFFAYAKSLEINVDKQELEDAQWHNREDVKKALTFAEYEKAQRTSAAKVDQICKGAEKGQNPSADFKVGSGEPAPMFVPGPYAIAHHLISSWAFEGAPKLPSSFSNL

SEQ ID NO: 338460 - protein, 91 aa, Zea mays
  Clone ID: MRT4577_71840C.1.pep
NWRGSLLIIFRRFSRRRWQLIYGGAPSADLMCLYMHISPNKTQQIKQVNFGHRPHSTRSTISMRASTKASSNTSPHRTVGPMFTGRRKGSP

SEQ ID NO: 338461 - protein, 96 aa, Zea mays
  unsure (1)..(96): unsure at all Xaa locations
  Clone ID: MRT4577_71841C.1.pep
HNTPRSFESVLKDTAPYLPLFSLTLSHSEXNPLFFXKVLMTIYFYNNVFILIITLSIFIFAHNXISLFINTLNASLLSLYLHLIYFHNKSLFITLL

SEQ ID NO: 338462 - protein, 66 aa, Zea mays
  unsure (1)..(66): unsure at all Xaa locations
  Clone ID: MRT4577_71842C.1.pep
GINKTCNTPLIVFYTXMQRRSXLNNPIKKGRTSVFQNSSTRAREGLYSGRAPFLQXCAMRWLPSVC

SEQ ID NO: 338463 - protein, 91 aa, Zea mays
  Clone ID: MRT4577_71843C.1.pep
WQGRGGNLPQYHVRQVGVFLNPPFVNKPEVFTRAPQPPSKFEEGGNLVDPDPKDQVPKGVRALQALALRMPLGKLPVAAPSFLKSSSSGGP

SEQ ID NO: 338464 - protein, 107 aa, Zea mays
  Clone ID: MRT4577_71844C.1.pep
PRGRPGIELVIFLPALCRKMGVPYVIVKGKARLGTVVHQKTAAVLALTEVRSEDKNELQKLVTAVNDGYLESHHKEASRHWGGGIMGAKANARMEKRRKAVENAIKI

SEQ ID NO: 338465 - protein, 116 aa, Zea mays
  unsure (1)..(116): unsure at all Xaa locations
  Clone ID: MRT4577_71845C.1.pep
ATVLDXPYQCRMSRNGFWQWEDESPPSGAWKGTSGGHAVLISGYSEGKGNFAMPRGVTYGHLLSSMRAIMKNRGGGCDLQGAIGAPIRTVANFSGVQEPNLSSSETFDIYRKQFVL

SEQ ID NO: 338466 - protein, 117 aa, Zea mays
  Clone ID: MRT4577_71846C.1.pep
MVRYMIHTYILLIELCCLASIYITNRHMGMQMPDAHASVVGAMTHSFVRTLECQPRGVTYGHLLSSMRAIMKNRGGGCDLQGAIGAPIRTVANFSGVQEPNLSSSETFDIYRKQFVL

SEQ ID NO: 338467 - protein, 58 aa, Zea mays
  Clone ID: MRT4577_71848C.1.pep
SRKLHAQLHTSHKFRVFSLSLSNKKRTLNMLSYFIERFPANTAHASAHTSAHASAHAS

SEQ ID NO: 338468 - protein, 305 aa, Zea mays
  Clone ID: MRT4577_71849C.1.pep
GASLPSPAVSGQVHLGVLELRGINELSSVAREMVRLIETATVPIFAVDTDGCINGWNAKIAELTGLSVEEAMGKSLVNDLIFKESEATVEKLLSRALRGEEDKNVEIKLKTFGSEQSKGPIFVVVNACSSRDYTQNIVGVCFVGQDVTGQKVVMDKFVNIQGDYKAIVHNPNPLIPPIFASDENTSCSEWNTAMEKLTGWSRGEVVGKFLIGEVFGNCCRLKGPDALTKFMVIIHNAIGGQDYEKFPFSFFDKNGKYVQALLTANTRSKMDGKSIGAFCFLQIASTEIQQAFEIQRQQEKKCYAR

SEQ ID NO: 338469 - protein, 55 aa, Zea mays
  unsure (1)..(55): unsure at all Xaa locations
  Clone ID: MRT4577_7184C.1.pep
IPLTFRKSGSPASSRSEFISRSTNLTYPQAALXFFFFFLFTKDLVNFFSXLSFFF

SEQ ID NO: 338470 - protein, 173 aa, Zea mays
  Clone ID: MRT4577_71850C.1.pep
ALAPGLTSRQPVNFGGNGNATIRCKYCRASLSVIPGERAIQCAQCNCVTRIRRADRIPLARPAHVPAAFQGALGKKRAALVGIMYAGMRPGCGDLRDRGTVGGEEGGRVGPAVGCISSERHNEITKHVQSLVFIREREGENGTSLETAWFLLPAYVINKVTWKLFYPRAMQVE

SEQ ID NO: 338471 - protein, 99 aa, Zea mays
  unsure (1)..(99): unsure at all Xaa locations
  Clone ID: MRT4577_71851C.1.pep
MGTIPVIPATMLEGDLLGASSTACFCATDTDTDSSIRFPSSYGAVVLPWESCDYHTKEPFIKPSLLRYNDLVDKSSSNXNSAXDGTPGNGFFSRDWIVN

SEQ ID NO: 338472 - protein, 105 aa, Zea mays
  Clone ID: MRT4577_71854C.1.pep
LLQSFCASGGPHQIWACDCCRRQAIVQLQRTVSFAMYLIRRSELAWIYVNRPMPPFTRACIQHIQCLFEVHITLSLRCPNLRGASVHSLLRPSPLYRSESETALW

SEQ ID NO: 338473 - protein, 41 aa, Zea mays
  Clone ID: MRT4577_71855C.1.pep
QPWTHGILRIERESHIHPYPRLHMVTDYPCLYFVYELIISI

SEQ ID NO: 338474 - protein, 88 aa, Zea mays
  unsure (1)..(88): unsure at all Xaa locations
  Clone ID: MRT4577_71856C.1.pep
ISMHIGQDDIHVGNAXCELYCLDXVIQADCXMPVVNXIGGGDDAFNTFFSESGAXKTLPRXCCLMTLNPTDIXRCITGTHRQLFHHDK

SEQ ID NO: 338475 - protein, 56 aa, Zea mays
  Clone ID: MRT4577_71857C.1.pep
MTPTMNGCNLQTLGEHGEATPCALGDQDHGLKDPYEGQDGGKPLKVNGHHGLCLNH

SEQ ID NO: 338476 - protein, 61 aa, Zea mays
  Clone ID: MRT4577_71858C.1.pep
RGMGFFFPTSTKGLKTVRVCAYGNARNNHRVDPQGMMALFAATGAEAAIAELQRGPQPEVR

SEQ ID NO: 338477 - protein, 62 aa, Zea mays
  Clone ID: MRT4577_71859C.1.pep
RTKLLPPTQLKVSPGKKKRVLHSTSTNKKGAESIRTSPNGRVTGHQATSLNAMHEEGPPPGP

SEQ ID NO: 338478 - protein, 53 aa, Zea mays
  Clone ID: MRT4577_7185C.1.pep
IFILYRQIFHVLSSIITFYIYLFFFATIHLFLFNMERGSYLKMFYFQITRKEL

SEQ ID NO: 338479 - protein, 412 aa, Zea mays
  unsure (1)..(412): unsure at all Xaa locations
  Clone ID: MRT4577_71860C.1.pep
MAATLLSHVVSDLCIGRPRVLTLPPSTPVAAALAALRTGXPIRLRGRRTGCXATRRPRRXVKVTVADILCYACGDAGNLRDVAAALSRPVAVVVAGAVAXGYSYTVWPNXRRLLDAIDVLLTDGCQGLLVPLSARTRKRHHQHQGQAPSSDAGALLATSSDCCVLTREDIVRHLFGSISHFSPVAALTVASLGLVRRDVVHAVHVDDDGLDVIPLLRRAVSDGTAVAVVADDDALVGEICPSVLASCDVEAVSAAFAGLSAGDTMAYIDCSLSSHSPPEFLVRAIRAQLAGKGLDAMAELVECAGKDTAVLPLSPSSSLSSTSSDEDSPSGRARRPRRMSSGSFGWRSTEDVVACHSESSLVAVMAQALAHRVGYVWVANETSGALVGVVRFADVLAVLREQLRPQSVSPRC

SEQ ID NO: 338480 - protein, 106 aa, Zea mays
  Clone ID: MRT4577_71861C.1.pep
IRGFWAYGKLPLDGNEQKTPRGPPKKGTLGPKVTQKLNPPHFVPCFFLFPQREMPLPSRAWSKFFLGAGKKAPPNILVPPCLTPCFCLATHLSNGLVNFWPPTISP

SEQ ID NO: 338481 - protein, 160 aa, Zea mays
  Clone ID: MRT4577_71862C.1.pep
AAAPAYTHLGGYKGHPRVYGSFDHSVGAGPGDRTSTADGTRRCTWPWHPKFVSRLVQLDVASAFPVLILTIRSSACTMMSTASAVLYVACIDRPFVVVLPICQRVEQIRSKSTNLVFITYCSVVTHNNMLLPEPSNHGHSILLVSTWVSSPSRRGQGEEC

SEQ ID NO: 338482 - protein, 61 aa, Zea mays
  Clone ID: MRT4577_71863C.1.pep
INRVVLGGPRSYDRHPGRNQSFLIFLEMVQFPMLLWFANICGWPCDPIGRTHKPVSYYSSE

SEQ ID NO: 338483 - protein, 64 aa, Zea mays
  unsure (1)..(64): unsure at all Xaa locations
  Clone ID: MRT4577_71864C.1.pep
VPPPVFFKKCFXFFFFFFFFFFFFFFFFFFFFFFLKVTPVTFIHXLSSFLMTPTHRNTYMHKCA

SEQ ID NO: 338484 - protein, 106 aa, Zea mays
  Clone ID: MRT4577_71865C.1.pep
LFRSPSLAPASVNLLSSPHPGSKKRGPGKWGGAKRSCIWPSLFKLYCQRRKNRKGRHRSLNYKNTLLKNSAASRPGPYHPLYGIGSRSHSCYFLPEETKPRSPPLL

SEQ ID NO: 338485 - protein, 35 aa, Zea mays
  Clone ID: MRT4577_71866C.1.pep
TCRLFMQVKSTLISSRIGLASHHVHASCTRPITVD

SEQ ID NO: 338486 - protein, 160 aa, Zea mays
  Clone ID: MRT4577_71867C.1.pep
GDGNANVDLEKDRIETRGLSKHAKTYKEDDDKMRTTAANVAARVAAGGDDMLSKWQLLAERNKQRSEGGDGSSGSVPGNMLQHRPSLKSGKDLREEHEVEKRGYSTMLGSGGVRRSPLTKVARSISMKDVVAALEREPQMSKSSLLFRLYGRPLTEPSAK

SEQ ID NO: 338487 - protein, 88 aa, Zea mays
  unsure (1)..(88): unsure at all Xaa locations
  Clone ID: MRT4577_71868C.1.pep
NARGNKDAQQQSAKDSKDTTGTEDKEGKRTQQPRGSGKDPGHQKXPKGREAENKDELGTKEEATAPRNHRKANATQTKETEEENTRTT

SEQ ID NO: 338488 - protein, 132 aa, Zea mays
  Clone ID: MRT4577_71869C.1.pep
PSGLPGPLGGGPGFTVAPGKGRDAYIPFYRVPQKQNKVVIPAPIWAKGLCFTNQPCFLNPQDVENNKPRGGEPPPLANTQLLESGGSPGSQNQGSAPAMLGAPEFPRVLIFIVFSPEPWEVFFPLPFWGPAV

SEQ ID NO: 338489 - protein, 81 aa, Zea mays
  Clone ID: MRT4577_7186C.1.pep
ARIPPSEFGPAPPAPFWVTFLSQILFWNSGEKDLGFNANQFANNGGGGRQHSITYRSGFAMCFYWSSGGAKFKLLSKQGQM

SEQ ID NO: 338490 - protein, 73 aa, Zea mays
  Clone ID: MRT4577_71870C.1.pep
VPNHPRLLLNETMLCLAQVGFSQEPARLGIRCSWAARATHSCMRFSHIPVPLRPGYICLVAWVVYRSLLIGRS

SEQ ID NO: 338491 - protein, 259 aa, Zea mays
  unsure (1)..(259): unsure at all Xaa locations
  Clone ID: MRT4577_71871C.1.pep
MAQLPPRAPSAAPQDHWPPAAGEFLGFAAARRGAHRRSASDSAAFLEAVPIDDDVVIGGGGGGGDDFDRLDHDQLLSMFSDXSTSPSPSPSPAAPGRGRSSXDAGGAGADDGVADSSPAAADGVAEPKRVKRILANRQSAQRSRVRKLQYISELERSVTSLQMEVSALSPRVAFLDHHRSLLTVGNSHLKQRIAALAQDKIFKDAHQEALEKEIQRLRQVYQQQQVKVATTGGADIATAASPSMQARQELLACEGAAIR

SEQ ID NO: 338492 - protein, 127 aa, Zea mays
  Clone ID: MRT4577_71872C.1.pep
LKAPPPIISLFLPFFFFFFYFSLNYFFFFFFFFFFFSSFKPSDIIWHFSLKQFRCTSKGTGLVESVHGNKTCTLHTSICSKQGLHVLRPRTPGLYREEMKCTQKTCCPQNQLRALGLRVGMNKNQIK

SEQ ID NO: 338493 - protein, 52 aa, Zea mays
  Clone ID: MRT4577_71873C.1.pep
LHVSSLSSCLSESNNYGLFLLGLSKVLVLRQGNLVHIWSSNRHMIKSLSFKN

SEQ ID NO: 338494 - protein, 546 aa, Zea mays
  Clone ID: MRT4577_71874C.1.pep
TRSCPGYSVGGLDEAHERTIYTDILFSLLKQLIKRRNDLKLIVTSATLDAEKFSGYFFDCNIFTIPGRTFPVEILHTKQAESDYMDAALITVLQIHLTEPEGDILLFLTGQEEIDHACERLHERMKAFGGDIPELIICPVYSALPTEVQSKIFEPAPPCKRKVVVATNTAEASITIDGIYYVVDPGFAKGTSYNPQLGLDSLVITPISQASAKQRAGRAGRTGPGKCYRLYTESAFRNEMPPTTIPEIQRANLGWTVLNMKAMGINDLLSFDFMDPPASQALISAMEQLYSLGALDEEGLLTRLGRKMAEFPQEPPLSKMLLASVDLGCSDEILTIIAMIQTGNIFYRPREKQAQADRKRSNFFQPEGDHLTLLTVYEAWKAKGFSGPWCVENFIQVNSLRRAQDVRKQLLEIMDKFKLNVISAGNNSTKIGKALTAGFFFHAARKDPSDGYRTLADHQQVYIHPSSALFHQQPQWVIYHEIVMTTKEYMRDVTAVDPRWLLELAPRSYKSVDPTKISKRKRQERIEPLYDRYNEPNSWRLSKRRW

SEQ ID NO: 338495 - protein, 98 aa, Zea mays
  Clone ID: MRT4577_71875C.1.pep
GGPGMFRPGTRPASKGQGMSVRSSASARKAKGLEQTTAGPRASLLSHRPQSDRSARLLVRAHWLSNMGMMSPPPPPHAVYTQQQTRQWTCYAHTPNKA

SEQ ID NO: 338496 - protein, 173 aa, Zea mays
  Clone ID: MRT4577_71876C.1.pep
REVFDGTVQNMHLHWKHRELVKIVVRGKSFAQAKHIAISLEAESEGVLISLDKTTKGYVIIFYRGKNYRRPQIMKPRNLLTRRQALARSIELQRREALKHHISSLQGKISKLQSQLVQTKVASEKHDLKLLQTVEDDFSSSDDDVEDDGEEAYLQTYSSADEEDAEDDANEYI

SEQ ID NO: 338497 - protein, 73 aa, Zea mays
  Clone ID: MRT4577_71877C.1.pep
VALLNTISRYTYLQTDSESILAHIQGITQRVTNTKSQLLFRGIELVLQSRPLSSCIFSIDEKMRSNKLEQCSH

SEQ ID NO: 338498 - protein, 439 aa, Zea mays
  Clone ID: MRT4577_71878C.1.pep
MAATYQTGLVAEPQLLNTEIITRRATNCVADTNRKDKCVGYLDVFVHQARDIHNVCIYHKQDVYAKLCLTSSPDVSCSTKVINSAGRNPVFEESLRLDVQTVDASLKCEIWMLSRVRNYLEDQLLGFALVPLVDIVIGNGKLVQEFSLTSTDLFHTPAGFVHLSLSYAGCSPDVVLISSPNNSPSTVYDSGIDHVVPSQLEKIVFPDLNVEKEDEIMVSKYLEMTSDSETPIKVENGVSLHSANDDDVPSKLEKIKFIDSESRAKAENGKMLLFGVAVPSTAICADKVEEHHDESPLSCVSTTGSSTTLSATTQSVSEPSETSVEASPRQCHREKSQDVTGGEANSSETPPKDEVIKPVISVNLQPEQSVVQQDIVDMYMKSMQQFTESLAKMKLPLDVENSSPSNEDSYSSTVEKTSPSPSSSAAKGSRVFYGSRAFF

SEQ ID NO: 338499 - protein, 69 aa, Zea mays
  Clone ID: MRT4577_71879C.1.pep
NKNNRYAVAPPTFKKAKYGGSPFTNLPCPRLLTRRYVFFCGNHVKSFARRPSTPDRGKHRELQPNYCCP

SEQ ID NO: 338500 - protein, 80 aa, Zea mays
  Clone ID: MRT4577_7187C.1.pep
GTISKTTGVHTGQEDGRCTAIEREASNMPHAMVRTLRHLFIGGALPWPPLGLWPGVVGAESAMSSSLLVAVAGTCSRVLP

SEQ ID NO: 338501 - protein, 439 aa, Zea mays
  Clone ID: MRT4577_71880C.1.pep
MAATYQTGLVAEPQLLNTEIITRRATNCVADTNRKDKCVGYLDVFVHQARDIHNVCIYHKQDVYAKLCLTSSPDVSCSTKVINSAGRNPVFEESLRLDVQTVDASLKCEIWMLSRVRNYLEDQLLGFALVPLVDILIGNGKLVQEFSLTSTDLFHTPAGFVHLSLSYAGCSPDVVLISSPNNSPSTVYDSGNDHVVPAQLEKIVFPDLSVEKEDEIMVSKYLEMTSDSETPIKVENGMSLHSANDDDVPSKLEKIKFIDSESRAKAENGKMLLFGVAVPSTAICADKVEEYHDESPLSCVSATGSSTTLSATTQSVSEPSETSVEASPRQCHREKSQDVTGGEANSSETPPKDEVIKPVISVNLQPEQSVVQQDIVDMYMKSMQQFTESLAKMKLPLDVENSSPSNEDSYSSTVEKTSPSPSSSAAKGSRVFYGSRAFF

SEQ ID NO: 338502 - protein, 68 aa, Zea mays
  Clone ID: MRT4577_71881C.1.pep
SILTVLHRRSLYTIYYIILLIHKSIVHAADGNVSVHWSRPYQSLVYIAVRSNRFSCIILNNRISKDNG

SEQ ID NO: 338503 - protein, 142 aa, Zea mays
  unsure (1)..(142): unsure at all Xaa locations
  Clone ID: MRT4577_71882C.1.pep
THASLTPGLIWKEGGGGXWWMQFGKDYVLGYWPSFLFSYLADSASMIEWGGEVVNSQPDXVHTGGGMGSGHFPEEGFSKASYFKNMQVVDXTNNLKAPKGLGTFTEQSNCYDVQNGNNGDWGTYLYYGGPGRSCNCAGLSRC

SEQ ID NO: 338504 - protein, 101 aa, Zea mays
  unsure (1)..(101): unsure at all Xaa locations
  Clone ID: MRT4577_71883C.1.pep
FGVGGRFSVXGAFLGGPFXXAVVVXSXFLXPXXXXXFXSPPPRXXRCCXXXXXASXRFXXXLSFRXXVCXLLFLLXXXXFXVLPCXXVXSCPRRAPGXWSP

SEQ ID NO: 338505 - protein, 86 aa, Zea mays
  Clone ID: MRT4577_71884C.1.pep
GSTMHDVLAPLIYAVIQSFENLWTGFRSTDRQTTLLLIGHYWQLSDQMTGLNLCYVLTTAFVREHRMWDAFVCAKDPPSKRYVCMR

SEQ ID NO: 338506 - protein, 176 aa, Zea mays
  unsure (1)..(176): unsure at all Xaa locations
  Clone ID: MRT4577_71885C.1.pep
TSSSVSRFSSSSRPPRVEPSDPQTPKAKGKAKGKYRALFNFGDSLADAGNLIANGVPDILATARLPYGQTYFGKPTGRCSDGRLVIDHLAQEFGLPLLPPSKANRSDLSHGANFAITGATALDTPYFEARXLGAVVWNSGALMTQIQWFRDLKPFFCNGTKEECKEFYANSLFVVG

SEQ ID NO: 338507 - protein, 45 aa, Zea mays
  Clone ID: MRT4577_71886C.1.pep
ALQTPAHTGGRARQIVNSLFFSPIDLYAGLDLFLMLFALVCERIR

SEQ ID NO: 338508 - protein, 64 aa, Zea mays
  Clone ID: MRT4577_71887C.1.pep
NARMPTALASATPTRWSAAVYTSTTATLMATPRPHLEDPHDATIPVLPLVSLPALTRFCCGHLP

SEQ ID NO: 338509 - protein, 49 aa, Zea mays
  Clone ID: MRT4577_71888C.1.pep
AASSEWHAQTECMRILSMFGAPVSDACQKKKKKGRSKDQASSRQRRQAL

SEQ ID NO: 338510 - protein, 90 aa, Zea mays
  Clone ID: MRT4577_71889C.1.pep
FVWPGVLGPVVGWLLGLRSFLLSPCSLCLLVVPLSPSVLWSFAFGVFSVAWLAWVLAVRGPPGMVALSRCCVSGLASLSLLLLVLAGRVG

SEQ ID NO: 338511 - protein, 38 aa, Zea mays
  Clone ID: MRT4577_7188C.1.pep
QDASRIISASSATPVRGTMRERVIGQIRSRRLSVAASF

SEQ ID NO: 338512 - protein, 89 aa, Zea mays
  Clone ID: MRT4577_71890C.1.pep
TLKNVRKMNVYNQKNKKEARTQEDSSEVSRHPPRSEESSGADGAVRAGGWPLARSVGFVTGERRANRDDDGQEEAHRMGMRSPRVRDAW

SEQ ID NO: 338513 - protein, 90 aa, Zea mays
  Clone ID: MRT4577_71891C.1.pep
GSSSFRWLIVRAPPYSFGSARSPPPLKGRGSRPPRFLWYLGPPRAGAISFRKGLDFFFRLVVAFNLTAFLVFCQPGPFFWLLKRPSFFAP

SEQ ID NO: 338514 - protein, 193 aa, Zea mays
  unsure (1)..(193): unsure at all Xaa locations
  Clone ID: MRT4577_71892C.1.pep
MRRRTHLPPRLKPFPLLPIPSVGRRSIPYDDTMRERISIHSGHAGIQDGNACCELYCLEHGIQADGQMPSDKTIAGGDDAFNTVFSETGAEKHVPRADNDDLEPTVIQDERTATYHQLFHPDELISDKEDAANNFARGHYTIGNEIVDLCLDRIRXLYDNCTGVQGFLVFNAAVGGTSSGLGSLLLERLSCDY

SEQ ID NO: 338515 - protein, 57 aa, Zea mays
  Clone ID: MRT4577_71893C.1.pep
SACLMQADTGGSRVFFLCNSEFSAVNVLVCRNFQVSFCCWHGTIAFLEPTQKTCTCS

SEQ ID NO: 338516 - protein, 191 aa, Zea mays
  unsure (1)..(191): unsure at all Xaa locations
  Clone ID: MRT4577_71894C.1.pep
MIEQSKHLQTVMAAPVGANAIGAGDELLLLGTWSSPWVIRARMAMGLKGRSXEYLFVDLGNKSGLLLRSNPVHKKVPVLIHGGRPVCESLVILQYLDEAWPTAGPPLLPADPYDRATARFWAAYINDTFFPAFRALFRSLTDEQRGEALRNALPAVETLERALAECSGGKAFFGGDAVGIVDVALGSHLVW

SEQ ID NO: 338517 - protein, 61 aa, Zea mays
  unsure (1)..(61): unsure at all Xaa locations
  Clone ID: MRT4577_71895C.1.pep
RRTSIPYTQLWGGGGGSXHPPPHYPXPIQIFXPLIAPAYFYLXLXQTLFLSAGVIVSGSVL

SEQ ID NO: 338518 - protein, 133 aa, Zea mays
  Clone ID: MRT4577_71896C.1.pep
PLFSGLCYQLLPRLFSGFRGPAFCGGPASAPPPFPRAVPRPLAPPARVLPAVPGGCSLGPCAFVNGLPGGPLVFFCCVSPCSFWFSPVFLFSLGFFFFLFFPFLDLFVWGSPPPPPFLWKLVAFFCPFGKRTN

SEQ ID NO: 338519 - protein, 297 aa, Zea mays
  Clone ID: MRT4577_71897C.1.pep
MAGRPPPSYARYPALQGGRPFAGEEHPSDSRVVYPSYLAPEGSVASYYASRPVLPVGSDVLRNDVISQPRTHGYDGPARVTNPALAGLTGLPAGVTARGPSALEDPSLAGLSGLAPVRATGGATARGSGALEDPSLAGLSGLAPARALGPRALKEELDVVGRSSSVGRGASIPDVEHHSSIPNFDGPSENESNILFVDCLPTDCTRREVAHLFRCFPGFKDIRVVHKEPRRSGDKAYVLCFVEFENAKFARTPMQALQGYRFDDRKPDDRCLEIHFARFPFALPGAGAGAARDHRKR

SEQ ID NO: 338520 - protein, 96 aa, Zea mays
  Clone ID: MRT4577_71898C.1.pep
LQASFPLKGVGRDLLFNPFPFSLGVPLSPLNSLGLLEPGPHRFPLFPLDFVWCGKSPEIPPFCVPKKKKKKKKKKKKKEKKKKKKKKKYSALLPLL

SEQ ID NO: 338521 - protein, 60 aa, Zea mays
  Clone ID: MRT4577_71899C.1.pep
SIRLDEQATTTFLLSYQPSEKPDAMGAHLSSTEEVAIHARPVKCPPSYQYYDPPLMPSNS

SEQ ID NO: 338522 - protein, 183 aa, Zea mays
  unsure (1)..(183): unsure at all Xaa locations
  Clone ID: MRT4577_7189C.1.pep
PCQPRLLHLSILLHQPSICNSSASSLWLPQPWPSPPSYPPRPQHQHVWKRAQRFLNGNSQTSSTTSRRAQTPPQSSLSSTTPLSTTRPTATASQSPRRPSLTARPTTPARSPTEPTLPPSSTTTRRASTPSSSTGPASRRVVGSRPLATXSTETKSNCHSTTKSETCTKASFTVPVLEMRAVL

SEQ ID NO: 338523 - protein, 50 aa, Zea mays
  Clone ID: MRT4577_718C.1.pep
PICSNKHSYQATYLYHPSHFNNLQPYLSFTHHYKPSSHITSINSFHLSST

SEQ ID NO: 338524 - protein, 111 aa, Zea mays
  Clone ID: MRT4577_71900C.1.pep
FNHRHAVLRNHVERALGVIKKRFPILKVATLHKMENQAKIPIAAAVLHNLIRSHNGDERWLENDQGNINPQSFVSLPNSDHGNDEGNMEGNNLRDMIAYHMWADYEQRRNQ

SEQ ID NO: 338525 - protein, 129 aa, Zea mays
  unsure (1)..(129): unsure at all Xaa locations
  Clone ID: MRT4577_71901C.1.pep
RTPVVTISXDRVESSALPVRSQLAEANTAAFVLAVYIAMMTVIMPSAAHXTDLFPTILYDXALETTDKANSAKLAYAVDLXGMTIKHPLIFIXTRPRTWTFVERTTFLLGFAFLVAHLIATLTAAYSRA

SEQ ID NO: 338526 - protein, 222 aa, Zea mays
  Clone ID: MRT4577_71902C.1.pep
MSAAGGDLPETVEVTLRAVGPSRPTTLRLPPLLSVAELRGCIARERRLAGTEEVRLRLILRGKTLPHQDDSHVTLRDGDTLIVAVAPKPPVNHLLDDDVEDEEEDELKFRIPQTTTLWKRKFFMFLRDKLRLPDIILMALFSLSMKAWIIIAMWFLLAPIAQKYDIGPLYIIGTGFLIILINLGRRQQGDVSAYSIFNEDFRELPGTLNADRIDADIRAGQF

SEQ ID NO: 338527 - protein, 40 aa, Zea mays
  Clone ID: MRT4577_71903C.1.pep
TFCLFYPPRSAYSIFNEDFRELPGTLNADRIDADIRAGQF

SEQ ID NO: 338528 - protein, 91 aa, Zea mays
  Clone ID: MRT4577_71904C.1.pep
SIYTQFCSYESLYIEIYIFVISTDTLIVAVAPKPPVNHLLDDDVEDEEEDELVQFSCSTCKSFVMLDIFVLFIKAHLSFHFFRSPEHHKRH

SEQ ID NO: 338529 - protein, 101 aa, Zea mays
  unsure (1)..(101): unsure at all Xaa locations
  Clone ID: MRT4577_71905C.1.pep
TRPKRTHNNTFYFNTTNRGAVIILSQGHHXHCSTVHVDQYGNPFGGVKHGTCGMMHGTGTVCIGQLCEHCSARMGGRQLQPTRXEHKTEGILHRFCSFNFS

SEQ ID NO: 338530 - protein, 79 aa, Zea mays
  Clone ID: MRT4577_71906C.1.pep
SSEFGSSKNCFLYFSLPPHDYKFDTSEIIRWGNPLRIIPSPDTGEAIRGRPPSRKTRSLLPPKGGCTTTYPTPPACFKL

SEQ ID NO: 338531 - protein, 46 aa, Zea mays
  Clone ID: MRT4577_71907C.1.pep
IITATYIQTPIHTTSTKTYLDKLQIAHIKQLLVLLYSYNEYNDLCI

SEQ ID NO: 338532 - protein, 61 aa, Zea mays
  Clone ID: MRT4577_71908C.1.pep
MLLIVALYLAELVHFDSRVCANPHGLIRKYGLMCCRQCFRSNAKDIGFIKVCNISFKLLCE

SEQ ID NO: 338533 - protein, 134 aa, Zea mays
  unsure (1)..(134): unsure at all Xaa locations
  Clone ID: MRT4577_71909C.1.pep
GPAGAIDFIPPASPSPPPSRASLSAFCXXXXGXALXXAAFXGXPGXGXLATXXVPGPXGXRLSXXLVXXVXGXXRALRXLLFCCPGALXSFXGVFLXKXXIKKKSXXGXPFVXVLLVXGXLQYXXVXXGXFXVV

SEQ ID NO: 338534 - protein, 542 aa, Zea mays
  Clone ID: MRT4577_7190C.1.pep
MAAQLHHALYELLHEAAAAQRALLLAIPFSLLLLPLLLRYLAASASASASATKNDGAAAVAASDPDKLLSLLPSPPMKLPIIGHLHLMGDIPYVSLAALATRYGPDLMLLRLGAVPTVVVSSPRVAEAVLRTYDHVFSSRPRSLVSDIIMYGATDSCFAPYGDHFRKARKLVTVHLLNASKVRSQRPAREEEVRGALDRVRRAAAAREALDMSELLHSFVNNLVCRAVSGKFSMEEGRNRLFRELTDINAGLLGGFHIQDYFPSLGRIELVRKVACAKTRRVRKRWDDLLDKLIDDHAARMATHQDEDDDKDFIYVLLSLQKEYGLTRDHIKAILIDMFEAGTDTSYMTLEFAMTELIRKPHLMKKLQEEVRRNVPAGQEMVTEDNLPGMTYLKAVIKETLRLHPPVPLLLPHYSLDACEVAGYTIPANTRVVVNAWALGRHSGYWERENEFVPERFLSGDVAGGVDLKPNEFQFLAFGSGRRMCPGVHSASATIETMLSNLMYRFDWQLPAGMKAEDVDMTEVFGITVSRKEKLLLVPQAA

SEQ ID NO: 338535 - protein, 66 aa, Zea mays
  Clone ID: MRT4577_71910C.1.pep
DRPLEETRGFYIVRRVDVYPNAKSLSSFVLCLLLPKTFFFFRGFFVSFGSLSLSCLKNGGTSISFN

SEQ ID NO: 338536 - protein, 66 aa, Zea mays
  Clone ID: MRT4577_71911C.1.pep
HNNISKNNINYLQQKKRSHLHDFLLVAFRNAALSTLAHILRIPITPIGEIIIKAMEDQRAPIPGIV

SEQ ID NO: 338537 - protein, 83 aa, Zea mays
  unsure (1)..(83): unsure at all Xaa locations
  Clone ID: MRT4577_71912C.1.pep
EEYDFLPKGRKPPXKRVPKSFSKMKAMGPVPETKDPVPRVFPFVLKKPEFPALQKKNPGGSPKMGLSEFQELWGGHAPIPGFF

SEQ ID NO: 338538 - protein, 191 aa, Zea mays
  unsure (1)..(191): unsure at all Xaa locations
  Clone ID: MRT4577_71913C.1.pep
YPRARRGLFAFHPSFFSAATTASLSSSPSRSRHPTAAAAGSRAPLHGAQACSLSCSMGASSSPRPAMVPPAPSSSSSKKPTPLHFRQRFPLLSVTWASSXSMAPSSPSSSSSQQAPPSTPCAXSPLPSRRPCSSSLAPRNYSSSSAPSSLRPAXSPLRSSTPSHGCAPPSGPILVHGRGPHLGCPCLCPRR

SEQ ID NO: 338539 - protein, 47 aa, Zea mays
  Clone ID: MRT4577_71914C.1.pep
CSISYIIIPHHESFWEGGNMFFWATPPNNKKIKKQNQANSHLNLPPL

SEQ ID NO: 338540 - protein, 314 aa, Zea mays
  unsure (1)..(314): unsure at all Xaa locations
  Clone ID: MRT4577_71915C.1.pep
WVPRGRPDVASTLLRSRPKSARTRARSKFPGHLPPLPSHSQIRVLGSSSSSLPSRSPSQSRVEIHRLRAPSPEQREEAGGQRPAMGKEGASDGGMSESVIRKVLVSYMYVAVWIFLSFSVIVYNKYILDPKMYNWPFPISLTMVHMAFCSSLAVALVRVLRVVDLPSSPAMTSQLYISSVLPIGALYSLSLWFSNSAYIYLSVAFIQMLKALMPVAVYSIGVLFKKESFKSSAMLNMLSISFGVAIAAYGEARFDARGVALQLAAVAFEATRLVLIQILLTXSKGISLNPITSLYYVAPCCSXFLVVPWXFVEL

SEQ ID NO: 338541 - protein, 398 aa, Zea mays
  unsure (1)..(398): unsure at all Xaa locations
  Clone ID: MRT4577_71916C.1.pep
PASAPRPPRVRSTVEIHRLRAPSPEQREEAGGRGQAMGKEGASGGGGGGXGGMSASVIRKVLVSYMYVAVWIFLSFSVIVYNKYILDPKMYNWPFPISLTMVHMAFCSSLAVALVRVLRVVDLPSSPAMTSQLYLSSVVPIGALYSLSLWFSNSAYIYLSVSFIQMLKALMPVAVYSIGVLFKKETFRSSAMLNMLSISFGVAIAAYGEARFDARGVALQLAAVAFEATRLVLIQILLTSKGISLNPITSLYYVAPCCLAFLVVPWVFVELPRLRAVAGGFQPDLFVFGTNSLCAFALNLAVFLLVGKTSALTMNVAGVVKDWLLIAFSWSVIRDTVTPVNLFGYGIAFLGVGYYNHVKLQALKAKEAQKKAAQADEEAGSLLQERDSHGDRKTDDQA

SEQ ID NO: 338542 - protein, 46 aa, Zea mays
  Clone ID: MRT4577_71917C.1.pep
VDWYFGSKIELKDNKASGWGCWQCNQCPTMVVLHSALVQSRKIDRN

SEQ ID NO: 338543 - protein, 413 aa, Zea mays
  Clone ID: MRT4577_71918C.1.pep
PTSSALSLSDPRPRLLLLLLLLPSFVPSRSPSQSRVEIHRLRAPSPVQREEAGGQRPAMGKEGASDGGMSESVIRKVLVSYMYVAVWIFLSFSVIVYNKYILDPKMYNWPFPISLTMVHMAFCSSLAVALVRVLRVVDLPSSPAMTSQLYVSSVLPIGALYSLSLWFSNSAYIYLSVSFIQMLKALMPVAVYSIGVLFKKETFKSSAMLNMLSISFGVAIAAYGEARFDARGVALQLAAVAFEATRLVLIQILLTSKGISLNPITSLYYVAPCCLAFLVVPWVFVELPRLRAVGIFQPDLFVFGTNSLCAFALNLAVFLLVGKTSALTMNVAGVVKDWLLIAFSWSVIRDTVTPINLFGYGIAFLGVGYYNHVKLQALKAKEAQKKAAQADEEAGSLLQERDSHGDRKTDNQA

SEQ ID NO: 338544 - protein, 269 aa, Zea mays
  Clone ID: MRT4577_71919C.1.pep
MGGKSEQKSRKERRKEARSEKHKLRFLSWVGHQGGKKKKPSMSVVEPSSVEEKPKKEPDGMMKKKRKREAEGKRKPRSNFQEYLEMEMGGPVSMEEDLEMERKLAKKLKLKKGKLGGPDDGMDDLFADLGFGGDFGSDDGETKAYDWNVVEDTNLDKRKGKKKNKEKKDDTVMEEPDDIDEENGRKKKKKKKKDGKREPEKEPDPRSKLQRKREMEMGGPVSMEEDLEMERKLAKKLKLKKGKLGGPDNGMDDLFADLGFGGDFGSDDG

SEQ ID NO: 338545 - protein, 60 aa, Zea mays
  Clone ID: MRT4577_7191C.1.pep
LSKSCRTLIICVSYLSFLPLSFLADHRLLMHLLFSFRDDDTVCRLQLRLGLKTRAPNGSH

SEQ ID NO: 338546 - protein, 99 aa, Zea mays
  Clone ID: MRT4577_71920C.1.pep
LAWQPLVGLGATRCLWKRSSCCSLLLPPVCAWVGSCQISALDARPPPPLFCVWTSAAASPDSRPQQQFAVLGRFIDIFRIKKKKKKKKKKKKKKKKHTH

SEQ ID NO: 338547 - protein, 91 aa, Zea mays
  unsure (1)..(91): unsure at all Xaa locations
  Clone ID: MRT4577_71921C.1.pep
GLPAVSISIQFSXXTXPXTXXXXPXXXXRRRRRRHPGGDGLHGQASXQXGRYEEMVEFMXXXXAAAELTVEEXNLLSVALQERHRRAPPCL

SEQ ID NO: 338548 - protein, 449 aa, Zea mays
  Clone ID: MRT4577_71922C.1.pep
IVYLDAGRDVATSTLLRSRPKSARTRARSKFPGHLLPPLPSHSQIRVLGSSSSPSSSLPSFLPDLPPSRESRSTASAPPHRSSARKRGGQRPAMGKEGASDGGMSESVIRKVLVSYMYVAVWIFLSFSVIVYNKYILDPKMYNWPFPISLTMVHMAFCSSLAVALVRVLRVVDLPSSPAMTSQLYVSSVLPIGALYSLSLWFSNSAYIYLSVSFIQMLKALMPVAVYSIGVLFKKETFKSSAMLNMLSISFGVAIAAYGEARFDARGVALQLAAVAFEATRLVLIQILLTSKGISLNPITSLYYVAPCCLAFLVVPWVFVELPRLRAVAAAFQPDLFVFGTNSLCAFALNLAVFLLVGKTSALTMNVAGVVKDWLLIAFSWSVIRDTVTPVNLFGYGIAFLGVGYYNHVKLQALKAKEAQKKAAQADEEAGSLLQERDSHGDRKTDNQA

SEQ ID NO: 338549 - protein, 68 aa, Zea mays
  Clone ID: MRT4577_71923C.1.pep
THQLKVNVLDSANVIGVVMTVVHPSHQCLHPGQYVTDGPDWSYCSSVSSASSWYVMYQLVVCTIQPRV

SEQ ID NO: 338550 - protein, 42 aa, Zea mays
  Clone ID: MRT4577_71924C.1.pep
MNKLFQCDSHDQVPISLNRVLWNCPILIRDGKRESSHITRLI

SEQ ID NO: 338551 - protein, 75 aa, Zea mays
  Clone ID: MRT4577_71925C.1.pep
GQKRELIHRFYKATCFLEKKLNIWGVPERGNLASTKKNTRTFYPLHGGFKKTCLQKKKGVYFLNRGQGRKKSKTC

SEQ ID NO: 338552 - protein, 112 aa, Zea mays
  Clone ID: MRT4577_71926C.1.pep
AHPTYRRHYSTPAAMPLPTPGTIASLRAGDRQHLVSLDVPMAPPPSYPVSTSVTAFVKEEDAPTPLVASPMAPPLSYPTSSSLRSRRSRRKLLHAREVKRSMRELLCVVARG

SEQ ID NO: 338553 - protein, 81 aa, Zea mays
  unsure (1)..(81): unsure at all Xaa locations
  Clone ID: MRT4577_71927C.1.pep
GSIDKYEHDKKTGRTKEDRALYSXVENPHKQGSDPRTQXEDKDPMDASDLMKEPEETGTNLRARAIGLMPMNDQGEKGRTR

SEQ ID NO: 338554 - protein, 55 aa, Zea mays
  Clone ID: MRT4577_71928C.1.pep
LGRTSLNAGRGISSVPRCYDCLQSVVHLQRPPFRHPLTLHLIEAVQIPRAEFRAS

SEQ ID NO: 338555 - protein, 42 aa, Zea mays
  Clone ID: MRT4577_71929C.1.pep
RSLFLKEVLYEMAVGGKYNFLGGLTHRSHMLHDSLTSDVAYP

SEQ ID NO: 338556 - protein, 138 aa, Zea mays
  unsure (1)..(138): unsure at all Xaa locations
  Clone ID: MRT4577_7192C.1.pep
MKLLVLAVLLTVAAADSGISPRAVWQFRKMIKCVIPGSDPFLEYNNYGCYCGLGGSGTPVDELDKCCQTHDNCYDQAKKLDSCKFLLDNPYTHTYSYSCSGSASSCSSKNKECEAFICNXDRNAAICFSKAPYNKAHK

SEQ ID NO: 338557 - protein, 129 aa, Zea mays
  unsure (1)..(129): unsure at all Xaa locations
  Clone ID: MRT4577_71930C.1.pep
PCLASASFFFAALSVLPLLGAVAPRXVSRFFPLPGPGALPFCLGAPFALAVFVGPVLLFVWAXVPRXGVSSFARPVASGLACGXGFWPVPSAVLSLRXXAPPLCLCFXPPPRRGWACFPSSVCPPGPSL

SEQ ID NO: 338558 - protein, 67 aa, Zea mays
  Clone ID: MRT4577_71931C.1.pep
ADLAHHPDQSDRHTLSPHRRATTSNTVELRVRAYTYMVASSSLACDLLLARVFMLHSCQLPISAQMG

SEQ ID NO: 338559 - protein, 33 aa, Zea mays
  Clone ID: MRT4577_71932C.1.pep
RLFLQQSSTLLQQLPLVHLLAQNIMAQQLQQLV

SEQ ID NO: 338560 - protein, 64 aa, Zea mays
  Clone ID: MRT4577_71933C.1.pep
TLTLPASPYIQNPHVPAAKHRAWALAIGVVCVYTVQYSKYLLEYLVVHLPRSTCTRRFVKMCPY

SEQ ID NO: 338561 - protein, 89 aa, Zea mays
  Clone ID: MRT4577_71934C.1.pep
LPHPIGTRRSPSSCSSQSTARRSTSGSSHELHPLAYCRDETVINFPVYIRKKKATTCLLFGRTRTIVSLCLKILYMRPKISIRRFKVNR

SEQ ID NO: 338562 - protein, 46 aa, Zea mays
  Clone ID: MRT4577_71935C.1.pep
PRRVGHAFALEHGSIIVYIVAPWNTAVTARSNSSVVGGVDIWEPWF

SEQ ID NO: 338563 - protein, 52 aa, Zea mays
  Clone ID: MRT4577_71936C.1.pep
SPYWLVDSWRGRGILGVRPICRFTCPLCSRHRGRFNLFFYLVAFRSFRQCLV

SEQ ID NO: 338564 - protein, 146 aa, Zea mays
  Clone ID: MRT4577_71937C.1.pep
LPLGVPRVLVWAGPPPSRGSPTASGPWLKSKTKGKGGNKNTTKGGGAAAAPPPLRFRKEWTTCTINKSKVVAPSGFFPLVIVMGMNSEPKPWVFQLLSPVWSDHDRGGDPFWSVVKKKRFFPPPPRVGVDFKKMDHAFWGDLKALV

SEQ ID NO: 338565 - protein, 195 aa, Zea mays
  unsure (1)..(195): unsure at all Xaa locations
  Clone ID: MRT4577_71938C.1.pep
MPTKRSVGTLGDKDLSGKKVLLRADLNVPLDDGQRIADDNRIRASVPTIKFLMGKDARVVLASHLGRPKGVTPKYSLKPLVPRLSELLGVDVVMANDCIGEEVEKLAAALPDGGVLLLENVRFYKEEEKNDPEFAKKXLASVADLYVNDAFGTAHRAHASTEGVTKYLRAAVAGFFMQKELDXLIGAVAXPEKAF

SEQ ID NO: 338566 - protein, 77 aa, Zea mays
  Clone ID: MRT4577_71939C.1.pep
PHIPHIKSQRIIDPILINQPIKLTNRDSDVAHQTKSVLKPRDQRHYPFVHNTERLAALHAYPSTSPTRPRTRGPTRG

SEQ ID NO: 338567 - protein, 232 aa, Zea mays
  unsure (1)..(232): unsure at all Xaa locations
  Clone ID: MRT4577_7193C.1.pep
MSAARAFSTALRAGVPRAPIAARFARGYAAAAPSSAANKPPVALFGVDGTYASALYTASAKTNTLDTTAKSLEQLSAVFKRDEKLAQILRAPTLSVSDKQQIVQELQKHVGQDKDSIVKNFLDTLAQNNRLGVLEGVVNNFGILMGAHRGEIELVVTSAAALDNKTLSRLEAAVTKSQYVANGQKLKVVSKXVTPRIKGGLIXXEIGDRTIDXLSVSSKMAKMNKLLKDTVI

SEQ ID NO: 338568 - protein, 283 aa, Zea mays
  unsure (1)..(283): unsure at all Xaa locations
  Clone ID: MRT4577_71940C.1.pep
MTGVVAGAGGGNKAAGATLRLHHYLVMAGVAAAVVLACLRYAPDPAGYGFXGRGAAAGXADAGARRDTTPPPRPSSSSSVVIFNFGDSNSDTGGMAAVNGMNINLPEGRTFFRRPTGRLSDGRLVIDFICESLHTPFLSPYLKALGADFSNGVNFAIGGSTATPGGSPFSLDVQLHQWLYFRARSMEMINLGQRPPIDREGFRKAIYTIDIGQNDVSAYMHLPYDQXLAKIPGFVAQIKYTIETLYSHGARKFWIHGTGALGCLAXKLVIPRDADDGDQLDAH

SEQ ID NO: 338569 - protein, 133 aa, Zea mays
  Clone ID: MRT4577_71941C.1.pep
GRVGGGRIRCMQVWPAYGNKKFETLSYLPPLTEEQLLKQVDYLLRNNWVPCLEFSKEGFVYRENSTSPCYYDGRYWTMWKLPMFGCTDASQVYKELQEAIASYPDAYVRILGFDNIKQTQCVSFIAYKPAGSE

SEQ ID NO: 338570 - protein, 79 aa, Zea mays
  Clone ID: MRT4577_71942C.1.pep
TTLFFSPRNGNNTQILPPARFFPQPNFQKSWSEKVEPNSPSMYLTKFWTIKWLKNESSSGIVRASLRVASRGICCGYCD

SEQ ID NO: 338571 - protein, 533 aa, Zea mays
  unsure (1)..(533): unsure at all Xaa locations
  Clone ID: MRT4577_71943C.1.pep
MAPPSHFYNNNGXAGRRQLPPRVRGRXXGPGNAPPQDSCLLDADEFRRQGHQVIDFIADYYGRMDDYPVHPSVNPGFLRRQLPDKAPSRPESPDAFGAALRDVRDLILPGMTHWQSARHFAHFPASSSTVGALGEALTAGINSVPFXXXXXXXXXELEMVVVDWLGKALHLPESLMFXXXXXXXXLGTTCEAILCALVAARDRKLADIGSGRIGDLVVYCSDQTHFAFRKAAHIAGIHRDNCREIATYRDDMFALSPAELQAAMQADVDAGLVPLFLCATVGTTQTTAVDPIRGLCAVAATHGVWVHVDAAYAGSALVCPEFRHLIDGADAVDSFSMNAHKWLLANNDCCALWVKKPALLVAALGTEQEYILKDAAAEGHDVVDYKDWSVTLTRRFRALKLWLVLRCYGVEGLRDHIRAHVRMAASFEDMVKADPRFQVMAKRQFALVCFRLRAPEELGGPKAANALNRRLLEEVNAACSGPYMSSANVGGVYMLRCAIGSTLTEERHVREAWTVVQNVASSLLAKMEMHEDY

SEQ ID NO: 338572 - protein, 227 aa, Zea mays
  unsure (1)..(227): unsure at all Xaa locations
  Clone ID: MRT4577_71944C.1.pep
RGRPGIFYRRRPRSPIRICASYHFYPLLPTPNVSTSIKGASGGTHYHRRGLWAXIKAKNGGAFTXRLGCRRRCDQVLXPADDIICPXADARKTISTEIGASITPATAVILLLGRSVVEESESCSTTSSSVLLXISVPFKIDGVPIRRGNHYYVIATSAEVGLAGVDDVDDDGNDFDRYNNFNANNTRGXEFVHREHDASKSVCDFKKDDQNGVDCALINAIDDCPES

SEQ ID NO: 338573 - protein, 154 aa, Zea mays
  unsure (1)..(154): unsure at all Xaa locations
  Clone ID: MRT4577_71945C.1.pep
MRPKEENKPSHKKPAARRSTVTENVDKAPAXYKPICEKCLPLAMLIVGAEGKKAKNKXAKKALETYMIXYIFNALXQVHPDIGISSEVMSIMNSFINDIFEKLACESAKLWRYNQKTTISSREIQTSVRLVLLXELGKHVVSDCTKAVTKFTSS

SEQ ID NO: 338574 - protein, 68 aa, Zea mays
  Clone ID: MRT4577_71946C.1.pep
KNIFPKKKKKTTPTTTPYYSPHIHILLQQYYQHLKQIKPLHLYQPIFFLYLQSILQHQPQKLPISLNY

SEQ ID NO: 338575 - protein, 73 aa, Zea mays
  unsure (1)..(73): unsure at all Xaa locations
  Clone ID: MRT4577_71947C.1.pep
IRLEDTVYVAGLQMELQQARDRISELEVDRRSARKKLDHLFKXLHXEKAAWRNREHEKVRAILDDMKADLVPE

SEQ ID NO: 338576 - protein, 74 aa, Zea mays
  Clone ID: MRT4577_71948C.1.pep
CLSLRHELGSRILDMSGDVLKSQFNPSYEHWLSIADVLCKLRHDVIPIHITAIESIYSHQRLDSVSMRIVATSR

SEQ ID NO: 338577 - protein, 168 aa, Zea mays
  unsure (1)..(168): unsure at all Xaa locations
  Clone ID: MRT4577_71949C.1.pep
RTGRNTRDDPRSSPRPHRRPGREKEGHDPGTTRKERRRTRPTDEQQEQPPPPAKTXGRAPREPRGEQPARPQPQQTXTPHATPTAASTKPPAPRRPRRTRTAPPTPRPTXPPTXTPATRPATKRTPPTTRPGTPTRTPTGRTGTRAPTNGTHARDAKPPKEEEDAKGG

SEQ ID NO: 338578 - protein, 36 aa, Zea mays
  Clone ID: MRT4577_7194C.1.pep
GLSCGSHAKFRCQLLNLLPVLHVVLHNLVYSDKCVN

SEQ ID NO: 338579 - protein, 75 aa, Zea mays
  unsure (1)..(75): unsure at all Xaa locations
  Clone ID: MRT4577_71950C.1.pep
TLMPYXGALVTKRKXCSXXMLXLLQXXXSAVMKXLKRVIMTXSPTXSXFKXXLPXKXXIXPSXWGVXRPRDXLGG

SEQ ID NO: 338580 - protein, 98 aa, Zea mays
  Clone ID: MRT4577_71951C.1.pep
SHPLIEPNHCRTVNSRHKTLRPINIRRVSRRLIHIPSFTNSPLRTNRGTNIKTTTIMSKRIARMSPIRITPTLLNCLPTTQPNPTSMRISRNRFNRLH

SEQ ID NO: 338581 - protein, 88 aa, Zea mays
  Clone ID: MRT4577_71952C.1.pep
KEPHFSKNGIPGMVKMVPPKPRGGGPFFENPPLGPFPGRTKRQTGAVGVPKRGGKKAPPGAKGPKAPPKKKKWVWPVLGLLEGSLVET

SEQ ID NO: 338582 - protein, 104 aa, Zea mays
  unsure (1)..(104): unsure at all Xaa locations
  Clone ID: MRT4577_71953C.1.pep
MDVALRDHLRQRRDDDDDMMLFFLPMLHILGSSSXSKGKKRRHTSKLSGEEHVQELLXGHLKNCRVAFRMEPEIFKSLACYLRXEGLVRDIIKVEEKAFFLYML

SEQ ID NO: 338583 - protein, 87 aa, Zea mays
  Clone ID: MRT4577_71954C.1.pep
AGDNGSVVSDKVLSVHTFKYGKNGANGQYEQLKAVGIIGPTKAVKLCMEHLESVAKAFQTLHAVVVEIKETKDAPPANPMDPMGYGD

SEQ ID NO: 338584 - protein, 490 aa, Zea mays
  Clone ID: MRT4577_71955C.1.pep
VQAEMKAANVQHPIVCIDVIKEGIISGPRAGLMKEVLSGKMLEQSQTSKSLRHFFFAQRATSKIPNITNIGLTARKIKKAAIVGGGLMGSGIATILILNNFNVVLKEVNEQFLSAGINRIKVNLQSLVRKGQLTEEDYEKKLSLLCGALDYEQFRDTDVVIEAVIEDMVLKQQIFSDLEKYCHHNCIFATNTSTIDLNIIGQKTASQDRIVGAHFFSPAHVMSLLEIVCTHHTSSQVIVDLIDLAKKIQKTPIVVGNCTGFAVNRMFFPYAQAASFLVDYGLDVYHIDHVITQFGMPMGPFRLADLVGFGVAIATRKQYYQSYPERSYKSMLLQILVEDNRTGESSCKGFYVYDDKRKASRDPDFGKYIEKSRNMAGVMQDPKLMKLTDNDIVEMIFFPVVNEACRVLDEGIALKASDLDVASIMGMGFPSYRGGVMFWADSLGAKYVYDKLDAWSKDYGEFFRPCEYLAVRARQGASLAAKVDGVKSRL

SEQ ID NO: 338585 - protein, 90 aa, Zea mays
  unsure (1)..(90): unsure at all Xaa locations
  Clone ID: MRT4577_71956C.1.pep
MGKFLKPGRAVILLQGRFAGRKPVICPLFKKATRNRPYGHCFVAGLXQYPKKVVRKDLAKKTRKKSRVKCFIKLVNFTHLMPTRYTLDVD

SEQ ID NO: 338586 - protein, 55 aa, Zea mays
  unsure (1)..(55): unsure at all Xaa locations
  Clone ID: MRT4577_71957C.1.pep
SLRLAPSXEKGSCLRAGXHLLRRAPQTQLPRQPCPLRLNAPLCVAPTKPQTRAQT

SEQ ID NO: 338587 - protein, 62 aa, Zea mays
  Clone ID: MRT4577_71958C.1.pep
KNHIYRAYLYSKQTIIKFFTTANLTLYSTQPPKSPTPTNKYQRPNLPLVTTIPNPDFFHAHH

SEQ ID NO: 338588 - protein, 121 aa, Zea mays
  Clone ID: MRT4577_71959C.1.pep
MAAAASANPGTAYKLLLSCPEGLPRSRVCVRFDPSFDRIPHPDASLEESIGEIWNQRLQQNPSLYNGTKFRYGGHALHRSDESNPDYCVSLHSGLTDYRTFVGTTLSPLWEKFLDSSPDDS

SEQ ID NO: 338589 - protein, 92 aa, Zea mays
  Clone ID: MRT4577_7195C.1.pep
GPFFFFFLVQTKNFRKHTSLQLLHTEEHMEISNEQIQQISHPGREFPPRFKIRKRWRKDKRGEILRRRGGGGRRAEPAAGGSEHGGSRTRPA

SEQ ID NO: 338590 - protein, 98 aa, Zea mays
  unsure (1)..(98): unsure at all Xaa locations
  Clone ID: MRT4577_71960C.1.pep
FLLINPLSSLVRGERGAGNTLTRTTRIMGIGRGHLLLPAAAACLWALSCALLLRACPHRAGAXSGGGGGGXLXTRGGRLYRRALAGVPAARRLGAGPL

SEQ ID NO: 338591 - protein, 92 aa, Zea mays
  unsure (1)..(92): unsure at all Xaa locations
  Clone ID: MRT4577_71961C.1.pep
MLMSRGRSFFCFLLCLCFLXFFFYCFFIFFFFFFFIIFLFFFFFFIFFYSFYYNFFFFFFFFFYLYFFYYFLLYIFFFTVFFFLFFFFXYNF

SEQ ID NO: 338592 - protein, 117 aa, Zea mays
  Clone ID: MRT4577_71962C.1.pep
AHPPGGQGPPFAARWFTGCPEPGFFGPWSWVWHSPGLYVTPWAFCEGVLWVHLPVFSLGVWPSVPPCVYSAGLCIDSRAVSPDLLRWARFALFLSLFCPPGYVSLQWPAKNHVWSMF

SEQ ID NO: 338593 - protein, 49 aa, Zea mays
  Clone ID: MRT4577_71963C.1.pep
MGPGASDLTVTGLKSFSSPSLCSLNTLLAGTSRLPHASSTGNLGLLCRS

SEQ ID NO: 338594 - protein, 124 aa, Zea mays
  Clone ID: MRT4577_71964C.1.pep
MQFSITAVLFGLVAISSAAITDVEGVRNTPRNVIETRQAPDGTCCFPNKSLKQDACTVNGAAGKCVPGGPAACNGALNCVANNQLVCDNNVPERSGVLCRFKAANGKIQDGANQITSLSQAKVN

SEQ ID NO: 338595 - protein, 125 aa, Zea mays
  Clone ID: MRT4577_71965C.1.pep
MADSKATSAVTLRKQFVLEVIHPGRANVSKAELKERLAKAYEVKDPNTIFVFKFRTHFGGGKSTGFGLIYDNLEAAKKFEPKYRLIRNGLATKVEKSRKQMKERKNRAKKIRGVKKTKAGDAKKK

SEQ ID NO: 338596 - protein, 139 aa, Zea mays
  unsure (1)..(139): unsure at all Xaa locations
  Clone ID: MRT4577_71966C.1.pep
MADSKATSAVTLRTRKFMTNRLLARKQFVLEVIHPGRANVSKAELKERLAKAYEVKDPNTIFVFKFRTHFGGGKSTGFGLIYDNLEAAKKFEPKYRLIRNGLATKVEKSRKQMKERKNRAKKXIRGVKKXTKAGDAKKK

SEQ ID NO: 338597 - protein, 96 aa, Zea mays
  Clone ID: MRT4577_71967C.1.pep
KAELKERLAKVYEVKDPNTIFVFKFRTHFGGGKSTGFGLIYDNLEAAKKFEPKYRLIRNGLATKVEKSRKQMKERKNRAKKIRGVKKTKAGDAKKK

SEQ ID NO: 338598 - protein, 172 aa, Zea mays
  Clone ID: MRT4577_71968C.1.pep
MADSKATSAVTLRTRKFMTNRLLARKQFVSGIHQTNIFQSFRRFTPCRPPSLTKSLPALPVLQVLEVIHPGRANVSKAELKERLAKAYEVKDPNTIFVFKFRTHFGGGKSTGFGLIYDNLEAAKKFEPKYRLIRNGLATKVEKSRKQMKERKNRAKKIRGVKKTKAGDAKKK

SEQ ID NO: 338599 - protein, 137 aa, Zea mays
  Clone ID: MRT4577_71969C.1.pep
MADSKATSAVTLRTRKFMTNRLLARKQFVLEVIHPGRANVSKAELKERLAKMYEVKDPNTIFVFKFRTHFGGGKSTGFGLIYDNLESAKKFEPKYRLIRNGLATKVEKSRKQMKERKNRAKKIRGVKKTKAGDAKKK

SEQ ID NO: 338600 - protein, 64 aa, Zea mays
  Clone ID: MRT4577_7196C.1.pep
LKEPFGVFVKVQDGFIFGDDVLHVMAHLGDKLTGQEVYKIIRKAEVVVDGQINSEEFVKVIMAK

SEQ ID NO: 338601 - protein, 68 aa, Zea mays
  Clone ID: MRT4577_71971C.1.pep
PRCSSLIAFSPSACTLSSCFSSRTGRVYSATVPPTYRVTRSLQLCSRPKTQPKRREMYLPFGPVGRLG

SEQ ID NO: 338602 - protein, 104 aa, Zea mays
  unsure (1)..(104): unsure at all Xaa locations
  Clone ID: MRT4577_71972C.1.pep
MLGTCVEFMTHNLSQSVKXVVSSQXQTVTPYCWHQLKQVQPQYRHQLMXGVAAAPHPGDLGXSLQFMLLQQAQIAQQLTLMCGLIEQNLSANCGLHDATHMHIL

SEQ ID NO: 338603 - protein, 88 aa, Zea mays
  Clone ID: MRT4577_71973C.1.pep
YSTRPALTVVPDARDKMVTDREAHGRRGPASRGLLGRDQKKRRRRAGRRCGLRKKIYFASIAFKKYGASPPAQADLVKWKSDEKQTCV

SEQ ID NO: 338604 - protein, 96 aa, Zea mays
  Clone ID: MRT4577_71974C.1.pep
VFGVHGLIPGRWGRTWGGGSSWLRVGSGCALTGGSVARRCPGCDAGKELAQSRGKGDVEIVKAEELSTQVSGTAEAEHSRERDGDRVCRYVWRLGY

SEQ ID NO: 338605 - protein, 49 aa, Zea mays
  Clone ID: MRT4577_71975C.1.pep
TNIPFVCPAFYPLQKKKALSENQVMSVFSFAVSESFFKTHDLIHEHPLL

SEQ ID NO: 338606 - protein, 118 aa, Zea mays
  Clone ID: MRT4577_71976C.1.pep
KLQRGCPVCSPQTWGGFFPPPSGGFGFKKGLDFFGWAGAPLFGFPQAPPPFFIKRLCPLEAQIWFFRPGPFFFFLPWGGAGFSPPYGWLGFQKIFFAQKPFLAKGWARKCSWPPPLGL

SEQ ID NO: 338607 - protein, 52 aa, Zea mays
  Clone ID: MRT4577_71977C.1.pep
TDGLTDLEQQSYRPKPRSLAGQAADKQTNRFTDKCILMSNMLQSSWTICYCI

SEQ ID NO: 338608 - protein, 124 aa, Zea mays
  Clone ID: MRT4577_71978C.1.pep
TKSRDLILGCPRLVAMMLQVRHGKAMAPLQDGQGVTSITIQPIHIVMRCNECSFFFLQAKTSLSIEARRAKSRSSQGSLPHVPSSRSRAVHSERNSGSEHRPEKQKFGLSRPGSENTSLQCQRT

SEQ ID NO: 338609 - protein, 186 aa, Zea mays
  Clone ID: MRT4577_71979C.1.pep
SGSECLNLLHHRKAKHLPEVVLSFVPPVWNNLGAETTKLSSFITLCCRRFCFHTADVEVKIVLHRRILGLRDNFLLYYGFFLLFEIHRAQTHARCSVWLHGGNTISGDQLPGSRPTFVRIKRAYNIHGVWRSSLDVISRPKPLRHRDPPTTAVMVRGFLLLPPWRSAIGVGRQVSDLDGNSGIEVL

SEQ ID NO: 338610 - protein, 134 aa, Zea mays
  unsure (1)..(134): unsure at all Xaa locations
  Clone ID: MRT4577_7197C.1.pep
MGSSTSPDPRARTQPRPQKTDSASPDPRARTQPRPRKTDSTSPDPRARTQPRPRKTDSASPDPRARTQPRPRKTDSASPNPRARTQPRPRKTDSASPDPRAQTQPQPRRSLRLARPXGSDRPRHRGGHHYPTLS

SEQ ID NO: 338611 - protein, 66 aa, Zea mays
  unsure (1)..(66): unsure at all Xaa locations
  Clone ID: MRT4577_71980C.1.pep
GDGPTGVTGXVSGXLKPGLHGLHVHALGDTTNGCMSTXPHYTTASNEHPAPYDENRHAGDHGNETA

SEQ ID NO: 338612 - protein, 98 aa, Zea mays
  unsure (1)..(98): unsure at all Xaa locations
  Clone ID: MRT4577_71981C.1.pep
DLAVLHKYSPPQEGYTLPSAXDPLIHXCITHIFSTKIPYFTQVINISSTSNIFLHRNSKLKPRYKIPSNLKKITLSIQNPQNLTRYILYTDSTRLNIP

SEQ ID NO: 338613 - protein, 43 aa, Zea mays
  Clone ID: MRT4577_71982C.1.pep
RFVDHASHLYLAPRLDLWHENVEYRLQRGLYVRLISLPEYADI

SEQ ID NO: 338614 - protein, 68 aa, Zea mays
  Clone ID: MRT4577_71983C.1.pep
TVVTPQGTRANKQGLRLTPYKSQKPAIFFSGNSFGSFSFSYIPPQKLTIRGPPKVWTILFKNCDLGQP

SEQ ID NO: 338615 - protein, 93 aa, Zea mays
  Clone ID: MRT4577_71984C.1.pep
SPPSAMLRPWIELGFCSSAPGLGFVQIGSCGLAPYSGSFPGHVGTLGSFLWLWHTHKVAHVLCERSVRQKTPALKGGLYLMKPRCVSPGRIRP

SEQ ID NO: 338616 - protein, 103 aa, Zea mays
  unsure (1)..(103): unsure at all Xaa locations
  Clone ID: MRT4577_71985C.1.pep
GGPCPFVVLCAARRFVGVWGLLPSPPXWCSLAAFLPPRRLPXVRGRALVLSCGLGLRRPSCGVCFLPCLGRFGGVVFSSSFFAAPAGLLAFPVAFYXKIXGPV

SEQ ID NO: 338617 - protein, 98 aa, Zea mays
  Clone ID: MRT4577_71986C.1.pep
VPVPVPDERKRRAGGGREGFYYLLIATSRDGLNALESLYLLLEEADLPVEDLHLELQAAAAAQVRVPRRRPGLRRFPHRPPTYRPTAEPDPTKPSCRI

SEQ ID NO: 338618 - protein, 57 aa, Zea mays
  Clone ID: MRT4577_71987C.1.pep
GPRGLFFFFFCSNAINNFTGKEWPSVNTAGMNIGQHDQHSTITGKTSGSRNIEGGST

SEQ ID NO: 338619 - protein, 77 aa, Zea mays
  unsure (1)..(77): unsure at all Xaa locations
  Clone ID: MRT4577_71988C.1.pep
SSGSFGDLYHVTYCTQNVPIKVLKPXRISVDILREYPQQDYIMTQFFNTTVFHFISPFTSHPYYSIITNNNHSNYIN

SEQ ID NO: 338620 - protein, 89 aa, Zea mays
  Clone ID: MRT4577_71989C.1.pep
TANMRQYILFNTRAIFADLPNFKTILGQHRRPAIESEEHEIHFIDEDLCRNHETADMPGRHFPNVVNIGVNYAVEASAALQHAHLASHI

SEQ ID NO: 338621 - protein, 90 aa, Zea mays
  Clone ID: MRT4577_7198C.1.pep
MKSTKLAAILILQAVLVMGILSHVNADYFPKCCNSCRSFSGVDVCDDAHPQCPKGCSACRVVTPSPHKTFRCADMKSTVDGTCGGPCKKH

SEQ ID NO: 338622 - protein, 48 aa, Zea mays
  unsure (1)..(48): unsure at all Xaa locations
  Clone ID: MRT4577_71990C.1.pep
RAYHTRPFKRTTKPXTRGPLIXPFRPKTPXKLIHKKNLTQNKVPNYAT

SEQ ID NO: 338623 - protein, 43 aa, Zea mays
  Clone ID: MRT4577_71991C.1.pep
FSRLFHCLQSTIFSKVLRKMNPRTLTTSNSFMDILNCQVQSLS

SEQ ID NO: 338624 - protein, 42 aa, Zea mays
  unsure (1)..(42): unsure at all Xaa locations
  Clone ID: MRT4577_71992C.1.pep
IKNEYMGNIRGLGEGNWSKGGIISFYGGXCCARRTPPPPTRP

SEQ ID NO: 338625 - protein, 129 aa, Zea mays
  Clone ID: MRT4577_71993C.1.pep
IKAPSCSRKQHECYWLEGMSCVCCMCWSEFDHYVASFLAILFIGWMAVGRTRGMGKAKGKRGNGNGSGREKGDGEWERKVMRMSALTKKGNGKGTGARQGNEKGRTGNQNGRTGTGSLPLAALISSREV

SEQ ID NO: 338626 - protein, 657 aa, Zea mays
  Clone ID: MRT4577_71994C.1.pep
MPAFRAVTQVQQDAVGQGQSVPGDKVLNTLSIRCLTNCFSIIQCRFLHSCNCRTDAVQHRQSWPPPVQYGILGDGVQVWLPPWPPPVWEFWLSLKITGPQMMHSVGYFGLPVMPATCITISEIVSGSSEQIFPEIFLQSLHECRVCLSENTGRSLLQLPCHHLFCLMCMKSNCRIHVIEGNLTQVWLREDAVAYFKNMFDGGLRPTSNAFNKVIDGWVKVDMLNEAHGFFDMMLEKDIDDVTVVIFYFGGQHVGWEMKTEWLSNGWLCLVCGASDTQELPLHFIKLAKYTYTSDCMFEKIGYGTVIKALVYMLSLLFVRRDYCNEEPFFRNVLEHYQCGVEMIRRDLFIGHWKHYLILAIPLQPCFDGLINVGKVAARTLQDTVVGNSCIVSRQPPWPPPTRHHFRTMHAETVANWNHLFSWCFANSDLGELLTLNCPADRAMVLLMYQIELRLLNWAWEDECVFNLCLLGLHSAVHSSLANAYKSWLITMIHRTHSIGQDHFWHNVDRCVVCGIKDRCCARLAKLVLSATLTQDSGKLSQLELHHPLLLNTQSSGLRTSRISSSGECQHIIFSSSQRWYQKNTDNAATTTMTIHGVYEDGGIAGKGTGVPGERARCLMKTSVRLAWAGVGLVNVGRSIGRVDRVVVWLQVTPKPWL

SEQ ID NO: 338627 - protein, 99 aa, Zea mays
  Clone ID: MRT4577_71995C.1.pep
KYSCFTNNSARKSIKYYDSYRLDNLNMLYLLPPYQEELPFKMARIPEWHLCIYFPGNNKVFFCLFVFVFFFFNLKLICLACLIHSFLWDKNVRNIQLAM

SEQ ID NO: 338628 - protein, 85 aa, Zea mays
  Clone ID: MRT4577_71996C.1.pep
RAGVTRPISGARRSKPIGRCTARHPTPARAPRTPHVRRRIRRRLRLVGSRPGRRSPWVRPKDAAEWERRIRLALEAGSPGRTGRV

SEQ ID NO: 338629 - protein, 215 aa, Zea mays
  Clone ID: MRT4577_71997C.1.pep
RLRVGGRVGGKLLHQQEVVLDTPSFDKDTLIDRDHAWQFSGEISFELKDPACIYVILKKPDDLNALSADITRWLSEVENSKISKLDAMFDLANFAVKGCQRTDGCSGSQHTPCIQKKIIQYFSKNYSTSDSGQCTQPQRGSPFLQADIKVFLKSNSFAKFTPRAVARIMHGISSPAFPSATWSKNHFWGRYLEVDFPVVMEAAKAELVKLVGKGE

SEQ ID NO: 338630 - protein, 57 aa, Zea mays
  Clone ID: MRT4577_71998C.1.pep
QYVKNLRMLSQNELRAHLPSGLDGVKVVVEGKVRDNDAVKHSHAPQIHSGVHELTGG

SEQ ID NO: 338631 - protein, 222 aa, Zea mays
  unsure (1)..(222): unsure at all Xaa locations
  Clone ID: MRT4577_71999C.1.pep
LELLTSATTPLPVRRRVCENVAAEFRAAEAGDPPPLFPANSSSRHTRREPAFTRNDLYKPCHLXTTSCGYXSGMTRWTXRHRIQNPHSMKKDIXRLVTVLETPXPLPLVGSRXYAMTPRGLLTLRSARTQHLSEEGRRMHDKIWRMSLNIAFTKXALKYECDDEDXEIQLQLGNMKKYASAIRDIAHTQIKKMKDLKHDRAHLMXIHVNGATIADKVDYGYK

SEQ ID NO: 338632 - protein, 100 aa, Zea mays
  Clone ID: MRT4577_7199C.1.pep
TLTIQNRGHGRCHKTLYKYQMKCRRVTLLTSTHIQYFDWIPFNYPSICIVKMQCNGSEMQVTETQNKTEDKHSLTPFQIIRRFGFFRNTDFTIYLNIVYI

SEQ ID NO: 338633 - protein, 106 aa, Zea mays
  Clone ID: MRT4577_719C.1.pep
EATMLGSVASGTHWQRWLDKFINMVRRTDAHYAWYRKPLTEYMIYFLVKYKVITAPDKISDACESSLTNRFYRVLVLDCNLDPTMASSDLLLTVVNFAVEEALIAS

SEQ ID NO: 338634 - protein, 51 aa, Zea mays
  Clone ID: MRT4577_71C.1.pep
QLQSSFFFFFFFFFFFFFFFFFFFFFFFFFLRGKQDSDLTSDVKFSYTTIP

SEQ ID NO: 338635 - protein, 126 aa, Zea mays
  unsure (1)..(126): unsure at all Xaa locations
  Clone ID: MRT4577_72000C.1.pep
ARFDALLSVAQPIQVGRWRSQRDLNPSAVRICDPRCSARRRHECLENVARRRSGGDMSGAGGSGDEFGRAVARAAVAQALEAAGFDCAHRSAVDAVVDILLRYITHXGSVRRLPCQPRRTRARQRA

SEQ ID NO: 338636 - protein, 78 aa, Zea mays
  Clone ID: MRT4577_72001C.1.pep
RRKTSPTYPQRFSLNCPCYIIFLCHINIPSATFSISATVPPKYFSYTLIPPLNINSHNYSLSVTFFRQLTNHNLHRNR

SEQ ID NO: 338637 - protein, 53 aa, Zea mays
  Clone ID: MRT4577_72002C.1.pep
PGVGAPASMAFSSQYSSRRACPDLIAGCRTVFVMHHLMMSSYGMVRSLAGGNS

SEQ ID NO: 338638 - protein, 60 aa, Zea mays
  Clone ID: MRT4577_72003C.1.pep
LPELSLQRSSALHQHGHFVNCMHIMLWERSCYGLCNDVSQVCSSSTYGTKMCRPPNIYAC

SEQ ID NO: 338639 - protein, 99 aa, Zea mays
  Clone ID: MRT4577_72004C.1.pep
ARVSGNPSFSCLRASTSSLQPQGVAAAHRQLASSPLEPEGLSLGPRRLAGSLSLAASEAGSSQRLLSNFDDCYLSVLLIALFVAVAGVPHGHAPHFPES

SEQ ID NO: 338640 - protein, 97 aa, Zea mays
  Clone ID: MRT4577_72005C.1.pep
SLKHNNSSQHILFIGKTPLRLRARTFQILSATQTRNFSRHSGLREVGRVAVGHAGNGNEQGDEQHYSRHSGRGSNALDIIHQRLEVSQEDWSLGRKL

SEQ ID NO: 338641 - protein, 165 aa, Zea mays
  unsure (1)..(165): unsure at all Xaa locations
  Clone ID: MRT4577_72006C.1.pep
GRSNVYMAQLAEHAXRCEEMGVVYXEKVANTVYGEELTVEERNLLWAAYKNVIGARRASWSIASSIEQKEESRLNEXMLTLCKEYRANIVAELINICDGILMLGDSHLLPSSTAGESNVFYLKMKGDYHRYLAEFKTGPDRNECAGSTMMDYMAAPDIALAELAP

SEQ ID NO: 338642 - protein, 79 aa, Zea mays
  unsure (1)..(79): unsure at all Xaa locations
  Clone ID: MRT4577_72007C.1.pep
MAGNGXAIVESDPLNWGAAGAELAGSHLDEVKRMVAQARKTEVKIEGYAPPIGQXTDVTSAKDAGGDIDWLDKEDTTAV

SEQ ID NO: 338643 - protein, 51 aa, Zea mays
  unsure (1)..(51): unsure at all Xaa locations
  Clone ID: MRT4577_72008C.1.pep
XAXGLGGRGGYHNTSPFDSNLNMAIIRWATSSTALLWRENLRLYSLFLTSP

SEQ ID NO: 338644 - protein, 146 aa, Zea mays
  Clone ID: MRT4577_72009C.1.pep
RTRGRTRGHKHTQISSSISPLSFTSLYLQAVCTTQGEKSRRNVGPADRAGAGACVLRALQLLQYNSRAPEKRQRVPSAYNRFIKEEIRRIKASNPDISHREAFSTAAKNWAHFPNIHFGLGPYESSNKLDEAIGATGHPQKVQDLY

SEQ ID NO: 338645 - protein, 87 aa, Zea mays
  Clone ID: MRT4577_7200C.1.pep
KKKNPGKGVFFLFGGGGISKKFVNLSLVDRQTDPRKFWVFWTSLGISLKRKEILGWEKFGVGGSLGAAWFFKLPIFRLGGGLGRGIS

SEQ ID NO: 338646 - protein, 204 aa, Zea mays
  unsure (1)..(204): unsure at all Xaa locations
  Clone ID: MRT4577_72010C.1.pep
MLSNVFLTTALAAGLAQALPQATPTPTAAPSGNPFAGKNFYANPYYSSEVHTLAMPSLPASLKPAATAVAKVGSFVWMDTMAKVPLMDTYLADIKAKNAAGANLMGTFVVYDLPDRDCAALASNGELKIDDGGVEKYKTQYIDKIAAIIKKYPDVKINLAIEPDSLANMVTNMGVQKCSRAAPYYXELTAYALKTLNFNNVDMY

SEQ ID NO: 338647 - protein, 365 aa, Zea mays
  unsure (1)..(365): unsure at all Xaa locations
  Clone ID: MRT4577_72011C.1.pep
MAAPRAAAASAKQVTRQNFAEAVLELRAHLEACDYVAVAAQKTGAPTGWRRALPVDTAETAYLKAKLAAESFQPLQIAVCPFRQRNSYPSTLVAYPYNFHLFPRDELQLGMPSYSFSCQPCYLSTIANDGFDFNMCIYDGISYLSRVQESLAREKIFTRPHQLLSSPNTSVADSVFMNRIKSRIVNWRKRYADPSKKHDGSLVSSLSRLILGAETYGSRPSMSIDVCSDRQVQLVLEAVNHISDDLVSLVPHKAGVGRAVRVIFTNSKEDKNLLLMDIQKLEDEQNFKFRGFREVIDLLSSSQKPIISYRFXSXLTMLRTKFIAPPPPNMHAFMCSLEMGFPNAVDISHLWRRIGPLREATYIQA

SEQ ID NO: 338648 - protein, 80 aa, Zea mays
  unsure (1)..(80): unsure at all Xaa locations
  Clone ID: MRT4577_72012C.1.pep
NQPKKCRWAPPLGPPGFTLYATDRYFWGNFKRITISPRKQPCPFFSQALKRPPIGKTGTPPGNGPKLPGGPPGPXKKGEK

SEQ ID NO: 338649 - protein, 37 aa, Zea mays
  Clone ID: MRT4577_72013C.1.pep
RRANPSPNAKQALWVVASLALAFVCNKSSLIIMWVSN

SEQ ID NO: 338650 - protein, 79 aa, Zea mays
  unsure (1)..(79): unsure at all Xaa locations
  Clone ID: MRT4577_72014C.1.pep
MGSIVDNIMVRGRXLPGLDAGGTSRPPKVPPGXPSIKTEYNGQWLTVRGRWYGQSNGSXAMDNSXPCGKKNSKLPPYSA

SEQ ID NO: 338651 - protein, 84 aa, Zea mays
  Clone ID: MRT4577_72015C.1.pep
CPPVEGVTDVDNEADPAVAYVSVFNGHITLVDVHQFDDRYEPEHGVEVHQVVRVQDAGHACLGHNHDLSNQRQAIDVQRLVKKW

SEQ ID NO: 338652 - protein, 103 aa, Zea mays
  Clone ID: MRT4577_72016C.1.pep
ARVTQKKLFFFRGKQKPPGPGPFKLFFLTGRWGEGTFPAGLETPPPRGKGPRAPQKKTPSRGSKPKLAKKSTSPGNPGGKLFGAQEPFQNFPAIKGFPPTGEP

SEQ ID NO: 338653 - protein, 74 aa, Zea mays
  Clone ID: MRT4577_72017C.1.pep
VASLSWLFNTPVGSTSIFSFVMFSSWCPQHSCSQIHLPPFPQREGFWSSVAFASWCFHGAVHSVVLERCSSCSR

SEQ ID NO: 338654 - protein, 83 aa, Zea mays
  Clone ID: MRT4577_72018C.1.pep
RAAAGSVIAPLKPEQQRAERPSALAARGAGRRAPRRGGAGTEVVARVEEQRRHRSREPRRGDRGRVPRVEETRLGTAEAQEES

SEQ ID NO: 338655 - protein, 123 aa, Zea mays
  unsure (1)..(123): unsure at all Xaa locations
  Clone ID: MRT4577_72019C.1.pep
LISSSPLDVVNAPTYLRQQVLQQSVPALTHLAVANPATYLQQLLTFNQLTVXSNSAAYLQQRQQILNPLAVANPLLAAFLQQQQLLSYNQLSLMNPALVRQHPIDGGAISSTTSEMYSIVAPS

SEQ ID NO: 338656 - protein, 40 aa, Zea mays
  Clone ID: MRT4577_7201C.1.pep
GGSQSSVVILIAHGDQRAPPVVAPALEWERAQMSSLGLVT

SEQ ID NO: 338657 - protein, 77 aa, Zea mays
  Clone ID: MRT4577_72020C.1.pep
FATARIRLPCPRRLFRHCCCPRQVLRSSSPHRANSSINDPRSIVTLHMLQNMINNTYFIQCQPSTYTPTTSSSRAPR

SEQ ID NO: 338658 - protein, 72 aa, Zea mays
  unsure (1)..(72): unsure at all Xaa locations
  Clone ID: MRT4577_72021C.1.pep
LSXAASAXQALRGQVYLADDARVPPARWWAPPXXRLSPXRIDLXLFTAHPDWLVVPALFLTLFTFLLPNVLV

SEQ ID NO: 338659 - protein, 121 aa, Zea mays
  unsure (1)..(121): unsure at all Xaa locations
  Clone ID: MRT4577_72022C.1.pep
MREALSXHIGQAGIAXANACWELYCLEHXGVEGDGQMPGDKTIGGGDDAFNTFFSETGAGKHVHRAGFVDLEPTGIDDARTVSYRQLFHPEQFISGKEDANNNFXRCYYXIGKEIXVELCQ

SEQ ID NO: 338660 - protein, 56 aa, Zea mays
  Clone ID: MRT4577_72023C.1.pep
FLLARCILTNIPERYTFSSEKRSQNNDPPSPSAPLLSPDHPATADAAPPQQLSPTA

SEQ ID NO: 338661 - protein, 49 aa, Zea mays
  Clone ID: MRT4577_72024C.1.pep
FVIRLFQLYWMPYLSAKAKSTRPLSAFSSQTRVAFVLTRNLYTHASATI

SEQ ID NO: 338662 - protein, 348 aa, Zea mays
  Clone ID: MRT4577_72025C.1.pep
MRNRIPEVTEAAVIEDFYRGSNDSTFVRAILQKAPTTSEQLFREADPYITVDERALDLIGGAKPAPTAPRRDTKQQPDKRWEKRLVKRSTPLNRPPLAPEEDLAEILVAATGPPFPYRWSEHPITFTRADQWLNFDHLGKYPLLVDPVIRERRVKKVLVDGGSSISVTFPRTLQGLRVPLKELHESDTPFFGIVPTKGVYPPGHIYMPVTFGTPENYRTEFLRFEVANFDCGYNAIIGRPGLAKFMAIPHYTYMILKMSGPQGIITVRADFQGAAECFRVAIQAALTTKPSTTSSAQANSKPEEDLAVPANEAQAVTSIWLTEETKRINLGFADERKTAIISSSLDDK

SEQ ID NO: 338663 - protein, 92 aa, Zea mays
  Clone ID: MRT4577_72026C.1.pep
FYFFLFLFFPNILFWLCLVFKKKKPPPKKYIYQIPFDEHKRPALKKKKPIKSPPLKKKKRHKREKYGISFYPKHIYTFLWVNPSKKHYVAVF

SEQ ID NO: 338664 - protein, 60 aa, Zea mays
  Clone ID: MRT4577_72027C.1.pep
ANLHESTASVIAHKLAWQIGKKPKSRTCQHLRITQGSEEPKFGKAHHRVITPNMSRMLIK

SEQ ID NO: 338665 - protein, 49 aa, Zea mays
  Clone ID: MRT4577_72028C.1.pep
VNLICRITVTSLFCVSPHLNYWISRILSTSFIRASCYFRLLSQNYLIMN

SEQ ID NO: 338666 - protein, 63 aa, Zea mays
  Clone ID: MRT4577_72029C.1.pep
NLDLLVAGSLGKYGCVISYVSSRRLTGFGGKLEVRRVICAQSQKATRTNMLKKKKKKQTKKGR

SEQ ID NO: 338667 - protein, 193 aa, Zea mays
  Clone ID: MRT4577_7202C.1.pep
TPPVFLKKPALYPFFFTKKKGPPMGPPPPYAPRLPKGPQNSRAQCPGVSPHPVFFLCSPQTGGLNPKKNFWGGPLGHFPRLKNVLGAFFPIKNRPILGTCDKPPALGFKKKKKFPCPVKNNKPNFCSFCPMKQIFSLGPRLEVVPHKLGRDFFFGGGQFLGGKHVPVFGPLVQELFLFQGYSGPSYNGNRQFF

SEQ ID NO: 338668 - protein, 99 aa, Zea mays
  unsure (1)..(99): unsure at all Xaa locations
  Clone ID: MRT4577_72030C.1.pep
KGKGLANGVILEKNGTKRALPEESFFTWFSDAHPKEDVEDXMQNEVADFIKEDLWPNPFPYFNNDADEKDFYGADDGDEEEKKGAFDEDDAEKDEVGEE

SEQ ID NO: 338669 - protein, 146 aa, Zea mays
  Clone ID: MRT4577_72031C.1.pep
MPAGPGATPGRTQQPTSRPTSRLFCFVSLSRKSQSKASPTMASTTTTASNNLAGVWLGELSSALHGTWQAVAVAATHGLGEDDDPRLPCQQQQRPWRGDDRSSSNNKALRGAAAAGTDRREGDVARCGGAMSDTTLYLLLDRFAPS

SEQ ID NO: 338670 - protein, 73 aa, Zea mays
  Clone ID: MRT4577_72032C.1.pep
TYDRTNRRIHSTHACNVRRVTLSNYTQCEQHTNKADMLKGSGLSFIARSQPNYNEACCSDDHYLSETDLIDVT

SEQ ID NO: 338671 - protein, 135 aa, Zea mays
  unsure (1)..(135): unsure at all Xaa locations
  Clone ID: MRT4577_72033C.1.pep
QPKKCGHITDSPIIXDRTRSEKNAHLEGNGGIVTKTSLVLNTSSIXGSLLDGRXEFLGRCVTCQIISSAGMDPKTTSPGKFRREATXLSKSLLNPTPLLLSEXQLRMTSHLNAVTAAIXPAASIRENTHACPVFL

SEQ ID NO: 338672 - protein, 96 aa, Zea mays
  Clone ID: MRT4577_72034C.1.pep
ILALLALLALLVSATNAFIIPKCSSFPIAIIPHFLPPVTSMVYKHSSLQAYRLQLTLAVSVLQHPISQFQQQSLSHLKLQTISTQHQQTFLPLLNH

SEQ ID NO: 338673 - protein, 65 aa, Zea mays
  Clone ID: MRT4577_72035C.1.pep
ICFLKYLFLHSNQQALNSDTNWTFMGGKLKLQYFNAGFWVGKNPNFFFNKYRWGKYLSFGEKRTG

SEQ ID NO: 338674 - protein, 36 aa, Zea mays
  unsure (1)..(36): unsure at all Xaa locations
  Clone ID: MRT4577_72036C.1.pep
MSCCGGNCGCGSGCKCGNGCGGCMXMYPDVAEVVTT

SEQ ID NO: 338675 - protein, 87 aa, Zea mays
  Clone ID: MRT4577_72037C.1.pep
GGILPICRTVAGRSGMRLEGPVEAAVIIVSGNCGVVSDRRDGGILGVALLCALGEYTRLPGWRYWDIAPSGWPFDLWLFLRGEWSPP

SEQ ID NO: 338676 - protein, 235 aa, Zea mays
  Clone ID: MRT4577_72038C.1.pep
MISGNLTNEDLGAGRTRTKAEGPTTAAVAGAVVAKSPVLPSSRQWPPSTESRIVRVSRVFGGKDRHSKVRTVKGLRDRRVRLSVPTAIQLYELQDRLGLSQPSKVVDWLLDAAQHEIDKLPPLQFPPQAAQDLVAHLPPPSMVAPFAADRAEADGDKRHCHAGVKGLMGLNNSIRLVNATMPLAHGLYYTPGESWTVMPMMPPPSSRLTTRLISAVSLLRSARYVLLCWLCGREC

SEQ ID NO: 338677 - protein, 298 aa, Zea mays
  Clone ID: MRT4577_72039C.1.pep
MISGNLNNEELGGGGCTKAEGPGAAGGAGAVVAKSPVLSSSRHWPPSTESRIVRVSRVFGGKDRHSKVRTVKGLRDRRVRLSVPTAIQLYDLQDRLGLSQPSKVVDWLLDAAQDEIDKLPPLQFPPQGQDLVAHLPPSMVAPFANVAADRAAAAAAAANASAAMAEGGKRHCHGGIKGLMGMGLNNSIGLANATMPLAHGLYYTPGESWTNGGNAAVHDHQVSHGGTSPQTVAHHSPFSSLLSLAAPGPQLVFYSPEGGGFAMKEATDHQFAVDSLDHSQGQLSLSSARSFLHPGNQG

SEQ ID NO: 338678 - protein, 84 aa, Zea mays
  unsure (1)..(84): unsure at all Xaa locations
  Clone ID: MRT4577_7203C.1.pep
KKKKKGAVLVFPSPPPAKKKGGVCLQSWIIRRVRIGLDCAFIRLLEGELSVQLESTGCPMCXFFCVSQALRSAASIEDPSLRTR

SEQ ID NO: 338679 - protein, 45 aa, Zea mays
  Clone ID: MRT4577_72040C.1.pep
YGWVKETISRKFNDGIRKDQYYTDPVSHRVFRTLKSVLSYLGTGE

SEQ ID NO: 338680 - protein, 154 aa, Zea mays
  unsure (1)..(154): unsure at all Xaa locations
  Clone ID: MRT4577_72041C.1.pep
RGDFSDGAVQGGAVLLVGAVGAGAXRSCGVIMTRAMFQSMLSHRGVSGCQGVFYTYDAFIEADSMLLGLGTTGDEYTRMGELVVFLGQTFHETTVGWVNDTDGPFACXLXRLKEQKHTDSPYYXTMTHTXIISTSTGYXXALNLNLVGNPYLVA

SEQ ID NO: 338681 - protein, 104 aa, Zea mays
  unsure (1)..(104): unsure at all Xaa locations
  Clone ID: MRT4577_72042C.1.pep
EFPGRPHSYAHSYPHSFHRFLQDNPQHVTRDLTLAQLPFQIPXHPLPDYPKHKPMPINAHDQPSTIPSKSYEPXEMNPIPCTLPTNHNRYATQKTPIPNQTLAS

SEQ ID NO: 338682 - protein, 49 aa, Zea mays
  Clone ID: MRT4577_72043C.1.pep
MRYEHMTFLFVLKLMPSAVLCSPTYWAAILIKSMVDMLVPWRKLKSHKR

SEQ ID NO: 338683 - protein, 96 aa, Zea mays
  Clone ID: MRT4577_72044C.1.pep
MQKFEFKDELSLRAAAFPLSLLSFQHLIYPLDEKLTLAGLGYDYGIDEEVARRSASLHYNGNMKPWLELGIPDYKKYWKRFLDRGDRFMDECNVNP

SEQ ID NO: 338684 - protein, 69 aa, Zea mays
  Clone ID: MRT4577_72045C.1.pep
VKESCVIHCVTPDLMFNMLSVLGIGMGYAVFFSRSRQVMVVVVMLSRCQGMSVKVLRTLNIVQEYVKSL

SEQ ID NO: 338685 - protein, 406 aa, Zea mays
  Clone ID: MRT4577_72046C.1.pep
YGDNLNDKLFCDFSINRRMKQMEQTIVRAKSCTVDCRSVDRKLRQILYMTEDEAHFHMQQSAFLYNLGAQTLPKSHHCLSMRLTLEYFKSSSLDSDDSPGRFSSPEYRHFVILSRNVLAASVAINSTVSSCKEPGYFAFHILTDAQNFYAMKHWFARNSYKNAAIRVINYEAIILEKLPKYTIRQLFLPEEFRVLIRSIKRPTENTRMKYLSLFSHSHFVIPEIFKYLNKVVVLDDDVVVQRDLSFLWNIDMGDKVNGAVELCGLKLGEMKNVLGKTAYDPKSCAWMSGVNLINLDKWREHNVTENYLRLMKKFEVKDELSLRAAAFPLSLLSFQHLIYPLDEKLTLAGLGYDYGIDEEVARRSASLHYNGNMKPWLELGIPEYKKYWKRFLVRGDRFMDECNVNP

SEQ ID NO: 338686 - protein, 44 aa, Zea mays
  Clone ID: MRT4577_72047C.1.pep
DLLCSCPSFSRVGPVVSFRSPCLGAEVARFYLNVPPFIGGCWFA

SEQ ID NO: 338687 - protein, 187 aa, Zea mays
  Clone ID: MRT4577_72048C.1.pep
MFYPPHKWNSGFCSWQESHIHSLMNVLRYCNLDESLNGEESLVCRSSLDLLFKTRELDYMSYIVLRMFENTEVPLEDPKRFRIEMTFSRGADISSLESGGKESLLPDDHTMPIMEPERLQEVGSYITLDKFDKMARPFAMPAEDFPPAAPQPLPVRFCKDIELRGKLQHKSDMMSGVLKRKTKKLQE

SEQ ID NO: 338688 - protein, 492 aa, Zea mays
  unsure (1)..(492): unsure at all Xaa locations
  Clone ID: MRT4577_72049C.1.pep
MVETRRSARRSGSGSLPADGAPSEPASSSPATSLPPRENNGLVISNDNTLKQTVEVEKQGRQGKEVLVVHELDESNEDSGSLDEPPGWLPDGWTMEVCQEDNGSIYKYYTSPMSGYMFTSKMETLHYLFSGVEERMLELQASAEDNELHESHTWLPRGWVIEVRAGGKKMDKMYKFYVHLPTGQRFLSKAEVLHFVNKGMVSTCDMDVLCDTSTDDNILAHVEFNPDGLPDGXWVKERISRKFNDGIRKDQYYTDPVSHRVFRTLKSVLSYLGTGEISRHSYLPRRNVIDMYSFDKCADLPKSMVKRLKAKGQAKKKFMRAQVLDKDLSNGQTSNHCEGAIGLTQSDPEGDKFGSMEAACEKGTSSETMKQRIGRPKKILKQTNDSISDRDKGSHQEHIEAKEEVDICGGKDLTHLKTLERTEAQNSTMITKEVNNNDTAEKNLSKIEGDNSDLVTGTGLHKQENSRLTEVSEKATFSTGYKFYKRRSCNKT

SEQ ID NO: 338689 - protein, 92 aa, Zea mays
  Clone ID: MRT4577_7204C.1.pep
REIMNLGHLTGWRHYRDKTNSYIKPAQQRIPEVKHTKALGVPMSETYLTLGGLCSLSYYQTKNRILLSQKRPTPDGIGFLSFEGEGLFSFPH

SEQ ID NO: 338690 - protein, 99 aa, Zea mays
  Clone ID: MRT4577_72050C.1.pep
HYRKLILAANTVLMGPANKGATTLKRSSSADLRRRLIVHSSTVGTGHAGSAITGVLASIIGGAHLLVKLGILLAMDKIPQAGIRRRVHQVPECPFGDVL

SEQ ID NO: 338691 - protein, 122 aa, Zea mays
  Clone ID: MRT4577_72051C.1.pep
AYPRLGMPKEPPNPPPPPKDSVELFAPLKFPLAQTSAPPPLFDPLRGRLPFPGAFFSPFFFVGPVLPPLFFSRPPFFLFICFPPCCLFEEFPPVLIHAPGNFRPPTFSPRARLVPPVPFWFF

SEQ ID NO: 338692 - protein, 24 aa, Zea mays
  Clone ID: MRT4577_72052C.1.pep
MALLCRGPWLLLLCFASAGGAVCG

SEQ ID NO: 338693 - protein, 107 aa, Zea mays
  Clone ID: MRT4577_72053C.1.pep
EKRAVGNDVHNLDPSTGMKITEALRVQLDVQRRLHEQLEIQRNLQLRIEVQGKKLQKMFEEQMKASRTVMEPRQEEEDDDDDAFDDVHVQLLATAARSDAGFQLKIS

SEQ ID NO: 338694 - protein, 137 aa, Zea mays
  unsure (1)..(137): unsure at all Xaa locations
  Clone ID: MRT4577_72054C.1.pep
MHIFVKTLTXKTITLEVEFSDTIDNVKAMIQXKEGIPPDQSGXFFTGXQIVDWRTLADYNIHKESTLHLVLRLRGGMQIFVKTLTGKTITLEVESSXTIDNVKAKIQDKEWIPPDQXRLIFVGKLLEDVRTLAGSSS

SEQ ID NO: 338695 - protein, 119 aa, Zea mays
  Clone ID: MRT4577_72055C.1.pep
VAHSIQIKSPTYFAPEVNHGRFSSLVQTNTSTHVPFSGGAREQQVHFTPQPNQHFPSLHYILSASLYLSLPFLLVMVKPSEAEKNLAQANVTSGGAASGGARKLYVGNLHSNITEDQLR

SEQ ID NO: 338696 - protein, 125 aa, Zea mays
  Clone ID: MRT4577_72056C.1.pep
KRRVDHSLQARAHDDAAAALVALGSSVFVHADTVDVALMVLGLVGAIGDGMATPLRLLVASRIANDLGSGPDHLHHFTSRINANVIRIILIACASWVMAFLEGYCWARTAERQASRMRARYLQAV

SEQ ID NO: 338697 - protein, 62 aa, Zea mays
  Clone ID: MRT4577_72057C.1.pep
AHGAPSGGPPRSLCRGWRRRTVPRPAAPDGPTTAGGARREGTPHDYLETPLLKQLAAQPHNN

SEQ ID NO: 338698 - protein, 67 aa, Zea mays
  Clone ID: MRT4577_72058C.1.pep
VSEVTLNKLFLCMLYLYIISNHDLSLAHCAEHYFLSRLIPLHPIIYTFLSYNPLHHQTRLKYQSYSP

SEQ ID NO: 338699 - protein, 246 aa, Zea mays
  Clone ID: MRT4577_72059C.1.pep
TVQHILLASIQLQVADFGLSRMGKASSPSSVGDPSHISTAPQGTPGYVDPQYHQNFHLSDRSDVYSFGVVLVEIITAMKAVDFTRVPSEINLAQLAVDRIGRGRVDDIVDPYLDPHRDAWTLSSIHKVAELAFRCLAFHSEMRPSMTEVADELEQIQRSGWAPSADDAAFLSTSSSISSSVASTRVTDRSWGANRSRTERGRVNALVVQETAAKSAVESPVSVQERWFSDGSSPSSNSLLGSRSLH

SEQ ID NO: 338700 - protein, 92 aa, Zea mays
  Clone ID: MRT4577_7205C.1.pep
TVWVPVSVPGLSRLFYSRGRPPTGPFLFRPHVRYSSYRFLLSSSSNILSAFNGFGAYTSCPNPHSLSFSRSYRSSFPSFLDYIFPLAIFFSP

SEQ ID NO: 338701 - protein, 84 aa, Zea mays
  Clone ID: MRT4577_72060C.1.pep
LINVDILVVSFQMHTTLLGRWEAARMERGVQWPGEVRQQGYAVGRDGGGDGALLSFDGMATTTSDLGRHKMVATAVERPTAGGF

SEQ ID NO: 338702 - protein, 64 aa, Zea mays
  unsure (1)..(64): unsure at all Xaa locations
  Clone ID: MRT4577_72061C.1.pep
MVSQIGIDLCTAYSCDCVRQNDRDSIIFYDQGXSTTPYDVDYCDSDRLMGDAAVNQVDLRPHQH

SEQ ID NO: 338703 - protein, 63 aa, Zea mays
  Clone ID: MRT4577_72062C.1.pep
AEPHSLFEILNCINCIKAQDQLGAPCCLQINWQHKFSFDTLFSVHTQRHTVAYMDDHRDSVLL

SEQ ID NO: 338704 - protein, 95 aa, Zea mays
  unsure (1)..(95): unsure at all Xaa locations
  Clone ID: MRT4577_72063C.1.pep
GMLRKCHXXLRMLXSSCTGSNCSXSSNHXPAHLLTAYLRHVTRASHPRSRGGARGFRSGGGGVPACPLIAVFWRGRTALLPAPLFSRFCPLIFRW

SEQ ID NO: 338705 - protein, 115 aa, Zea mays
  Clone ID: MRT4577_72064C.1.pep
SSGRPGRYKKKKKKKKKKKKKKKKKKKNNPGPRPRLRFGFCFFSIALGVGVAYAWAGAGPLLILISNYIDTGLAFYIDWGLAMALTLPHLNCSGCPFPFFCWWGRRGRGPAPFSF

SEQ ID NO: 338706 - protein, 95 aa, Zea mays
  unsure (1)..(95): unsure at all Xaa locations
  Clone ID: MRT4577_72065C.1.pep
MAMYAAPERRVDICGGRVEGACTDYLLXPRRVTXVPTLVQRCAPACADWGKDGRLLALDWCDSTPELSRLARASFALHRRRAAGHRGDTRRQRVL

SEQ ID NO: 338707 - protein, 70 aa, Zea mays
  Clone ID: MRT4577_72066C.1.pep
RADARVRKAKSITAVSFYCSLPPRRGRAVSFGHDPHPAALCLPAIPSVHATEVHSVHTQHLPRQHHEIRF

SEQ ID NO: 338708 - protein, 58 aa, Zea mays
  Clone ID: MRT4577_72067C.1.pep
AATHPVLKIIVVEAEIECFTELHRRGRLTPKPGCTSVPKQLHAHHSSHLLTLSTCANI

SEQ ID NO: 338709 - protein, 83 aa, Zea mays
  Clone ID: MRT4577_72068C.1.pep
IRPPQFLKFSPHKKPPFFLLIPPLRILKIIPPQKPLKLTLFSHLFGLFGPPPFYFPCTPNFSFLVRFFRPPLLIFILPLFPHL

SEQ ID NO: 338710 - protein, 231 aa, Zea mays
  unsure (1)..(231): unsure at all Xaa locations
  Clone ID: MRT4577_72069C.1.pep
PRPRDAVGTRTSTRTPLPPTRCLRRGSPEMDGSGSWDAIDWNQIEDPRPRRSGQAVKESMDDFLLEDEEVLAQGHGVVLLNNRDAGTLSVTNFRLLFVSQAKKCVIELGTIPLTTIEKLNDDVKLQPLPHLSDKNHPRELLQVIGKDMRIIVFAFIPRTQQKNEVFDALRRYTKPANLWDLYAFSCDPSTIKHDSEPKWRLLREYFRLFRRSLPLXEXXEVSLCNEWWRLT

SEQ ID NO: 338711 - protein, 60 aa, Zea mays
  unsure (1)..(60): unsure at all Xaa locations
  Clone ID: MRT4577_7206C.1.pep
IKGRPARAGKYMSXKDEKQTLINHFHEKLVKLNDMMKTHASKRIADKRHMFMEEFVAEFY

SEQ ID NO: 338712 - protein, 62 aa, Zea mays
  Clone ID: MRT4577_72070C.1.pep
SAWKIITNMAAVDFLVVSSTTCRGLLYHIVLGCRTLVFLGVLHGLHYLQHCTITTRKGSILH

SEQ ID NO: 338713 - protein, 97 aa, Zea mays
  Clone ID: MRT4577_72071C.1.pep
MDLESADGAEAADGKRRGESLRATLLLAYQSLGVVYGDVATSPLYVYKSAFAGNDIQHSEGNEEIYGVLSFVFWTLTLITLIKYVLIVLRADDGGFM

SEQ ID NO: 338714 - protein, 59 aa, Zea mays
  Clone ID: MRT4577_72072C.1.pep
NILILYTTCGSAYNLLRKRLYSVNQNNHLKTIRALVYLPGNVHGTTLIRLASNRIKLVI

SEQ ID NO: 338715 - protein, 61 aa, Zea mays
  unsure (1)..(61): unsure at all Xaa locations
  Clone ID: MRT4577_72074C.1.pep
HPNTHIGKIKMXAVLCHRCLRKPPPHQPIHTTDLIPLQPDQKGIWGGVAEPNINTAPRSNC

SEQ ID NO: 338716 - protein, 306 aa, Zea mays
  Clone ID: MRT4577_72075C.1.pep
FLRLFPRVFDLRAPLPLSLSLTPAAAGLLAVASSPADAARTLHRLLAMSVTRSLPLRAVFRVWRELALPDDFEDSVVEGHPHLFRLVSNPAEPNTHILHLVADQATEDFTPAVEKARPDRYAFKLQFPPGFRLAKEYRKKVKEWQLLPYTGPYQVVSPGAGGSKRVSKLARRKMEKRAVGIAHEFLSLTVEKMVEVEKFSQFRKWFGIEVNVRDVFLDHPGIFYLSAKGKRHTVFLREMYDRGKLLESNDVSEARAKLVELMLLRRRGLGNANSSANMASGATADARESGDDFVDHEDCLLDVSEK

SEQ ID NO: 338717 - protein, 71 aa, Zea mays
  Clone ID: MRT4577_72076C.1.pep
FPKSETSTLADSSLVQPYEKYRLKKSMASLCCSILIMKCKLSLHDINLFLQYFDFHLIAYIIQMVSHYPDN

SEQ ID NO: 338718 - protein, 129 aa, Zea mays
  unsure (1)..(129): unsure at all Xaa locations
  Clone ID: MRT4577_72077C.1.pep
FATFARPTALSGGIXLPDALRLRYRVQDFTKEEQDEMYVFSTSQKRVSVEFVGTDKVQEKLNNFNELASASVSYMGVSSIGAPNELNSLVPNLKLLDLTGNLFSQWQVRIPTEWFLLLQFAILSHLQLV

SEQ ID NO: 338719 - protein, 57 aa, Zea mays
  Clone ID: MRT4577_72078C.1.pep
LHGYTRYGICFQKAYRTGLSLGAVQSYFVGFTRMLSNDCYGSGFLDHPPIVVWGQPG

SEQ ID NO: 338720 - protein, 558 aa, Zea mays
  unsure (1)..(558): unsure at all Xaa locations
  Clone ID: MRT4577_72079C.1.pep
MVWVLDPVDTVRGIQKRYIFAAGTHXVPRGGPGVIVQTDTSISRVHAEIAIEKMVXWDPHSGAPASPSFVRVIDRSKYGTFVNKVHGTQGSRLHKDEDMMLTDGDAVTFGTGNATFRLSFVPIVVFFHGAKSTRIDPSLHAVMKSIGAYATRKWSNECTHVLVDGSCSLTPELLDAVMAKKQIMLGDSFEAMAEKNIHTEIPSCTRYIPNLTLDPAXIPILYITQRKKIIKYFTXLIYSCXQYQFGEKLHGLLESTGAKYVHIDDFCANSQDSAAGDTDHQILVVPARYPLEFSKIRVLFTLSKISDIKLFAAILSGRLEATSIEPPAFIVTSSNSTDATIVADSDVEMETATSNPTGAANKSQHHTENISDDEKQTTNITNEVARKGNVIHPKHPESVEDLKPMEEDVKVIEKTATYRSXRVEXEDARILSKAPKDEKLDTSRDGASDVIFSQNLVVRRSLPQSAPAAPAEIGGVNFKRFRKREMVSGNSFKDLIPFAREPYRESDHERGSTMTDFMREEKRQKQMEAIAEDLFNNAKSKKRAAAGSSIHTLLTGHR

SEQ ID NO: 338721 - protein, 105 aa, Zea mays
  unsure (1)..(105): unsure at all Xaa locations
  Clone ID: MRT4577_7207C.1.pep
LPGRPTQPGHAGILPGDPHLQLFFLQRDLIPDRLRHGDETIGVGVDDLNPLFRVTGAENHVHQGVHAHLEPTVIXDQXRTAAYCQEYQPARNIRRGHELGNMLIA

SEQ ID NO: 338722 - protein, 192 aa, Zea mays
  Clone ID: MRT4577_72080C.1.pep
MSEVAFCKSFLTALDARPAKLSSDHIADARQFDAGGSFTLPRLPHPPHPQRPTPKTSQNASSSLSISLKPMKSTFPTVPLSNIDTAKTSIFDLKSQYATQSSIPAAKIKILYKKKPVTDSKTVGEVIGQDAGGEVEFGVMIMGGATASPAAATPVTSPPAVAPSEADKGLAGASADGGPAAQGPSGKEVVAT

SEQ ID NO: 338723 - protein, 89 aa, Zea mays
  Clone ID: MRT4577_72081C.1.pep
AGEGAVANMQIPQKTLTGKTITLEEESSDTIVIQKATIQDKEGIPPDQHCLIFDGKHLEDGQTLGDYNMLKEYTLDRALPLRGGAKKRK

SEQ ID NO: 338724 - protein, 80 aa, Zea mays
  Clone ID: MRT4577_72082C.1.pep
AFNFKKMTSGPPPKVKEAPMQIKPPPVCGSNTGFFGLDENVAKPQENPKKPPAGDFSPKKPSFLGVKQPPNFPENPVSGP

SEQ ID NO: 338725 - protein, 134 aa, Zea mays
  Clone ID: MRT4577_72083C.1.pep
SWGRCMRPRRDWVGERSWTSQNHLVPSAAETKVRIPLCFAGERSRDYSRAWSHGHSPTQPRHLPVCDTAAPAVGQTLSSAPWSFGLAGRATGLCLQAARQQQPPSLADDRLRRGSNSQRGRLASRRHHCEVTRI

SEQ ID NO: 338726 - protein, 72 aa, Zea mays
  Clone ID: MRT4577_72084C.1.pep
RLPNFGQWTPDNFNHLLEQPTQLYAGALKLRVLDVKDKGTVFVEKNVCRYEKDTQSYPPGYQQPYHPLGGLG

SEQ ID NO: 338727 - protein, 47 aa, Zea mays
  Clone ID: MRT4577_72085C.1.pep
LIKHQTNFFLNHSTTSIYKGLSCLNRNRIKSFSLILHVFHYYPLIKM

SEQ ID NO: 338728 - protein, 56 aa, Zea mays
  Clone ID: MRT4577_72086C.1.pep
KKKKKKKKKKKKRQSNIKGSGLHTPAVRLKKSFSTFTLIQFTFHFFTSLLPWHTLT

SEQ ID NO: 338729 - protein, 120 aa, Zea mays
  Clone ID: MRT4577_72087C.1.pep
AHHLLCDQTPDLCRAQCLFLEEVLLAPSADEGTAAGASAFLLGDALAGAPAAGAEACFLTGVAAPAFRFFSTTSWCCCSAEMRSNSSMSFLARLLQALVDGDVDSDGSDESEGHQEWDYS

SEQ ID NO: 338730 - protein, 149 aa, Zea mays
  unsure (1)..(149): unsure at all Xaa locations
  Clone ID: MRT4577_72088C.1.pep
MATARLLLRSASLLPLRRSPLHSSRFXSPXAAMASDAASQFQKIQIQREDTTFDAYVVGKENAPGVVVLQEWWGVDYEVKNHAIHISQIGDGYRALIPDLYRGKVALEVAEAQHLMEGLDWQGAIKDIQASVKXLKENGSPKVGVTGYC

SEQ ID NO: 338731 - protein, 27 aa, Zea mays
  Clone ID: MRT4577_72089C.1.pep
IARLYGPGRNCWLDQLANYWPDDLSFL

SEQ ID NO: 338732 - protein, 71 aa, Zea mays
  Clone ID: MRT4577_7208C.1.pep
KVFYFTDTYFHLLSGLAQCLYSLIKSLVAQTILRDLLLQCYIDQASDVLQYSLALHLHLSRNCQIHFHPHL

SEQ ID NO: 338733 - protein, 138 aa, Zea mays
  Clone ID: MRT4577_72090C.1.pep
TSSDSRSIALYCIVSMFALVLATFKTIVVIFVARGPPLLFVQLSRVLGCFGGFGVLFSLVAVVLFSLAVLVLVRSCFRPFAFFLVPVPCRAAGGRFFLCSVSLWLSPSPPLRGLFRALLGVFCSSPHALVCRRGLKQG

SEQ ID NO: 338734 - protein, 48 aa, Zea mays
  Clone ID: MRT4577_72091C.1.pep
MEGYILCVAKYQINYLFENELWKVCQGSITVEYGAFFVSCFNNMSWEL

SEQ ID NO: 338735 - protein, 121 aa, Zea mays
  unsure (1)..(121): unsure at all Xaa locations
  Clone ID: MRT4577_72092C.1.pep
ILNFNWVPKEAPGHPQGCITLNLLGGPLFFFPWDPKQGFFFLAPKYXTPPKAFKQGSPWEGLIPPKEPAQFFFPSPNKVRFFFPGSHFKGQGFHFAKPWPLLPKTGQKFSNKIIKTGFCFP

SEQ ID NO: 338736 - protein, 63 aa, Zea mays
  Clone ID: MRT4577_72093C.1.pep
IDYIFTFFFFFFFYHQNKIKNRFVGVHSKLESIPCPFFAISARRAEMTTGTTATRHHHGRPLS

SEQ ID NO: 338737 - protein, 77 aa, Zea mays
  Clone ID: MRT4577_72094C.1.pep
TITITPVMQSPLIMHEQLACHLEIPAAMWQLRSGHPHPPMDVSLGPLPIHLILVWPTVGPGAQYHSEKELMQSQGHA

SEQ ID NO: 338738 - protein, 107 aa, Zea mays
  Clone ID: MRT4577_72095C.1.pep
KSPGRPHPSVKNLRPFRTFFYRKYHSFPGRASIKEWRVLHFLSTTWNLPQPICLLLPTLVILTTTISSYLFCFPLSSSTALIARFQSTNLLISNSTIFFPLFFKYFQ

SEQ ID NO: 338739 - protein, 137 aa, Zea mays
  Clone ID: MRT4577_72096C.1.pep
GGPLLTIGDLLSDLAVDGGDDPLVGVGDASAPSSPSATQQAGKADPSDLSRLFEEHYNNLMKALEEKDPSWPSLMLKLCAALKTADKLVSCANMNAEQLLEKVKALEGVLERSDHAVAEIVEALQKSGLAKDRQGSQ

SEQ ID NO: 338740 - protein, 61 aa, Zea mays
  Clone ID: MRT4577_72097C.1.pep
KKKKKKKKKKNKKKKKKKKKKRKKKKEKKKIKKKKKKKKKKKKKKGGLFKGPKLTPPTIAT

SEQ ID NO: 338741 - protein, 70 aa, Zea mays
  unsure (1)..(70): unsure at all Xaa locations
  Clone ID: MRT4577_72098C.1.pep
YLIFSIITPRCGFYPNGPGKLXXFFKILFTLTLYTTTYYDIIFHINNSYTTFNAYSTKLIIPKINSTIIH

SEQ ID NO: 338742 - protein, 59 aa, Zea mays
  unsure (1)..(59): unsure at all Xaa locations
  Clone ID: MRT4577_72099C.1.pep
QWNHYSDRREVLVVYRVIFLSQIFSGLVXNCSQSKLISCKQRMLAFPDSCLFQDSRFTI

SEQ ID NO: 338743 - protein, 65 aa, Zea mays
  Clone ID: MRT4577_7209C.1.pep
KKKKKKKRNGSAETNRREKERTRSEDRWRKGTPRQRREANPARPANEPENQRWTTRDHGTSLNNA

SEQ ID NO: 338744 - protein, 68 aa, Zea mays
  unsure (1)..(68): unsure at all Xaa locations
  Clone ID: MRT4577_720C.1.pep
RIGPRPLARLPYNSPAQVLGALEKPARAPGVGKFXNVVKFTFREVDTSTGDSDDDGEDEYHLLEVLKV

SEQ ID NO: 338745 - protein, 74 aa, Zea mays
  Clone ID: MRT4577_72100C.1.pep
DIKGKPHANQKKYPHDIKWFLKLQATVNCPKKRVDPHSRFWDRGPLFKGGSPLISRQGPQIFHPPPGTFWKKGG

SEQ ID NO: 338746 - protein, 67 aa, Zea mays
  Clone ID: MRT4577_72101C.1.pep
VGYRVNPARNMESKLILRTCESSQPWTIRPTGPDRSMVIFSAQHMLFFSVLPPCVFSMQYLVKPYLK

SEQ ID NO: 338747 - protein, 111 aa, Zea mays
  Clone ID: MRT4577_72102C.1.pep
PPFLGGAVSSLRGFVKVSWAKGLKPPGLGKNPPSKGGNPGVKFFRPCPAGCDSFFPVRNPILCRFLTLFFLLCPPYFYFAGGPPLLSLGFLPRVLCFSPFLPFGSGWGFFF

SEQ ID NO: 338748 - protein, 54 aa, Zea mays
  Clone ID: MRT4577_72103C.1.pep
FVNQNRGVQNREPGVQSLAHFTQNRIFSPRPLFCPEILVDPRASLSIPPRWNRS

SEQ ID NO: 338749 - protein, 47 aa, Zea mays
  Clone ID: MRT4577_72104C.1.pep
TSLYFYEHYDVSWASFSHFLKNTHDPNTVSSLRDHPSAVSVILGGSP

SEQ ID NO: 338750 - protein, 70 aa, Zea mays
  Clone ID: MRT4577_72105C.1.pep
FGHENYFFPTKPHYNERSLPFLMLTALFYTRYRNAHVWDTLTGLFDYFAITCIMEYGTSCLHGGLPPSLE

SEQ ID NO: 338751 - protein, 69 aa, Zea mays
  unsure (1)..(69): unsure at all Xaa locations
  Clone ID: MRT4577_72106C.1.pep
GSPAMWVDPQYGSQAPRRASVPGAWVGQADPHDHGGLCLESLGISTAASPMNRTAKRCAWCLXPGDXRT

SEQ ID NO: 338752 - protein, 121 aa, Zea mays
  unsure (1)..(121): unsure at all Xaa locations
  Clone ID: MRT4577_72107C.1.pep
ASNHTSGQKQFIFSTTNRRTGGGRRHGGARTFKFPCSFKNPLVIGLPENSGCGKSTFMRPVNKLLSVGPPSPPKGXGTPDSNTLNSDTKTVICLDDYHFLXRNGMNDKGVTALHPKANNFD

SEQ ID NO: 338753 - protein, 99 aa, Zea mays
  Clone ID: MRT4577_72108C.1.pep
VYIDGPTFGVRSSSPDGGAVCCILAASTMAVGYIVGSLGGSFANGYLGDTFISRNKVFGGTTPQTDYDNDAASCTQTPNSTVLGSHCCCTACHEPDPST

SEQ ID NO: 338754 - protein, 50 aa, Zea mays
  Clone ID: MRT4577_72109C.1.pep
VFSEWPNLSEFAESMQGGELPQDAAFEAVSQNYCPSRISGRPRFFQNTIH

SEQ ID NO: 338755 - protein, 194 aa, Zea mays
  unsure (1)..(194): unsure at all Xaa locations
  Clone ID: MRT4577_7210C.1.pep
ARARSRARARARARARARARARARARARARARARARAHIYXCVYTHTHIYIXERAHXXTHXRARSLTLSCXYTRAHTXIXXEMSLCVCVXXRALVVSIYVSLSLSLTLFIYIXLSRERGXIARAXXSLSRARXHSLTVCVREIXTLSDYTRARXYIYGSLSLYMRAHTLRETLXHTRTLYXIYTPARARAHREI

SEQ ID NO: 338756 - protein, 103 aa, Zea mays
  Clone ID: MRT4577_72110C.1.pep
IKNVLRPFSVIAAILEDERAPGRVQEEADTAGTCPSQWRCSGDGDQHWHGEAVKPTAAEPHPEEGTSNTLLSLPHILAHSVYWLLDVFALVGWIRIKTITGWE

SEQ ID NO: 338757 - protein, 47 aa, Zea mays
  Clone ID: MRT4577_72111C.1.pep
KIDATYSDMFTGTVLAVERLEVMLIGSYLGAASASAKPLHFIHQCCK

SEQ ID NO: 338758 - protein, 299 aa, Zea mays
  unsure (1)..(299): unsure at all Xaa locations
  Clone ID: MRT4577_72112C.1.pep
PTRPGVQLLYPIVRLRPSMDRYWAKIPVIRAAMVAHPEAEWVWWVDSDAVLTDMDFRLPLRRYRAHNLVVHGWPSLVFEASSWTSLNAGVFLIRNCQWSLDFMDAWAAMGPDSPDYQHWGAVLKSTFKDKVFDESDDQSALVYMLLQEGSRWRDKVFLESGYYFEGYWMEIVGRLANMTERYEAMERRPGAAALRRRHAEREHAEYAVXKERRPGRGRAGGDRGARXRRPFVTHFTGCQPCSGQRNEHYSGDSCDQGMRRALNFADDQVLRAYGFRHASSLSDDVQPLPFDYPAKAVTS

SEQ ID NO: 338759 - protein, 492 aa, Zea mays
  Clone ID: MRT4577_72113C.1.pep
PGDAYEDIPVEMSGRDIPPPVSTFADIDLGDALNENIRRCKYVRPTPVQRHAIPISLAGRDLMACAQTGSGKTAAFCFPIISGIMKAPSAGRPQRGGGMGMRTAYPSALILSPTRELSMQIHEEARKFSYQTGVRVVVAYGGAPITQQLRELERGVDILVATPGRLVDLLERARVSLQSIRYLALDEADRMLDMGFEPQVRRIVEQMDMPLPGARQTMLFSATFPKEIQKMASDFLDNYIFLAVGRVGSSTDLIAQRVEFVQEADKRSHLMDLLHAQRDTGKQTLTLVFVETKRGADSLESWLCMNGFPATSIHGDRNQQEREYALRSFKSGQTPILVATDVAARGLDIPHVAHVVNFDLPNDIDDYVHRIGRTGRAGKSGLATAFFNDNNSSLARSLADLMQESNQEVPAWLLRYAARPSYGGGGGGRNRRSGGGSRFGGRDFRNDSSSFGKGGSRGGGDYYGGGSSGGYGGGSSYGGGGHGGAGAPSAWD

SEQ ID NO: 338760 - protein, 53 aa, Zea mays
  Clone ID: MRT4577_72114C.1.pep
AGRGSLSLAIRASTFLLSLILRLLLIHPPHGIAVTQSDETTSNLTATLERARA

SEQ ID NO: 338761 - protein, 87 aa, Zea mays
  Clone ID: MRT4577_72115C.1.pep
MEGAGWANTWRAPCAMALSLLAALFMWVPPFLFPFQTVVLVPGLSVMRLPRFCQSVPHVLGNFFRHVPCKFLLPASIEGQMMFQSAI

SEQ ID NO: 338762 - protein, 181 aa, Zea mays
  Clone ID: MRT4577_72116C.1.pep
DGFPATSIHGDRNQQEREYALRSFKSGQTPILVATDVAARGLDIPHVAHVVNFDLPNDIDDYVHRIGRTGRAGKSGLATAFFNDNNSSLARSLADLMQESNQEVPAWLLRYAARPSYGGGGGGRNRRSGGGSRFGGRDFRNDSSSFGKGGSRGGGDYYGGGSSGGYGGGGHGGAGAPSAWD

SEQ ID NO: 338763 - protein, 39 aa, Zea mays
  Clone ID: MRT4577_72117C.1.pep
TRPVRTSNGPAPDAEPLQARPALGEDIDRQGGQSVQGKG

SEQ ID NO: 338764 - protein, 97 aa, Zea mays
  unsure (1)..(97): unsure at all Xaa locations
  Clone ID: MRT4577_72118C.1.pep
HXFFPHFTTNPSSASLGPTSHPPNPLTPLTPPCTIHPMPLSPPQRRSMIHTLSFTSHPTITLHCSSHYLNLIHCTHLNIRLKLSHSLPRITRRFLNS

SEQ ID NO: 338765 - protein, 951 aa, Zea mays
  Clone ID: MRT4577_72119C.1.pep
MAPKRKASSSFAAVIPPIDPNSQLPFAGNHMSVVSEPDLLHLVSIGVLPPKELCSWRICHGVTVPTEDTHESVIYVPFLLRGLALPISPFFRGLLDFYRLNLTHLNPNSVLQISIYVHLCEAFLGVRPHFGLWKYLYHCCPGMAGGQHQLVGGASLEMRRGRKTDYLEISLKDSIKGWRLEWETAGCSYSKLDRVPTDQEVAEAGALLAEVGLLKERGLTVEAVVADFVFKNIQPLKDRAYPAYLYRGLADSTRVTNRRILAVDLVNRLEMILRGKVSNVGAPIAYSVWNLPPSKAFAHFVSNPPAADGGLGLRVRPSAEEVSALVASIEEIPDDERQVHFEVPLDPSDAEISAMLDMLAEDSSDAAPAGTLVVAPLPEAGTTLDIQRPVSVRPKRPCRANQLDSPVDEQKKKKRRLRRVSSLDRDVGPSVPAAEEVPVPEFTDADPNGCDPSVADPNGGAPSVAEPNGCAVCVANENEGEEEDEVPLTRKNGRQYVASGESSGVPSPALSALIGLQELSLANFDKTLEDMVPEDLLSEPADGGETDVCADVLDAELGSSRAASRASSTLERGLEGQETDLDRLVPMEVTEGPLALEAATAENLFLKDGVDTYPALEGVSGDDSARVGSASRGPAPEGIAGDDPAQVGSANYDPAPEGVRAGSPSCTSMDVHAGSPPQSGCMVVAQALGQGVALEASVPADQVLGSADDTELVPAGSLRAASGGDPMPSHQLISHDLGVPSFFSNLQALVDGMASQLWLQGASVPEGASSLARWNPVLLQQRVSDLEATNAGADSCLQEEKRALVASRDNLDRLYRDSSNSLTILERSHRFTMEELDNHHSKLQESTDDVIRLRQLISAKDAAIKELRASKKSIAQELETAQLAVKVAEETSITLRAQRDRAMDKAIRAGRILMRRPSVVVPDDIRADVNAAPNSSSRPSSSVAPEKDIAK

SEQ ID NO: 338766 - protein, 142 aa, Zea mays
  Clone ID: MRT4577_7211C.1.pep
MASQSVQCFGKKKTATAVAHCKAGKGLVKVNGKPLSLIQPEVLRFKVYEPILILGVDKFADVDIRVRVSGGGHTSQVYAIRQAIAKSIIAYYQKYVDEHSKNQLKQALIQYDRTLLVADNRRCEPKKFGGPGARARYQKSYR

SEQ ID NO: 338767 - protein, 108 aa, Zea mays
  Clone ID: MRT4577_72120C.1.pep
EGGCFFNNPQQQRWIILPVVVPLPRSTTKKKGKAQGGWGGDVPEKTVPPGQVGYKQGLPPQTVGVRQKVPHGRPQQGGPQVFPFLQRPPHLPLVDMHVMYPPVKIFFF

SEQ ID NO: 338768 - protein, 879 aa, Zea mays
  Clone ID: MRT4577_72121C.1.pep
MGKNNKRKREPTPPSEDFGDSEYSEEFSSESEGSPAPVSPPASSDDSDDSQGIAAEVWTYIRAVECSGLEGSDELEYSSDEEDPPEEDGEGDDDDDNDDGDDDAASAFRALVLAFLPPDLLCNLALALFVSRVEMAPKRKASSSSAAVIPPIDPNSQLPFADLVNRLEMILRGKVSNVGAPVAYSAWNLPPSKAFTYFVSNPPVADGSLGLRVRPSAEEVNALVASLGEIPDDERQVHFEVPLDPSDAEISAMLDLLAEDSSDAAPAGTLVVAPPPETDTTLDIQKPISARPRRPSRANQLDSPADEQKKKKRRLRRVSSLDRDVGPSVPAAEEVPVPEFTDADLNGGAPPAADPNGGAPPTTNPNGCAPPAANPNGCVVCVADENDGEEEDEVPLTRKNSQQYVASGESSGVPSPALSALIGLQELSLANFDQTLEDMVPEDLLSEPSDDGVMEVCADVLDAGLGSSRAASRASSTLERGLVGQETDLDRLAPMEVIEGPSALEVATAENLVLKDGVDTCPAPEDVAGDDSARVGNASHCSAPEGSSPRSGCMVVARALGQGVALEASVPADQVLGSVDGTELVPAGSLQAASGGDLTPGRQLISHDLGVPSFFSNLQALVDGMASQLRLQGASVPEGASSLAHWNPVLLQHRVSDLEATNADMARQISILEEKHSQGQAELVQRCSDFEEKYSQSQTELAQVSAALNDAKTLNSTLRAQLDSEKEGKSALVASRDNLDRLYRDSSNSLIILERSHRFTMEELDNHRCKLQESTDDVIRLRQLISAKDAAIKELRASKKSIARELETAQLAAKVAEETSITLRAQRNRAMDKAIRAGRILMRRPDVVVPEDIRADVNAAPDSSSRPSSSVAPEKDIVK

SEQ ID NO: 338769 - protein, 59 aa, Zea mays
  Clone ID: MRT4577_72122C.1.pep
LSCRDPSGGRSDRPACERRRLPQGRSIRGGRRAIRQIGEAGGGGDLLAPVAGATVELYK

SEQ ID NO: 338770 - protein, 102 aa, Zea mays
  Clone ID: MRT4577_72123C.1.pep
MRADKAGEGTPLLSPLATYCRLFFRVKGTSSSSSPSFSSATQTTHPLGSATGGAPPLGSASVNSGTDTSSAAGTEGSTSRSKLDTRRRRLFFFFCSSAGGSS

SEQ ID NO: 338771 - protein, 146 aa, Zea mays
  Clone ID: MRT4577_72124C.1.pep
RPRVRQSTLHFLLRLRGGMEMFVKTLGGQTITLQAQSSDTIDNLKAKIHDNDGIPPHQHRLIFAGKQLDDSRTLTYYNIQNESTLHLVLRLRRCMHILLKTLTGKTITLEVDSSDTIDNVNAKIQDKECIPPYQQRLIFTGNQLDD

SEQ ID NO: 338772 - protein, 171 aa, Zea mays
  Clone ID: MRT4577_72125C.1.pep
MRADRAAEGTPLLSPLATYCRLFFRVKGTSSSSSPSFSSATQTAHPLGSATDGSHPLGSATDGSHPLGSALVNSGTGTSSTAGTEGPASRSNLDTRRRRLFFFFTNVPAGAASEECSASISSIALISASLGSKGTSKWTLPLSIISSRFTKSTAGILLLVTRVESARPRYR

SEQ ID NO: 338773 - protein, 117 aa, Zea mays
  Clone ID: MRT4577_72126C.1.pep
YVPPDAHRKRPGCIDPRDGDDARGGGLDLRVRESENRRREEQQQNIAMVNGMTERFHNKWLSKFAEWGLSVHSLWSLMAGLYTEIELLKENTRARFATPSTEESTLATEGSTPPTEE

SEQ ID NO: 338774 - protein, 367 aa, Zea mays
  Clone ID: MRT4577_72127C.1.pep
MGVLHLLLTPMGVLHLLLTPMEDEVPLTRKNSRQYVASGESSGVPSPALSALIGLQELSLANFDQTLEDMVPEDLLSEPADDGVMEVCADVLDTGLGSSRAASHASSTLERGLEGQETDLDRLAPMEVIKGPSALEAATTENLVLKDGVDTCLAPEDVAGDDSARVGNASHCPAPEALVDGMASQLRLQGASVKEGVSSLARWNPVLLQHRVSDLEASNADMARQISALEEKHSQSQAELVQRCSDFEEKYSQSQTELAQESADDAIRLRQLISTKDAAIKELRASKKSIAQELEAAQLAIKVVEETSITLRAQHDRAMDKAIRAGRILMRRPGMVVPDDIRADVNAAPDSSSRPSSSVAPEKDNAK

SEQ ID NO: 338775 - protein, 98 aa, Zea mays
  Clone ID: MRT4577_72128C.1.pep
PWSLLQRGNDSPAIQPTNGIPMPMAASVLLAAPAPLLAASHPRPTGEPAASRTVPASARFSSPGLLCSPRFLRRPGNNPLDPAETPHAIHANSASADV

SEQ ID NO: 338776 - protein, 1086 aa, Zea mays
  Clone ID: MRT4577_72129C.1.pep
MGKSKKGSGSSPRSGDKRKREPTPPSEDFGDSKYSKEEFSSESEGSPAPVSPPASSDDSDDSQGIAAEEYSSDEKDSSDSSEEDSGGDGGDGGDDGGDGDGGGDSGKGSDGGSNDVISRVIYGNIDVFRGNSRVTDGGVGVLEYLAEKNPICTASLHASTFRALILAFSASKLSLRSCDTASVLLAGEIEMAPKRKASGSSAAVIPPIDPNSQLPFAGNHMSVVSESDLLHLTYIGVLPPKELCSWRVCHGVTVPTEDTHEFVVYVPFLLRGLALPVSPFFRGLLDFYHLNLTHLNPNSILQISIFVHLCEAFLGNLPHFGLWKYLYHCRPGMAGGQHQLVGGTSLEMHRGRKIDYLDIPLKDSIKGWRLEWFIVENHGNSLPPRSGRQTDVRTPSWNESPIDQDVAEAGVLLAEVGLLKERGLTTEAVVADFVFKNIQPLKDRAYPAYLYRGLADSTRVTNRRIPAVDLVSRLEMILRGKVSNVGAPVAYSAWNLPPSKAFTHFMSSPPTGDGGLGLRVRPSAEEVSALVASLEEIPDDERQVHFEVPLDPSDAEISAMLDMLAEDSSDAAPARTSVVAPLPEAGKTLDIQRPVSVRPKRPCRANQLDSPVDEQKKKKRRLRRVSSLDRDAGPSVPAVEEVPVPEFTDADPNGCDPSIVDPNGCAVCVADENEEEEEDEIPLTRKNSRRYVASGESSGVPSPALSALIGLQELSLTNFDQTLEDMVPEDLLSEPADGDAMDVCADVFDAGLGSSWAASRASSTLERGLEGQETDLDCPAPMEVTEGPSALEAADAENLALKDGVDTYLAPEGVAGDDSAQVGSVSRDPAPEGIAGDDPAQMGSTNYDPAPEVAPDGDPTPSHQLISHDLGVPSFFSNLQALVDGMVSQLKLQGASVPERASSLARWNLVLLQQRVSDLEAANADMARQFSVLEEKHSQNQAELVRRCSDFEEKYSQSQTELAQVSAALNDANVLNSTLRAQLDSEKEEKRALVASRDNLDKLYRDSSNSLTILERSHRFTMEELDNHRCKLQESSDDVIRLRQSISAKDAVIKELRASKKSITQELETAQLAVKVAEETSATLRA

SEQ ID NO: 338777 - protein, 48 aa, Zea mays
  Clone ID: MRT4577_7212C.1.pep
AIWSKNPWIIKFRRMLTSKFIANFKIYLNQRSSMSLWDPNQNLTHGSL

SEQ ID NO: 338778 - protein, 169 aa, Zea mays
  Clone ID: MRT4577_72130C.1.pep
MARQISILEEKHSQGQAELVQRCSDFEEKYSQSQTELAQVSAALNDAKTLNSTLRAQLDSEKESTDDVIRLRQLISAKDATIKELRASKKSIAQELETAQLAAKVAEETSITLRAQRDRAMDKAIRAGRILMRRPGVVVPEDIRADVNAAPDSSSRPSSSVAPEKDIAK

SEQ ID NO: 338779 - protein, 98 aa, Zea mays
  Clone ID: MRT4577_72131C.1.pep
MRADRAGEGTPLLSPLATYCRLFFRVKGTSSSSSPSFSSSTQTTHPLGSAADGAPPLGSAADGAPPLGSAAGGAPPLGSAPGIISIFFKTVTSVQGMQ

SEQ ID NO: 338780 - protein, 99 aa, Zea mays
  Clone ID: MRT4577_72132C.1.pep
QPYVGGFFVGGGFFKAEFIGINKAAPGEAPLKGKLKTNILFFCSNVVCKVRAFVQEQKFFCPPPTFRLGLPPKVTFGGIQKGGYGTPFFWAELRGVRPL

SEQ ID NO: 338781 - protein, 65 aa, Zea mays
  unsure (1)..(65): unsure at all Xaa locations
  Clone ID: MRT4577_72133C.1.pep
MVRVSVLNDAHKCMYNAEKIGKRQDMIRRASKVIIKFLTVMQRHGYIGDFEYVGDYRSGXIVVEL

SEQ ID NO: 338782 - protein, 96 aa, Zea mays
  Clone ID: MRT4577_72134C.1.pep
SRVDPRVLETQSTGGNARAQALADVSLARESEALLMELALMRAYMLRMHQRSQGSRYWPSYDYEEQGPSDGDCEEGKLAMDDMQVLTPVSLPRRSL

SEQ ID NO: 338783 - protein, 86 aa, Zea mays
  Clone ID: MRT4577_72135C.1.pep
VTMKHYIRRDSRTTQFWEGVVSKLPAMQMSLPFQLSGACATTSLKKDYTDLHICREDRGKGISQVQETPVLFLLGIISPQSPDRPA

SEQ ID NO: 338784 - protein, 47 aa, Zea mays
  Clone ID: MRT4577_72136C.1.pep
LFFTATLWGVGKVHPSAPRTHPLRPTRRHRENISACITKDMDGAGVH

SEQ ID NO: 338785 - protein, 54 aa, Zea mays
  Clone ID: MRT4577_72137C.1.pep
SQNGLGVYISLCGNMFRPGMGQVFSELLFHKILVLKNLACTSSVTRYNNIIRFS

SEQ ID NO: 338786 - protein, 51 aa, Zea mays
  unsure (1)..(51): unsure at all Xaa locations
  Clone ID: MRT4577_72138C.1.pep
EPYLMXPTSGXMELXFXXLYLCPCRRRRIPAXPDDQLPRPRAPAPRVPXHA

SEQ ID NO: 338787 - protein, 54 aa, Zea mays
  Clone ID: MRT4577_72139C.1.pep
HTRPPTRARRHGRTRGLSLAGVRHQTMCRMYHMARLQSQEATANTSIDTDGHLA

SEQ ID NO: 338788 - protein, 62 aa, Zea mays
  Clone ID: MRT4577_7213C.1.pep
SRIMIATLILWLICICIKKGGPHFSCLLPPGFYLGRVLWGGSFFPECASIMFLCKSCHDCFP

SEQ ID NO: 338789 - protein, 53 aa, Zea mays
  Clone ID: MRT4577_72140C.1.pep
ASIRPACMHEQLATHGLRHGSLNEIYRLTLLSDEALSQQQALLPGRDYGRINS

SEQ ID NO: 338790 - protein, 73 aa, Zea mays
  Clone ID: MRT4577_72141C.1.pep
FVFTGVRTHVTAVDQAIVKGDTKLEGPVVVVTGASRGIGKATALALGKAGCKVTSLSNLLINIEKFIKCVCFS

SEQ ID NO: 338791 - protein, 518 aa, Zea mays
  Clone ID: MRT4577_72142C.1.pep
MAAITPPTQSEPSPQTGRPASSAAAAAKRGGGGAGAAGGPLMGKYELGRLLGHGTFAKVYHARHVDTGDNVAIKVLDKEKAVKSGLVPHIKREIAVLRRVRHPNIVHLFEVMATKTKIYFVMELVRGGELFSRVSKGRLREDTARRYFQQLVSAVGFCHARGVFHRDLKPENLLVDEQGNLKVSDFGLSAVAEQFRPDGLLHTFCGTPAYVAPEVLGRRGYDGAKADVWSCGVILFVLMAGYLPFHDKNIMAMYKKIYKGEFRCARWFSKDLTSLLMRILHTNPNTRITLPEIMESRWFKKGFKPVKFYIEDDQLHNVIDDEDGLLDMGPAGPVPPPLPPPPPPLPPPKVDGDESGSDSDSSISSCPASMLSDESQRPRGSLPRPASLNAFDIISFSRGFNLSGLFEEKGDEVRFISAEPMSDIITKLEDIAKLKSFKLRRKDWRICLEGTREGVKGPLTIGAEIFELTPPLVMVEVKKKAGDNEEYENFCDKELKPGMQHLVHHMVRAPSMLLTDAK

SEQ ID NO: 338792 - protein, 67 aa, Zea mays
  Clone ID: MRT4577_72143C.1.pep
TRGLRTETHRTLWSPRDMRGLKARWSLLHLLVCRKHNFSQLSSKPTEPVAGPRSAGGVIGRRGRTTH

SEQ ID NO: 338793 - protein, 107 aa, Zea mays
  Clone ID: MRT4577_72144C.1.pep
NNIDPPLYRETLPSRSQARGQNPNEGPKTRRVAPNKGGATETLTNYPVPKTTRLLGKGPNTLATRLALGGKPPPGVGHLCLNTNINSIGKHREGPLPKSLFKKLHPG

SEQ ID NO: 338794 - protein, 103 aa, Zea mays
  Clone ID: MRT4577_72145C.1.pep
KRKWFPIGIIFNKIPSGCFSFPIKRARSLGPLFAFSKDNGDAHKGPFQIKPFFPWDPQKTARKHFLSQEVFIFTPKKILFFFFFFFFFFFFFFFFFFFFFFFF

SEQ ID NO: 338795 - protein, 50 aa, Zea mays
  Clone ID: MRT4577_72146C.1.pep
IVSPYQFHPSQQLRPCHGPALRVRVIGISGSPVGVGSSFPGQPLLTVNRS

SEQ ID NO: 338796 - protein, 126 aa, Zea mays
  Clone ID: MRT4577_72147C.1.pep
MGSKPFALRSPQANPDPAISFRSAHATRGCGLLIHMAMQSCEGEAVTAAAPEQIDQVGEVVAAAAAASEPDATSEARVVETPQEEAEDPEPAHRGSKSRTPAPAPASPSTVKERQIPVDPASLRRL

SEQ ID NO: 338797 - protein, 119 aa, Zea mays
  unsure (1)..(119): unsure at all Xaa locations
  Clone ID: MRT4577_72148C.1.pep
MAPTVMMALSATAVAPFHGLEFTDSLPDDRRCSRSLCNVSNGGRIRCMQGWSDYGNTKFXRLXYLAAIATDDLLEQCDYXMMCNGWIPWLXFIPDRYEYRENXSSNRAXFELRYWTMRK

SEQ ID NO: 338798 - protein, 74 aa, Zea mays
  Clone ID: MRT4577_72149C.1.pep
NIVRFSNKWFCTPCARSVKRAKLVHQRHKTPVISKQLNGYHSPYSRKEGPVIDSSHRHFQCFPLRKKLNECAFH

SEQ ID NO: 338799 - protein, 184 aa, Zea mays
  unsure (1)..(184): unsure at all Xaa locations
  Clone ID: MRT4577_7214C.1.pep
KLLHSSAYHPQTSGQTKRVNQILEDMMRSCVLEFPQKWDDCLPLTEFSYNNSNQESIKMAPXEALYGRRCQTPLNWSEPRERCYFRPDLVKETEERVQRIRHHLKEAQARQNNYVDKRHQPLFFXVKDYVYLKVSPMKGVNRFEVKGKLAPRYIGPFSILEQCRPVAYRLQLPETLSVVHNVFH

SEQ ID NO: 338800 - protein, 135 aa, Zea mays
  unsure (1)..(135): unsure at all Xaa locations
  Clone ID: MRT4577_72150C.1.pep
MHLSPWWLPVCENPILQPYRIQLASLSTILPSSTMQLDQXETYDNSYDTAHVLAHIITGQQLRQLALTNVAVYSKQPHCLAFNQLGSSNSDYYLQPSQLPFRQLPDDYPQQSDAFNQLAALNSTAYLQAQQLLPF

SEQ ID NO: 338801 - protein, 118 aa, Zea mays
  unsure (1)..(118): unsure at all Xaa locations
  Clone ID: MRT4577_72151C.1.pep
MKYKSVPNTLYEDAEKCLRLALYSNPPVMAALLPLIQILLLGDKLKVALNELEKACLSLATALPFXLRGXLLEEYDQNQVSTIFSCYXEALRRDPTCSYSMERLIXMHKKGYYNTIQL

SEQ ID NO: 338802 - protein, 58 aa, Zea mays
  Clone ID: MRT4577_72152C.1.pep
PIPQLVFIPQLSYYLFCRNQKAGLPTTLGRPHMPLLANDVDPWPPFKSIGPRLARRCV

SEQ ID NO: 338803 - protein, 73 aa, Zea mays
  Clone ID: MRT4577_72154C.1.pep
SAREFGSRRAAICLRHGRGADQHPPALVGGRQLQLHQPPPFPVSCAYASPPNPLTFVHPTPFQTTVSCHLVSD

SEQ ID NO: 338804 - protein, 45 aa, Zea mays
  Clone ID: MRT4577_72155C.1.pep
HNKFILMLTHRKICCHSELVLIAFINILLSYYILVHKILLKWALL

SEQ ID NO: 338805 - protein, 149 aa, Zea mays
  Clone ID: MRT4577_72156C.1.pep
MLQGSEVMGECEDGKEYRCWEELLPDALGLIFRNLPLQEVLTVLPRVCKSWGRVVAGPYCWQEIDIEEWSQQQGKPEQIARMVELLVGRSAGSCRRISVSGLPCDPRFSFIGDNARALRTLEIPRSEISDSMVESVAPRLPNVTFLDIS

SEQ ID NO: 338806 - protein, 332 aa, Zea mays
  unsure (1)..(332): unsure at all Xaa locations
  Clone ID: MRT4577_72157C.1.pep
MGECEDGKEYRCWEELLPDALGLIFRNLPLQEVLTVLPRVCKSWGHXVAGPYCWQEIDIEEWSQQQGKPEQIARMVELLVGRSAGSCRRISVSGLPCDPRFSFIGDNARALRTLEIPRSEISDSMVESVAPRLPNVTFLDISSCTKMGARGLEAFGKHCKSLAGLRRVMHPIDLADRACQHDEAHAIACSMPRLRHLEMGYMLVATEAVAEILGRCRELRFLDLRGCWAVDDKLLPRDRHPGLRVLGPRVDDCYENSYWEECSDDYSDDSSIYSWELMDDVDDDYDYAAGSDDDDDEAVWDDDGQGLENLEVRFYGGGFGETFAGFDWPPSP

SEQ ID NO: 338807 - protein, 83 aa, Zea mays
  Clone ID: MRT4577_72158C.1.pep
RSLLFCLKILPVLKEWICGCFKRFPYYVTCSSIPFLFQSLDFFLSEPRLVFHLYQMFYNQRLFYVHFKIIRQRIKLLKFQTIK

SEQ ID NO: 338808 - protein, 100 aa, Zea mays
  Clone ID: MRT4577_7215C.1.pep
LSLERKQRHMTVVSGWDDESGLLDAMVVEATPVCESRRKRRASTCSNNDGAGSNTKYGDTVDRPPRIHLPTMVWCKNNNMVYTAVPLTHGRTKADATEYH

SEQ ID NO: 338809 - protein, 83 aa, Zea mays
  Clone ID: MRT4577_72160C.1.pep
RTESQRVVTAHEALVASSEVSTERAQDLPVNGHHRTSKVTGVAHPQSSRAVSHRDVSAAIACHEVHCAKDLGVGIHCDLFPRV

SEQ ID NO: 338810 - protein, 771 aa, Zea mays
  Clone ID: MRT4577_72161C.1.pep
MCVDYRSLNDVTVKNKCPLSRIEDLFDQMRGAKVFSKIDLRSGYHQMRIRPSNIPKTAFSTRYGLYEFTVMSFGLTNAPTYFMNLMNKVFMEYLDRFVVVFIDDILIYSKSDSDHEEHLRLVLQKLRDNQLYVKFSKCEFWIGGVPFLGHIISNGGISVYPAKVKEIMEWRVPTTVTEIRSFLGLAGYYRRFIEGFSKIAKPMTSLLEKDREFKWDEKCQDSFDQLKKRLMSPPVLVMPDLQKGFNIYCDACGQGLGCVLMQEGHVIAYASRKLRKHELNYPTHDLELTAVVHALKIWRHYVMGTKCQVYTDHKSLKYIFTQKDLNLGQRRWLELIKDYDLEIHYHPGKANLVADALSRKEHVHSAIVSQLPDEIVEDFRRLNLGIVAHTEGVTIDVEPTLEQEIRKGQIGDAKIQEIKDLITEGRGPEFTEDEQGTVWFKDGMCVPDIESLRETILKEAHDSDYSIHPGSTKMYKDLKQKYWWYGLKRDVVAHVAMCDVCQRVKAEHQRPARLLHPLKIPEWKWEEIGMDFITGLPRTQKGYDAIWVIVDRLTKVAHFIPVKTIYKGFIWEEVQTPLYWDQTGERQFFGPELIQEAEEQVRIIRENLRVAQTRQKSYADNRRRPLEFKEGDYVYLKVSPLRGMRRFKVKGKLSPRFIGPFRVFRRVGEMAYQLELPATLSDVHNVFQVSQLKKCLRVPEEQLPMEELSVQGDLTYTEYPIKILDTLTRVTRNKVIKMCKVQWSHHGEDEATWEREEELRIDFPHLFPRSS

SEQ ID NO: 338811 - protein, 79 aa, Zea mays
  Clone ID: MRT4577_72162C.1.pep
IRVGSRRPRPKDLVQYAESRMDGPIIPPLPTNSDQLQVCCDQQQVFRSVNLLRCCVNQLRLAFWHASQAWCWCRPCGRG

SEQ ID NO: 338812 - protein, 338 aa, Zea mays
  Clone ID: MRT4577_72163C.1.pep
MGASGGEKLGTLVCVLAHVSLLLVLVLAPCVCKATGGDYGGLSNDHYTESCPELETIVKKSLAPIFAVDITSPAALLRLLFHDCQVHGCDGSILLNSDERRHITSELGSRKNLGIRHVGTVGLVKAAVEAACPGRVSCADIVVLAAREAVAHTGGPRVASVPLGRRDATTTSTQAADAQLPSCFLGIDGALDIFTSRGMTVEETVAILGSHTLGGGHCVNIDTGRARRDKAFEALLHLQCPKTMPPLITEAVVFVPSDLTPTWFDTHYYRGAAAGRGLFNVDDEASTYARTAGYVRRFAEDREGFFGVFASAFVKLSGFGVLTGEQGEIRKKCDVVNY

SEQ ID NO: 338813 - protein, 578 aa, Zea mays
  Clone ID: MRT4577_72164C.1.pep
MSHKPPTFASSPDPLDTDDWLKSVEKMLNIAQCTDREKVLYASGRLTGPAADWWDSYTAAHDVADTTTRAEFTTQFKNHHIPAGLMKIKKKEFLSLKQGSMSVSKYRDKFIQLSRYVPDEVAEDERKQEHFIEGLNGPLIATTPVQNKQQTPGSGKGYSIARVNQVSVDATPDGADIVLGMFYVNAIPATILFDSGATHSFMSARYANTNEIPLLNMRKPMIVITPKGPVEANQMTRRLTLTIMAREFGATAIILEATSIDLILGMSWLRKAKAIIACGRGTVELTSPKGEIFQVQITVTTSSKRAMFFIPEEFVGDNIRVVRDFLDVFPEELPGMPPDREVEFVRDLLPGTAPISKRPYMMSVEELKELKKQLTELQEAGYIRSSSSPWRAPVLFVQKKDGSQRMCVDYRSLNDVTMKNKYLLPRIEDLFDQMRGARVFSKIDLRSGYHQMRIRPSDIPKTTFSTRYGLYEFIVMSFGLTNAQTYFMDLMNKFSKCEFWIGEVPFLGHIISNGGISVDPAKVKEIMAWGVPTIVTEIRSFLELAGYYWRFIEGFSKIAKPMTSLLEKGREFKWDEKC

SEQ ID NO: 338814 - protein, 480 aa, Zea mays
  Clone ID: MRT4577_72165C.1.pep
MSVEELKGLKKQLTELQEAGYIRPSSSSWGAVMRGARVFSKIDLRSGYHQMKIRPSDIPKTDFSTRYGLYEFTVMFFGLTNTPAYFMDLKNKFSKYEFWIGEVPFLGHIISNDGISVDPAKVKEIMEWSVPTTVTEIRSFLGLAGYYRRFIEGFSKIAKPMTSLLEKGIEFKWDEKCQDSFDQLKKRLMSPPILVMPDLQKGFDIYCDACGQGLGCVLMQEGHVIAYASRQLRKHELNYPTHDMELAAVVHALKIWRHYIMGTKCQVYTDHKSLKYIFTQKDLNLRQRRWLELIKDYDLEIHYHPGKANLVADALSRKEHVHSAIVAQLPDEIVEDFRRLNLGIVAHTEGVTIDVEPTLEQEIRKGQIGDAKIQEIKDLITEGRGPEFTEDEQGTVWFKDRMCVPHIESLRETILKEAHDSDYSIHPGSTKMYQDLKRKYWWYGLKRDVAAHVAMCDVCQIVKAECQRPARLLHPLKIPE

SEQ ID NO: 338815 - protein, 569 aa, Zea mays
  unsure (1)..(569): unsure at all Xaa locations
  Clone ID: MRT4577_72166C.1.pep
MAFGLRRSAAEQVAGWVLDGPGLGCTRAHPDPHVGPPLFGSPPTTIANRCQLKCPSGRGVTLHKIVTAIGGGVSVAKAQLVIRARFIGLEVDDASCNMPHSPRTKGIIQHFVRLMTKKHLIAGDYVLTVEVWVVFVDVRYMWIEHGKKNPNNMPQTWDALKRVMRARFVPSYYARDMLNKLQQFRQGTKSVEEYYQELQMGKSTPWQQRTTTSMTGRTPAPTPSLSRPAPPPSSGDKPRASSTNSATKSAQKPEGSASSVPSTGRTRDVLCYRCKGYGHVQCDCPNQRVLVVKDDGGYSSASDLDEAILALLAADDVGTKEPLEEQIGADDAEHYESLIVQRVLSAQMEKAEQNQQHTLFQSKCVIKEHSCRLIIDGGSCNNLASSDMVEKLALTTKPHPHPYHIQWLNNSGKVKVTKLVRINFAIGSYRDVVDCDVVPMDACNILLGRPWHHGRSNQYFLIHHDKKIILLPMSLEVIVRDDVAKAMKTKTENNKNIKVVGNNKDGIKLKGHCLLATKSNVNELXASTSVAYALRACWFSCPSSCLRNPTILEFDFETYIYIWVVFSKP

SEQ ID NO: 338816 - protein, 710 aa, Zea mays
  unsure (1)..(710): unsure at all Xaa locations
  Clone ID: MRT4577_72167C.1.pep
MPPNREVQFVIDLLPETAPISKRPYRMSVGELKELKKQLMELQEAGYIRPNSSPCGAPVLFVQKKQESQGMCVNYRSLNNVTVKNKCPLPRIEDLFNQMRGARVFSKTDLRSGYHQMKILPSDIPKTDFSTRYGLYEFTVMSFGLTNTPAYFMDLKNKVFMXLDRFVVXFINDIXYLKSDSDHEKHLRLVLQKLRNNQLYAKYSKCEFWIDKVSFLGHIVSNGGIAVDPAKVKEIMEWRVPTTVTEIRSFLGLAGYYQRFIEEFSKIAKPMTSLLEKGREFKWDEKQRRWLELIKDYDLEIHYHPGKANLVANALSRKEHVHSAVVAQLPDEIVENFRRLNLGIVAHTEGVTIDVESTLEQEIHKGQIGDAKIQEIKDLITEGRGPEFTEDEQGIIWFKDRICVPDIESLRETVLKEPHDLDYSIHPGSTKMYQGLKQKYWWYGLKRVVAAHVAMCDVCQRVKAEHQRQAGLLYPLKIPEWKWEEIGMDFITGLPHTSKGYDSIWVIMDSLTKVAHFILTRGRQFFGPELIQEAEEQVHIIRENLRVAQTRQKSYADNRRRPLEFEEGDYVYLKVSPLRGMGKFKVKGKLSPRYIGPFLIFRRVGEMAYQLELPASLSDVHNVFHVSQLKKCLRVPEEQLPMEELRVQGDLTYTEYPIKILDTLTRVTRNKVIKMCKVQLSHHGEDEDEATWEREEELRIDFPYLFPRSS

SEQ ID NO: 338817 - protein, 1190 aa, Zea mays
  Clone ID: MRT4577_72168C.1.pep
MSPEAIVRDDVAKATKAKTENNENIKAVGNNKDGIKLKGHCLLVTKSDVNELFASTSVAYALEYSDVFPSEIPEGLPPIRGIEHQIDLIPSASLPNHAPYRRNPEETKEIQRQVQELLDKGYVLRMKLGDEWKTAFKTKFGLYEWLVMPFGLTNAPNTFMRLMNEVLHAFIGKFVVLYFDDILIYNKSMDEHVDHMRAVFNALRDARLFGKLEKCTFCTDRVSFLGYVVTPQGIEVDEAKVEAIHGWPMPKTITQVWSFLGLAGFYRCFVKDFSTIAAPLNELTKKGVHFSWGKVQEHSFNVLKDKLTHAPLLQFLGFNKTFELECDASGIGLGGVLLQEGKHVAYFSEKLSGPVLNYSTYDKELYALVRTLETWQHYLWPKEFVIHSDHESLKHIRSQGKLNRRHAKWVEFIESFPYVIKHKKGKENIIADALSRRYTLLNQLDYKIFGLETIKDQYVHDADFKDVLLHCKDGKGWNKYIEAHGGGLMGHFGAKKTEDKLAGHFFWPKMRRDVARLVARCTTCQKAKSRLNPHSLYLPLPVPSAPWEDISMDFVLGLPRTRKGRDSVFVVVDRFSKMAHFIPCHKTDDATHIVDLFFREIVLLHGVPNTIVSDHDAKFLSHFWRTLWAKLGTKLLFSTTCHPRTDGQTEVVNRTLSTMLRVVLKKNINMWEDCLPHVEFAYNRSLHFTTKMCPFQIVYGFLPRAPIDLMPLPSSEKLNFDATRHAELMLKLHETTKENIERMDARYKFASDKGRKELNFEPGDLVWLHLRKERFPELRKSKLLPRADGPVKVLEKINDNAYRLGLPTDFGVSPTFNIADLKPYLGEEVELESRKTQMQEGENDEDIHTTDTSMPIQVPISGPITRARARQLNHQDECPSGQGVTLHKIVTAIGGGVSAVRKLEDMFEGLEFHHVERDRNVAADALSKLGSSRAQAPPEIFVQEVSRPSIPSDQAEECNTLSQPKSDPNDWREPIISIQNPGWEGFQFTKWVEYKPIASLTSAKAVEFIQDIIFRFGIPNNIIIDLGYNFTSSEFFDFCEQRSIQIKYATVAHPRANGQVERANGMILEALRKKVFDKNEKFAVKWIRELPYVVWSLRTQPSRALHGNTPFFIVYGSEVVLPADLRFGAPRLVFESIAEAEATRLEDIDVLEEERLNIVIQSARYQQSLRRYHDKVVRHRSFVVGDLVLH

SEQ ID NO: 338818 - protein, 40 aa, Zea mays
  Clone ID: MRT4577_72169C.1.pep
LLLAAVHVVANPVNAGVGCLPPLGFLSYGRNLLYELLSVG

SEQ ID NO: 338819 - protein, 83 aa, Zea mays
  unsure (1)..(83): unsure at all Xaa locations
  Clone ID: MRT4577_7216C.1.pep
CQHPHPSPCQLHGTCGVGSTRILGQLVELLRHHGTPTVTPYCSPDRLSLLLQRYLSLTLVEPXDQHQAILYLILQSILHEMSH

SEQ ID NO: 338820 - protein, 517 aa, Zea mays
  Clone ID: MRT4577_72170C.1.pep
MELPLDAQSSGRRLDVDERVEQCRAVAGVLHVLARVLMQEGHVIAYASRQLRKHELNYPTHDLELAAVVHTLKIWRHYSWELSAKQCRWLELIKDYDLEIHYHPGKAKLVADALSQKEHVHSAVVAQLPDEIVEDFRRLNMGIVAHTEGVTIDVEPTLEQEIHKGQIDDAKIQEIKDLITDGRGPEFMEDEQGTVWFKDRICVPDIESLCETILKEAHDSDYSIHPGSTKMHQDLKQKYWWYGLKRDVAAHVAMCDVCQRVKAEHQRPAGLLHPLKIPEWKWEEIGSWDKSLPYAEFSYNNSYQASLKMSPFEALYGRKCRTPLYWDQTGERQFFGFELIQEVEEQVLIIRENLRVAQTRQKSYADNRRRPLEFEEGDYVYLKVSPLRGMRRFKVKGKLSPLYIGPFLIFSRVGEMAYQLELPASLSNVHNVFHVSQLKKCLHVPEEQLPMEELSVQGDLTYMEYPIKILDTLTRVTRNKVINMCKVKWSRHREDEATSEREEELSIDFTHLFPRSS

SEQ ID NO: 338821 - protein, 947 aa, Zea mays
  unsure (1)..(947): unsure at all Xaa locations
  Clone ID: MRT4577_72171C.1.pep
METRPLLFSLGTREKTESEKDLNMLDSNCRRIPTCDGHHGHMRARIGSSSTTWKAYQDECPSGRGVTLHKIVTAIGGGVSVAKAQRLLEGCSRVVNVVSSTNRVIPHPLIERSGIHPTGLEVDDASRNMPHSPRTKGIIQHFVRLVKTHTEGLDNALQVTNEKMGQLEATQIDTNTKLANVEMTGAHIDKSLVALLRRFDEMHANTNGGCDEGAEGNWDDYVVDTEQDDKEAPNRRRLHTNRRGMGGFHRRGIHGNDDAFSKVKFKIPPFDGKYDPDAYITWEIVVDQKFACHEFPENALVRAATSEFTEFASVWWIEHGKNNPNNMPQTWDPLKRVMRARFVPSYYARDMLNKLQQLRQGTKSVEEYYQELQMGMLRCNIEEGEESAMAIFLGGLNREIQDILAYKDYANVTRLFHLACKAGREVQGQRASARSNVSAGKSTPWQQRTTTSMTGRTPAPTPSLSRPAPPPSSSNKPRASSTNSATKFAQKPACSASSVASTGRTRDVLCYXCKGYGHVQRDCPNQRVLVVKDDGGYSSASDLDEATLALLAADDAGTKEPPEEQIGADDAEHYESLIVQRVLSAQMEKAEQNQRHTLLQTKCVIKERSCRLIIDGGSCNNLASSDMVEKLALTTKPHPHPYHIQWLNNSGKVKVTKLVRINFAIGSYRDVGDCDVVPMDACNILLGRPWQFDSDCMNHGRSNQYSLIHHDKKIILLPMSPEAIVRDDVAKATKTKTENNKNIKVVGNNKDGIKLKGHCLLATKTDVNELFASTSVAYALVCKDALISIQDMQHSLSPVVTNILQEYSDVFPCEILEGLPPIRGIEHQIDLIPGASLPNRASYRTNPEETKEIQRQVQELLDKGYVRESLSPCVVPVILVPKKDGTWRMCVDCRAINNITIRYXHPIPRLDDMLDELSGAIVFSKVDLRSGYHQIRMKLGDEWKTAF

SEQ ID NO: 338822 - protein, 1175 aa, Zea mays
  Clone ID: MRT4577_72172C.1.pep
MAGESWSLAPSLLDRVYESSIRTTTCAWPKSTEREKKTEKRRRGPPPRCMGVAIPWQMGNMTCGYRVQPLQSVKLMVNTRKGGGIDLPPNRHTRRIFRQPQPQPTEMDPPPPPPPSGVDPLVAAQMRMMQQMADTMADMHAQMQQERQEMHQEREEIRRELHQEREEIRQERRTQQQQQQQQQPQQAPQPPPPPPVPPRDKHREFMSHKPPTFASCPDPLDADDWLKFVEKMLNIAQCTDQEKGSMSVSEYRDKFIQLSRYAPEEVAKDERKQEHFIEGLNGPLQYSLVAHTFPSFQRLLDKALSIEHKRVQLGDLKRKAISQGQGSNSATPTCTPMKFSGQSAGTTCFKCGKTGHYAIVCPQRIATTPVQNKQQTPGSGKGHSIARVNQVSTDATPDGADIVLGMFYVNAIPATILFDSGATHSFMSARYANTNEVPLLNMRKSMIVITPKGPVEANKMTRRLTLTIMGREFIATAIILEASSIDLILGMSWLRKAKAIIACGRGTVELTSPKGERFQVQIAVTTSSRHAMYFIVEEFVGDNIRVVRDFLDVFPEELPGMPPDREVEFVIDLLPGTVPISKRPYKMSVKELKELKKQLTELQEAGFIHPSSSPWGAPILFVQKKDGSQRMCVDYRSLNDVTVKNKYPLPRIEDLFDQMRGARVFLKIDLRSGYHQMRIRPSDIPKTTFLTRYGLYEFTVMSFGLTNAPAYFMNLMNKVFMEYLDKFVVVFIDDILIYSKSYSDHEEHLRLVLQKLRDNQLYAKYSKWEFWIGEVPFLGHIISNGGISVDPAKVKEIMEWSVSTTVKEIQSFLGLTGYYRRFIEGFSKITKPMTSLLEKEREFKWDEKCQDSFDQLKKRLMSPPVLKDINLRQRRWLELIKDYDLEIHYHPGKANLVADALSRKEHVHSAIVAQLPDELVEDFRRLNLGIVAHNEGVTIDVEPTLEQEIRKGQIGDAKIQEIKDLITEGRGPEFTEDEQGTIWFKDRICVPDIESLRETILKEAHDSDYSIHPGSTKMYQDLKQKYWWYGLKRDVAAHVAMCDVCQRVKAEHQRPAGLLHPLKIPGWKWEEIGMDFITGLPRTQKGYDAIWVIVDRLIKVAHFIPVKTTYKGSQLAELYMAQIVCLHGVPKKIVSDRGSQFTSRFWRSFHENMNTKLNFSTTYHPQTDGQTERTN

SEQ ID NO: 338823 - protein, 91 aa, Zea mays
  unsure (1)..(91): unsure at all Xaa locations
  Clone ID: MRT4577_72173C.1.pep
AKPVALYYDTGRSRTSLKYVDQERRNHLWNTSYLQSCSGRFRLXKDRKXCXXCPPPAESRNSRGRTAAAKRTEGLWWCGVGSPYVRVLGPA

SEQ ID NO: 338824 - protein, 609 aa, Zea mays
  Clone ID: MRT4577_72174C.1.pep
MSHKPPTFASSPDPLDTDDWLKSVEKMLNIAQCTDREKVLYASGRLTGPAADWWDSYTAAHDVADTTTRAEFTTQFKNHHIPAGLMKIKKKEFLSLKQGSMSVSKYRDKFIQLSRYVPDEVAEDERKQEHFIEGLNGPLYTPTKFSGQSAGTTCYKCGKIGHYANVCPQRIATTPVQNKQQTPGSGKGYSIARVNQVSVDATPDGADIVLGMFYVNAIPATILFDSGATHSFMSARYANTNEIPLLNMRKPMIVITPKGPVEANQMTRRLTLTIMAREFGATAIILEATSIDLILGMSWLRKAKAIIACGRGTVELTSPKGEIFQVQITVTTSSKRAMFFIPEEFVGDNIRVVRDFLDVFPEELPGMPPDREVEFVRDLLPGTAPISKRPYMMSVEELKELKKQLTELQEAGYIRSSSSPWRAPVLFVQKKDGSQRMCVDYRSLNDVTMKNKYLLPRIEDLFDQMRGARVFSKIDLRSGYHQMRIRPSDIPKTTFSTRYGLYEFIVMSFGLTNAQTYFMDLMNKFSKCEFWIGEVPFLGHIISNGGISVDPAKVKEIMAWGVPTIVTEIRSFLELAGYYWRFIEGFSKIAKPMTSLLEKGREFKWDEKC

SEQ ID NO: 338825 - protein, 66 aa, Zea mays
  Clone ID: MRT4577_72175C.1.pep
PMGFGTHESLVYTYTYKILVFKIRYNGAKQSHTKSVFEGQDFLCTSVFHVDYITLSDHCKVVGHCS

SEQ ID NO: 338826 - protein, 67 aa, Zea mays
  unsure (1)..(67): unsure at all Xaa locations
  Clone ID: MRT4577_72176C.1.pep
QRKPDXSCSKPQEXSCKLQVQSXFXGXGSXXGLLSSVFMXRPPKQGLWSIVAPPSPPXLLVIKNIXN

SEQ ID NO: 338827 - protein, 830 aa, Zea mays
  unsure (1)..(830): unsure at all Xaa locations
  Clone ID: MRT4577_72177C.1.pep
MGYPILLEESRIDLILEELLGMPPDIEVEFVIDLLLGTAPISKRPYRMPVEELKELKKQLTELQEAGYIRPSSSPWGAPVLFVQNKDGSQQMCVDYRSLNDVTVKNKYPLPCIEDLFDQMRGAKVFSKIDLRSGYHQMRIRPSDIPKTDFLTRYGLYEFTVMSFGLTNAPAYFMDLKNKVFIIWTDSSWISVDRAKVKEIMEWRVPTTVTEIRSFLGLAGYYRRFIEGFSKIAKPMTSLLEKGREFKWNEKCQDSFEQLKKRLMSPPVLVMPDLQKGFNIYCDACGQGLGWTLMQERHVIAYASRQLWKHELNYPTHDLELAAVVHALKIWRHYIMGTKCQVYTDHKSLKYIFTQKDLNLRQRRWLELIKDYDLEIHYHPGRANLVADALSRKEHVHSAIVAQLPDEIVEDFRRLNLGIVAHTEGVIIDVEPTLEQEIRKGQNGDAKIQEIKDLITEGRGPEFTEDEQGTVWFKDRMCVPDIESLRETILKEAHDSDYSIHPGSTKMYQDLKRKYWWYGLKRDVAAHVAMCDVCQRVKAKHQRPAGLLHPLKIPEWKWEEIGMDFITGLPRTQKGYDVIWVIVDRLTKVAHFIPVKTTYKGSQLAELYMARIVCLHGVPKKIVSDRAXIWEEVQDSXIGIRLERDNXFGPELIQEAEEQVRIIRENLRVAQTRQKSYADNRRRPLEFEEGDYVYLKVSPLRGMRRFKVKGKLSPCYIAPFLIFRRVGEMAYQLELPATLSDVHNVFHVSQLKKCLRVPEEQLPMEELSVQGDLTYTEYPIKILDTLTRVTRNKVINMCKVQWSHHGEDEATWEKEEELCIDFPHLFPRSS

SEQ ID NO: 338828 - protein, 559 aa, Zea mays
  Clone ID: MRT4577_72178C.1.pep
MGYPYSVRREHYRRDPWISVEELKGLKKQLTELQEAGYIRSSSSPCGAPVLFVQKKDGSQGMCVDYRSLNDVTVKNKYLLPRIEDLFDQMRVARMRIRPSDIPKTTFSTRYGLYEFTVMSFGLTKAPAYFMNLMNKVFMEYLDRFVMSDSDHEEHLRLVLQKLRDNQLYAKFSRCEFWIGEVPFLGHIISNGGISVDPAKVKEIMEWRVPTTVTEIRSFLGLAGYYRRFIEGFSKIAKPMASLLEKDREFKWDEKCLERKEDVHSTIVAQLPEEIVEDFRRLNLGIVAHTEGVTIDVEPTLEQEIRKGQIGDAKIQEIKGLITEGRGPEFTEDEQGTVWFKDRICVPDIESLRETILKEAHDSDYSIHPGSTKMYQDLKRKVKAEHQRPAGLLHPLKIPEWKWEEIEAEEQVRIIRENLRVAQTRQKSYADNRRPLKFEEGDYVYLKVSPLRGMRRFKVKGKLSPRYIGPFLIFRRVREMAYQLELPASLSDVHNVFHVSQLKKCLRVPEEQLPMEELSVQGDLTYTEYPIKILDTLTRVTRNKVIKMCKVQWSHHGQD

SEQ ID NO: 338829 - protein, 46 aa, Zea mays
  Clone ID: MRT4577_72179C.1.pep
LGGCPLSGNAPPHRLTKSQGHVLIRRAAVNKSNSPLCILAPVMSSI

SEQ ID NO: 338830 - protein, 56 aa, Zea mays
  Clone ID: MRT4577_7217C.1.pep
QVRLLAVVACWADFRPPPGFNFQVMESVLRAPLFHPAKVTYSNGANRWGTPHHAHP

SEQ ID NO: 338831 - protein, 80 aa, Zea mays
  Clone ID: MRT4577_72180C.1.pep
PGHLNDPWMGAASQQGAAQRRRPKNGLNKSVRSSVTGACGAERPPEAESEDLSAARPVCGRGRPGVARWSGPRRREASCR

SEQ ID NO: 338832 - protein, 100 aa, Zea mays
  unsure (1)..(100): unsure at all Xaa locations
  Clone ID: MRT4577_72181C.1.pep
PTRPPTRPTEPAAEHRRTASSSAYLSRAEDEMERARKKSGAGSEGAGMRLARPLKPXRLIASACGTPHTETGALHIGCDDYQTDQRNERKIATARQRIQR

SEQ ID NO: 338833 - protein, 394 aa, Zea mays
  unsure (1)..(394): unsure at all Xaa locations
  Clone ID: MRT4577_72182C.1.pep
GISGKWHSXEGLGEHVGGSAVRATCFIPETYTVTYNSCNYSSNGISDGIAVEKDETFLLISVGSKQVLTTWILQPRNAENRQVYSSGLDIDSKQNSRNLENVDSAMSFQWLTTHMPPKLPRNRLKSGHIKQRVEEGNSSVVQPNMDVMDHMENDWRYLSVTAFHLKHPVLRLTVCFVAVACSDATVVLRALLLPSRLWFDVAFLVPHASPVLVLRHIIINASHYKDDAGDRYLIASGSTDGSITFWNLTETIHGFMQLISETQPHMSIGYQKRPRTGRGSQGGRLRWRSLSYASKKRDGDMSSSDGSNPGTLNTAENSSEASGVENTHIVVHEASDSSKTEMPSSTQSCDIPELRPMHSLXSVHQSGXVNCLHISFSTPDKSYCIIKWWEMINL

SEQ ID NO: 338834 - protein, 106 aa, Zea mays
  Clone ID: MRT4577_72183C.1.pep
RRLGTNLREFGQDRREGFVPLIVLCRLCVDVARFYLGTGSCNIARVPVSASRVPRTNYTKIVSNGFCLSSNFTKSCSRKFGATLIFGLYGFEFWKTGNTSELGKGF

SEQ ID NO: 338835 - protein, 75 aa, Zea mays
  Clone ID: MRT4577_72184C.1.pep
TQTGFNKVKNSFGPATPPPKKFFVPAKYERVSTKPIFLGFHMDPHEDALAPPNILFFLGKDLRAYGLQGGLFSKL

SEQ ID NO: 338836 - protein, 81 aa, Zea mays
  Clone ID: MRT4577_72185C.1.pep
LVKPFINSCLINNSECLLLLYIGMGKMVNGDDAIIGGSRITGVIRAPGANTYHGTNGVHVLIIAWDPTQSSISSIGRLKDL

SEQ ID NO: 338837 - protein, 239 aa, Zea mays
  unsure (1)..(239): unsure at all Xaa locations
  Clone ID: MRT4577_72186C.1.pep
GGRLKKKKKKKKKKKKKKKKKKKKKKKKNRLSTFLLFRPGSKELGSKSWGGLELENRLRRSTQKDSRESHNPSHSQIAKGTMDIAASVSGAEGSKFXKGAACNFSDARNSSKDPRERPASMRKLIVAGALCVEFMGGEGGGGIKGNSLAILTDGGHLLSDGGGFAISLFSLWAAGGKATPRKSNGFFRGEILGALVSIQFIWLLAGILVYKAVVRFVGKSGNVRGSLMFPVSAFGLAVN

SEQ ID NO: 338838 - protein, 47 aa, Zea mays
  Clone ID: MRT4577_72187C.1.pep
SIELLRRRRVRSRGSQAGYRGRGHRWIDVARRRSWVVSNPRSPLVHR

SEQ ID NO: 338839 - protein, 89 aa, Zea mays
  Clone ID: MRT4577_72188C.1.pep
RPPFLGRGCFILLSRPSGCSLPPLQPAFLLRHVPLVWLVGAAVLRPCFFLFLVACLAPCPAPPVFLGSPPVLCGSVAPFPLRFSLPVSC

SEQ ID NO: 338840 - protein, 77 aa, Zea mays
  Clone ID: MRT4577_72189C.1.pep
CNNSSKRESYAHNSGGMNYMERGARALTAATRSYSGDGMVVLQRAIEPTTAPKEKPHINSRSRTTVAISDRMLHPLS

SEQ ID NO: 338841 - protein, 126 aa, Zea mays
  unsure (1)..(126): unsure at all Xaa locations
  Clone ID: MRT4577_7218C.1.pep
PAGPXKSRILTTQPRKNPFFLFSSNTSFFLYTYYRTWASSVVTLVITTPSTIPKLNHTPCPLKPTRTKALAHLPLLRLNTTPRALSRTDMRTRPRRRRNARRARRASRRGSGGSSLSLRSSRCSDN

SEQ ID NO: 338842 - protein, 136 aa, Zea mays
  Clone ID: MRT4577_72190C.1.pep
VTGDVDVHVKWASSIVVGDIALWGTVLISIKYGRRPAPPGDEGVSVVMDEEVWCRGAGGGRAEPAGSDPKVRVEVVVDMVADWVRCRPLGSDVPANRHLHEGMKDLYIDIAFLRLFRIRRLTSILERKLRMIGWTF

SEQ ID NO: 338843 - protein, 45 aa, Zea mays
  Clone ID: MRT4577_72191C.1.pep
VKKALRIVKVEVTHRGNMRRKCRISGLTSQATRELSYVSFIAGMS

SEQ ID NO: 338844 - protein, 68 aa, Zea mays
  Clone ID: MRT4577_72192C.1.pep
ASTDGRSAYNPGRSGSVSAQSAHQSFENNYYMNPHPSHQRFPSHYTMPQPINSGPKAQESFPAPRRRS

SEQ ID NO: 338845 - protein, 91 aa, Zea mays
  Clone ID: MRT4577_72193C.1.pep
NNPFKRRPWENQSGDQQAFNLNPTNQESYWQWPTFPIRTTQRSEAQSALANAPRNFNPTGQFLQGDGEKPPHLLHDTTSKVYERLIPPNLD

SEQ ID NO: 338846 - protein, 185 aa, Zea mays
  Clone ID: MRT4577_72194C.1.pep
MAEAAGATPLLTGLPDEITISEILVRLPPKPLLRCRAVSPAWRRATSTRDFLLSHHARQSALPLLYSHNDVADGGQSLDVTLFDHRAGVAAADQFQRVARLKTAPLEGGIDGSFTPLFYPVASCDGLLLLSIDCDLCICNPATRQYAPLEQLDGFMTVGLYPHPPTGQYRLLLYHETDQRAIYVF

SEQ ID NO: 338847 - protein, 182 aa, Zea mays
  Clone ID: MRT4577_72195C.1.pep
MESQRVVVVVEDAGAARSALQWAVGNFIRGSDSITLLHVCPPARSRRKRRRLRLGGFQLALAFKDLCNVIAEAKVEIVVTEGELGETVVATVNQLGASTLVVGLHDKSFLYSRAPSQYSRVIRSLGCRVLAVRQHATARDGFLNAELTQIETVNLHIPPPKIPFPMFTLPLGVIWRRSKRRK

SEQ ID NO: 338848 - protein, 168 aa, Zea mays
  unsure (1)..(168): unsure at all Xaa locations
  Clone ID: MRT4577_72197C.1.pep
VIVFSXKGKLYEYASDSRMDKILDRYERYSYAEKALISAESESEGNWSHEYRKLKCKIETIQRCHKHLMGEDLESLNPKELQQLEQQLESSLKHIRSRKSHLMAESIFELQKKERSLQEESKILQKELSERQKAVASRXQQQLPPPGQAQPQLRIAGLPPWMLSRLNA

SEQ ID NO: 338849 - protein, 89 aa, Zea mays
  Clone ID: MRT4577_72199C.1.pep
TNKAPLNNFWKKKRVELKGPPFNMGHPTIAGSTENGPQLSSRQNFLIRVKKRVQRTRKHHGPNIIIAGGIHHWGGGPRSKNSSFRKPYC

SEQ ID NO: 338850 - protein, 44 aa, Zea mays
  Clone ID: MRT4577_7219C.1.pep
KPVVLRDQFFIHKIVSPDKIIPRCRLIFDLLTIRIIPPLRRLVY

SEQ ID NO: 338851 - protein, 104 aa, Zea mays
  Clone ID: MRT4577_721C.1.pep
MARFQLAAVAMAMLFAAAAAQAPTATPTPAPKASPPPATPPPTPAPVSPPVPALIMPPPAPARAAKHRDRHQRYEYYLSSLRWWLNNKKRGRAGLTYIGIVWCV

SEQ ID NO: 338852 - protein, 111 aa, Zea mays
  unsure (1)..(111): unsure at all Xaa locations
  Clone ID: MRT4577_72200C.1.pep
LREEGLGDFGEVVFRKPIREKIKNFNLSFERVSRVQPAWFFPKDQYXDEVRISKSLKVKRAKRPFVGKKSGFFYGSRHRDFYVKTRAEDLETLFLALFEGIQKTLQHFFRG

SEQ ID NO: 338853 - protein, 38 aa, Zea mays
  Clone ID: MRT4577_72201C.1.pep
HMQSRILDRGMKAFIIFLHALEDRFMVQSDSNHSDLLY

SEQ ID NO: 338854 - protein, 101 aa, Zea mays
  unsure (1)..(101): unsure at all Xaa locations
  Clone ID: MRT4577_72202C.1.pep
ERKRFSFWKDMTDSYRLFLEEQPIRITHVTYSFFLPKKDWSLEQXPLSFRKMLVPPPCLERTHFLIVSAPTLRLSLDPLRVDPVAFLLQRNRVRNAFPLLE

SEQ ID NO: 338855 - protein, 68 aa, Zea mays
  Clone ID: MRT4577_72203C.1.pep
MPPKSKKSVKGLFKGLDLFQGSSSSIFRRRELLSAVHGDEVTYLVQINLLTSLRVISWVVCPRMSRGL

SEQ ID NO: 338856 - protein, 229 aa, Zea mays
  Clone ID: MRT4577_72204C.1.pep
MENCNNGQAAAVSMDDFKVVVRVQPTLTGHWVSVLRDRSTPSHAFRSAMGELGRLLIYEATRDWLPTVTRQIQSPVGTEVVESVSEMEPIMIVPILRAGLALADLATSILPSTRTFHLGMARDETTLMASVYLNKLPDRFPKGCKILIVDPMLATGGTVTAAVDLVMERGAEISQIKIISAVAAPPALKKLNQRFPRICVYTGAMDQIVNEKGFIIPGLGDAGDRSYGT

SEQ ID NO: 338857 - protein, 227 aa, Zea mays
  Clone ID: MRT4577_72205C.1.pep
MVSEQQAPAAEVVVEGSEAAAEVPVESEEAAAPKAEEQQDDEAPVVEDVKEDEDEDEDDDDDDADDDDADGGAGATEGTKQSRSEKKSRKAMMKLGMKPVTGVTRITIKRAKNILFVVSKPDVFKSPTSETYVIFGEAKIEDLSSQLQAQAAQQFRMQDLSKVMAKQDAAAAAAAPADEEEEVDEAGIEPRDIDLVMTQASVTRAKAVKALKAHDGDIVSAIMELTA

SEQ ID NO: 338858 - protein, 71 aa, Zea mays
  Clone ID: MRT4577_72206C.1.pep
ELTFRLPPFFFFFGGDLNYMAVPQNPAPTQEPQAEECTFFSNSPIQLPYNHEMTPHCASDFIRLLGNSNPH

SEQ ID NO: 338859 - protein, 56 aa, Zea mays
  Clone ID: MRT4577_72207C.1.pep
RWNMESGQCSMVYVACLMGLEQKPIRRGPPCLVALQLVSAVSCAVEVNTMRVGWTR

SEQ ID NO: 338860 - protein, 80 aa, Zea mays
  Clone ID: MRT4577_72208C.1.pep
YREKIVRIYLPKSLFYYWFIFNFCPLQFLVNYIGAGGFLHQQDYYMDGWMVFKRLACPVLPFVPSSPRASACSHFPLLRF

SEQ ID NO: 338861 - protein, 238 aa, Zea mays
  unsure (1)..(238): unsure at all Xaa locations
  Clone ID: MRT4577_72209C.1.pep
ESTQPPAAPPSLQRPTAYGLLSPTHQHGRASRRSRHPPRRRSVRPLAGRPXARPSSSAFFPSSXPRLSASSASAPRPLGPXQKAKSAGRGRSVRCMAAASDAAQLKAAREDIRELLNTTHCHPILVRLGWHDSGTYDKNIKDWPERGGANGSLRFDVELKHGANAGLVNALKLVQPIKDKYPSITYADLFQLASATAIEEAGGPKIPMKYGRXDVTGPEQCPPEGELPDAGPSAPADT

SEQ ID NO: 338862 - protein, 96 aa, Zea mays
  Clone ID: MRT4577_7220C.1.pep
MKCAEKLAYKRQKEKENENELPGEKEIDLKDSDKRKRKHEESDHSSEDEKYRRKKKGFKDAKNSGSQRPADRCGASSKSSGNSDEAFEEYLEGMFP

SEQ ID NO: 338863 - protein, 141 aa, Zea mays
  Clone ID: MRT4577_72210C.1.pep
FRCFAPPCSQIPWAVSPLRDDVRRERDEFGLAGLFGLRFSLPAILVFVWILFRPRLLSVWIAGLGTIRYWEFVVASGGEELGGRSVFCQIRRFIGFVTWIWIRWFQAQMSPGVVPSESDSVVGACTSEAEGRVLAGYGEIS

SEQ ID NO: 338864 - protein, 123 aa, Zea mays
  Clone ID: MRT4577_72211C.1.pep
FLRRSCFVLAFSACGLQDFGSDPVLGVRHGVVWRGDGGRSVFCQIRWFIGFVNWTWIRWFQAQKEGSLLVIERLVEGCRFAYGSFLVFRFDVTILCEDCHWIATGLFLLILHWRCCSDLQGQQ

SEQ ID NO: 338865 - protein, 161 aa, Zea mays
  Clone ID: MRT4577_72212C.1.pep
NSRTHRTHHESNPTVRPKRRPNNPNKRTSAKLQSREEVTAIQATWENQTQQGTRTRRRAEAKRSQLSASTEAKNSGTNQPEKKPTRLEIEKLDLGREITKKRIPKRGAQRRNAAPHERAEGRGTKGERTKATRGDRGQDKDRRGEALEQRRKGKTRASCRI

SEQ ID NO: 338866 - protein, 86 aa, Zea mays
  Clone ID: MRT4577_72213C.1.pep
WRMALMRESPNYTELGQDYYKDRTLIMLFLRDNWTLWTSNTNYDLQTSRSKNHLLPPQNPAPRDSKTHPISPADECLLMAARLPRL

SEQ ID NO: 338867 - protein, 84 aa, Zea mays
  unsure (1)..(84): unsure at all Xaa locations
  Clone ID: MRT4577_72214C.1.pep
RDSLLXVLLLLVEVDVLALARADLTHDNCVKNKKVTEHNLCSDDVTLMLEPLANSAPMFVGTYTLYPCSHAELPVCWWTESLRA

SEQ ID NO: 338868 - protein, 124 aa, Zea mays
  Clone ID: MRT4577_72215C.1.pep
SSTSQCVGCRIGSDQWRIHHDDMLRGDGGRSVFCQIRRFIDFVDWTWIGGFRLKCLRVWYHQNLRSILTLTAEKKGSLLVTGRGLLMVHSLFLVLMVSYWCEDRHRTYYKLSLPFIGNAAWLDL

SEQ ID NO: 338869 - protein, 43 aa, Zea mays
  Clone ID: MRT4577_72216C.1.pep
LNSKYIILTPSTYKNSQHHDKPVLDLISSYNFLIYNELYWLPI

SEQ ID NO: 338870 - protein, 70 aa, Zea mays
  Clone ID: MRT4577_72217C.1.pep
LSRFFSHPQPHPCRGHLSHSIPCQLNVTFNLGSTLIQIQGVLFLRHQCIPTATPYCSPQCQSLRQQYCQH

SEQ ID NO: 338871 - protein, 84 aa, Zea mays
  Clone ID: MRT4577_72218C.1.pep
APPRGKSWTAAARPAWRSAPWPPPASSASAPSSGGSAAPTSAAPGTPTTPRAGSSSDPLGWRPPSLPTLAPRIGSDQEMLPLHR

SEQ ID NO: 338872 - protein, 39 aa, Zea mays
  unsure (1)..(39): unsure at all Xaa locations
  Clone ID: MRT4577_72219C.1.pep
LHYSNLCIQFDALVLALEPTSSFVDTVDLIPHRYYPPPX

SEQ ID NO: 338873 - protein, 198 aa, Zea mays
  unsure (1)..(198): unsure at all Xaa locations
  Clone ID: MRT4577_7221C.1.pep
MASLGRLKSXIFDREERKMQYQSHIRGLNAYDRHKKFMKDYVQFYGHEKNVDSSLPIKTDKDTLREGYRFILSEEDEMDSTWEKRLVKRYYDKLFKEYCIADMTQYKKGKIGLRWRTEKEVISGKGQFICGNRHCDEKHGLGSYEVNFSYVEAEEQKQALVKLVACKRFVNQLFHNRICLKQFLTITPYSFLLGCFFH

SEQ ID NO: 338874 - protein, 85 aa, Zea mays
  unsure (1)..(85): unsure at all Xaa locations
  Clone ID: MRT4577_72220C.1.pep
YTKTMTAHRTKLRIQLEVSAPLSRHFPGPGNSYFDSXEQNYAKNPFRSVPNPPQRTSTTSLAPTNTFPHNLLTQTATITRSYCGP

SEQ ID NO: 338875 - protein, 94 aa, Zea mays
  Clone ID: MRT4577_72221C.1.pep
AQGHQAQLGVGVFRALMLQGLVLSASGSPPPCLFWCVWVPRPHSAPGCRPSSILSFPGLRGRLGDLHRGPLLNGPQSIWIGVDPNKPASGTQIH

SEQ ID NO: 338876 - protein, 98 aa, Zea mays
  unsure (1)..(98): unsure at all Xaa locations
  Clone ID: MRT4577_72222C.1.pep
RGPAPRRRAGRRSPAREPPRRRSHRSAASAPRRPRGREGRRRXPAPVLXLGAPPRERTHEDCPWPGSXRRAGADAPRSGLAPRXSSREXGARRAXNPR

SEQ ID NO: 338877 - protein, 82 aa, Zea mays
  Clone ID: MRT4577_72223C.1.pep
IFLCRSIQSSIPYHQYVRFSSSSFAAQMMRLEHGLFYAPLIRQLHLGHTRGGTRLMLRPSELGVGEQQNPRIRNGVPARPAS

SEQ ID NO: 338878 - protein, 175 aa, Zea mays
  unsure (1)..(175): unsure at all Xaa locations
  Clone ID: MRT4577_72224C.1.pep
PRPPPHPEEEGPLLLGCAAPTSCLRGEQSTHRSGRSYHHNHDPIAFMPSRSNASYGMGEAPSIRETLVELQMKKAYRYVIFKIEQKQNQVAEDKTGATTESYEDCXASLPQNDCRYALHDFDFVTEENVHKSKIFFIAXSPSTLRIPAKMLVSTSKDRIKYELDRFHYEIHATDP

SEQ ID NO: 338879 - protein, 100 aa, Zea mays
  unsure (1)..(100): unsure at all Xaa locations
  Clone ID: MRT4577_72225C.1.pep
IGIPPPQQLPRSCHCALAPATPRTTHTTEWSSSLPARKTGRLNTISIDSSPSTTSKDLRAKLVLQRDSSAGKSRIALRXEHRQKDPTPKVTVGASFLSQT

SEQ ID NO: 338880 - protein, 78 aa, Zea mays
  Clone ID: MRT4577_72226C.1.pep
GIAYCTPCDGTIIHGQSFPCVRVSVHAHGLTNPMGSIYHTLRVNKRRGPPKSLDIQIMIQVNDQTVRITTKNWGAYLS

SEQ ID NO: 338881 - protein, 79 aa, Zea mays
  Clone ID: MRT4577_72227C.1.pep
FFLKRKTQDTGCDIGSEHYHVGWEPVYTFYTRSLPRAYASRFIQFNSEGTEALGVRIRGCSNPTRLVRVLDTHGWHPQP

SEQ ID NO: 338882 - protein, 132 aa, Zea mays
  unsure (1)..(132): unsure at all Xaa locations
  Clone ID: MRT4577_72228C.1.pep
PFTRAARTSSGDSEEPRRPPGPCAQSCIDPLXLQPSRSTQPCCTPSRDSSTPSRTRRTRAEPLKKPLLAQLAGEPTEARPNSYAGTHEDLAPEIIRRDGHGKLVDRRPLGKCLHEXLYGKTPFRGPVNDETL

SEQ ID NO: 338883 - protein, 76 aa, Zea mays
  Clone ID: MRT4577_72229C.1.pep
MVCCGRNNGTCVCAQEAKCSCGKQPALQCTCEKAATENKLPSSTCACGKRAEDACNCSRSENNGSSNLETDFTTKK

SEQ ID NO: 338884 - protein, 127 aa, Zea mays
  Clone ID: MRT4577_7222C.1.pep
FGIAFFILLGPMRDSCVGVHQTIGLLISAVYRGDDCLLIADVYCRGNLWASDLSRHPRWDPRRRRPPRLQHQRPLRLRISNACASCDSSCKIRVSVYNLASMWMLNLRHVTIIRATLHEKKKKKGRP

SEQ ID NO: 338885 - protein, 128 aa, Zea mays
  Clone ID: MRT4577_72230C.1.pep
MQIFVKTLTGKTITLEVEPSDTIENVKAKIQDKEGIPPDQQRLIFAGKQLEDGRTLSDYNIQKESTLHLVLRLRGGVIEPTLRILAQKYNCDKMICRKCYARLHPRATNCRKKKCGHTNNIRPKKKIK

SEQ ID NO: 338886 - protein, 208 aa, Zea mays
  Clone ID: MRT4577_72231C.1.pep
MSYSRYRSRSRSVDSSDVENPGNNLFVTGLSSRLTDQDLEKHFSTEGEVIDASIVLDPWTRESRGFGFVTMATLKEAERCIKYLDRSVLEGRVITVEKAKRRRGRTPTPGRYLGAKSSRGRRYSRSRSPVRRDRYSSRYSPERERSYSPYRRGRSYSRRDRRRSYSRRRSYTPSDRSESPYDRRRSYSPYDRRISYSPHHGHRHRSRS

SEQ ID NO: 338887 - protein, 92 aa, Zea mays
  Clone ID: MRT4577_72232C.1.pep
YKAYVSPVRSRELTLVRVCPYTFHVHVNKVSSTSSHYNVWDVWDNLKKTKIDWGSLATTGKAFGQFGVIHIPTCSGDSKFGTWQQSKKSKAQ

SEQ ID NO: 338888 - protein, 266 aa, Zea mays
  unsure (1)..(266): unsure at all Xaa locations
  Clone ID: MRT4577_72233C.1.pep
SEAVSQVATDRQTQRRSERQRLERLRRPGSQSQRRRSKDVVFEVXRSRSRSVDSSDVENPGNNLFVTGLSSRLTDQDLEKHFSTEGEVIDASIVLDPWTRESRGFGFVTMATLKEAERCIKYLDRSVLEGRVITVEKILLTAAGXAYSCLASIQKIHNLRSKQCYLNQRAKRRRGRTPTPGRYLGAKSSRGRRYSRSRSPVRRDRYSSRYSPERERSYSPYRRGRSYSRRDRRRSYSRRRSYTPSGQVGVSYGQPKVLLVRRGHIL

SEQ ID NO: 338889 - protein, 126 aa, Zea mays
  Clone ID: MRT4577_72234C.1.pep
QTSRSLFSIRHEEDVVELSGFSVLARDKSSHSGSGGSEVLRFLRPLGQCCPALSAVKSACSSEKHSRTPMARTSRAEQVRSSVARCRCLSQRQVGRRAARAISMLLWSTRRFVSVVSLPVGTDTGK

SEQ ID NO: 338890 - protein, 100 aa, Zea mays
  Clone ID: MRT4577_72235C.1.pep
MGMMGMGMGGYGLGGPMGMGGYGLGGPMGMGGYGLGGEDDDDAMKDLHAGAGAGAGDDPPAELKVGEEREIGKEGLKKKLVKEGEGCDRPGAGDEVEVHY

SEQ ID NO: 338891 - protein, 349 aa, Zea mays
  unsure (1)..(349): unsure at all Xaa locations
  Clone ID: MRT4577_72236C.1.pep
MVQFGKWLRRQIERSLPEWQDQFLRYKELKRCVKARSGGCPPLPAEEAEFVAEIDAETEKINAFFLDQEEEFIIRHRELQNHIERALGRGRPAPAPALHEAEVAAIRREIVNFHGVMVLLLNYSSINYXVGGVLALASCTELNXACRSVLLPMHVSSPCMMILTXPFHPPCLAAGCWLLAGLAKILKKYDKRTGAMLRLAVMESVLQQPFFKTETVSHLVRECESLMEAVFPEARDRGQAAAAALAVAEAEQGIFRNTVAALLTMQDVRAGSSTRGSHSLPPLNLPDSDXAPVLRPAVSDPDPMTHVGLLLAPSWLAPASSISLPFRLLGPVHAVLALVFHFSRFLSSN

SEQ ID NO: 338892 - protein, 260 aa, Zea mays
  Clone ID: MRT4577_72237C.1.pep
MSSGADGSDPITGLGPSTIPEPPDREPPHLQSPSPAAQQEVAASQAETPVPAVTIVISRPGEEVQTPDAMGGSPACSTQAGDGKATATSVSLTASAAAKEAELARSDSFDDYEQCRVCQQKTEEPLVDLGCRCRGDLAKAHRTCIDVWFRTRGSNKCEICQQVAANIPPPETQASGWFSPLWVAFAILIGGLLLDVLISVSLGVSALPVNIIIGVLIVLGLGTALRLALECCQEWGSRRNVGNMPRLENIPPTGYHPAVV

SEQ ID NO: 338893 - protein, 141 aa, Zea mays
  Clone ID: MRT4577_72238C.1.pep
HRVFSRCGKTECAACCTSLRGRGCRALSCGPCLCGKKKPHCGAIYAPPLSARCAILYNTCRARFFECKKGTVSTALIMREISLYTPQSFHFICLGLILCVIVRAYHFFTEDTYIHMYAPIYNASLYRKMGRAHGPRCDIRG

SEQ ID NO: 338894 - protein, 81 aa, Zea mays
  unsure (1)..(81): unsure at all Xaa locations
  Clone ID: MRT4577_72239C.1.pep
IEQLVENAEECXVLDNEALYDIXLRTLKLATPTFGDLNHLISATMSGVTCWLRLPGQLNSDLRKLAVNLIPLPSLHLFMVG

SEQ ID NO: 338895 - protein, 30 aa, Zea mays
  Clone ID: MRT4577_7223C.1.pep
AGTRDSLISAKLHALNKILCYRTKTDMRSQ

SEQ ID NO: 338896 - protein, 282 aa, Zea mays
  Clone ID: MRT4577_72240C.1.pep
MSSGADGSDPCTGLDPGTIPELPAHEPPVLQAPSPAPQQEVVVASQAEAPVPAVTIVISRPGEEVQMPDAMGGSPACSPQAGDGKATATSVSLTASAAAKEAELARSDSFDDYEQCRVCQQKTEEPLVDLGCRCRGDLAKAHRTCIDFWFRTRGCKHVRICQQVAVNIAPPETQSSTSYWVWRVDSTYGRGRGGRERGWFSPLWVAFAILIGGLLLDVLISVFLGVSALPVNIIIGVLIVLGLGTALHLALECCHEWGSRRNVANIPRLENIAPTGYHPAVV

SEQ ID NO: 338897 - protein, 115 aa, Zea mays
  Clone ID: MRT4577_72241C.1.pep
AVVTTQSTRASYWVWRVDSTYGRGRGGRERGWFSPLWVAFAILIGGLLLDVLISVSLGVSALPVNIIIGVLIVLGLGTALRLALECCQEWGSRRNVGNMPRLENIPPTGYHPAVV

SEQ ID NO: 338898 - protein, 103 aa, Zea mays
  unsure (1)..(103): unsure at all Xaa locations
  Clone ID: MRT4577_72242C.1.pep
MGDPNDLKTSVEALTTAMKEMQASIAANAKGIGALSFGRTLSSGATTDSGEPRTVRAPRFQKMDFPRYDGKXDPLTFLNWCEXSYFHQQRIMDEEKXVWMASY

SEQ ID NO: 338899 - protein, 97 aa, Zea mays
  unsure (1)..(97): unsure at all Xaa locations
  Clone ID: MRT4577_72243C.1.pep
ASSMLSATTVPLEQGGXGLPELSGLRSSARVPMRRIGLCGGXMCAASFRAHAAATSGVPGPAARAAPLAVPVPGVRRVARLFLRRWPGRRVWPRGVV

SEQ ID NO: 338900 - protein, 79 aa, Zea mays
  Clone ID: MRT4577_72244C.1.pep
KIKGGGGEKTQQPFSGLSQQSRNKKGGQLNSNEPPLEGEQNEIPGGGETIFYKQKAPEGWIRGNGNSGGARIIWAKSGG

SEQ ID NO: 338901 - protein, 112 aa, Zea mays
  Clone ID: MRT4577_72245C.1.pep
IMGYIYIYIYIFSLEEILAGIIKFKGLFVKGRASPSWMRKPWVPVPVPGGVGNVGSCVDRYSLGFSLRDAFVLPGFDSFVRIFVPLHARALLFFSFFDRLYLQMKIILVFQI

SEQ ID NO: 338902 - protein, 196 aa, Zea mays
  unsure (1)..(196): unsure at all Xaa locations
  Clone ID: MRT4577_72246C.1.pep
MDGEEVGRRGIPTLLKPSSSSSDGSAGEQEHIASDVTQLIGWTPLVELKRIASEAGIDARIVGKMEAYQPLCSIKDRSALRMIEDAEERGLISPGVTTLVEPTSGNMGLGLVLFAIQRGYRLIAVMPAKYSLDKQILLRFMGAELYLTDPALGFPGMFDKVEQLRKQLPKXHVLNPVRTSEFEAHXRLTGPETGGH

SEQ ID NO: 338903 - protein, 53 aa, Zea mays
  Clone ID: MRT4577_72247C.1.pep
TWSEYSYLVQYMTTTSSKICQLLCIRKDHIRRIIATLCTCCSLYLTIFGLALR

SEQ ID NO: 338904 - protein, 137 aa, Zea mays
  unsure (1)..(137): unsure at all Xaa locations
  Clone ID: MRT4577_72248C.1.pep
RRLSKMVQXEAEKYQAXELMRVKKKVSSRTTLEKYAYNMRNTISDDKIAFKPSADDKKKIGHAVDSATSCLISIQQVEVPQFEVKMEELAGLSVSIIAKMFLGAGKGMAHSSVTQEEXPCHGSGPGXPRLEEIAYIC

SEQ ID NO: 338905 - protein, 51 aa, Zea mays
  Clone ID: MRT4577_72249C.1.pep
FTSTAYSRQPLTFIVYHTSIMNIRRLVQLLHAYDLNKYSTEKTTLFTLLTD

SEQ ID NO: 338906 - protein, 85 aa, Zea mays
  Clone ID: MRT4577_7224C.1.pep
MDALKFEYPDYERLDKCAEGVKRKRIVCILSMQAARMVKEDEKASKKRKSTPEPKAAASKKRKAESPEPKIPEATEETPSMPSAA

SEQ ID NO: 338907 - protein, 64 aa, Zea mays
  Clone ID: MRT4577_72250C.1.pep
HASSHCYASMPDFTPITCRNSSKQAYELENEANELIRIKNYLYGKLPVHTGHSVEKIHENLSRV

SEQ ID NO: 338908 - protein, 68 aa, Zea mays
  Clone ID: MRT4577_72251C.1.pep
RPWAIHSSPPISPCNFGAKHCAAAHGGVFRRLGPLVPVSEALRGHLQRVRGCAGWNLQAVVGELLIND

SEQ ID NO: 338909 - protein, 146 aa, Zea mays
  Clone ID: MRT4577_72252C.1.pep
NGKITLKTRERDPEKNVKGKIYTFNLFYPVEKKLGRRAKIPRDSGLLKLLLDPWADPGGPPKRTPGKKRVSPLPHKNWNAPFWPPPPGANFAKGAKRPFSRGPPNSPGSKGTSGLSGGGQKMGTQVGAAAGPLQLGGLLPRVPGGE

SEQ ID NO: 338910 - protein, 68 aa, Zea mays
  Clone ID: MRT4577_72253C.1.pep
KITPTSISTYLTFHIPRKNFSSTYSVRSCLLEDPKVYDDHTPALALGEKQIGQYQIMVFRPTEYSTAP

SEQ ID NO: 338911 - protein, 94 aa, Zea mays
  Clone ID: MRT4577_72254C.1.pep
RRSNSRGNIWCLMLNSNPPHVSPKMSMALWLPSSGPSANPCTRLRSNLSLSFLVLRNSKSFLFTLVVVVGRCCLLSASLRLVPPPILFLQYIIK

SEQ ID NO: 338912 - protein, 96 aa, Zea mays
  Clone ID: MRT4577_72255C.1.pep
GRVGVCAVLFVFGGGEKPRVLRGEGKPLNARRCAELCTNRNRHSPYKHRLGLFMDREMMIEQLMWCQPQDAVGGRPENGLNQWMLVERVPPPTNTT

SEQ ID NO: 338913 - protein, 69 aa, Zea mays
  Clone ID: MRT4577_72256C.1.pep
GSTLSSYLFALVIDKITRYIQGDIPWCMVFADDVVLVDESQAGVNKKLELWLETLEFKGFRVSRTIYEM

SEQ ID NO: 338914 - protein, 57 aa, Zea mays
  unsure (1)..(57): unsure at all Xaa locations
  Clone ID: MRT4577_72257C.1.pep
GMIIDKGYISPYFITNQDKSIVEFENTRVLLTDQRVNDVQEILPLLEKTTQLXCPLL

SEQ ID NO: 338915 - protein, 73 aa, Zea mays
  unsure (1)..(73): unsure at all Xaa locations
  Clone ID: MRT4577_72258C.1.pep
MGITIKADKIVSKVLADIKQIIQYAIHQAIIWLXTNXLAETDQFEYKIKELESSSNPMINLMNQGMGKDMGGV

SEQ ID NO: 338916 - protein, 63 aa, Zea mays
  Clone ID: MRT4577_72259C.1.pep
PSSRRRREREEVEGRGGLRGLGVNQFCIYSLTAFAWNPLSELLATRYRRTPKGLFSLEDSPTT

SEQ ID NO: 338917 - protein, 84 aa, Zea mays
  Clone ID: MRT4577_7225C.1.pep
SNIKPSKCTNTGDPRAGRGSYLSFLPESGSASILLQCSKAPIRITSCQRHFHTMSCLTICEHLTSQPYSKPTAYTPLAYLDISH

SEQ ID NO: 338918 - protein, 75 aa, Zea mays
  Clone ID: MRT4577_72260C.1.pep
EQSNHLIACNQTVPSMSSCSVFSTCRASRSSFTCASGINTMLVFVKWRPLGDHLLIDHLLRLSIFRFIHLLHYAE

SEQ ID NO: 338919 - protein, 70 aa, Zea mays
  Clone ID: MRT4577_72261C.1.pep
HEIIHTSHIDGAQGDLKAGGVMKPPAGASGKGGAVRPLSAAVQVPGVRPRPGRPGGRVLRRQAAPSTPCR

SEQ ID NO: 338920 - protein, 68 aa, Zea mays
  Clone ID: MRT4577_72262C.1.pep
GPTKIRPRPLFSRLHDPIFLASGALKIWIGKTDGGKNPLFPFGLEGERFKKVWNGFFNVLKPMQVSTY

SEQ ID NO: 338921 - protein, 43 aa, Zea mays
  Clone ID: MRT4577_72263C.1.pep
ARELDPRILERGRILPKRPPVKPPTEPIGFDLGIENRIQERES

SEQ ID NO: 338922 - protein, 125 aa, Zea mays
  Clone ID: MRT4577_72264C.1.pep
GSATTMPKATKQWKYDVLGCFFRVYFRVDKTASTLKDAIYNLYEKMIPPDLRLARNAMFRYMWKYFRNSQITLFQKDYRDYVRGMRLMVWTRDHQMIEETTEQKDIDSLFNCSTLKYIPENKEQP

SEQ ID NO: 338923 - protein, 116 aa, Zea mays
  Clone ID: MRT4577_72265C.1.pep
KKGGPLKGFALPAFKMEPFFQKSCRSRSTRARLPFRFKSLRLHFWGTKFLTGSFRGRVSRSESFLGGFPFPGFPFCARSCFYVRINCALKHSRLFFTRQIITIWAPGFLALSFLLP

SEQ ID NO: 338924 - protein, 151 aa, Zea mays
  Clone ID: MRT4577_72266C.1.pep
NPISLSHTTRRARLIPPASHARRSRFGALIPSYARSQPCLPSSPPCHAPLPSSLTSSRPHSQLKESSRNREPHHRIRSSCVASMVVAELPMTARWCRTPHRRRHRAYSLPSTHLPGEDILFCIDVDLEVHAKMKSAAVASSDPRPPRRRSP

SEQ ID NO: 338925 - protein, 68 aa, Zea mays
  Clone ID: MRT4577_72267C.1.pep
NKLSVSSFACYTLLFNFHDDPLRVKNQLHHIFVTNLCWEKQKDGGVQFIVYGDLIIKYNKRDTLDVCA

SEQ ID NO: 338926 - protein, 142 aa, Zea mays
  unsure (1)..(142): unsure at all Xaa locations
  Clone ID: MRT4577_72268C.1.pep
MVCVLPPTSSPXPLPDFAPLPEAVXKPQSTPSSLSGPLRDPIPRQPAFPAPKIPFPSPTPXLRPPDSARQPRSQISLGRPDSVVXERSLPRLPSSPPCHAPLPSSXFQPPPFPVEAVVQEPGTPSPDQEQLCRATRAPAPRT

SEQ ID NO: 338927 - protein, 34 aa, Zea mays
  unsure (1)..(34): unsure at all Xaa locations
  Clone ID: MRT4577_72269C.1.pep
CPYLVGSLSSVPSFVAAHELIMNKQAAICXRIIT

SEQ ID NO: 338928 - protein, 57 aa, Zea mays
  Clone ID: MRT4577_7226C.1.pep
GGLQIYSLDTITSKLVSQLKRSLHQAIREGGSRLPLHLQERWIQLAFKIVRLSEDSD

SEQ ID NO: 338929 - protein, 230 aa, Zea mays
  unsure (1)..(230): unsure at all Xaa locations
  Clone ID: MRT4577_72270C.1.pep
MEPMSVDSSGCGGLDAQIEQLLQCRPLAEQEVKALCEKAKEILMEESNVQPVKSPVTICGDIHGQFHDLVELFRIGGKCPDTNYLFMGDYVDRGYYSVETVSLLVALKVRHPHRITILRGNHESRQITQVYGFYDECLRKYGNANVWKIFTDLFDYFPLTALVESEIFCLHGGLSPSIENLDSVRSLDRVQEVPHEGPMCDLLWSDPDDRCGWGISPRGAGYXFGQDISE

SEQ ID NO: 338930 - protein, 256 aa, Zea mays
  Clone ID: MRT4577_72271C.1.pep
VAWGRLTREEADARTKRKVEAVIKRERALAYAYSHQGLKATPMAAHAILADLQSGRSPWWWTPIERRHEPGAYRPADPAIRKPLPALAIAHRDMTTTPVAMTAATTPARSVVSAYSKTRATRPVIRVGAPPPSNHSHVGSIRDDESLTSCPAFGGVPNYMTPTMSASAKARARAHLQEQQKNKAAQEKPRFSFGLGQSIGSWAKSPFWKAAVPSSRVATPAASMAGGRHRSTRSISGLSTDSTVSMPARLGTRSFK

SEQ ID NO: 338931 - protein, 93 aa, Zea mays
  Clone ID: MRT4577_72273C.1.pep
TTLPSDPAGHQRADLSFTMLLSKEKPPRDMTSTCSMMGSYVARMTTTIVHAPQALKRPSMKAITLMHTSLATKHARKTCLCTHHYSARSLRQA

SEQ ID NO: 338932 - protein, 71 aa, Zea mays
  Clone ID: MRT4577_72274C.1.pep
GTPAGTGPEFPGRPTRPVVFYILEIRCHTGQSRFRLKKGYTDINLQQVLFILIKCTVLRNQNSALRQTETS

SEQ ID NO: 338933 - protein, 76 aa, Zea mays
  Clone ID: MRT4577_72275C.1.pep
PRGARVAGESARRVAAVPRPPRQKLLLQLHACAPPAEESRERSETLRVVTAALWAMQGGGGGGGGGGGVCVAHGRS

SEQ ID NO: 338934 - protein, 78 aa, Zea mays
  Clone ID: MRT4577_72276C.1.pep
MKHICGIEEGRKTIHEEVSNQTEKEKDASIKEAKLKVEQQKKNTQELEKKLDEQPKNSKEATVKEALEQQQKELETYQ

SEQ ID NO: 338935 - protein, 159 aa, Zea mays
  Clone ID: MRT4577_72277C.1.pep
LELGSDVNFNREPILFLIRPRGRLSPPKGDKKLQVKGPLIFIFICRGFAFIFWIEKQISQRQFFFFSLFFFFFFFFFFFFFFFFFFLCCKSAIFLLYRHTRGKKQRGNYYKCLDDRYRVRIFCIQFKFELNPVTCDKISIVQMVFSWESNVIKKWYYKS

SEQ ID NO: 338936 - protein, 126 aa, Zea mays
  unsure (1)..(126): unsure at all Xaa locations
  Clone ID: MRT4577_72278C.1.pep
KNSPGGGRGRRANTRRGRAAGHSSTDGPQAKRARXPASTRRKKHRGPDRTGPDQHEGGGGAQQRPAXXXPQTGDQPQRNEDRTDEEXAKGEXXNHKNXRKQGTGTHNXSTGRDREDNKPRNEKDGE

SEQ ID NO: 338937 - protein, 38 aa, Zea mays
  Clone ID: MRT4577_72279C.1.pep
LHIFSPFSPKTTVQSSAIKKSYCYHNFHVKKCLSLLLI

SEQ ID NO: 338938 - protein, 59 aa, Zea mays
  Clone ID: MRT4577_7227C.1.pep
VPVLEGYEVECTGTLAGDLARAICFFGCMDFIWYKLGPLPSWGPFRCPVFWGCLWVFLG

SEQ ID NO: 338939 - protein, 366 aa, Zea mays
  Clone ID: MRT4577_72280C.1.pep
MALMQESSQDLLEAHDELFHHCLCFAKSLALAVAQDLRIPDAIHHHGGGATLHQILAEAALHPSKLRALRRLMRVLTVSGVFTVQYSSTVDASDGADVVYRLTAASRFLVSDSDEAGTASLAPFANLALHPIAISPHAVGICAWFRQEQHDPSPYGLAFRQIPTIWEHADNVNALLNKGLLAESRFLMPIVLRECGDEVFRGIDSLVDVGGGHGGAAATIAAAFPHVKCSVLDLPHVVAGAPSDACVQFVAGNMFHSIPPATAVFFKTTLCDWGDDECIKILKNCKQAISPRDEGGKVIIMDVVVGYGQSNMKRLETQVMFDLVMMAVNGVERDEQEWKEMFIEAGFKDYKIRPVAGLMSVIEVYP

SEQ ID NO: 338940 - protein, 180 aa, Zea mays
  Clone ID: MRT4577_72281C.1.pep
SNTTRDNGTHAGEQPGLARSARRALPPLPVLRQIAAAFPHVKCSVLDLPHVVAGAPSDACVQFVAGNMFHSIPPATAVFFKTTLCDWGDDECIKILKNCKQAISPRDEGGKVIIMDVVVGYGQSNMKRLETQVMFDLVMMAVNGVERDEQEWKEMFIEAGFKDYKIRPVAGLMSVIEVYP

SEQ ID NO: 338941 - protein, 379 aa, Zea mays
  Clone ID: MRT4577_72282C.1.pep
MALMQESSQDLLEAHDELFHHCLCFAKSLALAVAQDLRIPDAIHHHGGGATLPQILAETALHPSKLRALRRLMRVLTVSGVFTVQQEQPPDADGGGGADSSTVDASDGADVVYRLTAASRFLVSDSDEASTATLAPFARLALHPIAISPHAVGICAWFRQEQHDPSPYGLAFRQIPTIWEHADNVNALLNKGLLAESRFLMPIVLRECGDEVFRGIDSLVDVGGGHGGAAATIAAAFPHVKCSVLDLPHVVAGAPSDACVHFVAGNMFHSIPPATAVFFKTTLCDWGDDECIKILKNCKQAISPRDAGGKVIIMDVVVGYGQSNMKRLETQVMFDLVMMAVNGVERDEQEWKEMFIEAGFKDYKIRPVAGLMSVIEVYP

SEQ ID NO: 338942 - protein, 99 aa, Zea mays
  Clone ID: MRT4577_72283C.1.pep
MTMRTYNKAVLLVLAMVMAVLSTGICTVPAPAPSLEEFPTTTENTCVKILADSGCVRNHKACHDNCFIKLKGNGVCLRDACWCSYTCKPSLLSPPPAAQ

SEQ ID NO: 338943 - protein, 48 aa, Zea mays
  Clone ID: MRT4577_72284C.1.pep
MDSSYVFLASGVTAAARIGSDAASKAALAAGQASNAVNGQRDDAADEA

SEQ ID NO: 338944 - protein, 57 aa, Zea mays
  unsure (1)..(57): unsure at all Xaa locations
  Clone ID: MRT4577_72285C.1.pep
WNVQXXLPFHLCPXPXXIXLFAXXALXGSWVVVXFVXRGRXGRGSDRARPREKRSGR

SEQ ID NO: 338945 - protein, 103 aa, Zea mays
  unsure (1)..(103): unsure at all Xaa locations
  Clone ID: MRT4577_72286C.1.pep
RWRTRSEREGGGETPSREAVLAALAGVVDAAMRDNTAYAQNTAHDFXNLLFCSRAVGGGGGAARYARVAWLAGGCAAFRAGVCRLVXSGGSLGAGVVWGLLGR

SEQ ID NO: 338946 - protein, 175 aa, Zea mays
  Clone ID: MRT4577_72287C.1.pep
TAFLLDVLKPNLPEHAFLQTKVLEINLVTYPNVADAILANGMFSHYDRPRIAQLCEKAGLYLRALQHYSELPDIKRVIVNTHAIEPQALVEFFGTFSREWALECMKDLLLVNLRGNLQIVVQAAKEYCEQLGVDACIKLFEQFKSYEGLYFFLGSYLSSSEDPDIHFKYIEAAAR

SEQ ID NO: 338947 - protein, 68 aa, Zea mays
  Clone ID: MRT4577_72288C.1.pep
QVPPDTPVNEPHIAQDRCLPGPYTGSFSWVHPAHRARPPPVVSGPANHSCSYLTSIMRSSPPPPHQHR

SEQ ID NO: 338948 - protein, 69 aa, Zea mays
  Clone ID: MRT4577_72289C.1.pep
VYTQFVGGARVRLWEPLPKQWVYEGVKYTSLYFSSGAAAGTSFTSAASSNVSPRPSSGTSSSSCAAALA

SEQ ID NO: 338949 - protein, 75 aa, Zea mays
  Clone ID: MRT4577_7228C.1.pep
SKSPHPSPVSCLPRPHRKSSSSESSLSLSSISCLPRPLPHVFRSCCTSARCRVRSFCTAPAASCFWVRFIWPWNL

SEQ ID NO: 338950 - protein, 65 aa, Zea mays
  unsure (1)..(65): unsure at all Xaa locations
  Clone ID: MRT4577_72290C.1.pep
CRGAXVGVLRSPAAPACAVAGXSRVQLPTVHGRWVPLVLPLSERLRFLAAALSRRVAAVVAFCAG

SEQ ID NO: 338951 - protein, 83 aa, Zea mays
  unsure (1)..(83): unsure at all Xaa locations
  Clone ID: MRT4577_72291C.1.pep
KKKKKKKKKKKKKKKKKKKKKKKKKKKKKKKKKKKKKKGGGLKGTKVNERGKERKRXKKGGGKKNKGAGVKKGGEGKNLGVTK

SEQ ID NO: 338952 - protein, 82 aa, Zea mays
  Clone ID: MRT4577_72292C.1.pep
AQYYCSCHLTRSRKPIHCQPQAGCPLPRCFHLELRPRQPPTWTTTANSRTWQNMVIGEVVTDHMLIANVIRNLNERVVDISN

SEQ ID NO: 338953 - protein, 75 aa, Zea mays
  Clone ID: MRT4577_72293C.1.pep
YVAPVNDRAAGGHHHRRDGVICEDDQVQSTGELRDESGPPGNESKDTRQRLDQLLQPDHRRLAADYISLAKVRSK

SEQ ID NO: 338954 - protein, 89 aa, Zea mays
  unsure (1)..(89): unsure at all Xaa locations
  Clone ID: MRT4577_72294C.1.pep
VLLLFQQRVLYCRNCQYLQHDRLDDPFVRLGHRPRRSLQSVEPVRRCSEGGARLPGSMFVRVRTGVVGSSSCAFLPSRGGXFLGFGGGP

SEQ ID NO: 338955 - protein, 51 aa, Zea mays
  Clone ID: MRT4577_72295C.1.pep
TAQKKFNLFFGLKSLWKLNSGRSFLGAPREPFGKKKLVEMEDPHIKKLIWS

SEQ ID NO: 338956 - protein, 81 aa, Zea mays
  unsure (1)..(81): unsure at all Xaa locations
  Clone ID: MRT4577_72296C.1.pep
XVNARLLFEVXXXLAAAGAAAALXKRYTTAPAVSSRAALSNRLPFFLGDRLLLRAKFNFPLGLPLSLFSYFFLFLYTLGRG

SEQ ID NO: 338957 - protein, 62 aa, Zea mays
  Clone ID: MRT4577_72297C.1.pep
YVRHLCATENCHNGIIRVHLGFNLQLFVRPASSQYPRFLNVSSYILTVELLVLFSEHVFYSN

SEQ ID NO: 338958 - protein, 145 aa, Zea mays
  unsure (1)..(145): unsure at all Xaa locations
  Clone ID: MRT4577_72298C.1.pep
SLASRCILMESKDPQTDPPTYCSPGPVGEDMFHXQATIMXGQHDSPCAGGVLLLKSQFPADQPLKPPKVSFRSKLFRPKIKASASXCRDIRKDEWSPALXISKVLLXICSLLSYPETDDXRVPEIAHIYRNDSAKYXESYAPSWT

SEQ ID NO: 338959 - protein, 103 aa, Zea mays
  Clone ID: MRT4577_7229C.1.pep
RGKEAGTLMETSRSWGVLSPGAGRGGLFLGGVQEGIWFLWGPEPLGGLYLGGYVCLAPFGGGPRLGPLKGFCFRAPMVYVFCTPEKVKRERKKKGKNTQSPKG

SEQ ID NO: 338960 - protein, 59 aa, Zea mays
  Clone ID: MRT4577_722C.1.pep
WFFSNLYPAQAEWVGGHFFAIRGGYTPPLYEGGLVCYKPGPVGHIGGRGPWRGLNFSKM

SEQ ID NO: 338961 - protein, 38 aa, Zea mays
  Clone ID: MRT4577_72300C.1.pep
AQRWSPRDSQATEGTHIHLFWSEGTLSVGLTRRNRCRA

SEQ ID NO: 338962 - protein, 677 aa, Zea mays
  Clone ID: MRT4577_72301C.1.pep
LGYINGPPYPGPIPPMYYYMPTVPMDSMRSPSHYIQNQPAPNPVLSPEAAELRSNILTQVEYYFSDANLERDDFLKSLMDEHGWVPVSKLADFNRLKKMTADIHLILDALTSSSLLEVQDDKIRRRYDWSKWVSLSGTSVASPSSASVNSSVGEKNIGGFSNKDAYSEDQKTHCQSKDIRCNTDIGMGEKVIDEQVQDSHGCSLNNDFSVISIDEKTKNLSAHPSRKYGSSFRFGEVQKTRSKIVPNAQSERGFSIGFPSAFSSFGGGGDQSTFLLDEELELEHVDHSRDDLHSHKRGDDEDEDFFVDDQDVSRLMIVTQDTRLEKDDKNRTSIPQAFSTEEASRISDALYCYEKLHGRCTDNQRSSQADPADADSKPTSGSKGSHIRTGTKVTEEAGQPIPRRRQNKGNRKAHSSRKQRFFAGNFVNNPDQYGGVSESPPGNSVGYFYGSTPENHSYKSSKLSSSPHGIPTGSSPVGSVPKSSPQSQHLTFHLLEKNKLQPQRYNKFKHHCLMERKKLGTGQSEQMNSLYRFWSYYLRDNFNEDIYKDFKKLALEDAAASYRYGLECLFRFYSYGLEKKFQPNVYEDFEKLTFEFYRNGDLYGLEKYWAFHHYRNPDSGPVDKLPELERLLREEFQTLEDFKAKEKARATTEKGTGISSSSVVVAASHSKAETKQV

SEQ ID NO: 338963 - protein, 256 aa, Zea mays
  Clone ID: MRT4577_72302C.1.pep
MASTIGNNDRLTQLKAFDDTKAGVKGLVDEGVTIVPPIFHHLPDPHDATSNAHAAIPVIDLAAFSATNNDEAHAHQQLVAQVKAAAETVGFFQVVNHGVPAELLPRMLASVKSFNEEPADERRPYYTRDQARRVRYESNFDLFHSPAANWRDTVFFEDSAAPEEMPPAFRDVVPEYARQARGLAAQLLALLSEALGLHAGYLQRDAGCLGGPSLACHYYPPCPEPWLTLGTTRHSDPSFLTVLLQDAVGGLQVLLG

SEQ ID NO: 338964 - protein, 146 aa, Zea mays
  Clone ID: MRT4577_72303C.1.pep
GGVRCLAILNVVFAVIFGLMAIILGSTLLALGSTCSVPLFWCYEITAWGLVVLYGGTAFFLRRKAAVVLDESDYSTHNVGLEMLESKMEVTPEMQRRITDGFKQWMGSSLLSSDDEEEASDDYIERDVPSPTALGQQHQHEHDRET

SEQ ID NO: 338965 - protein, 98 aa, Zea mays
  Clone ID: MRT4577_72304C.1.pep
ALRRVGLRRDYPPLPSTGAGDPIYPTDSTHHPPAASAGSHGLGSARPQPPRAAAAQWSELTEDARTRGGGGHLKVRGRGTHCEALGPDLRSRLAPRPW

SEQ ID NO: 338966 - protein, 113 aa, Zea mays
  unsure (1)..(113): unsure at all Xaa locations
  Clone ID: MRT4577_72305C.1.pep
SFDYSWAFFPLLAVFPLGGVFFAFSFPLCALLPLPFPGPFPSFRGGVFLLMGRGFHTSLFGKPLGFPILSPLRPFPFCAGVSLLARPPPLVFPPGGGPDRXXVFFLGGXXTPP

SEQ ID NO: 338967 - protein, 377 aa, Zea mays
  Clone ID: MRT4577_72306C.1.pep
MARRRGFSAVVPPAWLPAVLLCLAGAASGEPLPQYYNAIFSFGDSFSDTGNFVIINSGKLPNMPKFPPPYARCSNGRLVIDFLAEAFGLPLLPPSANKGTNFSQGANFAVMGATALDLKYFKDNNVWSIPPFNTSMGVQLEWFQEVKRSICPDDPAACRALFGRALFVFGEFGGNDYSFAWKADWSLEKVKTMVPAVVASLVGGVERLLDEGARHVVVPGNLPAGCIPITLTMYPSEDRSEYDPRTGCLKKYNSVALYHNAMLRVALDRLQRRRPESRVVYADYYTPYIQFARTPHLYGYKRGALRACCGGGGPYNYNVSASCGLPGATTCEDPDAHVSWDGIHLTEAPYRFIANTWVKGPYAHPPLATVVLEDMVD

SEQ ID NO: 338968 - protein, 96 aa, Zea mays
  Clone ID: MRT4577_72307C.1.pep
GDLNQFLSAHQLEDKAAEGAPGDGQAAQGPTISYPMLLHVAAQIASGMRYLATLNFVHRDLATRNCLVGENFTIKIADFGMSRNLYAGDYYRVQGR

SEQ ID NO: 338969 - protein, 103 aa, Zea mays
  unsure (1)..(103): unsure at all Xaa locations
  Clone ID: MRT4577_72308C.1.pep
DAWADAWAPEAHKKAWKXXKXAXXXXXXGGXGXRGXQGKXXAAKXARENXXXXXGXXXGGGXAXXEXAXXEKKPRGAXSTEXXPXTTTPRGNXKPEGXKTQKG

SEQ ID NO: 338970 - protein, 37 aa, Zea mays
  Clone ID: MRT4577_72309C.1.pep
SKLICRLIAAALFRLAAPLLTGLDDATRNPQLLVQRT

SEQ ID NO: 338971 - protein, 130 aa, Zea mays
  Clone ID: MRT4577_7230C.1.pep
KRYFHPGFGPLPPGGGPFFGPKPKVPLPKLAQVSYQSPRGRFPGFPPYLGDPRGPFCLPKVGPGLPTKPNFCVRPTHWLPGGVPDPLKYINVCWGIGATPPFVSLFYKPQDFPPFFLKTKLKPFWGFILI

SEQ ID NO: 338972 - protein, 69 aa, Zea mays
  Clone ID: MRT4577_72310C.1.pep
VPLRPVYQFSRHVHVAFAPLGGPRVPFVIAGAVLVSASVWSFSACFLTIFSAAVRSPSVGAPGIPAGFR

SEQ ID NO: 338973 - protein, 132 aa, Zea mays
  Clone ID: MRT4577_72311C.1.pep
GPRVGRFDPRPVLVLGQRPCQRVYEPADIDVARDITRRRGRGGGRPPRGGGRLFGRLELGALFLWLVGGCHFFRGCSPPGIVPKPCAWWKKKRRPGLGLHDPVLQQPWHAPLPIMGGVFFNNPLSLTAISLG

SEQ ID NO: 338974 - protein, 55 aa, Zea mays
  unsure (1)..(55): unsure at all Xaa locations
  Clone ID: MRT4577_72312C.1.pep
ASEPNPHDTTPXLVARGHQSWPSMFSSVVGLNPAAAVPHAAAASSPAKRVQLAAP

SEQ ID NO: 338975 - protein, 436 aa, Zea mays
  unsure (1)..(436): unsure at all Xaa locations
  Clone ID: MRT4577_72313C.1.pep
MPPPQDGVDDSAARVPLLPPPAPRRAAVRLHPLPLLIAATLAASYRLLFLAPAPSYYQSLLLSLGSNDTAAAHLHALTIRPHLAGTGANALAAAHVAATLSSHSFPTRLTSYSVLLSYPAYRSLSLSAPDRDTVLFALKQETYAGDPYEAVSAEAVPTFLAYAASGSVSAEAVYANYGRAEDFAYLAARGIDVTGKVAVARYGEVFRGDIVRNARDAGAAAAVIYSDAKDYAAGKTFPDGPWMPPTGVQVGSTFKGVGDPTTPMWASSEGCERLTIAEAMSSDDMPGIPALPVSWKDGETILQLIGGDVAPENWQGGDGAAAYRFGPGPAVLNLTYTELTWDRGTWKGQRTSYFPICCFLCIGXNETMVTIQNVISVIEGGEEPERYVILGNHRDAWTFGAVDPNSGTASLLELAQRLSELQKKAGDLDGPSSCAT

SEQ ID NO: 338976 - protein, 54 aa, Zea mays
  Clone ID: MRT4577_72314C.1.pep
GTGPSKGREEGQLDSGRNACPNDDRGGGEHGHGRLHLSECYVRTDRTCERRRGR

SEQ ID NO: 338977 - protein, 84 aa, Zea mays
  Clone ID: MRT4577_72315C.1.pep
PFIFSCVFPLVMTNFCMSPVNPPPNQRIVLSAPPSTPFFFSSVKRLPPGPVGSSWAYLFLSGLLAFSCPRLRFFPFLKCNFLSP

SEQ ID NO: 338978 - protein, 53 aa, Zea mays
  Clone ID: MRT4577_72316C.1.pep
LEPFVSGSDLIISFIMPTNFDFFAELSSVDVCTHILYFSTSIGFCGLKFLSCS

SEQ ID NO: 338979 - protein, 151 aa, Zea mays
  Clone ID: MRT4577_72317C.1.pep
MSGFYEVMEKTNIEKITNEMLARLSEDSCDSDSFDVESGNEDVEDRPWRPSHVVFGKSTVKQGQIEAMKDKYFHDVSITKATGKEQYHNNFGCYSFVPRCEANYPVPTFRKKWPGSWMKQWFFVKNDLHHKEDVRDIIQRPIWSRFGIRSP

SEQ ID NO: 338980 - protein, 59 aa, Zea mays
  Clone ID: MRT4577_72318C.1.pep
PSFASPVFLLPIQLFRAFFFFSFSSPRPGPEIHGFHFPDRSSFSCSVTFTRSACLYWVC

SEQ ID NO: 338981 - protein, 40 aa, Zea mays
  Clone ID: MRT4577_72319C.1.pep
ASERPYQRTYWGGAYELNSQDNVRDSQHHCCCKLTEESQY

SEQ ID NO: 338982 - protein, 33 aa, Zea mays
  Clone ID: MRT4577_7231C.1.pep
KKMHHINLTKKTTKCTMGGMGGLNYDGTDRFHY

SEQ ID NO: 338983 - protein, 38 aa, Zea mays
  Clone ID: MRT4577_72320C.1.pep
GFIPGKKWNPTGLIKRAFLFQGVQRKFYLFPKGFGGGK

SEQ ID NO: 338984 - protein, 52 aa, Zea mays
  Clone ID: MRT4577_72321C.1.pep
RSSMMVIYILKAVSDIKSKSWSSTLSFPQNRFKFLKNGFVLHLSPFDPLGPF

SEQ ID NO: 338985 - protein, 149 aa, Zea mays
  Clone ID: MRT4577_72322C.1.pep
MDPMVFEVAELDGAAMICHANSKRKGYLLVLNMVFIDDENDFLSNSARKKNRMRAKDKYNMVAWSHCPLESVGAFRMLAYDVHADSMDKIVRIAKSTMYESFKPFVRAVVKVFGERYLRTTTIDDTASLSDMNNNRSWPSMLGRIDCIY

SEQ ID NO: 338986 - protein, 58 aa, Zea mays
  Clone ID: MRT4577_72323C.1.pep
SSISFVTSIHLSTIEKIIAVDQIATAVCQDQGSSKSYLPVPNRDPSPIQTTNQQGRSA

SEQ ID NO: 338987 - protein, 51 aa, Zea mays
  Clone ID: MRT4577_72324C.1.pep
ELPLSVVLVLPNRFPVYTAGCCKISRACIASAATVQGNENDVEELEMSLEA

SEQ ID NO: 338988 - protein, 33 aa, Zea mays
  Clone ID: MRT4577_72325C.1.pep
ELVVSYPFDMTRTPWAARELTPTRDDAVFRWLS

SEQ ID NO: 338989 - protein, 84 aa, Zea mays
  Clone ID: MRT4577_72326C.1.pep
ASSTTAAARAGAGAEDDDDGSTRKKLRLTKEQSKLLEDRFKDHSTLNPVRRRRTNPDRLAACFALLLRYAPRSNSCTCLPAPLY

SEQ ID NO: 338990 - protein, 140 aa, Zea mays
  unsure (1)..(140): unsure at all Xaa locations
  Clone ID: MRT4577_72327C.1.pep
ADIVTHPTNFTFARPTTSGRGLTEHGLTATINALLPSRALFQLIKNHTIYAVSITIPLLLRFMLLALIXIFDFPPFIVLIIAILNDSTIINISNDKVKPSTQPDNLKLPDIFPTGVIIGGYLTMNTVIIFCPAYNTDFFP

SEQ ID NO: 338991 - protein, 174 aa, Zea mays
  unsure (1)..(174): unsure at all Xaa locations
  Clone ID: MRT4577_72328C.1.pep
MARTRGMPALALVVVAAVAVACAEARLPDYHPSTFTVTGKVQCQDCTKNWNAYAYNAKPIPGSKVSITCRDDRSRVVYHGSDYTDGQGIFNIEVPSKATNGCDLAPSRCLVRXASSGDAACAVFTDFNRGQTGQVPARLTHASPTKVTYAVGPYYCTLRQCDDDVKGDDDDACY

SEQ ID NO: 338992 - protein, 100 aa, Zea mays
  unsure (1)..(100): unsure at all Xaa locations
  Clone ID: MRT4577_72329C.1.pep
NSNRPRGSIKETQRVHSEPAAXIRAPPAEKNMHYFNDMKRGPTTXPYERGAASHERVTADEDPVAXPKRQVXTRRDQPNIAREGRIGLDILNDKCSPAPQ

SEQ ID NO: 338993 - protein, 53 aa, Zea mays
  Clone ID: MRT4577_7232C.1.pep
HGPKCWMDCMFVLEPDLFIAMNDESILFFEGKTAKRLDSVAKSERLSESHPPG

SEQ ID NO: 338994 - protein, 51 aa, Zea mays
  Clone ID: MRT4577_72330C.1.pep
DMLKLSWYYKLAPSGCCRRQDDDVLFEVEFAIMMLQRICLKVEFVIMFPIS

SEQ ID NO: 338995 - protein, 56 aa, Zea mays
  Clone ID: MRT4577_72331C.1.pep
SFHRRGGLDVVPSRPHCEDDGDAATVNADVEIHLHHLLVDVYHLSMCTVCTFSRTD

SEQ ID NO: 338996 - protein, 58 aa, Zea mays
  Clone ID: MRT4577_72332C.1.pep
WEWSHQALGFCSLRPRKNHSLACSRGQVKRLTTACMIYRVRDRDGNRTEKIFKVLYVT

SEQ ID NO: 338997 - protein, 105 aa, Zea mays
  Clone ID: MRT4577_72333C.1.pep
MAKKDVAAKPSSSSGGKKAKKKWSAKKVKDKANNLVILDKPTYERLFKEVPTYKLISQSVLVDRLKLNGSLARIAIRELESQGLIKPISRHHAQIIYTRATGDEK

SEQ ID NO: 338998 - protein, 55 aa, Zea mays
  Clone ID: MRT4577_72334C.1.pep
KKKKKKKKKKKKKKKKKKKKKKKKKKKKKKKKKKKKKKGGGLFEGPRVSPRVRGN

SEQ ID NO: 338999 - protein, 85 aa, Zea mays
  unsure (1)..(85): unsure at all Xaa locations
  Clone ID: MRT4577_72335C.1.pep
MLAVFSGQVVEVPAELVAAGSRTPSPKTKASXLVGRFLAASXPAVSVQLGDHFPYFYFPYRTPVPTQSPIISISLFFLCFQYLFS

SEQ ID NO: 339000 - protein, 59 aa, Zea mays
  Clone ID: MRT4577_72336C.1.pep
DSRVALTKAFNPNQPIHVSGACYPIPLARRGIDTEITAEHLLAFHGTVPFKAIYAYVLG

SEQ ID NO: 339001 - protein, 47 aa, Zea mays
  Clone ID: MRT4577_72337C.1.pep
KMAPPTMGCCHDKAGFHQRELVVWQQFVAASRKGQATKLELATCQVE

SEQ ID NO: 339002 - protein, 69 aa, Zea mays
  Clone ID: MRT4577_72338C.1.pep
RSPAAPPSLAGDEVGGVGPSVVVDGERYRVRMLPTRQGGYVGITTPNGVLDHEETNRQNGGGQGLGYFH

SEQ ID NO: 339003 - protein, 56 aa, Zea mays
  unsure (1)..(56): unsure at all Xaa locations
  Clone ID: MRT4577_72339C.1.pep
LFLNAHELELQATKSTVRAFHAAGPLTWEQESLLTNLRLSLNIXNEEHLLQFLCSG

SEQ ID NO: 339004 - protein, 238 aa, Zea mays
  Clone ID: MRT4577_7233C.1.pep
MADSAALSTSLPRSLASRRPLSSPLHARARARSQRRCRLGSRSLHRLRARAGKDDPEDLYGPYPWDQPLDLTAGSDIQWVPEDRVTLFTSDGLIQIGGSLVPRRVSASEKRQRKLKSGQKLRRFQESSYMDPNQSLCLGALFNIAATNGLDMGRRLCIFGFCRSIEMLSDVVEDTVLEHGGEVVTAEKASSNGLQEKLTMSVAVPLLWGVPPASETLHVAVRSGGGIVDKIYWQWDLF

SEQ ID NO: 339005 - protein, 95 aa, Zea mays
  unsure (1)..(95): unsure at all Xaa locations
  Clone ID: MRT4577_72340C.1.pep
APSTSDTCLVLRQLDLFVRPHHCYLXXLIWALSMTEEEXXXXXXXXXQNVVLRXXXYYFTEXXXXXXXXXXXXXXXXXXXXXXXXXXXXXXXXXT

SEQ ID NO: 339006 - protein, 58 aa, Zea mays
  Clone ID: MRT4577_72341C.1.pep
YILHLQVYFSVFFHQLSTFFYLCFHYYGVLGFHYVLMPLRRSLLDMSKPFQSVLGKFF

SEQ ID NO: 339007 - protein, 99 aa, Zea mays
  unsure (1)..(99): unsure at all Xaa locations
  Clone ID: MRT4577_72342C.1.pep
XAVTYPPSTXPPQGTXXPPXGCXVYALSNDKGAAPFFTAXRRAKGSLPSIXGGXXLGMXVVXXGXVGCCGGPLIXSLSPPFSLNSSLXXFWWWVLGSPN

SEQ ID NO: 339008 - protein, 61 aa, Zea mays
  Clone ID: MRT4577_72343C.1.pep
QESVASLNSVYAKGATGHWNNGVVRILGRFRLVHSGSRNSAKSFISKQQLKVFFRSWVVNI

SEQ ID NO: 339009 - protein, 76 aa, Zea mays
  unsure (1)..(76): unsure at all Xaa locations
  Clone ID: MRT4577_72344C.1.pep
RRRCSVHCHRLRLRWGVFSRRPSAMPAHIFPCLRVKEGAHARLGPGTPLCXSARSNASTVLPAASAAAEKKAWTSP

SEQ ID NO: 339010 - protein, 169 aa, Zea mays
  unsure (1)..(169): unsure at all Xaa locations
  Clone ID: MRT4577_72345C.1.pep
PKHTNTRHPAXTASAATATQXPQCSQTPQAPLLPPYLXPAAQQQCEGGGVQPHKIQQAHAQHXLTLXPQHLQQPSPLQHKQHQPHXLTQNIKAQQQQQLDLGNLATYYQLQQAPTSNQPAAQNSEAYXQQQPPFXXLANAYPPKXLATNQLAAWNSAAKLQQYQVPRST

SEQ ID NO: 339011 - protein, 69 aa, Zea mays
  Clone ID: MRT4577_72346C.1.pep
LGAPWEFYFQKNLFYCFGVQTECSNKCLKNSFIKRLQFLKVQLKNRAPNNQQIYILTTIHIKICNTTEL

SEQ ID NO: 339012 - protein, 116 aa, Zea mays
  Clone ID: MRT4577_72347C.1.pep
SELYAYETVGALTFVEKQAGLVNCHSVLAETNNGFTDPAKERLYKGSEKSGAALSTVIGTGILDQYAIHVMQSQFISTTDKTIYIACRQTSAMCDPTPRLNMQQLLKKKDGLSAML

SEQ ID NO: 339013 - protein, 103 aa, Zea mays
  unsure (1)..(103): unsure at all Xaa locations
  Clone ID: MRT4577_72348C.1.pep
KKTPKGRVFKAXITGLKKKEVKVEVQGGKILXIKGEPHKGQVVKTAPWPPLERNNGRFLCRFLQPKNVKFEQISPPMENGGVSVLLPKKEPKKPKVNSLKISG

SEQ ID NO: 339014 - protein, 1009 aa, Zea mays
  unsure (1)..(1009): unsure at all Xaa locations
  Clone ID: MRT4577_72349C.1.pep
MPTVGAPGRGLLRVNEHFPVEFQMGRLQQPLEPETVLRFGSLEFMSLDGSYDMVLLPSQHDNNNNPRLARRRRIRRWHLPVAEEEHSGHPRHPPRRRRRRRGNCGHAGGSTLSAVGPERVDDAGTPPGDMSSVVLAPETTTSVASPRRANPKRTDDASTLAKDLLGVTLVPEMTVCSVPDATSPPSIDQEVPSALHPVPFRFSFDPPSDPAVAEDDPDFGWDFSGLGNPGAMRDFMSACDHCLSGCSDDGHDLDDEGYGPSRECFHVDQGDHDEGNHLGMPEVDDPPRPASRVDIPWELAVVPVPAEDRDTQLEQIREIQAKVDEEAGRLVQLRQNIEQEWAGRTLAGGACHRARDVHRRIIDNARAALPPAVNGSGQDLAAAAMLLRTMPEPSTTEGRRIQGKLKDLLEGAAVRRAESSASRRRADPSEHHAASSRRMREASVHPERTRDEAPTARDCLGNEHHHRDHRACLEEKVRRGYHPRREGRCDSEEDQSPSPEPPGPRVFSRAIRRASFPIRFRAPTTITKYSGETRPELWLVDYRLACQLGGADDDNLIIRNLPLFLSDAARAWLEHLPPAQISDWDDLVKAFVGNFQGTYQRTELHNITDSDVIGAFLAGTTCRDLVSKLGRKTPTKASELMDVATKFASGQEVVEAIFRKDKQPQGEPKEDAPEASAQRGAKKKAKKKAKAKRNVVDANLVAAAEHRNPRKPPGGAGAFDKMLKEPCPYHQSPVKHTLEECVMLRRYFHKAGPPAEDGKGQGNNKKEGAKEEEFPEIHNCLMIYGGQVANASARHRKQERREVCSVKVVAPAYLDWSDKPITFDRGDHPDFVPSPGRYLLVVDPIISNARLSKVLMDGGSSLNIIYAETXRILGVDRSEVRAGXTLTFEVVGFRGTYHAVLGRPCYAKFMVVPNYTYLKLKMSGPNGIITVGSTYRHAYECDVECVEYAEALAESEALITDLERLSKEAPDAKRHAGNFEPVEAVKYVSLDPSNDASNKVRIGSELDPK

SEQ ID NO: 339015 - protein, 356 aa, Zea mays
  Clone ID: MRT4577_7234C.1.pep
ALSRTFSRSSQNPGWVQKFLSHPMTQLPWARDAKSRSEGSQNGLEPGIPEHEYNVTRNLQWAHGKAGEDRVHVVLSEEQGWLFIGIYDGFSGPDAPDFLMSTLYKAIDRELEGLLWVYEDSSERSDHVSTHEEGGLVAASVDAPHDDSGQCQSDSGRQELGNFGKQNVSPGKGCDDSALQFQPNCTSSEEKDLAPHGSTSEMLGRDEIVDEMVEADLGNDRQSREPHSSNRDLSGTDLNTSCSCATETSSYCDQHAKFLKGNRKSKRLFELLQMELLEDYNTRLSKEPPEESKIPNLHVTQADTAEARSRNTAEVSRCSLAATGECFDDSEGLGSSRHAVFVLGLGIKEWTGCSIT

SEQ ID NO: 339016 - protein, 768 aa, Zea mays
  unsure (1)..(768): unsure at all Xaa locations
  Clone ID: MRT4577_72351C.1.pep
MTSVASPQRASPKRTDDASTLAKDLLGVSLVPEMTVRSVPDATSPPSIDQEVPSVFHPVPFRFSFDPPSDPALVSAFARAYPDHPGYHMWSTWDRLTAVSTSGLAGSEEEDDPDFGWDFSGLGDPDAMWDFMSACDHCLSGCSDDSHSLDDEGYGPSRECFHVDQGDNDEGSHLGMPEVGDPPGPASRVDIPQELAVVPVPEGDQDTQLEQIREMQAKVDXGSRPSTTEGQRIQGELKDLLEGAAVRXAESSASRRRADPSEHHAASPRRMWEASVHPERTWDEAPAARDRLDDEQHRRDHRARLEEKXAEATTPGAGDAATISDWDDLVKAFAGNFQGTYVRPRNSWDLRSCRQQPGESLREYIQRFSKQRTELPNITDSDVIGAFLAGTTCRDLVSKLGRKTPTKASELMGVATKFASGQEAVEAIFWKDKQPQGEPKEDVLEASAQHGAKKKAKKKAQAKRNAADANLVAAAEHRNPRKPPGGASAFKKMLKEPCPYHQGPVKHTLEECVMLRRYSHKAGPPAEDGKGQGNNKKEGDKEEEFLEVHNCFMIYSGQVANASARHRKQERREVCSVKVAVPVYLDWSDKPITFDRGDHPDFVPSPGRYPLVVNPIICNVRLSKVLMDGGSSLNIIYAETLELLGVDRSEVWAETYHTVLGRPCYAKFMAVPNYTYLKLKMPGPNGIITVGSTYRHAYECDVECVEYTEALVESEALIADLEHLSNEAPDAKRHAGNFEPAEAVKSVPLDPSNDASKKVRIGSELDPK

SEQ ID NO: 339017 - protein, 1487 aa, Zea mays
  unsure (1)..(1487): unsure at all Xaa locations
  Clone ID: MRT4577_72352C.1.pep
RCAPTQLHHRPSTKRNPWKPPGGAGAFDKMLKESCPYHQGPVKHTLEECVMLRRYFHKAGPPAEDGKSQGNNKKEGDKEEEFPEIHNCFMIYGGQAMNASARHRKQERREVCSVKVAASVYLDWSDKPITFDRGDHPDFVPSPGRYPLVVDPIISNVRLSKVLMDGGSSLNIIYAETLELLGVDRSEVRAGAAPFHGITPGKRILPLGQIDLPVCFGTPSNFRKEILTFEVVGFRGTYHAVLGRPCYAKFMAVLNYTYLKLKMSGPNGIITVGSTYRHAYECDVECMEYAEALTESDALIADLERLSKEEVVLVDFLLSNAEVFAWSPSDMPGIPRDVAEHSLDIRAGARPVKQTLHRFDEEKRRAIGEEIHKLLAAGFIKEVFHPEWLANPILVRKKDGKWKMCVDYTSLNKACPKVPYPLPRIDQIVDSTAGCETLSFLDAYSGYHQIKMKESDQLATSFITPFGMYCYTTMPFGSRNAGATYQRCMNHVFGEHIGRTVEAYVDDIVVKTKKASDLLSDHETTFKCLRAKGVKLNPEKCVFGVPRGMLLGFIVSERGIEANPEKIAAITNMGPIKDLRGVQRVMGCLATLSRFISCLGEKGLPLYRLLRKAERFTWTPEAEEALENLKALLTNAPILVPPAAGEALLIYVAATTQVVIAAVMVERREEGHALLIQRPVYFINEVLSETKVRYPQIQTRWKLQHYFESHPVTVVSSFPLGEIIHSRKASSRIAKWAVELMGETLSFAPRKAIKSQVLADFLAEWTDTQLPTTPIEPELWTMYFDGSLMKTGAGAGLLFISPLGKHLCYVIRLHFLASNNMAKYEALVNGLRIAVELGVRCLDARGDSQLVNNQVMKNSHCYDRKMEAYYDEVRRLEDKFYGLELNHTTVPSDVFSKDIYQPSVKIDDTSEIPSAKPEVPSAAEGEALRIEEERNGVTPVLNWQTLYXNISSEESCPSTRPKLGDWLDAPSRSFCWVMKRSSITTVPRASSSDASPSPKDKSCYKKYTRGLAATMQHLEPSXEMPSDKXYWPTTVADATRIGLDLVGPLQKAPRGFSHLLVAIDKFSKWIEFLDFCEDHHIRVDWAAVAHPMTNGQVERANGMILQGLKPRIYNDLNKFGKRWMKELPSVVWSLRTTPSRATGFTPFFLVYGAEAVLPMDLEYGSPRTKTLKHQQGEERHPRRRFDPRWNLAQPQTVMRAGASASRSEAPASRPPRIPARLTASAAWLQDWSYSRVIWPNPSYRCCTSSAWEATCSRAEKASVQADIASVHATAAFSFGSSQSSRSIFPLQTGLRFKSRGYEQPPHQGGRGITNSKRLAGTEKGDILKGILPREGNGPPSPPTDQGFKGWPLGRVRQPPQSTRAPRPLLIRGPKAGPSKGFRQSPQSTRAPRPLLIRGSKVGLSIGFDSRPRTRRVRDDPGYVRYMAETRATLPRYPRTFPRPAGTTRNGIPLEGGIEPSDPVEKGPGPANHLQVLLERASGPLADP

SEQ ID NO: 339018 - protein, 46 aa, Zea mays
  Clone ID: MRT4577_72353C.1.pep
RNNALLRGSTADKMDQTKQLINIETLIYRLVSLIYESHDPLLECDA

SEQ ID NO: 339019 - protein, 69 aa, Zea mays
  Clone ID: MRT4577_72354C.1.pep
NSFQDTLYVTGKDIHLLYSYIEYLTYGQCSPFYPVPPPLIPCNACVSTPQVHSLQPGSSHGAIWKNRAH

SEQ ID NO: 339020 - protein, 98 aa, Zea mays
  Clone ID: MRT4577_72355C.1.pep
SSPVGGRPSFFFFFFFFFFFCSFSYFSFFFFHQPNWGKKGFQICQLHHKTPLRFPKKFGVETVNKTFPELFGDFFWFGHPNLGLPFITVTLRAGWPVQ

SEQ ID NO: 339021 - protein, 85 aa, Zea mays
  unsure (1)..(85): unsure at all Xaa locations
  Clone ID: MRT4577_72356C.1.pep
MRELAPTHPIRLGLASNFSVCYYXILNSPDRACSLAKQAFADAIAQLDTVGGEPYKDRTVIMQLVRDSLTLWTSDMPVCSLSILI

SEQ ID NO: 339022 - protein, 291 aa, Zea mays
  Clone ID: MRT4577_72357C.1.pep
MDPPQELAAAGRKRRRRGGVRNRKRLSSQKGLPPATAPPTPASPPVKRRRKDIAGQAAAMPKRGNTSSLLDKMRARLSGGHFRMLNEKLYTCSGEDAFDYFKNDPNLFDVYHTGYQEQMSHWPEQPVNVIINWLKSQNASWTVADFGCGNAAVAKNLKNKVFSIDLVSDEPSVIACDMAHTPLEPSSIDVAIFCLSLMGINYPSYLEEANRVLKPSGWLVIAEVRSRLDPSNGGADPEKFSKAIIQLGFSLVSKDVKNRMFILFYFRKKEKSKVAKSIDWPQLKPCLYKRR

SEQ ID NO: 339023 - protein, 94 aa, Zea mays
  Clone ID: MRT4577_72358C.1.pep
SFYCFLLSQCKNCLVFSSEYIFSTCHCLDVFCTQFYIPSHYFIFYISRQYVATIISNFAILGRQTVCGYNLTYQQSVCYVCNNLLNRGTTYNFT

SEQ ID NO: 339024 - protein, 58 aa, Zea mays
  Clone ID: MRT4577_72359C.1.pep
LQSLQILTLTQLQPTPHLLRLARNYKKYLQLNQTKFNTPSHTINLSNKIMHSIQTTHT

SEQ ID NO: 339025 - protein, 166 aa, Zea mays
  unsure (1)..(166): unsure at all Xaa locations
  Clone ID: MRT4577_7235C.1.pep
FAFGKCSLFLFCAQFPHRLKVPDLCVLADIQWVPEDRVTLFTSDGLIQIGGSLVPRRVSASEKRQRKLKSGQKLRRFQESSYMDPNQSLCLGALFNIAATNVKYLLLLTTFLPYLDFIFVTPFDIXGLDMGRRLCIFGFCRSIEMLSDVVEDTVLEHGGEVCFPIW

SEQ ID NO: 339026 - protein, 81 aa, Zea mays
  Clone ID: MRT4577_72360C.1.pep
AAGPGIFKQGRELPTFSQNQTTWPRPSPATARDFRHLLSLPAPPPPLLLFFLFFQSESRGRRGKGSAADAEVRSMGDQQSR

SEQ ID NO: 339027 - protein, 85 aa, Zea mays
  unsure (1)..(85): unsure at all Xaa locations
  Clone ID: MRT4577_72361C.1.pep
TDKKNRHGDILDKYMYLFCRVDMLMDEKTVQYLMNSGMDPXTENNPYLCFLYTSYQKRATDVSHSNTVLLARAHRDDVLLRACGT

SEQ ID NO: 339028 - protein, 130 aa, Zea mays; identical to SEQ ID NO: 223344
  Clone ID: MRT4577_72362C.1.pep

SEQ ID NO: 339029 - protein, 43 aa, Zea mays
  Clone ID: MRT4577_72363C.1.pep
TLPSSLLLSGRSLLQSHVAVSSVAVVAAAPADGGATATEAKKV

SEQ ID NO: 339030 - protein, 82 aa, Zea mays
  Clone ID: MRT4577_72364C.1.pep
MAHHPSLLLLGLLERGRLAHLRPEPVTEQPGNRTLHWPHGPLCRGHLGRPAGHCHDGGTARNRRGAAADYVCPVGGGLRPSA

SEQ ID NO: 339031 - protein, 73 aa, Zea mays
  unsure (1)..(73): unsure at all Xaa locations
  Clone ID: MRT4577_72365C.1.pep
TKLGIRLEAFYTDANWAGSPDTRRSTSGYAAPSGGNXXXXXPKRQPDETRTRAEAEHRAXANSXAEASRLRQH

SEQ ID NO: 339032 - protein, 64 aa, Zea mays
  Clone ID: MRT4577_72366C.1.pep
KGIYLVNPNWAPSNGLPPLPFWCPGVGNEEGVKGNNVTVSPVGGGRKRAAFPCTVGRLGFQTHQ

SEQ ID NO: 339033 - protein, 143 aa, Zea mays
  Clone ID: MRT4577_72367C.1.pep
MVNKYADADILLAAAVLGCLVSLSLDDQGTDTYYTDYTSVGGLRELARRHDASPRPWTRSGTAVPGAGQCTRTPDQHRDQRELEHLKHRCLRNRKYRGPLPVSTARHVIVCLSHECLCTIGSLGASNMVIEYGQTQDMYMYVV

SEQ ID NO: 339034 - protein, 78 aa, Zea mays
  Clone ID: MRT4577_72368C.1.pep
MSAHLQWMVVRNCSSFLIKRNKQTYSTEPNNHKARNSFRYNGLIHRKTVGVEPAADGKGVVVVMKRRSGQRKPATSYV

SEQ ID NO: 339035 - protein, 38 aa, Zea mays
  unsure (1)..(38): unsure at all Xaa locations
  Clone ID: MRT4577_72369C.1.pep
SSIQANITNYQKINLMYCFHNNTXKGNILEYMQCHLCT

SEQ ID NO: 339036 - protein, 153 aa, Zea mays
  Clone ID: MRT4577_7236C.1.pep
GEEHLTRTQTVASTSASSEISSKVNKLENGVTKSCGGMGNTGSAGPPMQQLCLRGPEIRSNINGFPAMSNATSQYAGQGLFGSGIPMTHAQVLGMFSGMNGKANGYVHRHPVAADSLKTAAQNGDVGKAAVNPVQGAGHDPKIANGNSSAHPG

SEQ ID NO: 339037 - protein, 135 aa, Zea mays
  unsure (1)..(135): unsure at all Xaa locations
  Clone ID: MRT4577_72370C.1.pep
GQTMTIGDVRPQEQQEQDQPSSSTLVHPLTQDEEQVPQDEGLDQGGAHGEHDKEEEEPQAPLTQVYXTIQKNHPVDXIMGDISKRVTTLSCLANFCEHYSFVSSIEPFRIEEALQDSDWLLAMQEELNNFKRNKI

SEQ ID NO: 339038 - protein, 140 aa, Zea mays
  Clone ID: MRT4577_72371C.1.pep
SAREHLARSFSDPSPLPPASHYPIERALSPSRRKPGRPWALGPPSPFEFPPSVLAATAAGCSPARGSGQGTTACDSRFLRAHQLFPESSRSLGFLSIDSSMGPGDEYEFGLYTPKLLAYTGEDYVFNPRMPDQGEFSIFT

SEQ ID NO: 339039 - protein, 142 aa, Zea mays
  unsure (1)..(142): unsure at all Xaa locations
  Clone ID: MRT4577_72372C.1.pep
ESICPXHAGSSVALAWFXGRKAEHLESLPDDEVIHGVHSTLDSFLPAPSRWRVKRIKRSGWATDQLFLGSYTYVPVGSSGEDLDRMAEPLPRRLDADVDVARAPPLRVLFAGEATHRTHYSTTHAAYLSGVREAERLLQHYA

SEQ ID NO: 339040 - protein, 59 aa, Zea mays
  Clone ID: MRT4577_72373C.1.pep
YLSQRQDIHNINNTQIPYRPHSDYPTHYAHSIQHIQCNTTITHLYTSSTHTRHHLHQCI

SEQ ID NO: 339041 - protein, 399 aa, Zea mays
  unsure (1)..(399): unsure at all Xaa locations
  Clone ID: MRT4577_72374C.1.pep
KIRAKAVREDWRQKSKPIPPGAVYPAKDHCXDLERQVHGRGRKEGMDEMYFGVYDQLLYARKTEPVEGAQWTGIVTTIAVEMLKANMVDAVXDPDDRLAPRPVLARTPDEVIAAKGVKPTLSPNLNTLALVEAAGVKRLLFCGVGCQVQALRSVEKYLGLEKLYVLGTNCVDNGTREGLDKFLKAASSEPETVMHYEFMQDYKVHLKHLDGHIEEVPYFCLPANDLVDVIAPSCYSCFDYTNGLADLVVGYMGVPKYAGVSMTQHPQYITVRNDRGQEMLNLVAGLLESTPTISSGSRQPFVMETVKADDAAKLGKGPSKPAPRFVGDILAFLLNLVGPKGLEFARYSLDYHTIRNYLHVRRAWGKQRAEQHIPGYAKKIVEAYDKDGRIEAMVTQSGD

SEQ ID NO: 339042 - protein, 232 aa, Zea mays
  Clone ID: MRT4577_72375C.1.pep
MEYAAVGYGYGYGYDERQEPAESADGGGGGDDEYATVLSAPPKRPAGRTKFRETRHPVYRGVRRRGPAGRWVCEVREPNKKSRIWLGTFATPEAAARAHDVAALALRGRAACLNFADSARLLQVDPATLATPDDIRRAAIQLADAASQQDETAAVAADVVAPSQADDVAAAAAAAAAMYGGGMEFDHSYCYDDGMVSGSSDCWQSGAGAGGWHSIVDGDDDDGASDMTLWSY

SEQ ID NO: 339043 - protein, 76 aa, Zea mays
  Clone ID: MRT4577_72376C.1.pep
LLIHRKTRVFKGMCSTDSHYPCPARSTSACLEMPSMLRQSGDMVLDYLNRDDLENMNENLYSVNTVAEIHPAFLTS

SEQ ID NO: 339044 - protein, 471 aa, Zea mays
  Clone ID: MRT4577_72377C.1.pep
MASSTSLSLCLHASSPSSSSPGLRRPSLASSSSSRSERTRKIRAKAVREDWRQKSKPIPPGAVYPAKDHCSRCGLCDTYYVAHVKTACAFLGDGMSRVEDLERQVHGRGRKEGMDEMYFGVYDQLLYARKTEPVEGAQWTGIVTTIAVEMLKANMVDAVVCVQSDPDDRLSPRPVLARTPDEVIAAKGVKPTLSPNLNTLALVEAAGVKRLLFCGVGCQVQALRSVEKYLGLEKLYVLGTNCVDNGTREGLDKFLKAASSEPETVMHYEFMQDYKVHLKHLDGHIEEVPYFCLPANDLVDVIAPSCYSCFDYTNGLADLVVGYMGVPKYAGVSMTQHPQYITVRNDRGQEMLNLVAGLLESTPTISSGSRQPFVMETVKADDAAKLGKGPSKPAPRFVGDILAFLLNLVGPKGLEFARYSLDYHTIRNYLHVRRAWGKQRAEQHIPGYAKKIVEAYDKDGRIEAMVTQSGD

SEQ ID NO: 339045 - protein, 63 aa, Zea mays
  Clone ID: MRT4577_72378C.1.pep
SEIGAGCMLSLNILGRLYYMHGANPQMLGVLYQFERCQYVSIHYISNMYKICIVDEKKKKKSG

SEQ ID NO: 339046 - protein, 263 aa, Zea mays
  Clone ID: MRT4577_72379C.1.pep
LGVRDKVKGILERQDLKRVPGLGLIYTELVQGIPPIFPHLIEKIPTVHSGVVFITVKHLPIPHVDVSERFLFRQGEPKHLMVFRCVARYGYLDTLEMASEFVKILVEYLQYYIRDINLYALGDPLMRVSNCSARIDSFSTEKPSGRHAVYAEEMLTPIQSFSELTMHPVGINSVLTHLQTAKLNVEEMIKIEEDQKMVEREVDNGVVYILGETEVVAKPHSNLLKKIIVNYVYSFLRKNSRNGEKMLSIPRGQLLKVGIAYEI

SEQ ID NO: 339047 - protein, 190 aa, Zea mays
  Clone ID: MRT4577_7237C.1.pep
WEHMRRLGIEPNLYAYTILASIYIGKGDHAMADAVLHDMLSKRIAPTVVTFNAIISACARSGSGGNAFEWFHRMKTKGIEPNEITYQVLIEALVQDGKPRLAYEMYMKACGQGLQLPAKSYDTVLEACKAYGSVVDVATLGPRPSKGVEVEPIRIENSFSSLSQFKDVHGSSHRFAGVGMYGFYGYRMAR

SEQ ID NO: 339048 - protein, 249 aa, Zea mays
  unsure (1)..(249): unsure at all Xaa locations
  Clone ID: MRT4577_72380C.1.pep
PRRISPLPTVRSLPPPSLSSRAPLRSAWSFPVVPLLIFPWPRALAMLAELPLVFSARRDSPWCRVVPSPRFSTLNAAIFLVFCAGRRSKLCCAPSRAIPCARVPCTCPSRALAVPAPLGAPSARPHGAGRVPRRRSLLLAIPCRGNRPAAPVRPAERFSGPCARYFSSMPRPVPAPCFSLRRGVSSPRGSLSFLPCSDCAALPVAFGLLRIRSWSPRCEIXVTSGVLTCLPAXRQTWVPCSGFSASASA

SEQ ID NO: 339049 - protein, 127 aa, Zea mays
  Clone ID: MRT4577_72381C.1.pep
SFFFFFFFFVGFFFWLGDTTNCLKLPLKVLPRDPNGGLTSPVPKKGKGGGAYHHNHSEDLTLLGGVKPQTRPRTKFSYRGSGGPPRRAPQYLELGGETQPVNLSWALGTVPPLPYPGSLGPSGLDPH

SEQ ID NO: 339050 - protein, 43 aa, Zea mays
  Clone ID: MRT4577_72382C.1.pep
VILTMFSHSQAVVVCPGCHTVLCQSSGGIARLIDVCSFGLTGD

SEQ ID NO: 339051 - protein, 235 aa, Zea mays
  unsure (1)..(235): unsure at all Xaa locations
  Clone ID: MRT4577_72383C.1.pep
MLLPLKLVNHPGSVKMSDSHETDRNIEIWKIKKLIKALESARGNGTSMISLIMPPRDQVARVAKMLGDEYGTASNIKSRVNRQSVLAAITSAQQRLKLYNKVPPNGLVLYIGTIVTEDGKEKKVTIDFEPFKPINVSLYLCDNKFHTEALNELLESDDKFGFIVMXDGNGTLFGTLSGNTREVLHKFTVDLXXKHGXREGQSALRFAXLRMEKRPYYXPQTAELXATQFFHHPAT

SEQ ID NO: 339052 - protein, 39 aa, Zea mays
  Clone ID: MRT4577_72384C.1.pep
RCTDESHSAIILELRLTSLLSDLRIRSNIIACAGYSFNC

SEQ ID NO: 339053 - protein, 437 aa, Zea mays
  Clone ID: MRT4577_72385C.1.pep
MSDSHETDRNIEIWKIKKLIKALESARGNGTSMISLIMPPRDQVARVAKMLGDEYGTASNIKSRVNRQSVLAAITSAQQRLKLYNKVPPNGLVLYTGTIVTEDGKEKKVTIDFEPFKPINVSLYLCDNKFHTEALNELLESDDKFGFIVMDGNGTLFGTLSGNTREVLHKFTVDLPKKHGRGGQSALRFARLRMEKRHNYVRKTAELATQFFINPATSQPNVAGLILAGSADFKTELSQSDMFDQRLQAKILNVVDVSYGGENGFNQAIELSAEILANVKFIQEKKLIGKYFEEISQDTGKYVFGVDDTLKALEMGAVETLIVWENLDINRYVIKNSTTGEIIIKHLNKEQEADQSNFRDPSTNTDLEVQEKMSLLEWFANEYKKFGCSLEFVTNKSQEGSQFCRGFGGIGGMLRYQLDIRSFDELSDDDDVYEDSD

SEQ ID NO: 339054 - protein, 48 aa, Zea mays
  Clone ID: MRT4577_72386C.1.pep
PARAWTKQSGRAPWGKGQRMTTPGRGECLRLRGEAPCWVQAQQKELSP

SEQ ID NO: 339055 - protein, 373 aa, Zea mays
  Clone ID: MRT4577_72387C.1.pep
MASAAATTTSAPAQNLNPLSINIKLPPWLSGLRCPFTFVCPPPPPPPPPPPPPPPLPPTEPVVPRSRRLPSLRVTTEYDSEEGVFVNKVSCKLAGDLAKLRLSFQSDPQGQWQGGGEEGDPLQQLFAAPLVGFITKRFSVHYDVEARNALLRGDCSLPGGAVQLRASHDVKAQQGEVSVITSLGDPLYKMELSSLVPYSGLPRATFHFPIGQVSVEEKRNEDDEKVLSVYGIGKSDFLDGVLTAQYNENDLNLRYCYKDKELTLVPSVSLPSNAVSIDFKRRFGPDDKLSYRYIFVTDEWNAVYKHKVGKNFKVKAGYDSEVRVGWASLWVGEEGGKAKTAPMKTKLQLMLQVPQDNPRNPYFLFNVKKRWDL

SEQ ID NO: 339056 - protein, 90 aa, Zea mays
  Clone ID: MRT4577_72388C.1.pep
EQTLRECLSSYKAVAASASYGLLWTMYGIVSLLTETKLDEPNFTNVCDDLCSPAMLLHLQFAYGVECNDSSERERRTMVWTCRLDKKHIR

SEQ ID NO: 339057 - protein, 6 aa, Zea mays
  Clone ID: MRT4577_72389C.1.pep
MTGKSS

SEQ ID NO: 339058 - protein, 73 aa, Zea mays
  Clone ID: MRT4577_7238C.1.pep
PFGMGRRKSPGKALPLRTLGLVLGTFIQCFDWDPVGGPEVDMAQGGGIPLPRAVPLEAICKPPHVMFGVPKGL

SEQ ID NO: 339059 - protein, 62 aa, Zea mays
  Clone ID: MRT4577_72390C.1.pep
QIHAHSHTDHQETFKSFDSGMTVSSFQGQGGNATMTPVFVLATFSLPPSVPPYGVLCVPQTA

SEQ ID NO: 339060 - protein, 79 aa, Zea mays
  Clone ID: MRT4577_72391C.1.pep
GTLEAGREIASPLRIQLTLLPPLRDTDCDCSTALRRAHCSLCLDSDCSRTLSPCVAPCNLRTIVLSGAHDHGIGRMVPF

SEQ ID NO: 339061 - protein, 132 aa, Zea mays
  Clone ID: MRT4577_72392C.1.pep
QRRDEESALAPVMPPPPVLPAPVMPVASSDLMVGAPGPYDKLLQPVHLRRGAGRSSAVPRISMPDLGRRYYEPPPVMITPLMQLTQYELRVINSVESQLGEPLREDGPALGINFDPLPPGAFGAPIGMHIEI

SEQ ID NO: 339062 - protein, 77 aa, Zea mays
  Clone ID: MRT4577_72393C.1.pep
LLARAPGFAQARVVPARDFKDACRMRLTPFELRIGTSKKRIHVPVICQRHSRPYSSCTSLCCFYCNMLHWSMVNGMH

SEQ ID NO: 339063 - protein, 101 aa, Zea mays
  Clone ID: MRT4577_72394C.1.pep
RDSRCLPLPQRRSLCSSPSLPVAIIPSQSQSGRRDQPHGLAPVTWVRASTICQSSRDPVPFPITSHAYSVCISFCFYGFWSNLNSQLFIFSKENKIAVARP

SEQ ID NO: 339064 - protein, 44 aa, Zea mays
  Clone ID: MRT4577_72395C.1.pep
CGAIYIGSSWQCYCKTCQLLSCIRRDLESMHYHTAVKLHCAFVA

SEQ ID NO: 339065 - protein, 80 aa, Zea mays
  Clone ID: MRT4577_72396C.1.pep
EREGLIVVAMFRFFSRNCRNLIMSSDLFSNLKEVKQFWHLPLACCSRRYGAAWFMHKYGQLRNCQIVCILSVAMSITQLF

SEQ ID NO: 339066 - protein, 82 aa, Zea mays
  Clone ID: MRT4577_72397C.1.pep
TCFKTKSYGLTKTHCPDNFLSPRHKHPYGPTPPDLKPANKLLGGGNLLPSLISLGRAFKLYTPPLFGGALTLHGLPKNQPGG

SEQ ID NO: 339067 - protein, 74 aa, Zea mays
  unsure (1)..(74): unsure at all Xaa locations
  Clone ID: MRT4577_72398C.1.pep
PTRTSSSLGERAMRXRRNXRFLLNFIGVTVELDHGGIATTQHFDEYLRGDEFQEEMGEMREVLESSRARKLRLN

SEQ ID NO: 339068 - protein, 97 aa, Zea mays
  unsure (1)..(97): unsure at all Xaa locations
  Clone ID: MRT4577_72399C.1.pep
GPGVPPPERHFPCPVPRLLYFLSAVSVPGSNRIEPIHLHFRRRRRRETPTPPIHHHVAPPPHPSPRLAQGYGGGRRGPCXVXXLCRAGRIVFLGGLV

SEQ ID NO: 339069 - protein, 55 aa, Zea mays
  Clone ID: MRT4577_7239C.1.pep
KWILTPHHITINYNWHKKTHSCSRKRTNTMHYWQRISHSLVHMQCTTTLNHFDAS

SEQ ID NO: 339070 - protein, 149 aa, Zea mays
  unsure (1)..(149): unsure at all Xaa locations
  Clone ID: MRT4577_723C.1.pep
MSTVLQRPTPGTVQCXGRKKTAEDVAYTKPGRGLIKVNGVPIELIRSEMLRLKAFQPILLAGRSRFKDIDMRIRVRRGGKTVHIYAIRQVAPKGVVDYYQKYVYHGAKKEVKDIFTRHYRTLLVCDPMLCKPNKIGVCSARVRIQNCYR

SEQ ID NO: 339071 - protein, 44 aa, Zea mays
  Clone ID: MRT4577_72400C.1.pep
VNLNGYVRNGRGGANLCCVITIYIYCEAVCVNASPSSILLYGRK

SEQ ID NO: 339072 - protein, 216 aa, Zea mays
  Clone ID: MRT4577_72401C.1.pep
MQAAVALSQGQASLLVRRLPRPYCYAGGPEPDDGVLLLRRRGVSLPLPRLRLRRACCSASLPVGTGAGAGSEHVPVFPRQKTWDPYKLLGVDHDASEEEINSARNFLLQQYAGYEENEEAIEGAYDKIMMKSYSHRKKSKINLKRKLIKQVEESPSWVKSLLGHFEVPSMDVVSKRFALFGFIAGWSIATSAETGPTFQLALALVSCIYFLNDKMK

SEQ ID NO: 339073 - protein, 109 aa, Zea mays
  unsure (1)..(109): unsure at all Xaa locations
  Clone ID: MRT4577_72402C.1.pep
SHPXGKTPGGVFNQFWFVPPREPVRCHDVCDMDGSKLACLIIYERKLLGCTYQXCRVRLWAVEISLNIPYGLGVSPKLNFLDELRQHMEDKPVKPDDITAYHSAVKTMA

SEQ ID NO: 339074 - protein, 106 aa, Zea mays
  unsure (1)..(106): unsure at all Xaa locations
  Clone ID: MRT4577_72403C.1.pep
RIRGRVDRELVYKRGFAKIKGQRIPITNNEMIEKKLGKYGIICTEDLVHCIYRADRRFKYAMNFLWPFKLNTPTGGWRKKTNHYVEGGDFGNRXEDTINKLLRKMV

SEQ ID NO: 339075 - protein, 262 aa, Zea mays
  unsure (1)..(262): unsure at all Xaa locations
  Clone ID: MRT4577_72404C.1.pep
MATTASPSTTTTPRSFLSSPSFSLRASKSNHLRTTRRLPVNVRCASSSPAADTSYTTKVSRNANIAKLQAGYLFPEIARRRAAHLLKHPDAKIISLGIGDTTEPIPEVITNAMAERAHALSTVDGYSGYGAEQGEKKLRAAIAATYYADLGIDETDIFVSDGAKCDISRLQVLFGSKVKIAVQDPSYPAYVDSSVIMGQTDLYQQDVQKYGNIEYMRCSPENGFFPDLSXVPRTDIIFFCSPNNPTGAAASRDQLTQLVKLQ

SEQ ID NO: 339076 - protein, 66 aa, Zea mays
  Clone ID: MRT4577_72405C.1.pep
ISMNQRWHSSFTFIPTVAILYAIAMAAGMNARPGERTLVFYAWAWVQVLFEETLPLLSLSPSLPCC

SEQ ID NO: 339077 - protein, 296 aa, Zea mays
  unsure (1)..(296): unsure at all Xaa locations
  Clone ID: MRT4577_72406C.1.pep
FQSFVIRIQQPRILVVLDFLLPVVEYFVPSLGSITGREESLDPXEDPLMRADDIILTEHVFLQKEDFIQLSPVRQLIVDGCDIDEFIYDGCGGTVSLCEEFDKKGQVYSGIIIIIGCGKRLRFKNVKIENGALLRRCVYLNMGSSYSISSEDDVEVSVLESSFTNDEDCLNLEEHKKRNLQNAIDGPTNQILNFTFEAQVVSPEFTFYDSSKLSMDDSLHIEKLLRAKMDFSFMYASKEKDIWARSVIKDLTIEAGSGLLVLEPVDVSWKYTSVNEKTNIVLVSTDVCIHLSLSVA

SEQ ID NO: 339078 - protein, 63 aa, Zea mays
  Clone ID: MRT4577_72407C.1.pep
YSINRGFGHFVTNMITQSITCQRAASLHVFSGSNQSLLLDCKASFQDRILTILISSGLPIMLC

SEQ ID NO: 339079 - protein, 75 aa, Zea mays
  Clone ID: MRT4577_72408C.1.pep
ASMNICNDKGSSFTGQHRSTFDATSPTGQTTVDGKNVFHNARYRLYHEQFSAFLANETELDAHKLTREDTVAHAY

SEQ ID NO: 339080 - protein, 76 aa, Zea mays
  unsure (1)..(76): unsure at all Xaa locations
  Clone ID: MRT4577_72409C.1.pep
GACPRXFAFVRCXXFLLVCWXXGGVLSWSPPXXPSXLFLCVCVCAXXCRPPPVLSRFWXGGLPFXXRVVXXLALPP

SEQ ID NO: 339081 - protein, 41 aa, Zea mays
  Clone ID: MRT4577_7240C.1.pep
PLTFSTIFTGFSTSVIFFTQTPLRVLSYQSKCILCIKYLKC

SEQ ID NO: 339082 - protein, 256 aa, Zea mays
  Clone ID: MRT4577_72410C.1.pep
SLASSTWYGNLTAPWCHPDHAAALLQLKRSFLFDYSTTTLASWEAGTDCCLWEGVGCDSVSGHVTVLDLGGRGLYSYSLDGALFNLTSLQRLDLSKNDFGGSPIPAAGFERLSVLTHLNLSYAGFYGHIPVVIGKLPSLISLDISSIHNIDGAEIDTLYNLFDSYNLLVLQEPSFETLLSNLTNLRELYLNGVDISSSGREDWGRTLGKYVPHLQVLSMEECRLVGPIHRHFLRLRSIEVINLKMNGISGAKKKKK

SEQ ID NO: 339083 - protein, 100 aa, Zea mays
  Clone ID: MRT4577_72411C.1.pep
VNNIHQKTPIHPQNPKKKTPRNTTKKQPKKNEPNQAKKPTKQAHSKATRITTTKPQQLNQQGNPTETDTIYPKKKNETEKKSLQRPPYKAGDRQKTPQST

SEQ ID NO: 339084 - protein, 183 aa, Zea mays
  Clone ID: MRT4577_72412C.1.pep
MDEATKKNVEATVLEILRGSDMESVTEYKVRAAASDRLGIDLSIPDRKLFVRGVVEEYLLSLSSKEEAKAEEEGVTGRESKGKEHEEEDEEDDDEEEDEGKGGGKREYDDQGDLILCRLSSKRRVTLSEFKGRSLVSIREFYVKDGKEMPSAKGISMTLEQWEAFCNAVPAIEDAIKKLEDSD

SEQ ID NO: 339085 - protein, 72 aa, Zea mays
  Clone ID: MRT4577_72413C.1.pep
VTCISAPCTLSRLASNGTALHFGRSGCKVCPGCIVSTLRLSPGRISGCLFENIICPDYIIQQITHYLLDYII

SEQ ID NO: 339086 - protein, 84 aa, Zea mays
  Clone ID: MRT4577_72414C.1.pep
TSPAYIHSPPPPPPSPPTLFPLRRNPIQYPSLHPWRGAAPPPGPSSPPSAARQRPRASTPRAAASRPPSPPPPPRSRPRGLWRR

SEQ ID NO: 339087 - protein, 122 aa, Zea mays
  Clone ID: MRT4577_72415C.1.pep
FFQGTIGAWKRCNQDILYNQNVQSVVPYHSRLAAKGYRALIYSGDHDRIVPFVGTQAWIRYLNLTVVDDWRPWYVGGQVAGFTRNSGNLTYATVKGAGHTAPEYKPTECQTMFRKWVSRDPL

SEQ ID NO: 339088 - protein, 105 aa, Zea mays
  unsure (1)..(105): unsure at all Xaa locations
  Clone ID: MRT4577_72416C.1.pep
AALPRPSPSRAELDNFLYRYFGDPGSDXIEADVPPDFEXEPRGFLPNVHRPKARTWALEVHALRKRLARKVAPDVAARTDRHTLMPLPGKAEGPGYKFRQAYYWD

SEQ ID NO: 339089 - protein, 73 aa, Zea mays
  Clone ID: MRT4577_72417C.1.pep
RGSEPSVSIRGKSLFSFLGGGVPCKLKSPLVLNGGGVFYLPLSRVGGPAPPRPVLFVLPWNFFQKNRRGWGSP

SEQ ID NO: 339090 - protein, 64 aa, Zea mays
  Clone ID: MRT4577_72418C.1.pep
SSFKSRYMCPTMWLAAEDVLVYSYSGHPSDLLCMVPDDFSSLSSRNLRDNPYSIFHSGPYSTSM

SEQ ID NO: 339091 - protein, 56 aa, Zea mays
  Clone ID: MRT4577_72419C.1.pep
DASDAIDEFVAASERKISIVWLSLAAPDNDIQLVLQVPEKDGVHLLGGGLESSAWA

SEQ ID NO: 339092 - protein, 69 aa, Zea mays
  unsure (1)..(69): unsure at all Xaa locations
  Clone ID: MRT4577_7241C.1.pep
MGSTAGDEAAVVDEEACMXGMQLASWSMVAMTLKNAMELGVLEVLEKEAGSGKAALAADEVVARMACAP

SEQ ID NO: 339093 - protein, 100 aa, Zea mays
  Clone ID: MRT4577_72420C.1.pep
HTHTPMVMVMEGGRTEGDELIADYVDCLMSLDTNTRPVHSDGLILGAPGGGGGTVDAGTEPDAMRDIPSSEDPNEPVLGMTFESDEAAKAFYNDYAKRLG

SEQ ID NO: 339094 - protein, 135 aa, Zea mays
  unsure (1)..(135): unsure at all Xaa locations
  Clone ID: MRT4577_72421C.1.pep
RAGKGEDQRVRQRDGNPPGQQDNWLPGSSSSGLPGTGRPASTRSERAGATGRGGAGPSTGGQAHRTGPSTGPGDNNNGSXTRGGGQGGGGGGPGDGRGRXRIRGNGKPGRGRERPTGGEPRNKKGGRRQNKQRGR

SEQ ID NO: 339095 - protein, 68 aa, Zea mays
  Clone ID: MRT4577_72422C.1.pep
GIEQSCQFYVLCYPYQIYLYASFSKWYHINTRALIAPLNQSRVLLIWLLQLMFIQVDKRSEIQRDVHP

SEQ ID NO: 339096 - protein, 107 aa, Zea mays
  unsure (1)..(107): unsure at all Xaa locations
  Clone ID: MRT4577_72423C.1.pep
CQRRLDRSHSDARHFSQHSAKDLRFKXXTSLXTXTGXTITLEVESSDTIDNVNANDSDHECDPPXQHRLIFAGKQLEDQRTLADYNIQXESTLQLVLRLSGGMQIFV

SEQ ID NO: 339097 - protein, 66 aa, Zea mays
  Clone ID: MRT4577_72424C.1.pep
LKKKFMVQTFAQRFQNSDAMKLGASVLQGRHSSANLRYKINPYEPPLFLTESGTTSCLTQAHVATF

SEQ ID NO: 339098 - protein, 122 aa, Zea mays
  unsure (1)..(122): unsure at all Xaa locations
  Clone ID: MRT4577_72425C.1.pep
NGSLFHYTELEAFTWGSYLQLQRIPFRQIHDAYRQHFFPFHPMAAVNSPIYLQKQHVXPFSLVPGVSLLPSSXQPQLLPFPWPGERNADALLHLHQWLPFFXRGFTNLTVFYHRPMGGGALF

SEQ ID NO: 339099 - protein, 58 aa, Zea mays
  Clone ID: MRT4577_72426C.1.pep
YSAPNAIPCINLDDSLQLLCVLMHSISTSVHCTVYTLVGIDCRWHRCCLSDTPARSCS

SEQ ID NO: 339100 - protein, 55 aa, Zea mays
  Clone ID: MRT4577_72427C.1.pep
FIFFHFFFLFNRNTLNNGWSAVRQVWSFSSTKQVLAPSMPNNHGFRLLTSRLRCI

SEQ ID NO: 339101 - protein, 43 aa, Zea mays
  Clone ID: MRT4577_72428C.1.pep
KYALKMVGIKCKIFCSFNYFSILFKSEHFFLNSNTTGKRILKN

SEQ ID NO: 339102 - protein, 106 aa, Zea mays
  Clone ID: MRT4577_72429C.1.pep
RCDQPVLPASWAWGSSWRGTSGTTRRLLCRKGVNSEAKDLIKIKNFLMDPDDALKNKDLYYATYFLLDNLSLMYEAPCNMIKMAKEQTAVVKSLQNRECAPTRHTS

SEQ ID NO: 339103 - protein, 164 aa, Zea mays
  Clone ID: MRT4577_7242C.1.pep
IHGSKAKRSRLPDFAGSLADQIWDLRLRDHDSAVRMPVRIFFVHQEISVCSFFFRKLNGAVAGRSVNTTTRRAACPLPVAISIHSSSAPCRYQLPEATISPAHNRKATWPPQMKSISPLTWRNQGLTTTGETSRGRGRRRHAGTGPGRGITPCLTHKGVAAKYL

SEQ ID NO: 339104 - protein, 41 aa, Zea mays
  Clone ID: MRT4577_72430C.1.pep
TLLNSGHPLARSLRYPWVAQPSKALPNPPFPNLFKSSRRLL

SEQ ID NO: 339105 - protein, 203 aa, Zea mays
  unsure (1)..(203): unsure at all Xaa locations
  Clone ID: MRT4577_72431C.1.pep
NTSAVVLSTCSSKYYNKKPNMSNIGINGFGRIGRLVLRASLEKGAKVVAINDPFIGIEYMVYLFKYDSTHGRFKGEVSVDGDVLIVNGNKIKVFSERDPKAIQWGSAGAEYVVESTGVFTTIEKASAHLEGGAKKVVISAPSADAPMFVVGVNLDAYNPSFKGVSNASCTTNCLAPLAKVIHDNFGIIEGLMTXVHATTASKT

SEQ ID NO: 339106 - protein, 92 aa, Zea mays
  Clone ID: MRT4577_72432C.1.pep
TGHASCCCGVPLLHLSAYPRHQQLLPGKCLRILKPDAQLQRHQRPLNREVTRYPQHQHLLRYNQLRRIEPRLLICSIKYDYHLSSQLHQAVL

SEQ ID NO: 339107 - protein, 60 aa, Zea mays
  unsure (1)..(60): unsure at all Xaa locations
  Clone ID: MRT4577_72433C.1.pep
MAQSNNHAADNRSLSAHQNGVPKPPRHRQTXTXGMDSKLLRKLRYSRKGHKNSGEAAPEE

SEQ ID NO: 339108 - protein, 86 aa, Zea mays
  Clone ID: MRT4577_72435C.1.pep
THLKPTQATLVFPPTAHKRGPFQRRTPQSIPIISTSAVSHWTSISGRAHAPKPWHRTRRASSRLGHRRRTSAHVPHAPSSIFQQHT

SEQ ID NO: 339109 - protein, 64 aa, Zea mays
  Clone ID: MRT4577_72436C.1.pep
WQSGLFSPVPLDPAPRCPVLLKKKKNPKKKKKKKKKKKKKKKKKKKKKKKKKNKKKKKKKKKTR

SEQ ID NO: 339110 - protein, 132 aa, Zea mays
  Clone ID: MRT4577_72437C.1.pep
PHKNFKTSIKKSSLHGEEQTPTSANFTVSNKQKKFKISRKVIKPFPRKKTPKVPTLFFSLEQQQAFWFPSTKINPVSFKRAKEVLSLTIPSQNEEGTVVNNPGSRLFDSLLACPQKSTKTLAPRKSGRTPGS

SEQ ID NO: 339111 - protein, 40 aa, Zea mays
  Clone ID: MRT4577_72438C.1.pep
NGGGSPNVFSFHVTLLQTKIKLQQYIILVYLFMACIELNT

SEQ ID NO: 339112 - protein, 367 aa, Zea mays
  unsure (1)..(367): unsure at all Xaa locations
  Clone ID: MRT4577_72439C.1.pep
AGLIEATARRAGPIPRSLAQNFCMTDWXAKLKHWKAEFVTTLQHYWLGTKLLWADVRISSRLLVKLAGGKSLSRRERQQLTRTTADIFRLVPFAVFIVVPFMEFLLPVFLKLFPNMLPSTFQDKMKEEEALKRKLKARMEYAKFLQDTAKEMAKEVQTSRSGDIKQTAEDLDEFLNKVRRGERVSNDEILSFAKLFNDELTLDNMSRSRLVNMCKYMGIRPFGTDHYLRFMLRKKLQDIKNDDKMIQAEGVESLSEEELRQACRERGHLGLLSTEEMRQQLRDWLDLSLNHAVPSSLLILSRAFTVSGKVKPEEAVVATLSSLPDEVVDTVGTVLPSEDSVSERRRKLEFLEMQEELIKEEEKRKEK

SEQ ID NO: 339113 - protein, 77 aa, Zea mays
  Clone ID: MRT4577_7243C.1.pep
VLYYKWPFQQLQHSEDRTMTFNRRVVAQYLQQYFQVNSLFVVVVNYGFHFHNHELKLHELEVLTSKSHSPNRFGSCL

SEQ ID NO: 339114 - protein, 66 aa, Zea mays
  unsure (1)..(66): unsure at all Xaa locations
  Clone ID: MRT4577_72440C.1.pep
FXWIYKSVFRFFPPSHDRKGYFIHEGRSLPAAGTFKTTYRATIFQTVAYSMRLIGTKADWTTIDLP

SEQ ID NO: 339115 - protein, 94 aa, Zea mays
  unsure (1)..(94): unsure at all Xaa locations
  Clone ID: MRT4577_72441C.1.pep
CISRGTVGPSPRSGEAETSPEAEVEAEPWGRARRRPPSEAEVETEPXGRARRRPPPEVEVEAKPWGGDLLPRPRPKVGRGGASCCVRGRTWLAD

SEQ ID NO: 339116 - protein, 37 aa, Zea mays
  Clone ID: MRT4577_72442C.1.pep
NPCLECSMPFLKRVSPGSNGVGPCSLYCELLPPPCGS

SEQ ID NO: 339117 - protein, 64 aa, Zea mays
  Clone ID: MRT4577_72443C.1.pep
RRVGTGPAGIGSLHRVSTGELRLTDCAACRLARNQLWPCVRFELAHAAAGFVGSFGPVSPCAIV

SEQ ID NO: 339118 - protein, 87 aa, Zea mays
  Clone ID: MRT4577_72444C.1.pep
FGTAPTPCSLFPRRHPSRESTEPNEITLSSPTGNGVGAGAPVEAGSVGYSARRIPHTDVCGRLQLNSVPPCADWHDTTRGGLRDSTG

SEQ ID NO: 339119 - protein, 37 aa, Zea mays
  Clone ID: MRT4577_72445C.1.pep
SICHCKEPSHEKDHAKWPPQRVLEQYVLQREVRWQHS

SEQ ID NO: 339120 - protein, 37 aa, Zea mays
  Clone ID: MRT4577_72446C.1.pep
QSTSLCPTISNTLSLSSIVQVNRYLVLERLTTNTTCG

SEQ ID NO: 339121 - protein, 103 aa, Zea mays
  Clone ID: MRT4577_72447C.1.pep
RRAPAPTSPCSAHRPPGEQHRWPLRASLGQLKNLDTLTTTRRCSPARPHQSSASSCGVRCGRPRLSYAATWRPRCRSRLRPVRHARRHVLSQPPHPGTTVIAP

SEQ ID NO: 339122 - protein, 159 aa, Zea mays
  unsure (1)..(159): unsure at all Xaa locations
  Clone ID: MRT4577_72448C.1.pep
RPGRNLGSGETRFVQFKTRRGGREAXQAVRSHGALPRPPLIVAGGRRRGAVARSRVRPRSGVLSMSXSLVSEFRRRTKRSICGAQQEARRLLQGRQQQVAVHHQVRAEREEGRRAGHMAGPRGHGRLRLRDRRRGGHRQGLPSGRTVRNIDRSEERTRV

SEQ ID NO: 339123 - protein, 212 aa, Zea mays
  unsure (1)..(212): unsure at all Xaa locations
  Clone ID: MRT4577_72449C.1.pep
VSRSSRRPRRPAGGHSLRLAGFYPCRHKTQARGRXEGSFSSRXRGGREAXQAVRSHGALPRPPLIVAGGRRRGAVARSRVRPRICGAQQEARLLQGRQRQVAVHHQVRAEREEGRRGGHMAGPRGHGRLRLRDRRRGGHRQGLPSELGRGYSGADAGAGRVGARRRPRRXLPAAVGIGRRHASQTTDGTHELRARVERRLPTRHQLLCCNGW

SEQ ID NO: 339124 - protein, 66 aa, Zea mays
  Clone ID: MRT4577_7244C.1.pep
LGVTVTVLAPVPYRPTAVAAGANKHAAASCREEEQSDTGSSSSVVDASPAVGVGFDLNMPPPAEVA

SEQ ID NO: 339125 - protein, 110 aa, Zea mays
  unsure (1)..(110): unsure at all Xaa locations
  Clone ID: MRT4577_72450C.1.pep
RRTKRSISGAHKRRVVSCRAVSSRSLSIIRCEQSAKKGGGPDTWLGRAAMVGFASAIAVEVATGKGTXVVGGVQNLGVGTPAPTLALAVSGLVVGLAVFFLLQSGGGTRD

SEQ ID NO: 339126 - protein, 194 aa, Zea mays
  unsure (1)..(194): unsure at all Xaa locations
  Clone ID: MRT4577_72451C.1.pep
SYYPCRQKPRTRGRGRRFVQFKTRRGGRERXAQAVRSHXGALPRPPLVAGGRRRGAVARSRVRPRICGAQQEARLLQGRQQQVAVHHQVRAEREERRRAGHMAGPRGHGRLRLRDRRRGGHRQGLPSELGRGYSGADAGAGRVGARRRPRRLLPAAVGIGRRHASLTTDGTHELRARVERRLPTRHQLLCCNGW

SEQ ID NO: 339127 - protein, 120 aa, Zea mays
  unsure (1)..(120): unsure at all Xaa locations
  Clone ID: MRT4577_72452C.1.pep
MLLPPLTKSSWGEGNLRFCGRAMAAADVEYRCXYVGGLAWDTSNETLENAFASYCEILDWQVITNLXTTRSQGFRLVTFYYENYMLDSIXTLNGKVLHGLHITVXNQAQTRVASGGGGGY

SEQ ID NO: 339128 - protein, 81 aa, Zea mays
  Clone ID: MRT4577_72453C.1.pep
SIISCVWVRCGSHSVVQDASCLWCFNSASRPSVLPNRLRLGSDCLSPSSQACCGLVATRYTCVCFGPFDTRPSHNKSPLSS

SEQ ID NO: 339129 - protein, 179 aa, Zea mays
  unsure (1)..(179): unsure at all Xaa locations
  Clone ID: MRT4577_72454C.1.pep
GPSRPAGPRPVPQKKKRTRGRGGRFVQFKTRRGGXRGAQAVRSHGALPRPPLIVAGGRRRGAVARSRVRPRICGAQQEARLLQGRQQQVAVHHQVRAEREEGRRAGHMAGPRGHGRLRLRDRRRGGHRQGLPSELGRGYSGADAGAGRVGARRRPRRLLPAAVGRRHARLTTDGTHELS

SEQ ID NO: 339130 - protein, 210 aa, Zea mays
  Clone ID: MRT4577_72455C.1.pep
MSFRAREMYKKVVRRVGGEGKLPAELMKSVKDMLPDSNVIMGRAKRGIFAGRHIRFGNKVSEDGGNKSRRSWKPNVQEKRLFSYIHDRHIRVKVTTHALRCIDKAGGIDEYLLKTPYNKMYTEMGIVWKAKIEKMYSDLGEMEVGFFPPEEEAKVKEGFDEVRAAKKDFRREAKRALAKQRQLEASSAGDDQAGEVTHKKEKVSAAAAEL

SEQ ID NO: 339131 - protein, 77 aa, Zea mays
  Clone ID: MRT4577_72456C.1.pep
PGLAFTVLPPRAFYPVHWSKIGGLFVAPKDRKGERCVKAKVENIKGQSFGIHLWNRESSRMEMEVGSVIETLISDSC

SEQ ID NO: 339132 - protein, 116 aa, Zea mays
  Clone ID: MRT4577_72457C.1.pep
NPGGKKTPPFWPNGGNFRGQRPLKIWICLCRGRGKKKPPGFGGKKKIPGRPPFSTQKKRNLHKTAGGLSCRGQSGGGGPTPCFCRGQGWGRGGFWGGPCRGKWPGQKIPTGKTGGG

SEQ ID NO: 339133 - protein, 120 aa, Zea mays
  Clone ID: MRT4577_72458C.1.pep
THHSQLIGGVASLILELVEVLELPEIRLDTVLLLLYLSIDCTKGNLHQADAQGLQLCRTRRTRSLGRQRLILYSSKLGNESRSWRGSVRGDFPVATTRAAAQRRGRGMAPCGCTSASEKG

SEQ ID NO: 339134 - protein, 71 aa, Zea mays
  Clone ID: MRT4577_72459C.1.pep
LNKYFLTFPPWGCPKKQPGFEFLNKKKTMQGTKNGFIPSNKNYFYKPGTLTHYFQTLLKPLWVFFQPLSVT

SEQ ID NO: 339135 - protein, 74 aa, Zea mays
  unsure (1)..(74): unsure at all Xaa locations
  Clone ID: MRT4577_7245C.1.pep
LPSILYFVSSYIFXXXGRPSPTKCLCHDKQCHQLAPDLDRGLAGYASPLRRQRSSITGLDPCEWGAQRGSFSRS

SEQ ID NO: 339136 - protein, 73 aa, Zea mays
  Clone ID: MRT4577_72460C.1.pep
RTRGRTRGRTRGRTRGAGESGGGGAGAGAEAGGEPAQERPPAVCAVQPYGEQERRRHADHRLATSYLFDGCIT

SEQ ID NO: 339137 - protein, 157 aa, Zea mays
  unsure (1)..(157): unsure at all Xaa locations
  Clone ID: MRT4577_72461C.1.pep
TRALTVTILSQCSQAPIAXYLPRXLTRRAISVCEIIILKPYMIQHAIXTSILPLSPLLIQKSSSLXITHIHXASIXEQNIKEQQLQQLELEKLDNYCNKQNIIAYNQINILNYTNYLEQQQITFXRIPNTYPXKSISLKQLASLNSPAYTQHSQLLP

SEQ ID NO: 339138 - protein, 92 aa, Zea mays
  unsure (1)..(92): unsure at all Xaa locations
  Clone ID: MRT4577_72462C.1.pep
GNSMRPRNHQNSVRVANLSEDTREPDPPEVFRAFGPVNRVYVPVDXKTGSNKGFGFFNLFPKKDPEKAINKVHGYGYFTPILPVEWGTPRPH

SEQ ID NO: 339139 - protein, 375 aa, Zea mays
  unsure (1)..(375): unsure at all Xaa locations
  Clone ID: MRT4577_72463C.1.pep
MDEVPGRSSSVRATRSIFGESIGGRKPEMNRARNVLGQENLRPEMKQLAKSSIDKLSERKAAVDRERAGAESELSRARAMAKELERQIEQAKARASSKRSEPHTMRPATRASKTGHGAPRSQGERRDAAEYAEVSRELHRARQELLRLRLEVKSAAEAKAKAESDIVSSAINIQSNLLAADEMKRLVDEANEEHVLVELARIEAERERREXIDAQRCAEAERFAREMEATRAKIEALRKDLSRAREMEAKLAVTNADVEVLQAEMELVRAMERNSVKNDGTADVEAEDKALLRTAEAELDAAKKELDSIKAGSFQFMTSMDSARTEIMRVSEEVNRLKAHDKNADAQVQQLNAKLLNARARLEALTETSERSKAI

SEQ ID NO: 339140 - protein, 79 aa, Zea mays
  Clone ID: MRT4577_72464C.1.pep
VNPQKPPLVNKFGSNKTLWKEKFPPPMVKMGRIPVQPGTFGKVLFNSGVVNPSLYFFFSPVELGLRAPPPFGKKGYPPS

SEQ ID NO: 339141 - protein, 385 aa, Zea mays
  Clone ID: MRT4577_72465C.1.pep
MASTSLATLPSQLASPVRLRRRAALSSASRPHFLLHRATKGGSQCRLAVTCNAQAVAPTSFAQGTPVRPTSILVVGATGTLGRQVVRRALDEGYDVRCLVRPRPAPADFLRDWGATVVNADLSKPETIPATLVGIHAVIDCATGRPEEPIRTVDWEGKVALIQCAKAMGIQKYVFYSIHNCDKHPEVPLMEIKYCTEKFIQDSGLDYIIIRLCGFMQGLIGQYAVPILEEKSVWGTDAPTRIAYMDTQDVARLTFIAMRNEKANKKLMTFAGPRAWTTQEVITLCERLAGQDANVTTVPVAVLRFTRQLTRCFQWTNDVADRLAFSEVLSSDTVFSAPMNETYQLLGVDGNDILSLEKYLQDYFTNILKKLKDLKAQSKQTDIFF

SEQ ID NO: 339142 - protein, 137 aa, Zea mays
  unsure (1)..(137): unsure at all Xaa locations
  Clone ID: MRT4577_72466C.1.pep
QGTPVRXTSILVVGATGTLGRQVVRRALDEGYXVRCLVRPRPAPADFFRDWGATVVNXICLGCRCYCSSQSVQLCLLLLLVVILCALHWHWXADLSKPETIPATLVGIHAVIDCATGRPEEPIRTVCYDHFSEYSNK

SEQ ID NO: 339143 - protein, 98 aa, Zea mays
  unsure (1)..(98): unsure at all Xaa locations
  Clone ID: MRT4577_72467C.1.pep
RSRIHGSTHASTVHSCIEWLDAQRTTSVLYVSFWSLSAMDXPTELREVEWGLAECGHPFLWVVRRNMVRGCDVYTARHLPDGFQDPVKGIGVVVRWAP

SEQ ID NO: 339144 - protein, 130 aa, Zea mays
  unsure (1)..(130): unsure at all Xaa locations
  Clone ID: MRT4577_72468C.1.pep
MPAMXRDRPYYDPMGVNVNAAINGFKKVCHIXVKLWHAHKNAWNLDAILMNHKLGEDHEVLLDTDKNELCNYYGKEDLAHDNIMYPDGDVMMLLGNHYLEDHAWHEVLIYLAIEDADENSNRKRAEQHIQ

SEQ ID NO: 339145 - protein, 203 aa, Zea mays
  Clone ID: MRT4577_72469C.1.pep
MPSECQIPFATAYRSACRWDHLEWGGKTVQMAGEEAFDGALRTWARWIDYNIDPSRTRVFFRSVSPEHKRSISRTTNIQSNYISQLTTFLLSCSVNWCYNQTAPISRGNIAPWFPQSLIDIIEKNIKRMKTPIVYMNITRLSELRIDAHPSIYTITHEGKPLSKEQRQQPLTYSDCSHWCLPGLPDTWNMLLFNFLIRPLPST

SEQ ID NO: 339146 - protein, 120 aa, Zea mays
  Clone ID: MRT4577_7246C.1.pep
ILMKEGISPEVQCIICRRLHHVGHVTSLPTTSSHEGLRTSHMDVPPPGRRHDPYELQGHQAQEDREPAQEREGPVLHAYRAEVTTRQGDQTCSMSGTTQSGYSECSWPNCSCVYTAVTAA

SEQ ID NO: 339147 - protein, 56 aa, Zea mays
  Clone ID: MRT4577_72470C.1.pep
MAKLKNHRGQNQLFKGPKKGIKKPKGPRQASPKGRGPKFFRNLGYFRKGPKKSGEV

SEQ ID NO: 339148 - protein, 98 aa, Zea mays
  unsure (1)..(98): unsure at all Xaa locations
  Clone ID: MRT4577_72471C.1.pep
GSSXAAAPIXRTVTPTFRXRSSASTLPLLPRPTAVPAKRSGRLRSLGLGGRRAARAGRLDFCGRGVTXXRISPAPRLGEVRSGGASILSXSPFLGPVT

SEQ ID NO: 339149 - protein, 78 aa, Zea mays
  Clone ID: MRT4577_72472C.1.pep
MALSLRKKQLDLITRMLHLNQQQPSPDGGGGGEGDEEAYKILVMDGPCISLLSPVLRVGDLRKHGVTLHLNIDNARFH

SEQ ID NO: 339150 - protein, 50 aa, Zea mays
  Clone ID: MRT4577_72473C.1.pep
GVCPGYKYFKAKKLLKPHLTSFGKAKDCSGFQMKSLGRWFKSGRSKLFLK

SEQ ID NO: 339151 - protein, 135 aa, Zea mays
  unsure (1)..(135): unsure at all Xaa locations
  Clone ID: MRT4577_72474C.1.pep
FATPSPQIIHALHXSLTQILTKPLSERFQGHIEVSNKVKKGXVTDLGLKVVATKPEDQAHAMTAIYLPDGIGAADVLPKLAAKGVVFAGGIHKAIAPKYIRFGHMGVSALDPSRNHIEKALSALKDSLFEVGYKA

SEQ ID NO: 339152 - protein, 96 aa, Zea mays
  Clone ID: MRT4577_72475C.1.pep
RKTGYTLSPAVLPMVADNHHEFMIWMRGSHPNKAQSPPKRFMHKNSAKPRGSQRGRSFTCTNNKLSERAKRARPNLPSQTAHGQAKRTSKSDPIIS

SEQ ID NO: 339153 - protein, 189 aa, Zea mays
  unsure (1)..(189): unsure at all Xaa locations
  Clone ID: MRT4577_72476C.1.pep
PAGYAQYLPQDAYLMNTNQLMDRMAMTMGGRVSEELHFPTVTTGASDDFKKVSQMARNMVTQWGMSEIVGPVHFENDPNRMQKPFAESTAQQIDLEVSRIVEEAYKRCKDLLTEKKNEVGLIAQELLKKEVLVRDDMVRILGKRPFGDNEDFEKYFGGSKPESTPPPFPEETDSPNEPPTPSPAXKKVE

SEQ ID NO: 339154 - protein, 61 aa, Zea mays
  Clone ID: MRT4577_72477C.1.pep
LSIPGTATNGVGRSIVSANLRACRCGGWERGRDSAGSALESFLIPSTMLLRKIGPISVWFL

SEQ ID NO: 339155 - protein, 190 aa, Zea mays
  unsure (1)..(190): unsure at all Xaa locations
  Clone ID: MRT4577_72478C.1.pep
METANMGSGACGGLGCCAIWIAVGGRQDFTVKLVRRNSAIPPFGEALSGVKIILSEYYDFVTDDVYASWVNTSNVHGMLLDIAITDQPSCASAQSQENKDTYACNSESICNDVLPPAVSQGAYNCLCPGRKKGNPYIEDGCIAYYNPETPNRNCMRLCGNISVPFPFXIERGCSAXDDPTTHCTNNNTLS

SEQ ID NO: 339156 - protein, 89 aa, Zea mays
  Clone ID: MRT4577_72479C.1.pep
MAKRLLPSLNRVLVEKLVQPKKTAGGILLPETSKQLNAAKVVAVGPGERDKAGNLIPVALKEGDTVLLPEYGGSEVKLAADKESRASGW

SEQ ID NO: 339157 - protein, 96 aa, Zea mays
  unsure (1)..(96): unsure at all Xaa locations
  Clone ID: MRT4577_7247C.1.pep
XKQPLITKYSHCYKRSDSGGGEWEKVPIWNVLYVQLRWELFTPLHNSKVQCIHIFKVPESPREIVPVKETPMAAPLEIEIPPTKGIVHPAIPSFIY

SEQ ID NO: 339158 - protein, 98 aa, Zea mays
  Clone ID: MRT4577_72480C.1.pep
MAKRLLPSLNRVLVEKLVQPKKTAGGILLPETSKQLNAAKVVAVGPGERDKAGNLIPVALKEGDTVLLPEYGGTEVKLAADKEYLLFREHDILGTLVD

SEQ ID NO: 339159 - protein, 98 aa, Zea mays
  Clone ID: MRT4577_72481C.1.pep
MAKRLLPSLNRVLVEKLVQPKKTAGGILLPETSKQLNAAKVVAVGPGERDKAGNLIPVALKEGDTVLLPEYGGSEVKLAADKEYLLFREDDILGTLVD

SEQ ID NO: 339160 - protein, 545 aa, Zea mays
  unsure (1)..(545): unsure at all Xaa locations
  Clone ID: MRT4577_72482C.1.pep
MEKRKRILELRDRLDRTLAMPDLAEEASLRALVKKQILASSLPGSDQGDIDLIAETRAKEVSEFLEMLDTSRDGRSSKVHGLPQKEWKVKQDTDQLRVMYREGPEGTPFHTLLAEGFADGPIDVCTCVSWESTLYKKWFPQYNLPTFRIDQSGCLKKVRIGEEICMVRVKVPWPVSEREAILHYFELEYLKEDVVIVIMKTLSDLDAIDVRTXDLVXGIPEAGDTVRIDVFGGFVLQRITKERSFFRAIANMDIKLDFVPPWLINFMSRQLIGSGHKLYQKAVSTVASHDDDYRKALRGPLYVRIREYQDSDDKAKVAATEENATEAPPDNATTQNRLSLTNTVSNSEIVEESEQNTSVTVDSLPTSQQPYVPVEQAWQVGNRPYTSPEVERALCILDTSIALLRGDDKAGNVTTLQNLLSYDASLEASTAAGSVTCQTNVLNADSLPNGHPVAAAPQDSREKASDSAAEEEDAGDENSLKNPTASTVTKSVSMTLRSAIRVHGEESLDTDGFFHQNGFSNSKESRRARKSKKRWPCCLIPTTMG

SEQ ID NO: 339161 - protein, 170 aa, Zea mays
  unsure (1)..(170): unsure at all Xaa locations
  Clone ID: MRT4577_72483C.1.pep
AGRVADSISLLPVYPPFSLLYRVLPQPKSETAVGAPWRCHALVAGGKGSAVDYYRTYAANHSEVWGTNQETYMICFKGQKFHGASALVGKYGSIPFPVREDSIVAYDCWSGGTQVGVLDFVSXSITLGTEETPFKISQVXRLXPRAVNFFVPDDVSRLNYGYYAEMSCAE

SEQ ID NO: 339162 - protein, 42 aa, Zea mays
  unsure (1)..(42): unsure at all Xaa locations
  Clone ID: MRT4577_72484C.1.pep
CAGKDLGANIGKLVHWFRCRRAHLKSRWTSRWRSCXRPARVG

SEQ ID NO: 339163 - protein, 137 aa, Zea mays
  unsure (1)..(137): unsure at all Xaa locations
  Clone ID: MRT4577_72485C.1.pep
SSSSSSRSSRRRLPPAPTXTPTPPPPPPPVVNPPPSSTPCPPPPYSPSTPTGKCPVDTLKLLACVDALNGLAHAVVGTNASDTCCPLLSGVADLDAALCLCTTIKAKALSVSLVLPVAISVLVNECGKHVPSSFQCP

SEQ ID NO: 339164 - protein, 156 aa, Zea mays
  Clone ID: MRT4577_72486C.1.pep
MATNSHRIIAPGLLLVAATTLVVVVVAQLAAPAAACPYCPTPTPPPPPVVNPPPSSTPCPPPPYSPSTPTGKCPVDTLKLLACVDALNGLAHAVVGTNASDTCCPLLSGVADLDAALCLCTTIKAKALSVSLVLPVAISVLVNECGKHVPSSFQCP

SEQ ID NO: 339165 - protein, 46 aa, Zea mays
  Clone ID: MRT4577_72487C.1.pep
ASTKNVREFQYSSSTSPLYIRYSLCINKQYLCHALFTTVTSTPCNR

SEQ ID NO: 339166 - protein, 140 aa, Zea mays
  unsure (1)..(140): unsure at all Xaa locations
  Clone ID: MRT4577_72488C.1.pep
SSSSSRSSRRRLPPAPTXPTPTPPPPPPPPPPVVNPPPSSTPCPPPPYSPSTPTGKCPVDTLKLLACVDALNGLVHAVVGTNASDTCCPLLSGVADLDAALCLCTTIKAKALSVSLVLPVAISVLVNECGKHVPSSFQCP

SEQ ID NO: 339167 - protein, 137 aa, Zea mays; identical to SEQ ID NO: 339163
  unsure (1)..(137): unsure at all Xaa locations
  Clone ID: MRT4577_72489C.1.pep

SEQ ID NO: 339168 - protein, 148 aa, Zea mays
  Clone ID: MRT4577_7248C.1.pep
MNLASVVPCAQAFTVLMTPAAGSHRRVHTHAAASKSGLACRVARSGGARWLPVSCAAGGGAVGDTFVTEDTTNVKFPREVTVPGYTHPLVAVGTGYREKFFVKVYAAAFYVDYSLRLDTEQWKAKTGIESFDSSSVFDSIFKDLHFGR

SEQ ID NO: 339169 - protein, 142 aa, Zea mays
  unsure (1)..(142): unsure at all Xaa locations
  Clone ID: MRT4577_72490C.1.pep
MSLARCTNXYRPFGXDLRHCFDTLFRWIAPPAIRMNSETAALSSARIHWKDTRXAHVFKAELTRMKKEEVKTEVXYGYVLIITGQRRTETEDEDDXRARVERIRGAFVWRLTLTENTKELHLKVGLXNGPLTMTRTKTVEKK

SEQ ID NO: 339170 - protein, 58 aa, Zea mays
  Clone ID: MRT4577_72491C.1.pep
EHQQECMYINLNPSSKLKICCSGMRKLIISIGLSHWVMVCTRMDIFQELTNCSFFWVS

SEQ ID NO: 339171 - protein, 144 aa, Zea mays
  Clone ID: MRT4577_72492C.1.pep
MPKNKGKGGKNRKRGKNEADDDKRELVFKEDGQEYAQVTRMLGNGRCEAICVDGTRRLCHIRGKMHKKVWIAAGDIVLVGLRDYQDDKADVILKYMNDEARLLKAYGELPETLRLNEGVDVDGPEDGEEGSDYIQFEDEDIDKI

SEQ ID NO: 339172 - protein, 142 aa, Zea mays
  Clone ID: MRT4577_72493C.1.pep
MPKNKGKGGKNRKRGKNEADDEKRELVFKEDGQEYAQVTRMLGNGRCEALCIDGTKRLCHIRGKMHKKVWIAAGDIVLVGLRDYQDDKADVILKYMNDEARLLKAYGEIPDNVRLNEGVVDEEEAGAQDDYIQFEDEDIDKI

SEQ ID NO: 339173 - protein, 144 aa, Zea mays
  Clone ID: MRT4577_72494C.1.pep
MPKNKGKGGKNRKRGKNEADDDKRELVFKEDGQEYAQVTRMLGNGRCEAICVDGTKRLCHIRGKMHKKVWIAAGDIVLVGLRDYQDDKADVILKYMNDEARLLKAYGELPDTLRLNEGVDVDGPEEGEGDSDYIQFEDEDIDKI

SEQ ID NO: 339174 - protein, 139 aa, Zea mays
  Clone ID: MRT4577_72495C.1.pep
QVLVIDTSDGGFPLLLGYQKIPLFFPFWSFGLGFSVPLFFLGCSFFTRFPFFFSPFLPFFFFLYRWILFSVVPPSLYSFRVGFSVFCVPVLVWGRLFPVFFLKRFFPPPPPPPNFYVSPLSLPLTIFSFLFQTSPNIYF

SEQ ID NO: 339175 - protein, 109 aa, Zea mays
  Clone ID: MRT4577_72496C.1.pep
RPRCFSPNIMRGGPLGVSTSPKKSVVPPPPLGPKKRPKTWGLLLASFLAKVGRDFCLGVYPGFFSQQIGPLFCFPRLSRPPTFLAKAPMPLGFWALFPRNGPNFGAFLF

SEQ ID NO: 339176 - protein, 116 aa, Zea mays
  Clone ID: MRT4577_72497C.1.pep
VLLFSRCLHSHIFTQSSCLAPSFTTLGSELIIRCIILPLFCNLPLSWFLPKGNLLCFFLLFCPLYITIGRYIHSILIFIITMHIFLVVLPPPSASSSCITSYIDTSSSIEEFLLIS

SEQ ID NO: 339177 - protein, 194 aa, Zea mays
  unsure (1)..(194): unsure at all Xaa locations
  Clone ID: MRT4577_72498C.1.pep
MECLFGITGNGFTLLSADTVSARSIVVMKGTEDKSRQLNAHTVLLYSGEPGDTVNFAEYIQRNIKLYGIRNGIELSPKATATFTRRELADSLRSRHPYSVNLIVGGYDVKKQKSELYWIDYLGAMASLPFCAQGYGAYFCTSLMDRHYKEDMSVDEAKTLMKMCIQELKTRFIVNLPXFKTTLIDKDGVHSIEL

SEQ ID NO: 339178 - protein, 68 aa, Zea mays
  Clone ID: MRT4577_72499C.1.pep
ERPRLAKKNKNKSQEHRKRPNTKTKTINNKKKKKKKKKKNRGGPFKKPKFTYPALQRHTFMMQSPKLN

SEQ ID NO: 339179 - protein, 74 aa, Zea mays
  Clone ID: MRT4577_7249C.1.pep
PTRAPTRPTSCLIPPWLALTPPVAPRQAVHSAWSLLWLAIVFPSSNLARPKLNFIHGHYLFFLDGLKRPRLRWF

SEQ ID NO: 339180 - protein, 228 aa, Zea mays
  Clone ID: MRT4577_724C.1.pep
MHSKSPGRRPDGTGCVRRVTEAIWNRASGRTPLDWETRSAIALAAARGVAHIHSTGPMASHGNIKSSNVLLTKNYEARVSDHGLPTLVGPSFSPTRVSGYRAPEVTDIRRVSQKADVYSFGVLLLELLTGKAPTHAVVNEEGLDLPRWVQSVVREEWTAEVFDQELLRYQNVEEEMVQLLQLAIDCSAQHPDRRPAMSEVATRIDEIRRSSLGDRQVADSAEGDEPSL

SEQ ID NO: 339181 - protein, 143 aa, Zea mays
  Clone ID: MRT4577_72500C.1.pep
PAWPGEPRPHYLISVVTTSMKKRQSYQSSSVAMAMAIVSSSSPTNPPASGPWPSWSPPLSWVRLLLRRRWLFSMWGVGGFEARAIVRHGVASGTAIALYCGGTMTARHFEDEDVCPLRGLGGGGGGSSDSGGDWRRLRRCGHG

SEQ ID NO: 339182 - protein, 55 aa, Zea mays
  Clone ID: MRT4577_72501C.1.pep
NALVQVSCGELLQIWRYDDTLEEGDGEEEYHSDSELAFDRELPWYSNSMIKVIKG

SEQ ID NO: 339183 - protein, 214 aa, Zea mays
  unsure (1)..(214): unsure at all Xaa locations
  Clone ID: MRT4577_72502C.1.pep
GPFFFFFFFFFFFFFFFFFFFFFFFFFFFFFFFFFFFFPRPKPTPLGDLPNRKKQNPRGEKPPPGKKGPGNPRKPQRGPQKPXGREKESPPPQGXKKPPPPPEPPGEGKIRGNGPKGKGPAGALPHPGGAAPFPGKNTPGRPPPXFKPPNKRPGKGPQKIGPPXPQRGGPPKKKPRELSGWGGKITGSSKMGWAWQNPGPVPKMGGPWVAPPQK

SEQ ID NO: 339184 - protein, 54 aa, Zea mays
  Clone ID: MRT4577_72503C.1.pep
IVQTLCARRKSGLNLDVPHRRNATYNMLNEALNYKLALNRHAVEEHHEFLIEED

SEQ ID NO: 339185 - protein, 33 aa, Zea mays
  Clone ID: MRT4577_72504C.1.pep
VFNQVPWGGLIMKTTNLSTVGVLQNGWHSLVNW

SEQ ID NO: 339186 - protein, 66 aa, Zea mays
  Clone ID: MRT4577_72505C.1.pep
TEPEYRLFFIACHENIGDHQKVLTRVHQYDYYKLSSYWASQSLQHTHETDTIRLVHLLYLGAWATF

SEQ ID NO: 339187 - protein, 66 aa, Zea mays
  Clone ID: MRT4577_72506C.1.pep
QGSVMSPRLASGNGASTTGRLVMMMSAMQSAHATAEGGSGHGRSGDDYARTRGGRVVTRIRTVLRV

SEQ ID NO: 339188 - protein, 132 aa, Zea mays
  Clone ID: MRT4577_72507C.1.pep
GKKTTFFSSAATFPPVCPVFCCEGHGVAPRAFFFVNSSEPGGFVCFFPRGPVILMALVMFSLVPGFSPLRNRGCCPSLFVVARSLCFCCLCGVKQGAPACPCNGPRGLWSKKCCTSRQNMLKVKHKGHTVLF

SEQ ID NO: 339189 - protein, 69 aa, Zea mays
  Clone ID: MRT4577_72508C.1.pep
KLKMLHLSRWLGVYCSNSKTTASMRQNGGRETTRSSSGWLRPAAVDAGERREEETGAAREWTGGGGVLI

SEQ ID NO: 339190 - protein, 142 aa, Zea mays
  unsure (1)..(142): unsure at all Xaa locations
  Clone ID: MRT4577_72509C.1.pep
KQGGKKSPPGGPILPKQPKQGPRTRGFPKRGKQNPRPGPNSPKTRAGSLDGPRSPPGQPAPESWNPPLGGGGXGGKGRGPGRSQGPPNPGXGGFEPPPEGXTQRPRPPTPPPLSPLGXPPPVPPPLNCQQGPPPLGWAPGAK

SEQ ID NO: 339191 - protein, 110 aa, Zea mays
  Clone ID: MRT4577_7250C.1.pep
PGTVTSRGNFTFVVSSVTKASPTAPPPAAQETGSHRAPPLRATRQANPLLEADACVWTRRWEPAAGVINARNACAQGTTDAKFIVRYCAARSARSPIREKVKWNWRALVV

SEQ ID NO: 339192 - protein, 149 aa, Zea mays
  unsure (1)..(149): unsure at all Xaa locations
  Clone ID: MRT4577_72510C.1.pep
MKVGDNDIDVSITCSLQNDTSKGFNTANIDGFKLDNSLILASCGSGKGTPKMLTYDLRSTSITDMELKDIDTXNERSTIDFDEEANAHPERXHHMNKLGLKTTDFTSIVEGIDDKDPXPEIKKTQLMSRLTYTLGDIEARIEXTSDGTV

SEQ ID NO: 339193 - protein, 78 aa, Zea mays
  Clone ID: MRT4577_72511C.1.pep
AGSKNRVLDLHLDRSSPGSYATTKHGVRHRPRPGRGPAPVGVSQVDDKVLHKFTSEINKRSMDCDTVLKYSFLNKKSE

SEQ ID NO: 339194 - protein, 380 aa, Zea mays
  Clone ID: MRT4577_72512C.1.pep
GVLRELRGDDGVAYAIIELQEECDSRGTQILRRYTDYRKLARLASDINSYTKNLLSVMGSMASAAGGNEGPDPREIELYLEEILALTQLGEDYTEFMVNKIRGLRDVKPELGPRAMKAFRNGNFYKTEQDLTGFYVIFEEFFMVENVRKAIRIDEPISDGLTTSMVDDVFFVLQSCCRRAASTASINSVLAVLGGAMSLLSNEYQEALQWRMREPNLGAKLFLGGVGVQKTGEEIATALNNIDISSEYVLKLRHEIEELCVEIFHTPADREKIKSCLSELGEISASFKKILHSALEHLVASVAPRIRPILDTVATVSYGLDDAEYGENEVNDPWVQKLILAVNTNVAWLQPVMTPNNYDSFVHLIIDFIVKRLEVIMVHK

SEQ ID NO: 339195 - protein, 58 aa, Zea mays
  Clone ID: MRT4577_72513C.1.pep
KKKPAPHSKTVFQFSFWENKNVNYLKINWGGPAKKKKKKKKKKKKKKKKKKKKKKKKK

SEQ ID NO: 339196 - protein, 87 aa, Zea mays
  Clone ID: MRT4577_72514C.1.pep
KKNFMVLFLIHQTVCPHFKYRGLFFSFPLIKRGHRTRFFFPLRGNASFFAEIPYHITGDKGFFIVFPRKLITIGRPIGATPAEEVPT

SEQ ID NO: 339197 - protein, 302 aa, Zea mays
  unsure (1)..(302): unsure at all Xaa locations
  Clone ID: MRT4577_72515C.1.pep
MMSFRSKDAHAQTRLNWPWRSQSPLSAQLLVDIPPEIELSDYRRLPSSRSESPSGLLHGEGVKEEPIPDLDIFFERLYEYFCAKGLRCIITKWIIEILNVLFMVCCIGFFFLFVDWDTLIHLKCGVEALESGEKPCDLMKAIKHDPLVPFTLPKMITVGSMVIMTAYGLTNFLKFFVQLRSTLNVRQFYYDRLKVNDLEIQTISWPKIIEKVVLLQKSQKLCVVRDLSEHDIIMRIMRKENYLIGMVNKGILSFPIHSCVPGAGPTGSHEHGRRNYLILPKSLEWTLXWCIFQSMFDSKFCV

SEQ ID NO: 339198 - protein, 387 aa, Zea mays
  unsure (1)..(387): unsure at all Xaa locations
  Clone ID: MRT4577_72516C.1.pep
MAPDLVNGVLNWVGTPAMVASLLLFYPPYYLFKTCYSFLSWLFPEDLAGKVVLITGASSGIGEQLAYQYALNRASLALVARRESSLRHVADRALELGARDVVVLPGDVSAPDDCDRFVRTAISHYDRLDHLVCNAGVASVGAFEEIPDVTSYSSQLDVNFWGSVQTTFAALPHLKRSRGRIVVTASATGWNPVPRMSIYNAANAALINFFETLRTELGNQVGITVVTPGWVESEMSRGKFLKEHGQVEVDQEMRDVSEEHDHAPVECLLMNQPPATRDRSSXNTLLTNSDVFPXQIGLFPVEYAKNCAKAMVQAARQGERYLTVPAWFGAMYLWRLFAPEVVEACYRLLYMHGHGARQADAPSRTMAEAGGKQLLYPTSLRSEEIKE

SEQ ID NO: 339199 - protein, 60 aa, Zea mays
  Clone ID: MRT4577_72517C.1.pep
QRRCSEMCLTSLSSSWVIQSAIVPVRWSRPKIPRHVSATPQQYVAKDSHSLSAMSSAYSL

SEQ ID NO: 339200 - protein, 164 aa, Zea mays
  unsure (1)..(164): unsure at all Xaa locations
  Clone ID: MRT4577_72518C.1.pep
KKKKKKIKKKKKKKKKKKKKNKKKPNKRKKKGRPGGGRQPNPPLPAPPMQLLYCDCSALQCPGPGPXFPGPANPSPALPQXSHPLPAPXYFGVVPNRPPPHSFPTPVWPVESHRAPPRTAPPAAGXAQLPPXSPAPARPLVPVPSLPFPPRPPPXSPPGPTKVE

SEQ ID NO: 339201 - protein, 222 aa, Zea mays
  unsure (1)..(222): unsure at all Xaa locations
  Clone ID: MRT4577_72519C.1.pep
MAHLVCNAGVASVGAFEEIPXVTSYSSQLDVNFWGSVQTTFAALPHLKRSRGRIVVTASATGWNPVPRMSIYNAANAALINFFETLRTELGNQVGITVVTPGWVESEMSRGKFLKEHGQVEVDQEMRDAQIGLFPVEYAKNCAKAMVQAARQGERYLTVPAWFGAMYLWRLFAPEVVEACYRLLYMHGHGARQADAPSRTMAEAGGKQLLYPTSLRSEEIKE

SEQ ID NO: 339202 - protein, 268 aa, Zea mays
  Clone ID: MRT4577_7251C.1.pep
MNLASVVPCAQAFTVLMTPAAGSHRRVHTHAAASKSGLACRVARSGGARWLPVSCAAGGGAVGDTFVTEDTTNVKFPREVTVPGYTHPLVAVGTGYREKFFVKVYAAAFYVDYSLRLDTEQWKAKTGIESFDSSSVFDSIFKAPVVKSLSIILVRAVDGKTFVNALNDVIARQIKNPNAEEESSLSTLQNTFLGRNLKQGTSIYLTWLEPKRMLISISEDEDPRQVDAEIKSATVNYALYDGFFGKSTVCPSLRSSTAQLLDALLLAK

SEQ ID NO: 339203 - protein, 1803 aa, Zea mays
  unsure (1)..(1803): unsure at all Xaa locations
  Clone ID: MRT4577_72520C.1.pep
MARLRHTAHKSVIPFLPSRLAERPLHRTVSGQSSHLERLHHRLREEQERRRQHGEQQGSSSSPQQEVETVRPRSSVAQLEAPLVPPRDVPAVGGATGGDPDDDDSDHSTESSEPQEAEGWAFDRHTWLIEYRCVVYQHSRGRYPDRWEATCLVRRPEDDLRGAEAVSEHYSISERDTAEAAMQDAARRALSQYCSLFGGVADGLNLRYYPRRPTGSTESVVVSPVGEANPRLSSTVNLVAVLNTELDHSLDELSRARTEIAELRAELAERHHQEGGSPAPVGTQHPYRSPPRGHHTYGSPIVRSMLMYECLPQMSDNRRRCNRRAQLEQHDQQEENQRQPPPPPPMSVEQMFLMQTQAVQAIGQTLAAMQQAQQQPQPQLQVQMPQMPRDKRGEFMRGHPPTFAHSADPMDAEDWLRAVERELRTXQCDDREKXESFRRYHVPEGLMIVKKEEFLALKQGPMSVSEYRDKFLQLSRYAPEDVNTDAKRQYRFMRGLVDPLHYQLMNHTFPTFQHLIDRAVMTEKKRKDMEDRKRKMSGPQSGGISRPRFSGSSSQQGRSGHPQGYQNQNQRPHQQQFQRQYPQQQQQYRQHSQQGGNQYQKQNNQAPRLPAPAANQNNQAAPAQGGGRGCFHCGDQGHWAMQCPKKSAQQQINPNAPARQGVLQPAAGNRNQAYNRGKVNHLEAEAIQDAPDVAVGMFSVESHPAKVLFDTGATHSFVTATWVELHNISVEAMMPPMRINSVGGKVQTDKICSNIMVEIRGIGFPSDLIVIGTPGIDVILGMNWLMKYEANVSCDKRTITLKSSSGEEVVAELRMPKSEEGVCHQISVDSKEPNPLEAIKVVSDFPDVFPEELTGMPPERKVEFAIELIPGTAPISKRAYRVSGPELVELKKQIDEMLEKGYIRPSTSPWAAPVLFVEKKDGTKRMCIDYRALNEVTIKNKYPLPRIEDLFDQLRGASVFSKIDLRSGYHQLRIRPSDIPKTTFITKYGLYEFTVMSFGLTNAPAFFMYLMNSVFMDYLDKFVVVFIDDILIYSQSEEDHVEHLKMVLQRLREHQLYAKLGKCEFWIHEVLFLGHIINQDGLAVDPKKVADILNWKAPKDVRGIKSFIGMAGYYRRFIEGFSKIARPMTALLAKKVEFKWTQKCQEAFEELKNRLTTAPVLVLPDVHKSFSVYCDASYTGLGCVLMQEGRVVAYSSRQLKIHEKNYPTHDLELAAVVHALKTCRHYLYGQKCDIYTDHKSLKYIFTQSELNMRQRRWLELIKDYELEIHYHPGKANVVADALSRKSQVNMLASHPMPYELAKEFDRLSLGFLNSTQGVTVELEPTLEREIKEGQKDDENINKIWQLILEGRGKDFREDEEGVIWFKDRLCVPDLKPIRELILKEAHETAYSIHPGSEKMYQDLKRRFWWYGMKREIAEYVAICDSCQRTKAEHQRPAGLLQPLRIPQWKWDEIGMDFIVGLPRTRAGYDSIWVVVDRLTKVAHFIPVKTTYTGATLAELYMSRIVCLHGVPKKIVSDRGTQFTSHFWQQLQEALGTHLNFSSAYHPQTDGQTERTNQILEDMLRACALQDKSGWDKRLPYAEFSYNNSYQASLKMSPFQALYGRSCRTPLHWDQPGERQVFGPDILLEAEENIKMVRENLKTAQSRQRSYANRRRRELSFEVGDYVYLKVSPIRGVRRFGVKGKLAPRYVGPYQIQAKRGEVAYQLDLPESLSAVHNVFHVSQLKKCLRVPEEQLPMEGLEVQEDLTYIEKPTQILEFADRVTRRNTIRMCKVRWGHHSEEEATWEREDDLKAKYPELFADQP

SEQ ID NO: 339204 - protein, 1279 aa, Zea mays
  Clone ID: MRT4577_72521C.1.pep
MSDNRRQGNRRVQQEHRAQQEEEPQQHRRQPSPPPPMTVEQMFLMQTQAVQAIGQALVAMQQAQQQPQPQLQVQMPQMPRDKRGEFMRGHPPTFAHSADPMDAEDWLHAVERELRTARCDDREKVLYGPRQLRGAAQSWWESYLATHADPEAITWEEFRENFRRYHVPEGLMIVKKEFLALKQGPLSVSEYRDRFLQLSRYAPEDVNTDAKRQYRFMRGLVDPLHYQLMNHTFPTFQHLIDRAIMTERKRKEMEDRKRNMSGPQPGSNSRPRFSGSSSQQGKPATNQNNQAASAQGGGRGCFHYGEQGHWAMHCPKKVARQQTNPNAPTKQGVPQQAAGNRGHAYNHGKVNHLEAEAIQDAPDVAVGMFSVESHLAKALFDTGATHSFVTATWVEMHNISVESMMPPMRVNSVGGKVQADKICSNVRVEIRGIGFPSDLIVIDTPGVDVILGMNWLMKYEASVSCDKRTVTLKSPPGEEISVDSKEANPLEAIKVVSDFPDVFPEELTGMPPDRKVEFSIELIPGTAPISKRAYRVSGPELVELKKQIDELLEKGYIRPSTSPWATPVLFVEKKDGTKRMCIDYRALNEVTIKNKYPLPRIEDLFDQLRGASVFSKIDLRSGYHQLRIRPSDIPKTAFITKYGLYEYTVMSFGLTNAPAFFMYLMNSVFMDYLDKFVVVFIDDILIYSQSEEEHVEYLKMVLQRLREHQLYAKLSKCEFWIHEVLFLGHIINQDGLAVDPKKVADILNWKAPKDVRGIKSFIGMARYYRRFIEGFSKIARPMTALLAKEVEFKWTQKCQEAFEELKNRLTTAPVLVLPDVHKPFSVYCDASYTGLGCVLMQEGRVVAYSSRQLKIHERNYPTHDLELAAVDYELEIHYHPGKANVVADALSRKSQVNMMATYPISYELAKEFDRLSLGFLNRTQGVTVELEPTLEREIKEGQKDDENINKIQQLILEGRGKDFREDEEGVIWFKDRFCQRTKADHQKPAGLLQPLQIPQWKWDEVGMDFIVGLPRTRAGYDSIWVVVDRLTKVAHFIHVKTTYIEATLVELYMSRIICLHGVPKKIVSDRGTQFTSHFWQQLQEALGTHLNFSSAYHPQTEGQTERTNQILEDMLRACALQDKSGWDKRRRRELSFEVGDYVYLKVSPIRGVRRFGVKGKLAPRYVGPYQIQAKRGEVAYQLNLPESMSAVHNVFHVSQLKKCLRVPEEQLPVEELEVQEDLTYIERPTQILEFADIVTRRNTIRMCKVRWGHHSEEESTWEREDYLKAKYPELFADQP

SEQ ID NO: 339205 - protein, 1439 aa, Zea mays
  unsure (1)..(1439): unsure at all Xaa locations
  Clone ID: MRT4577_72522C.1.pep
MSVEQMFLMQTQAVQAIGQTLAAMQQAQQQPQPQLQVQMPQMPRDKRGEFMRGHPPTFAHSADPMDAEDWLRAVERELRTAQCDDREKVLYGPRQLRGAAQSCEYRDKFLQLSRYAPEDVNTDAKRQYRFMRGLVDPLHYQLMNHTFPTFQHLIDRAVMTEKKRKDMEDRKRKMNGPQSGGISRPRFSGSSSQQGRPGHPQGYQNQNQRLHQQQFQRQYPQQQQQYRQHSQQGGNXSEAEQPGTSPSXQQRIRATKQPQXGGGRGCFHCGDQGHWAMQCPKKTAQQQTNPNAPARQGVLQPAAGNRSQAYNHGKVNHLEAEAIQDAPDVAVGMFSVESHPAKVLFDTGATHSFVTATWVELHSISVEAMMPPMRINSVGGKVQTDKICSNIMVEIRGIGFPSDLIVIDTPEIDVILGMNWLMKYEANVSWDKRTVTLKSPSGEEVVAELRMPKSEEGVCHQISVDSKEPNPLEAIKVVSDFPDVFPEELTGMPPERKVEFAIELIPGTAPISKRAYRVSGPELVELKKQIDEMLEKGYIRPSTSPWAAPVLFVEKKDGTKRMCIDYRALNEVTVKNKYPLPRIEDLFDQLRGASVFSKIDLRSGYHQLRIRPSDIPKTAFITKYGLYEFAVMSFGLTNAPAFFMYLMNSVFMDYLDKFVVVFIDDILIYSQSEEDHVEHLKMVLQRLREHQLYAKLGKCEFWIHEVLFLGHIINQDGLAVDPKKVADILNWKAPKDVRGIKSFIGMAGYYRRFIEGFSKIARPMTALLAKKVEFKWTQKCQEAFEELKNRLTTAPVLVLPDVHKSFSVYCDASYTRLGCVLMQEGRVVAYSSRQLKIHEKNYPTHDLELAAVVHALKTWRHYLYGQKCDIYTDHKSLKYIFTQSELNMRQRRWLELIKDYELEIHYHPGKANVVADALSRKSQVNMLASHPMPYELAKEFDRLSLGFLNSTQGVTVELEPTLEREIKEGQEDDENINKIRQLILEGRGKDFREDEEGVIWFKDRLCVPDLKPIRELILKEAHETAYSIHPGSEKMYQDLKRRFWWYGMKREIAEYVAICDSCQRTKAEHQRPAGLLQPLRIPQWKWDEIGMDFIVGLPRTRAGYDSIWVVVDRLTKVAHFIPVKTTYTGATLAELYMSRIVCLHGVPKKIVSDRGTQFTSHFWQQLQEALGTHLNFSSAYHPQTDGQTERTNQILEDMLRACALQDKSGWDKRLPYAEFSYNNSYQASLKMSPFQALYGRSCRTPLHWDQPGERQVFGPDILLEAEENIKMVRENLKTAQSRQRSYADRRRRELSFEVGDYVYLKVSPIRGVRRFGVKGKLAPRYVGPYQIQAKRGEVAYQLDLPESLSAVHNVFHVSQLKKCLRVPEEQLPVEGLEVQEDLTYIEKPTQILEVADRVTQRNTIRMCKVRWGHHSEEEATWEREDDLKAKYPELFADQP

SEQ ID NO: 339206 - protein, 80 aa, Zea mays
  Clone ID: MRT4577_72523C.1.pep
KEDNERTPVKSLKRHVLQRGKRTTRKIAHKRIRVARGPKSNKSTAYPMRPDPLSIKDVPPPSMEIELQDPQTKKPLSKKT

SEQ ID NO: 339207 - protein, 1797 aa, Zea mays
  unsure (1)..(1797): unsure at all Xaa locations
  Clone ID: MRT4577_72524C.1.pep
MRVVHIATTAQEKAKSWKETSRSSKTTTNFRWLVLDTLHLEAPPAPPRDVPAVGGATGGDPDDNDSDHSTESSEPQEAEGWVARPITRDAARGCHFHDALDTLLRQAFDQHTWSIEYRCVVYQHSRGRYPDRWEATCLVRRPEDDLRGAEAVSEHYSISERDTAEAAMQDAARRALSQYCSLFGGVADGLNLRYYPRRPTGSTESVVVSPVGEANPRLSSTVNLVAVLNTELDHSLDELSRARTEIAGLRAELAERHHQEGGSPAPVGTQHPYRSPPRGSMLMYECLPQMSDNRRRCNRRAQQEQHDQQEEQQRQPPPPPPMSVEQMFLMQTQAVQAIGQTLAAMQQAQQQPQPQLQVQMPQMPRDKRGEFMRGHPPTFAHSADPMDAEDWLRAVERELRTAQCDDREKVLYGPRQLRGAAQSWWESYLATHANLEAITWEEFSESFRRYHVPEGLMIVKKEEFLALKQGPLSVSEYRDKFLQLSRYAPEDVNTDAKRQYRFMRGLVDPLHYQLMNHTFPTFQHLIDRAVMTEKKRKDMEDRKRKMSGHQSGGISRPHFSGSSSQQGRPGHPQGYQNQNQRPHQQQFQRQYPQQQQQYRQHSQQGGNXSEAEQPGTSPSXQQRIRATKQPQXGGGRGCFHCGEQGHWAMQCPKKLAQQQTNPNAPTRQGVLQPAAGNRNQAYNRGKVNHLEAEAIQDAPDVAVGMFSVESHPAKVLFDTGATHSFVTATWVELHNISVEAMMPPMRINSVGGKVQTDKICSNIMVEIRGIGFPSDLMVIDTPGIDIILGMNWLMKYEANVSCDKRTVTLKSPSGEEVVAELWMPKSEEGVCHQISVSSKEPNPLEAIKVVSDFPDVFPEELTGMPPERKVEFAIELIPGTAPISKRAYRVSGPELVELKKQIDEMLEKGYIRPSTSPWAAPVLFVEKKDGTKRMCIDYRALNEVTIKNKYPLPRIEDLFDQLRGASVFSKIDLRSGYHQLRIRPSDIPKTAFITKYGLYEFTVMSFGLTNAPAFFMYLMNSVFMDYLDKFVVVFIDDILIYSQSEEDHAEHLKMVLQRLREHQLYAKLGKCEFWIHEVLFLGHIINQDGLAVDPKKVADILNWKAPKDVRGIKSFIGMAGYYRRFIEGFSKIARPMTALLAKKVEFKWTQKCQEAFEELKSRLTTAPVLVLPDVHKPFSVYCDASYTGLGCVLMQEGRVVAYSSRQLKIHEKNYPTHDLELAAVKCDIYTDHKSLKYIFTQSELNMRQRRWLELIKDYELEIHYHPGKANVVADALSRKSQVNMLASYPMPYELAKEFDRLSLGFLNSTQGVTVELEPTLEWEIKEGQKDDENINKIRQLILEGRGKDFREDEEGVIWFKDRLCVPDLKPIRELILKEAHETAYSIHPGSEKMYQDLKRRFWWYGMKREIAEYVAICDSCQRTKAEHQRPAGLLQPLRIPQWKWDEIGMDFIVGLPRTRAGYDSIWVVVDRLTKVAHFIPVKTTYTGATLAELYMSRIVCLHGVPKKIVSDRGTQFTSHFWQQLQEALGTHLNFSSAYHPHTDGQTERTNQILEDMLRACALQDKSGWDKRLPYAEFSYNNSYQASLKMSPFQALYGRSCRTPLHWDQPGERQVFGPDILLEAEENIKMVRENLKIAQSRQRSYADRRRRELSFEVGDYVYLKVSPIRGVRRFGVKGKLAPRYVGPYQIQAKRGEVAYQLNLPESLSAVHNVFHVSQLKKCLRVPEEQLPVEGLEVQEDLTYIEKPTQILEFADRVTRRNTIRMCKVRWGHHSEEEATWEREDDLKAKYPELFADQP

SEQ ID NO: 339208 - protein, 88 aa, Zea mays
  unsure (1)..(88): unsure at all Xaa locations
  Clone ID: MRT4577_72525C.1.pep
RHEHPALRHAGPWQAATTXGDASALMQSPKNGPHQAEERVVGYRGHHAPRQGYTLFSPPALQPPPPTGGGIKKKYSPRFCCPYCGLEL

SEQ ID NO: 339209 - protein, 97 aa, Zea mays
  Clone ID: MRT4577_72526C.1.pep
ARQRQVRFSGHAQACQPEECHLPTAIGREQEVGRLVDKKPDPVLELHGQGPETLKLTDREAQAKFPNQAFWPQTVLDKKNCLKKGRIQRPPFPNTLK

SEQ ID NO: 339210 - protein, 184 aa, Zea mays
  unsure (1)..(184): unsure at all Xaa locations
  Clone ID: MRT4577_72527C.1.pep
FXXCXGLXXCSLWXWXCXXXFXSFLXXLWGXPFXLXXGXXXXXSXXXFXAXXLFPXXXASSXXPXXRXVXFXXXVWFLXXCVFXSXXXFSLXXXXXFXXLAPXXCLGASXCPXXLXXAVLCXXXXFVPPXXXFLXXLSCLXXLXXLXLALCPFXXPXXFVCXSXPXVLPRFXXXXXCPGLLVLF

SEQ ID NO: 339211 - protein, 360 aa, Zea mays
  Clone ID: MRT4577_72528C.1.pep
MTTTKRHCLRFTTVLATTLLSATAACLDVGFYDRTCPTAETIVQQTVAAAFRNNSGVAPALIRMHFHDCFVRGCDGSVLIDTVGNLTAEKDAPPNNPSLRFFDVVDRAKASLEAQCPGVVSCADVLAFAARDSVVLSGGLGYQVPAGRRDGRISNDTEALNNLPPPFFNATELADRFASKNLTIEDLVVLSGAHTIGVSHCSGFAGPTDLNGPVDRLYNFSSPDGIDPTLSKAYAFLLKSICPANTSQFFPNTTVFMDLITPERFDNKYYVGLTNNLGLFKSDVALLTNATMKALVDSFVRSEATFRTKFARSMIKMGQIEVLTGTQGEIRRNCRVINPVSATDDVVLARPSGFTGVAAS

SEQ ID NO: 339212 - protein, 1384 aa, Zea mays
  unsure (1)..(1384): unsure at all Xaa locations
  Clone ID: MRT4577_72529C.1.pep
MSDNRRRCNRRVQQEQRAQQEEHRRQPPPPPRXDSGAXFLMQTQAVQAIGQTLAAMQXSIATQPQLQVQIPQMPRDKRGEFMKGHPPTFAHSADPMDAEDWLRAVERELHTAQCDDREKVLYGPRQLRGAAQSWWESYLATHVDPEAITWEEFSESFRRYHVPEGLMIVKKEEFLALKQGPLSVSEYRDRFLQLSRYAPEDVNTDAKRQYRFMRGLVDPLHYQLMNHTFPTFQHLIDRAIMTEWKRKEMEDRKRKMSGPQSGSNSRPRFSGSSSQQGKHANQNNQAAPAQGGGRGCFHCGEQGHWAMHCPKKMAQQQANPNAPARQGVPQQAAGNRGQAYNRGKVNHLEAKAIQDAPDVAVGMFSVESHPAKVLFDTGATHSFVTTTWVEMHNISVEAMMPPMRINSVGGKVQADKICSNVRVEIRGIGFPSDLIVIDTPGVDVILGMNWLMKYEANVSCDKRTVTLKSPFGEEVVAELRMPKTAKGDCHQISVDSKEANPLEAIRVVSDFPDVFPEELTGMPPERKVEFAIELIPEKKDGTKRMCIDYRALNDVTIKNKYPLPRIEDLFDQLRGASVFSKIDLRSGYHQLRIRPSDIPKTTFITKYGLYEYTVMSFGLTNAPTFFMYLMNSVFMDYLDKFVVVFIDDILIYSKSEEEHVEHLKMVLQRLREHQLYAKLSKCEFWIHEVLFLGHIINQDGLAVDPKKVADNMNWKAPKDVRGIKSFIGMAGYYRRFIEGFSKIARPMTALLAKKVEFKWTQKCQEAFEELKNRLTTSPVLVLPDVHKPFSVYCDASYTGLGCVLMQEGRVVAYSSRQLKVHEKNYPTHDLELAAVVHALKTWRHYLYGQKCDIYTDHKSLKYIFTQSELNMRQRRWLELIKDYELEIHYHPGKANVVADALSRKSQVNMMATYSMSYELAKEFDRLSLGFLNSTQGVTVELEPTLEREIKEGQKDDENINKIRQLILEGRGKDFREDEERVIWFKDRLCVPDIKPIRDLILKEAHETAYSIHPGSEKMYQDLKRRFWWYGMKREIAEYVAICDSCQRTKAEHQRPAGLLQPLQIPQWKWDEIGMDFIVGLPRTRAGYDSIWVVVDRLTKVAHFIPVKDNQLQEALGTHLNFSSAYHPQTDGQTERTNQILQDMLRACVLQDKSGWDKRLPYAEFSYNNSYQASLKMSPFQALYGRSCRTPLHWDQPGERQVFGPDILLEAEENIKMVRENLKIAQSRQRSYADRRRRELSFEVGDYVYLKVSPIRGVRRFGVKGKLAPRYVGPYQIQAKRGEVAYHLNLPESLSAVHNVFHVSQLKKCLRVPEEQLPVEDLEVQEDLTYIEKPTRILEFADRVTRRNTIRMCKVRWGHHSEEEATWEREDDLKAKYPELFADQP

SEQ ID NO: 339213 - protein, 243 aa, Zea mays
  Clone ID: MRT4577_7252C.1.pep
PPPKDYDCQAAGFENANAGREIKNDLYGSSSSLVRFQRISPFQALFRVERMSLVWNLVELIYIVRFGPNWNGNWPGLKFSFTSRPGTNPCVVPSGSKPGHTRPTRRRLDATGATRGFDATGTAAAHSPDVDPPRCLLPGEDLLSSFPISYPLLSLPQSVTLDLGPLRSHQVRRHLQELRPCVLVHRRLPSLRAQRLNGCRQDEWAEDRMSGRRNGSGEPDPAEKRSSSYNEGSTVWNEIPVTS

SEQ ID NO: 339214 - protein, 1557 aa, Zea mays
  unsure (1)..(1557): unsure at all Xaa locations
  Clone ID: MRT4577_72530C.1.pep
VVHVTTTAQEKTKPWKETSRSSKTTTSFRCGLAATPVRWLVLDTLHLEAPPAPPWDAPAAGGGPGGDPDDDDSDHSTESSEPQEAEGWVARPITRDASRGCHFHDALDTLLRQAFDRHTWSIEYRCVVYQHSRRRYYPLRPTGNTESVVVSPVGEDNPRLSSTVNLVAVLNTELDHSLDELSRARTEIAELRAELAESRHQEGGSPAPVGTQHPYRSPPREDWLRAMERELRTAQCDDREKVLYGPRQLRGAAQSWWESYLATHADPKAITWEEFSESFRRYHVPEGLMIVKKEEFLALKQGPLSVSEYRDKFLQLSRYAPEDVNTDAKRQYRFMRGLVDPLYYQLMNHTFPTFQHLIDRAVMTEKKRKDMEDRKRKMSGPQSGSISRPCFSDSSSQQGRPGHPQGYQHQNQRPHQQXFRGSTHNSSSIVRIASRENKATGRCSARRRWRSSRPTXCSNKARCTAAXAAGNRGQAYNRGKVNHLEAEAIQDAPDVAVGMFSVESHPAKVLFDTGATHSFVTATWVEMHNISVEAMMPPMRINSVGGKVQTDKICSNIRVEIRGIGFPSDLIVIDTPGIDVILGINWLMKYEANVSYDKRTVTLKSPSREEVVAELRMPKLAEGVCHQISVDSKEPNPLEAIKVVSDFPDVFPEELTGMPPERKVEFAIELIPGTAPISKRAYRVSRPELVELKKQIDEMLEKGYIRPSTSPWAAPVLFVEKKDGTKRMCIDYRALNEVTVKNKYPLPRIEDLFDQLRGASVFSKIDLRSGYHQLRIRPSDIPKTAFITKYGLYEFTVMSFGLTNAPAFFMYLMNSVFMDYLDKFVVVFIDDILIYSQSEEDHVEHLKMVLQRLREHQLYAKLSKCEFWIHEVLFLGHIINQDGLAVDPKKVADILNWKAPKDVRGIKSFIGMAGYYRRFIEGFSKIARPMTALLAKKPFSVYCDASYTGLGCVLMQEGRVVAYSSRQLKIHEKNYPTHDLELAAVVHVLKTWRHYLYGQKCDIYTDHKSLKYIFTQSELNMRQRRWLELIKDYELEIHYHPGKANVVADALSRKSQVNMMATYPMSYELAKEFDRLSLGFLNSTQGVTVELEPTLEREIKEGQKDNENINKIRQLILEGRGKDFREDEEGVIWFKDRLCVPDLKPIRELILKEAHETAYSIHPGSEKMYQDLKRRFWWYGMKREIAEYVAICDSCQRTKAEHQRPAGLLQPLRIPQWKWDEIGMDFIVGLPRTRAGYDSIWMVVDRLTKVAHFIPVKTTYTGATLAELYMSQIVCLHGVPKKIVSDRGTQFTSHFWQQLQEALGTHLNFSSAYHPQTDGQTERTNQILEDMLRACALQDKSGWDKSLKMSPFQALYGRSCRTPLHWDQPGERQVFGLDILLEAEENIKMVRENLKIAQSRQRSYADRRRRELSFEVGDYVYLKVSPIRGVRRFRVKGKLAPRYVGPYQIQAKRGEVAYQLNLPESLSAVHNVFHVSQLKKCLRVPEEQLPVEDLEVQEDLTYVEKPTQILEFADRVTRRNTIRMCKVRWGHHSEEEATWEREDHLKAKYPKLFADQP

SEQ ID NO: 339215 - protein, 1111 aa, Zea mays
  unsure (1)..(1111): unsure at all Xaa locations
  Clone ID: MRT4577_72531C.1.pep
MSDNRHRCNRRAQQEQRAQQEEHQRQPPPPPPMTVEQMFLMQTQAVQAIGQTLAAMQQAQQQPQPQLQVQMPQIPRDKCGEFMRGHPPTFAHSADPMDAEDWLRAVERELRTAQCDDREKVMYGPRQLRGAAQSWWESYLATHADPEAITWEEFSESFRRYHVPEGLRIVKKEFLALKQGPLSVSEYRDRFLQLSRYAPKDVNTDAKRQYRFMRGLVDPLHYQLMNHTFPTFQHLIDRAIMTERKRKDMEDRKRKMSGPQSGSISRPRFSGSSSQQGKPGHPQGYQHQSQRPYQQQSQRQYPQQQQYRQNSQQGGNRYQRQNXGTSPSCPSSKSEQPSSPSXGGGRGCFHCGEQGHWAMHCPKKMAQQQANPNAPARQGVPQQAAEMHNISVESMMPSMRINSVVGKVQADKICSNIRVEIRGIGFPNDLIVIDTPGVDVILGMNWLMKYEANVSCDKRIITLKSPLGEKVVAELRMPKTTKGDCHQISVDSKEANPLEAIKVVSDFPDVFPEELTGMPPERKVEFAIELIPGTAPISKRAYRVSGLELVELKKQIDELLEKGYIRPSTSPWAAPVLFVEKKDGTKRMCIDYRALNEVTVKNKYPLPRIEDLFDQLRGASVFSKIDLRSGYHQLRIRPSDIPKTAFITKYGLYEYTVMSFGLTNAPAFFMYLMNNVFMDYLDKFVVVFIDDILIYSQSEEDHVEHLKMILQRLREHQLYAKLSKCEFWIHEVLFLGHIINQDGLAVDPKKVADILNWKAPKDVRGIKSFIGMAGYYRRFIEGFSKTARPMTALLAKKVEFKWTQKCQEAFEELKNRLTTSPVLVLPDVHKPFSKCDIYTDHKSLKYIFTQSELNMRQRRWLELIKDYELEIHYHPGKANVVADALSRKSQVNMMTTYPMSYELAKEFDRLSLDFLNSTQGVTVELEPTLEREIKEGQKDDENINKIRQLILEGRGKDFREDEEGVICFKDRLCVPDIKPIRELILKEAHETAYSIHPGSEKMYQDLKRRFWWYDMKREIAEYVAICDSCQRTKAEHQRPTGLLQPLQIPQWKWDEIGMDFIVGLPRTRAGYDSIWVVVDRLTKVAHFIPVKTTYTGATLAELYMSRIVCLH

SEQ ID NO: 339216 - protein, 198 aa, Zea mays
  unsure (1)..(198): unsure at all Xaa locations
  Clone ID: MRT4577_72532C.1.pep
LLGACRIXGHVDLGECVIGNLIKLKAQQAGDYVLLLNTYAAVGEWSKVSEIRKLMQEEGIQTTPGCTTVEHNGTVHEFIADDDAHPRKVEIYENLSEIYKQLRIAGYVPNVSSELHDLDSEGKESALTYHSEKLAIAFALLVTPQHRPIRLAKNLRVCVDCPNFPKMFSAIYRRIVIVRDRTRFHHFLGGKCSCNDYW

SEQ ID NO: 339217 - protein, 1428 aa, Zea mays
  Clone ID: MRT4577_72533C.1.pep
MTVEQMFLMQTQAVQAIGQTLAAMQQAQQQPQPQMQVQMPQMPRDKHGEFMRGHPPTFAHSADPMDAEDWLRAVERELRTAQCDDREKVLYGPRQLRGAAQSWWESYLATHADPEAITWEEFSESFRRYHVPEGLMIVKKEEFLALKQGPLSLMNHTFPTFQHLIDRAVMTEKKRKDMEDRKRKMSGPQSGSISRPRFSGSSSQQGRPGHPQGYQHQIQRPHQQQFQRQYPQQQQYRQNSQQGGNQYQKQNNQAPCLPAPAANQNNQAAPAQGGGRGCFHCGEQGHWAMQCPKKMTQQQTNPNAPTRQGVLQQAAGNRGQAYNRGKVNHLEAEAIQDAPDVAVGMFSVESHSAKVLFDTGATHSFVTATWVEMHNISVEAMMPPMRINSVGGKVQTDKICSNIRVEIRGIGFPSDLIVIDTPGIDVILGMNWLMKYEANVSCDKRTVTLKSPSGEEVVAELKMPKSAEGVCHQISVDSKETNPLEAIKVVSDFPDVFPEELTGMPPERKVEFAIELIPGTAPISKRAYRVSGPELVELKKQIYEMLEKGYIRPSTSPWAAPVLFVEKKDGTKRMCIDYRALNEVTVKNKYPLPRIEDLFDQLRGASVFSKIDLRSGYHQLRIRPSDIPKTTFITKYVLYEFTVMSFGLTNAPAFFMYLMNSVFMDYLDKFVVVFIDDILIYSQSEEDHVEHLKMVLQRLREHLLYAKLSKCEFWIHEVLFLGHIINQDGLAVDPKKVADILNWKAPKDVRGIKSFIGMAGYYRRFIEGFSKIARPMTALLAKKVEFKWTQKCQEAFEELKNRLTTSPVLVLPDVHKPFSVYCDASYTGLGCVLMQEGRVVAYSSRQLKIHEKNYPTHDLELAAVVHALKTWRHYLYGQKCDIYTDHKSLKYIFTQSELNMRQRRWLEFIKDYELEIHYHPGKANVVADALSRKSQVNMMATHPMSYELAKEFDRLSLGFLNSTQGVTVELEPTLEREIKEGQKDDENINKIRQLILEGRGKDFREDEEGVIWFKDRLCVPDLKPIRELILKEAHEIAYSIHPGSEKMYQDLKRRFWWYGMKREIAEYVAICDSCQRTKAEHQRPAGLLQPLRIPQWKWDEIRMDFIVGLPRTRAGYDSIWVVVDRLTKVAHFIPVKTTYTGATLAELYMSRIVCLHGVPKKIVSDRGTQFTSHFWQQLQEALGTHLNFSSAYHPQTDGQTERTNQILEDMLRACALQDKSGWDKRLPYAEFSYNNSYQTSLKMSPFQALYGRSSEENIKMVRENLKIAQSRQRSYADRRRRELSFEVGDYVYLKVSPIRGVRRFGVKGKLAPRYVGPYQIQAKRGEVAYQLNLPESLSAVHNVFHVSQLKKCLRVPEEQLPVEDLEVQEDLTYVEKPTQILEFADRVTRRNTIRMCKVRWGHHSEEEATWEREDDLKAKYPELFADQP

SEQ ID NO: 339218 - protein, 35 aa, Zea mays
  Clone ID: MRT4577_72534C.1.pep
KKKKKKKKKKKKKKKKKKKKKKKKKKKKKKKKKKN

SEQ ID NO: 339219 - protein, 347 aa, Zea mays
  unsure (1)..(347): unsure at all Xaa locations
  Clone ID: MRT4577_72535C.1.pep
MPRDKRGKFMRGHPPTFAHSADPMDAEDWLRAVERELCTAQCDEREKVLYGPRHLRGAAQSWWESYLATHADPEAITWEEFSESFRRYHVPEGLMIVKKEEFLALKQGPLSVSEYRDRFLQLSCYAPEDVNTDAKRQYRFMRGLVDPLHYQLMNHTFPTFQHLIDRAIMTERKRKEMEDRKRKMSGPQSGSNSRPRFSGSSSQQGKPGHPQGYQHQSQRPYQQQSQRQYPQQQQYRQNSQQGGNQYQRQNXGTSPSCPSSESEQPSSPNXGGGRGCFHCGEQGHWAMHCPKKMAQQQANPNAPARQGVPQQAVGNRGQAYNRGKVNHLEAEVIQDAPDVAVVCSWTT

SEQ ID NO: 339220 - protein, 98 aa, Zea mays
  Clone ID: MRT4577_72536C.1.pep
MSNSNPEDKFKNRLLQQESVHEDGSITCPSIELGGCGDAMLNLIYASPSSQSEELSSECELDAAGNHSGVKDAEVHGSPVPESNGRLAAASQAETMST

SEQ ID NO: 339221 - protein, 52 aa, Zea mays
  Clone ID: MRT4577_72537C.1.pep
YRYQIWTGFARPLFINQLNPIYLLFSINTPNVEIHAVPQNAAQELPIPALGV

SEQ ID NO: 339222 - protein, 214 aa, Zea mays
  Clone ID: MRT4577_72538C.1.pep
MATQDIAEQKVLFGSQLSEEQEKALLKYLFNNKDVFSWSSNDLCGFNRDVIEHSNNVDPTIRPRKQKLRKMSNDKVEGARNEVKRLLSAGVIREVTYLEWLANTVMVKKANGKWRMCIDFTDLNKVCPKDEFPLPRIDTLIDAAATSELMSLLDCYSGYHQIWMKKENEPVIPQFSKKKLNFLFSFLSCSVALGFGVSGGIPQGNNRSFGIFFR

SEQ ID NO: 339223 - protein, 60 aa, Zea mays
  Clone ID: MRT4577_72539C.1.pep
YTNGTHRVTALALSTPSGELAMINEQNDTIFYIRLNAGGGTLTPLMVFRRQENADGQTSN

SEQ ID NO: 339224 - protein, 173 aa, Zea mays
  Clone ID: MRT4577_7253C.1.pep
MSRYGRYGGETKVYVGNLGTGAGKGELERAFSYYGPLRTVWIARNPPGFAFVEFEDPRDAEDAVRGLDGKVICGSRVRVELSTGMPRRSRFDRPPARRPFDPNDRCYECGEKGHYAYDCHRYSRRRRSRSRSRSHSRSRGRRYSRSRSRSRGRRSRSASPRRSRSVSLRRSRS

SEQ ID NO: 339225 - protein, 243 aa, Zea mays
  unsure (1)..(243): unsure at all Xaa locations
  Clone ID: MRT4577_72540C.1.pep
MILEKPSWIRHEGLQIFSIDIQTGGLRFATGGGDQKVRIWSMESVHKDNTNNDSKQRLLATLRDHFGSVNCVRWAKHGRYLASGSDDQVILIHERKAGSGTSEFGSGEPPDAENWKVIMTLRGHTADVGDLSWSPDDSTLASGSLDNTIHIWNMNNGICTAVLRGHTSLVKGVTWDPIGSFIASQSDDKTVMIWRTSDWSLAHKTEGHWTKSLGSTFFRRLAWSPCGXHFITTTHGFXQKPKH

SEQ ID NO: 339226 - protein, 74 aa, Zea mays
  Clone ID: MRT4577_72541C.1.pep
LAASVTETERVAAINYTVELTVRIWSSLQNQNLVASNHVQRPEGSITHQASCEMFTTSLSLFLSFFLSFFLFKK

SEQ ID NO: 339227 - protein, 62 aa, Zea mays
  Clone ID: MRT4577_72542C.1.pep
PPKQKFLFSLETSEGICLDHPSSGKGKFFPIGSFWPFPQILQGLSFYLKKNSPLPPWGKIKP

SEQ ID NO: 339228 - protein, 35 aa, Zea mays
  unsure (1)..(35): unsure at all Xaa locations
  Clone ID: MRT4577_72543C.1.pep
XSEKLDLVIFSRLLYKKSNPSQRSFEADRTGSRGR

SEQ ID NO: 339229 - protein, 56 aa, Zea mays
  unsure (1)..(56): unsure at all Xaa locations
  Clone ID: MRT4577_72544C.1.pep
MEMGIGLGGCLAFATCHPFCMENPLPCAGLAGLYGACAGLTTMMGAGGLXYPYAGV

SEQ ID NO: 339230 - protein, 163 aa, Zea mays
  Clone ID: MRT4577_72546C.1.pep
SRPREKKKKKKKKKKKKKKKKKKKKKKKKKKKKAPRRVAQPIIAVSFLRDQKKKARKAAPLFGFIHKIEENLHMGGAPKREDEPHKKAGEPHRRGGGEPHKKAGGEHKEGIGEKIKDKITGEHGDKSGDHREKRAKKKKREKKNPGEGHDHNGGHSSSSSDSD

SEQ ID NO: 339231 - protein, 70 aa, Zea mays
  Clone ID: MRT4577_72547C.1.pep
MGLCSKDTQVLFYRPDSKCLDGPENSFAAADVCNLCCICLESMSVPQVHHIVRAQGSAWYGQLVQLSAMV

SEQ ID NO: 339232 - protein, 60 aa, Zea mays
  Clone ID: MRT4577_72548C.1.pep
SPAYLLRRVIPDHNLTRACSKQEPEMGLQYRLGKPGSPLSVMVVFYQAVWPLHPRLRGHR

SEQ ID NO: 339233 - protein, 64 aa, Zea mays
  Clone ID: MRT4577_72549C.1.pep
VHPRALDNANTPVHLWIIWPMVYFPKNWGFNKPIEIFFWGRGPVTGSPCSSSLPTKIGLLSPHG

SEQ ID NO: 339234 - protein, 156 aa, Zea mays
  unsure (1)..(156): unsure at all Xaa locations
  Clone ID: MRT4577_7254C.1.pep
MSHFGRSGPPDISDTYSLLVLNITFRTTADDLYPLFAKYGKVVDVFIPRDRRTGDSRGFAFVRYKYKDEAHKAVERLDGRVVDGREITVQFAKYGPNAEKISKGRVVEPPPKSRRSRSRSPRRSRSPRRSRSPPRRRNPRRSRTSRRRPRDDFXGK

SEQ ID NO: 339235 - protein, 113 aa, Zea mays
  unsure (1)..(113): unsure at all Xaa locations
  Clone ID: MRT4577_72550C.1.pep
LPAPLGSIPNFRAKAHHQRFRGGREAMAEEAAKKEEVEKPKEAAAAEEKKKDDKPKEVGGGXAXKPKDGEEEEKKKEDAPPPPPPEEVEMRVYMHCEGCARKVKKILKALRRK

SEQ ID NO: 339236 - protein, 109 aa, Zea mays
  unsure (1)..(109): unsure at all Xaa locations
  Clone ID: MRT4577_72551C.1.pep
KTVNATLTTCCSLNLDGXGIIARVTSNSDAAQVAETLXEYXCRTNVDGVPXVXLNGDLXSRLWKQHLRLDXVCKANSQLVSHAXLDAISAGKYYHCDRLMARRASQDDL

SEQ ID NO: 339237 - protein, 51 aa, Zea mays
  Clone ID: MRT4577_72552C.1.pep
LSIRSTVSRVRGCDCCYPLLRLMVVQLLQCLKGNPKPITGLPPDLGLLMER

SEQ ID NO: 339238 - protein, 89 aa, Zea mays
  Clone ID: MRT4577_72553C.1.pep
KTLEQRARKQHQRCLAHSLVGTPNYIAPEVLLRKGYTQLCDWWSVGVILFEMLVGQPPFLAPTPAETQLMVINWENTLHIPAQVKLSPE

SEQ ID NO: 339239 - protein, 252 aa, Zea mays
  Clone ID: MRT4577_72554C.1.pep
MVSTSTIRPLAGRMAQASSTRISSAVPQVARFSTTAPQCKRKTKDNNPKRGVSSLYGSGPREPLSMSNIPLPKPRDFKPKIEVDPNHGLWGFFPGQGKLLATPKETEEHGRAWTVEELRKKSWEDLHALWWVCCKERNMLSTSRAELLRTKVGFGEREIDSRDEEVMKTQRAIKHVLTERYYTWQDAVDVAMNDPEINFEGGDGQAYTPSAYEDETNAAEWTQLGAESEAAKQIDPVATEAQEAKIEKELKK

SEQ ID NO: 339240 - protein, 196 aa, Zea mays
  Clone ID: MRT4577_72555C.1.pep
EIDPITKEVLATPIADALGRKFTRFGHQAKEDRQAAIFRSENGNVWQVKIFGEDKTGKRSGQYLAPTGIGDVPYLPTIPRRIILAIAEKHGVKPPEDGQDFWPWFVDHPEIPLIVTEGGKKALAAISQGYVALSLYGCLCGNDGLTIKPSLLPYVQGREVAIAYDQDAKGSKGRKAVFKGTKRLARNLTYHAKATV

SEQ ID NO: 339241 - protein, 123 aa, Zea mays
  Clone ID: MRT4577_72556C.1.pep
RGNPHPDSLFIEGFPPPFFSEAGFPSRISPFFAPDLFNGELYAPAPEMPSCLAFLKRVGVSCSKAPPSKKMTMDHVAAHLPKTKGSLEEPPWGLKGETLMPLIYFSKAGPFYPPLSPWGAPFE

SEQ ID NO: 339242 - protein, 240 aa, Zea mays
  unsure (1)..(240): unsure at all Xaa locations
  Clone ID: MRT4577_72557C.1.pep
GVSEGCRTCYVKAVKEIEPALKKQLIISTTLMTVGIAVISWLALPAKFTIFNFGTQKDVSNWGLFFCVAIGPWAGLIIGFVTXYYTSNAYSLVQDVADSCRTGAATNVILGLALGYKSVIIPIFAIAVIIYVSFSIAAMYGIAVAALGMLSTIATGLAIDAYAPISDNAGGIAXRTDAVDAAGNTTAAIGKGFAIGSAALVSLALFXGAFVSRAGVKVVDVLSPQVFIGLIVGAMLPYWF

SEQ ID NO: 339243 - protein, 115 aa, Zea mays
  Clone ID: MRT4577_72558C.1.pep
RESPYQRLCRRGMPPRSRVRSRRPMTSARNHPTPATPHRHHTANGESVTRTAASSPVLSLTRRGCTHVPRWTRMARRHHSHPSEQPRPCGFTCRHRRMYSHSSSLANGGILRCVW

SEQ ID NO: 339244 - protein, 405 aa, Zea mays
  unsure (1)..(405): unsure at all Xaa locations
  Clone ID: MRT4577_72559C.1.pep
MSVKEIEPALXEQLIISTVLMIFGIALISWLALPAKFTIYNFGTQKEVSNWGLFFCVSIGLWAGLIIGFVTEYYTSNAYSPVQDVADSCRTGAATNVIFGLALGYKSVIIPIFAIAVSIYVSFSIAAMYGIAVAALAIDAYGPISDNAGGIAEMAGMSHRIRERTDALDAAGNTTAAIGKGFAIGSAALVSLALFGAFVSRAGVKVVDVLSPKVFIGLIVGAMLPYWFSAMTMKSVGSAALKMVEEVRRQFNTIPGLMEGTAKPDYATCVKISTDASIKEMIPPGALVMLTPLIVGTLFGVETLSGVLAGALVSGVQIAISASNTGGAWDNAKKYIEAGASEHARTLGPKGSDCHKAAVIGDTIGDPLKDTSGPSLNILIKLMAVESLVFAPFFATQGGLLFKYL

SEQ ID NO: 339245 - protein, 177 aa, Zea mays
  Clone ID: MRT4577_7255C.1.pep
VKQDDIGKVIGLDPQLLGCSIAHKLEVSVKYFRSLGIYHFVLGQMIADFPTLLRYNVDILRPKYQYLRRVMVRPLKDLIEFPRFFSYSLEDRIEPRHRTLVANRINMKLRYMLTGSDEEFAQRVREAVERRARFEAGKAAGLETFSCSSETSSDAEATEAAACQNSTDVVGVLQKQA

SEQ ID NO: 339246 - protein, 119 aa, Zea mays
  unsure (1)..(119): unsure at all Xaa locations
  Clone ID: MRT4577_72560C.1.pep
YLSFQGLESLTEEDQQNLSFLPAHPCPSTRRSCQASRTLLFFSRGIKYTTCAIVLWVFGYSSLIWNPGFYFYNKILYFIKGYKRTFNLACIDHRGTPDHPARTCTLETYYXAICWGISY

SEQ ID NO: 339247 - protein, 65 aa, Zea mays
  unsure (1)..(65): unsure at all Xaa locations
  Clone ID: MRT4577_72562C.1.pep
XFVXXXXPXLFFVPFRASLPLGAFPAPXFXXWXXXVLSCPXVVAGVFSTKSMGGGWGGNLVXGGR

SEQ ID NO: 339248 - protein, 242 aa, Zea mays
  Clone ID: MRT4577_72563C.1.pep
MAGLALAPSIHQWSEVNNSTPAKHTQVRSQQVMARTREKLTLLVAAVAVGLLLAGGAGAGVASAARGREGRRRVHLRLYMHDVIGGPNRTAIRLIWGVGPPHASMPGRTFGDTVAIDDLVTDGPGVGADSRPVGRAQGTYMLSSQHEEVIVVSITVVLTAGPYNGSTLVVAGRDRIYDQTRELAVVGGTGGLRGASGYVLWTTAKVWSEVHMVLELDVHASVPLPDEDHDDNDVLVLGSRDA

SEQ ID NO: 339249 - protein, 80 aa, Zea mays
  Clone ID: MRT4577_72564C.1.pep
HGGDRGGRQGSGWCGRQRPQASGQEKVADTPGPKLRGSQETVNPAPVVSGAGAEEADKQEGAAALEEKKKRNMAKLRGGA

SEQ ID NO: 339250 - protein, 117 aa, Zea mays
  Clone ID: MRT4577_72565C.1.pep
PGSPPASGGKKERKGELGGGMEVPQNRWFQKWNPAPQTPGFNFPWAPPTLPVVGLLGLPVPTLVYKGFVPEFHIQDGDPGRPPRKFLLPGSRAPGNVVPPPGAARRGVSLPFVPGFF

SEQ ID NO: 339251 - protein, 130 aa, Zea mays
  Clone ID: MRT4577_72566C.1.pep
LHHIISLDLSLGGYTQSNTEWPPPPPWKRRSSLHSYRAFYVDVLVDSRTTTVVQVMTALPADKVNCRPKRQAVRVIQQLRQAHHDARGGNSPDQDVRRRRHPVICRETSGETAVLLNGKSLLLLEYKKSY

SEQ ID NO: 339252 - protein, 74 aa, Zea mays
  unsure (1)..(74): unsure at all Xaa locations
  Clone ID: MRT4577_72567C.1.pep
VEPASDTSPRTSADSDSISXFSAIKFWIDNISMSKCKDSVIDVMQTSTGIIISICHFSNHSNVMLFSTSDSWAE

SEQ ID NO: 339253 - protein, 113 aa, Zea mays
  Clone ID: MRT4577_72568C.1.pep
MAKRVLITGAAGQIAYSLVFAIARGDLLGPNQPVILHLLDIPQMIEGLNGVVLELEDCAFPLIAGIVATTDVKEAFTGVDIALLVGAMPRREGMERADLLKANAGIFKGQGKA

SEQ ID NO: 339254 - protein, 50 aa, Zea mays
  Clone ID: MRT4577_72569C.1.pep
ISLVCFQRPTLFPKVICSRKLERNWLYLYPLMPNKEGAIYSTQICSVKTI

SEQ ID NO: 339255 - protein, 153 aa, Zea mays
  Clone ID: MRT4577_7256C.1.pep
MSRRFQLPPILTCLITVLISGTASADTPDCPYPCLPPPSAAGAINSYPPPQPSTGGGGGLGGSFPPPPPGSFQLTPPGAIPAGFSPPYSGFPSGPAPPPPNPVLPWFPWYYQRTNPITGSTTSASSPAMDARSTTLTVAVLFHLSLLVLVRVL

SEQ ID NO: 339256 - protein, 49 aa, Zea mays
  Clone ID: MRT4577_72570C.1.pep
WDRRLVSQHSKDSWGLPEQRSSSIFVSASQLLNILIISSHQRLLAYMTH

SEQ ID NO: 339257 - protein, 47 aa, Zea mays
  unsure (1)..(47): unsure at all Xaa locations
  Clone ID: MRT4577_72571C.1.pep
XXLALXXXAXPRFEVXAXSEXRTXRSXYWMESGRXPXXQXEKKCRGA

SEQ ID NO: 339258 - protein, 112 aa, Zea mays
  Clone ID: MRT4577_72572C.1.pep
RPPFFFFFFFFFFFFFFFVFFFFLVGFFFFFLKKGGKPLIFVEGVQTQFLFVAGQKQATNLFFHLLTGQGGIPPDKTSFVGRKFPYCFVPGNTFTLIFPSPAFSGNKNILPL

SEQ ID NO: 339259 - protein, 92 aa, Zea mays
  Clone ID: MRT4577_72573C.1.pep
TIFPESVSTAGSMYPKNLNFPCFQKGNLRTTKKNSVVTFVGARYWPNLNPNFLGGILGKLRLQNLQLGQQLQVPHEQPSFPGGPPLVPPNHN

SEQ ID NO: 339260 - protein, 63 aa, Zea mays
  Clone ID: MRT4577_72574C.1.pep
PSLSLLSIVRPSCAVEEYNSFGVIGLNPTGAMMGSLQALSHVPFVSVSSSACSKLSNGLRAAA

SEQ ID NO: 339261 - protein, 156 aa, Zea mays
  unsure (1)..(156): unsure at all Xaa locations
  Clone ID: MRT4577_72575C.1.pep
MGKSKKGGSSSHHSGDKRKREPXPPSEDFGDSEYLEEEFSFGSYGSPTPASPRASSDDSDDSQGIATEVXTYIRAIERAGLEGSDESEDSPDEEDSSDSSEESGGGDDGEGDDCGRGGGDGDGDSGEGSDKGDGGSGGSKGGNSKGSGRGSNKASG

SEQ ID NO: 339262 - protein, 55 aa, Zea mays
  Clone ID: MRT4577_72576C.1.pep
GGAAPAPPPPPWASLADYSIGSVWWERDGMRFLEAASAVSRSGEAGGLGCEYAIN

SEQ ID NO: 339263 - protein, 162 aa, Zea mays
  unsure (1)..(162): unsure at all Xaa locations
  Clone ID: MRT4577_72577C.1.pep
RGKKGGHKAKGTGARALRRDPGPPRVNPPPAGDNAPPQGGSPPPKGGPTARKGDKGGPPQXLPPPTKXDGPPKGLTGSSQGIPRPPGVKPPPHKXNGPLKGKMGPLKARGNPPPTGTKXPQFPPKGVSAQVQTFFFFFFFFFFFFFFFFFFFFFFFFFFFFF

SEQ ID NO: 339264 - protein, 48 aa, Zea mays
  unsure (1)..(48): unsure at all Xaa locations
  Clone ID: MRT4577_72578C.1.pep
EAIWEMETLKKESXKERPLIMKLLCDKLTLWTFEISEDPAEKIREGPK

SEQ ID NO: 339265 - protein, 91 aa, Zea mays
  Clone ID: MRT4577_72579C.1.pep
PVQGAQGEHQAPPHPQQKPRDAAQEVHDPQRPRPLHRRHQQDAPQPHRQPPQLRPAPQRGPTLPPHRRMERKSRPGVTSSTSMMSPYMAGG

SEQ ID NO: 339266 - protein, 49 aa, Zea mays
  Clone ID: MRT4577_7257C.1.pep
LTPRTSWSTTPASRGRGWSDSTASSSPYITWRYPPQCHIPKECKLKFPK

SEQ ID NO: 339267 - protein, 183 aa, Zea mays
  Clone ID: MRT4577_72580C.1.pep
MALGALARLLRLAPTPRLARPFAAKVRASRPQEPELPSEDDNDFAGGELTAPTEGIGKPLAEVLKELGKRVPDSLVKTRVENNGFAIKYIPWHIVNKILNIHAPEWSGEVRSIVYSFDGKTVSVVYRVTLHGIDAEIYREATGTASVDDTSYGDPIQKAEAMAFRRACARLGLGLHLYHEDMS

SEQ ID NO: 339268 - protein, 96 aa, Zea mays
  Clone ID: MRT4577_72581C.1.pep
MAAALMDVAAASAVVFSAVASVSTAASSCSNKKAPTAFVAAAFAKKPETPTTADVAQEKHEELERCIDECESGSEVVFRSIVRNRVSLLNIHSPAI

SEQ ID NO: 339269 - protein, 345 aa, Zea mays
  unsure (1)..(345): unsure at all Xaa locations
  Clone ID: MRT4577_72582C.1.pep
FGGNGVIASXEHCNDFMLLGTEAVALGRVGXDFWCTDPSGDPNGTFWLQGCHXVHCAYNSLLMGNFIHPDXXRFGSTHPCAAFHAASRAISGGPIYVSDSVGQHDFALLRRLALPDGTVLRCEGHALPTRDCLFADPLHDGRTVLKIWNVNRFAGVVGAFNCQGGGWSPEARRNKCFSEFSVPLAARASPSDVEWKSGKAGPGVSVKGVSQFAVYAVEARTLQLLRPDEGVDLTLQPFTYELFVVAPVRVISHERAIKFAPIGLANMLNTAGAVQAFEAKKDASGVTAEVFVKGAGELVAYSSATPRLCKVNGDEAEFTYKDGVVTVDVPWSGSSSKLCRVQYVY

SEQ ID NO: 339270 - protein, 83 aa, Zea mays
  Clone ID: MRT4577_72583C.1.pep
TGAKKRPTGSTRPKQQTLKNKGGIKKTQKGADYTKTNPPHGKNLKWSTLLFPNPSGDKGTKAPLGMVSNPHLSVQAGGPREQL

SEQ ID NO: 339271 - protein, 92 aa, Zea mays
  Clone ID: MRT4577_72584C.1.pep
PPHINKDHNHLNMHQPYVLDTKTCWLPILGLASMCRFLSFFLGFKCLKKINEKDNGNLLYCDIGIDRKSHNWYANWLLPFVLMNVNLEMCNS

SEQ ID NO: 339272 - protein, 90 aa, Zea mays
  unsure (1)..(90): unsure at all Xaa locations
  Clone ID: MRT4577_72585C.1.pep
RXGNPRVDHTLPAPPNQTIKHFLQPKRQRPPGGPQEGEAGVHQPSFQSNWPWRQRPAKAGGSPCPAGCLAMPLRPTSTNWGPRPPRPQLP

SEQ ID NO: 339273 - protein, 100 aa, Zea mays
  unsure (1)..(100): unsure at all Xaa locations
  Clone ID: MRT4577_72586C.1.pep
MLVIRAYXAAAPMDSIRHHLLDEPXRTHTASAAPRPVYCRSTSFRSLVADQWSESLPFRPDHPDYMVVFGALRDAFSQGWLPHGSFAAMKPEPLAFPDFP

SEQ ID NO: 339274 - protein, 358 aa, Zea mays
  Clone ID: MRT4577_72587C.1.pep
MASLAFLRVSIVRDCWNSRGNSLQDSLSHPLPLCTLNVLRRGSSPTVRMDDTEAAKNTATTGPTFASPLFSFSNLGGASFGSGFGFKSSAPLPPAIEVQLCEESPVPAARLEPVVVDDSLTIYKGRVSTSDVFGVKDSDLVPGKYEGGLKLWEGSLDLVKALNSDIKEDKFHLEGKRVLELGCGHGLPGIFAGLKGADLIHFQDFNAEVLRCLTIPNVKVNLFKDSPEGTCTCPIVGFFAGDWSEMDKLLLCGDAEQDKTASGDTEGKMCNGYDIILMAETVYAVSCLPNLYRLIKKCLRYPGGVVYMAGKKHYFGVGGGTRQFLRLVEKDGAMHPERLNDVADGSSNVREVWKFSFK

SEQ ID NO: 339275 - protein, 192 aa, Zea mays
  unsure (1)..(192): unsure at all Xaa locations
  Clone ID: MRT4577_72588C.1.pep
PFQYQPSLGIIENNGTPPAVIGTGGYXQSTSKPETTCAELRVSXRFCEHQVSGSENDPIKAVKLPERCKISKDHKVLPIDVRVLNDMTTHASYLPDKQHPTTQKCNDSGEDSKNVITSSQQESSCSGRKPILLGEHGGSLTGSISELMSKSVMNPIAITPRVHTDHLTTGIPHGNIFSAAVEKEESTHKRGE

SEQ ID NO: 339276 - protein, 103 aa, Zea mays
  Clone ID: MRT4577_72589C.1.pep
PPKTRGIKKTEQQDWKDLFKRTPPFSGVEKLNRLQKDSPPPKKTKGEKQKSDPGKTIWTQTKPEGNSGGEHRPRKKNTRMGMKSGTGPFGPEALYGLRQCKNP

SEQ ID NO: 339277 - protein, 95 aa, Zea mays
  Clone ID: MRT4577_7258C.1.pep
KYLVLSRWSQWRVFRTPPAIRRRRSRRELSLAPLGPGTVACASMPPDSGGRARRGQRTSPWSALERSLSWSKEEGACDREIDNSILRWWRVPSEE

SEQ ID NO: 339278 - protein, 126 aa, Zea mays
  unsure (1)..(126): unsure at all Xaa locations
  Clone ID: MRT4577_72590C.1.pep
VPRGRPGMVSXARSRDRAVTSEGSDEEQGHEMVAMKFISEVNRTTRTVREIENHRPSGTPTSSGQGGGDSHAPCDRDGDAAIEIVPGSATRRSIGEGXPPRPPXKHPPLFFSPFFFFFFPPPPSPP

SEQ ID NO: 339279 - protein, 55 aa, Zea mays
  Clone ID: MRT4577_72591C.1.pep
QRPGEVAEFVRLQVGICRDLPQVGIHQSPHGQHGSSASLSAWRLRLAALLFVALV

SEQ ID NO: 339280 - protein, 210 aa, Zea mays
  Clone ID: MRT4577_72592C.1.pep
GRNSPVDPRVRWEAVIEAADTTLVTTEWAMYEIAKHPEKQEYLYQEIRKVCGNKTVTEDHLPELPYLNAVFHETLRRHSPVPLVPPRLVHESTNLAGYEVPAGTQMIINLYGCNMNKSDWDAPEEWRPERFLDGSFEVADMYKTMAFGGGRRACAGSIQAVNIACTAIARFVQEFAWTLKEGDEDKDDTIQLTTNRLYPLHVYLTPRGRK

SEQ ID NO: 339281 - protein, 97 aa, Zea mays
  unsure (1)..(97): unsure at all Xaa locations
  Clone ID: MRT4577_72593C.1.pep
NGTRIQVQTSTIYYTVTSSSPRSYPPPPRQPRRRHRRPPSPRCAPRQPPPSRRPPSWPPCRRPSPPRRRRPPRPXVTLSPPPPXPPLASRSSPRPAA

SEQ ID NO: 339282 - protein, 68 aa, Zea mays
  Clone ID: MRT4577_72594C.1.pep
GFTGPDFKGSAVRGWGGCCRQTLLMSSALVCANNKILRLHESSVMRQVSYNSEFSSFGVPLLIKATGR

SEQ ID NO: 339283 - protein, 77 aa, Zea mays
  Clone ID: MRT4577_72595C.1.pep
YLPLRFPEPSQSCRQQAFWISPTTSCLGGTYNDSLVLFLSSPERPLESSNTLYISPVHTSHFTESSFDPTPYVRADP

SEQ ID NO: 339284 - protein, 92 aa, Zea mays
  Clone ID: MRT4577_72596C.1.pep
SYTKLAIKPETLNHLQYIIAFLLVHRSRASDNQRSIRKPSGQEQNEGKLKTRSANKKKQAYKLRLARWLLVPPTQIGNRWRRRLVSLAPVTR

SEQ ID NO: 339285 - protein, 94 aa, Zea mays
  Clone ID: MRT4577_72597C.1.pep
HLVRQFPHSSFVCHSPLAAVTTREVPKSGLASTNVLYTTGTGGPGNNNPRNVNVGNVGPGNVNVGPGNVVNVNVGPGNVNNANVNANNVNAKNP

SEQ ID NO: 339286 - protein, 43 aa, Zea mays
  Clone ID: MRT4577_72598C.1.pep
GHPIGMSGARIVVHLAHALKHGEFGLASICNGRGRASAVLIEK

SEQ ID NO: 339287 - protein, 174 aa, Zea mays
  Clone ID: MRT4577_72599C.1.pep
VGPIPSSLAALPGLRYLDLSGNMLSGAIPPELLHGSSRFLILSNNRLTGEIPGDYGDGDVDTIDLSHNQLTGDPSSFLFGITKPAVKIDLSWNQLEFDLTEVRFPHHLRFLDLSHNRVRGRVAKSLMDVRLEHFDVSYNELCGELPAGRFMSMHGAECYAHNKCLCGTPLPPCN

SEQ ID NO: 339288 - protein, 291 aa, Zea mays
  Clone ID: MRT4577_725C.1.pep
RASAEVLGKGAFGTAYKAVMENGSAVAVKRLKDVDLPEPEFRERIAAIGAVQHELVVPLRAYYFSKDEKLLVYDYMSMGSLSALLHGNRASGRTPLDWETRSAVALAAARGVAHIHSTGPTASHGNIKSSNVLLTKNYEARVSDHGLPTLVGPSFSPTRVSGYRAPEVTDIRRVSQKADVYSFGVLLLELLTGKAPTHAVVNEEGLDLPRWVQSVVREEWTAEVFDQELLRYQNVEEEMVQLLQLAIDCSAQHPDRRPAMSEVATRIDEIRRSSLGDRQVADSAEGDEPSL

SEQ ID NO: 339289 - protein, 91 aa, Zea mays
  Clone ID: MRT4577_72600C.1.pep
ITWISSPCANYPLLRLNQNRGPKRGTRTCRHQRHHVARRLRYPLFSVHRRVAENEPDATPEIDRAANAAARRGGATERTNEHFWATCTRSP

SEQ ID NO: 339290 - protein, 108 aa, Zea mays
  unsure (1)..(108): unsure at all Xaa locations
  Clone ID: MRT4577_72601C.1.pep
MTSGEIACTYAALILNDDRICITAEKIATIVKRGNINVLALLRETLRELLEKRNVXALILSDESAGEAAPLAADAPGDDDTTAAGPAVYEXTGEAEEESDDCWIHLFD

SEQ ID NO: 339291 - protein, 106 aa, Zea mays
  unsure (1)..(106): unsure at all Xaa locations
  Clone ID: MRT4577_72602C.1.pep
EPGERQVQGSRSRTHQRREGLMSSAWHPETPPNAGLPXGEHAQQHKGAHPDVTAHLSXAPEVRDYRFQTCAATLSNDGVHQESQVDRPQDQASTRAGQWARTLVAD

SEQ ID NO: 339292 - protein, 57 aa, Zea mays
  Clone ID: MRT4577_72603C.1.pep
VLAKNTLKIMPFKLPHVSLYDVLVRMIAVEICGSDVHYLTEMRIAHFTVKEPMVIGH

SEQ ID NO: 339293 - protein, 43 aa, Zea mays
  Clone ID: MRT4577_72604C.1.pep
NELKDFSNKSGAEGSKSAESGPMFLDVLECYLKYEVYLLLDQQ

SEQ ID NO: 339294 - protein, 91 aa, Zea mays
  unsure (1)..(91): unsure at all Xaa locations
  Clone ID: MRT4577_72605C.1.pep
MEWFYILGFLLLADRLLAALVCEYLEXPQLSHTMKLYFPECNLPDFXXNELKDFSNKSGAEGSKSAKSGPMFLDVLECYLKYEVYLLLDQQ

SEQ ID NO: 339295 - protein, 43 aa, Zea mays; identical to SEQ ID NO: 339293
  Clone ID: MRT4577_72606C.1.pep

SEQ ID NO: 339296 - protein, 98 aa, Zea mays
  Clone ID: MRT4577_72607C.1.pep
RVALLEMGSPVQVLLVPVGPVLFPRGSAQKKNLGVPPAPGPKKGGEKGARGWVLAVACSPVFLILVAGGLVKKALPSKWGQTNGSGSGETLFDRFPLS

SEQ ID NO: 339297 - protein, 76 aa, Zea mays
  Clone ID: MRT4577_72608C.1.pep
AGPDPHGEAPDPCLSLQAQRGMPYVHVNPPATNSWLLTCGSIQPQHLVPLRVTIAPSPHPMSSPRPPKVPFCPRAE

SEQ ID NO: 339298 - protein, 76 aa, Zea mays
  Clone ID: MRT4577_72609C.1.pep
GPSRPAGMHNHITILHHIQKKLPMYPCRHAAQRAARSGTARRNMEWKTCVEHDLSCLFTINGMHEATLSRDSKSLG

SEQ ID NO: 339299 - protein, 59 aa, Zea mays
  unsure (1)..(59): unsure at all Xaa locations
  Clone ID: MRT4577_7260C.1.pep
RPXPASTDNKPFATHSTLWEAPTIDTGVFPTDSPPYSYLLDCFPYASLTCFTTLKTQSS

SEQ ID NO: 339300 - protein, 133 aa, Zea mays
  unsure (1)..(133): unsure at all Xaa locations
  Clone ID: MRT4577_72610C.1.pep
LERERESXGERERERESRERERPRERESPRERERERERELEYARAPESXRVRGRPPESQRERESQRERERELHESESRESQPPRVSPESRESRPSRESALFREREGRERERERERERERERERVERERERERE

SEQ ID NO: 339301 - protein, 183 aa, Zea mays
  Clone ID: MRT4577_72611C.1.pep
WEPRGFAFVEFVDPYDASEAQYHMNRQVFFGREIAVVLAAESRKRPEEMRSRTRVRGYSGHEGRRSSYYGRSRSRSPRYRGRPRSRSYSPAPRRGNDYSASPRRQEAHRSSPPRRLPKEHDEDKKRRSYSPASRDDADNVYEKRSPPADSDGSPLHRRSPKEYSGSPPGSRSRSADDSPVASD

SEQ ID NO: 339302 - protein, 56 aa, Zea mays
  Clone ID: MRT4577_72612C.1.pep
NLPLLRLINLLGEIVVDSKNFDEHTIMKHIDYSTMRRVMNLDKINGIELYVMFFFQ

SEQ ID NO: 339303 - protein, 198 aa, Zea mays
  Clone ID: MRT4577_72613C.1.pep
TAPASPASSSSRELPSPSTPAALPLQAPSPSSSAWYSLFRAHREAPLLARQRSSFPATWTFPARPLAAARALPPWPRPLSRPARLLYARRSFLYSVPCRPAPSSWRRSALSFLPLFAHAQACFAELAPARPALPSSALVVRAPLLAEAPSLCTLRPAEVSPATVPLKVLCSVPLRAPWWLRVLLPAELGTVCLATLGL

SEQ ID NO: 339304 - protein, 63 aa, Zea mays
  Clone ID: MRT4577_72614C.1.pep
AWSDKDIGLMTACAYHSYWSIHRSISHWQQENRRRTWSGIQEVSPSTLWGTCGAKEIHFFLLG

SEQ ID NO: 339305 - protein, 45 aa, Zea mays
  unsure (1)..(45): unsure at all Xaa locations
  Clone ID: MRT4577_72615C.1.pep
ETTTANSLKSPTHGGLCPFNLGNRGIMVGXKTRGPRGLPRVTHGR

SEQ ID NO: 339306 - protein, 258 aa, Zea mays
  Clone ID: MRT4577_72616C.1.pep
MRRYSPPYRSPPRRGYGGRGRSPPPPRRGYGGRKEGSGSLLVRNIPLSVRAEDLRVPFERFGPVRDVYIPKDYYSGEPRGFAFVEFVDPYDASEAQYHMNRQVFFGREIAVVLAAESRKRPEEMRSRTRVRGYSGHEGRRSSYYGRSRSRSPRYRGRPRSRSYSPAPRRGNDYSASPRRQEAHRSSPPRRLPKEHDEDKKRRSYSPASRDDADNVYEKRSPPADSDGSPLHRRSPKEYSGSPPGSRSRSADDSPVASD

SEQ ID NO: 339307 - protein, 30 aa, Zea mays
  Clone ID: MRT4577_72617C.1.pep
AISVPLPACYHLLPIEEPILIALAANHWST

SEQ ID NO: 339308 - protein, 55 aa, Zea mays
  Clone ID: MRT4577_72618C.1.pep
SKSMFNNIAYNALYDIVMSYNQLKGCSYNNLLMIQAVYLIFGPHLFLIESLGVSE

SEQ ID NO: 339309 - protein, 134 aa, Zea mays
  unsure (1)..(134): unsure at all Xaa locations
  Clone ID: MRT4577_72619C.1.pep
LRGQWSASSLGWSSGTGQRPTTTRRPSTTGGGAVTPSSNERRRRKRAHRRLPRHPAIGARTHAYPLPSLLRPDCSTANCSLTAHHATIATSLHDPIYHMLSLHALIDPSCTFEAPYACIVTCCLFTTAPGXTTA

SEQ ID NO: 339310 - protein, 72 aa, Zea mays
  Clone ID: MRT4577_7261C.1.pep
SATRRSRRHRSRGSGNSSMNATDGEGKEKTKEKSKKGTRKNRKKQDKSTGVDASGTCQGGPAVPKKSTLPCR

SEQ ID NO: 339311 - protein, 121 aa, Zea mays
  Clone ID: MRT4577_72620C.1.pep
GRISGLPVRALDRQQHRVLWSGRQTSSRRASGRRPGRRMAGDEQQPPPPSAGDEQQPPPPSLLLGLECFAQCSSRCACAAGRLRVSRRSAMHLHSVVGWWHGPWATGLALAGQGARTLGEA

SEQ ID NO: 339312 - protein, 111 aa, Zea mays
  Clone ID: MRT4577_72621C.1.pep
LRSLVIGIEVVPAPQALDTGHLVGRYWCRVVCAARFQVMYCACPNVAKCRCSLRRRVRVHSHGSSSCKRQSSQLNPLCGQRLSAVYGMSLQHLSAQCVSSVLWRLKSLIIR

SEQ ID NO: 339313 - protein, 47 aa, Zea mays
  Clone ID: MRT4577_72623C.1.pep
LTDIQKITEENKITNPQNENHSYNCTSFTQLSFKSRTDTHRTQKSHH

SEQ ID NO: 339314 - protein, 46 aa, Zea mays
  Clone ID: MRT4577_72624C.1.pep
LSLLRFLQCCSSARAVTPVSSSIRGCVCVGRRRRWYPGLTSAGRAR

SEQ ID NO: 339315 - protein, 148 aa, Zea mays
  Clone ID: MRT4577_72625C.1.pep
AHSHGWEQGCRYWKIAEWRECSGAWGGDGHEVAATALPPVQEPVLPPRMGRIGGKRGRNDMPAQILEVNQAELMKNRPKQDKSKLTGLAFGPSYQPAPSAKGKPSKLHKRKHQIGSLYFDMKSKEMELAERRSKGILTKAETQAKYGW

SEQ ID NO: 339316 - protein, 69 aa, Zea mays
  Clone ID: MRT4577_72626C.1.pep
DCCTISSTTFTSIVDAVKLKFSFHHIFLRGSYIETNNSAACGPFIPVSVDFVNPTVVGYQNFVGYELLV

SEQ ID NO: 339317 - protein, 54 aa, Zea mays
  Clone ID: MRT4577_72627C.1.pep
PSSLLFLQFLPLPALLTITSMDIQPPSPPSPILQYCDTTISALDSFKDFILKAL

SEQ ID NO: 339318 - protein, 94 aa, Zea mays
  Clone ID: MRT4577_72628C.1.pep
SCEERVDLLDLQTRGELRQGHGRSVCVMCALLVALGFAEDWKAAAQMIREKRPSISMNTLHRKSLEEWSKHLLSSKRSGESDVSSVIHSDYNRK

SEQ ID NO: 339319 - protein, 185 aa, Zea mays
  Clone ID: MRT4577_72629C.1.pep
SCEERVDLLDLQTRGELRQDGVFVGGWPSSVEHLPPGDPAIIDCTCELPKSSTISNNAYLCIATWDTRAPQPSQIESAVQWAVRKRSQNKPVYVHCAYGHGRSVCVMCALLVALGFAEDWKAAAQMIREKRPSISMNTLHRKSLEEWSKHLLSSKRSGESDVSSVIHSDYTGNKLTSKGQACSVA

SEQ ID NO: 339320 - protein, 55 aa, Zea mays
  Clone ID: MRT4577_7262C.1.pep
EYLIKILSIKACLSCSMSGFSGGHGDWLLDKVLAYNVSDSPAIRLLVHQRTTHSI

SEQ ID NO: 339321 - protein, 338 aa, Zea mays
  Clone ID: MRT4577_72630C.1.pep
MGWGISRLIGLKAAALLSVACFFQGLGVTLISFPLIYASIIAILVSIASRPSIDLPLLLGKASDGSFPLWSWIIFSPFLLFIHLFVLLRRFVKNEPLYTEVADGVFVGGWPSSVEHLPPGDPAIIDCTCELPKSSTISNNAYLCIATWDTRAPQPSQIESAVQWAVRKRSQNKPVYVHCAYGHGRSVCVMCALLVALGFAEDWKAAAQMIREKRPSISMNTLHRKSLEECNRLIQLSMADDIGSRVDFGILSLLISDKLISNNVKIASPFLHLSIDRSGLASYNLLVSLCDRLLSAHENVFAKILDLKKAFNGYSVTLTAISALWQGLQFRCCGAEAL

SEQ ID NO: 339322 - protein, 103 aa, Zea mays
  Clone ID: MRT4577_72631C.1.pep
MAYVDHAFSITDDEDLVGGAVGGPRGAPVKEIAFAAALLAFGVLGVVAGSFMAAHQVGGDRAHGIFFAVLGGVMFIPGFYYTRIAYYAYKGYKGFTFSNIPPI

SEQ ID NO: 339323 - protein, 70 aa, Zea mays
  unsure (1)..(70): unsure at all Xaa locations
  Clone ID: MRT4577_72632C.1.pep
MLRLVVPSRRXLQSSSDSXGAIPDPNPKRIPGIPXXDPPVVVNSDVVVIXXVLFCVLICXVGLAVVXRWA

SEQ ID NO: 339324 - protein, 116 aa, Zea mays
  Clone ID: MRT4577_72633C.1.pep
MPTTMPGRGSVRRFKDGSEVHDTTGTAGLDDASNAPDALLGLYDCPLTEYTATSYNYCQPLAVGRMTGARLPIWQVYEKSLRMHYRLTSRQADELMNEVQDNLKLIAQMKEWDPWE

SEQ ID NO: 339325 - protein, 99 aa, Zea mays
  Clone ID: MRT4577_72634C.1.pep
FLYFFGFGQKDYQRLTMCFYRGTGQGFHLPAFFVQTENCMHGLHLTLPPIAKRDRVLCLFATAKEEEGPLLLLFYKCAFFNNHMIGGGHPLAEPLVTLS

SEQ ID NO: 339326 - protein, 124 aa, Zea mays
  unsure (1)..(124): unsure at all Xaa locations
  Clone ID: MRT4577_72635C.1.pep
PNQISYTPTPSNYVKRSPPSYPISIIFFYIFQSITTSPQSLKNILFNLNPLSFYNTSFFFGGVGGRXXTXTXPKKNPKYTNILLHILKYILSKSFLFTLIFILIYIYLTLLXYKFLPQSTLIYI

SEQ ID NO: 339327 - protein, 77 aa, Zea mays
  Clone ID: MRT4577_72636C.1.pep
LPPSFLPRHCAARVRRQPITHSHSLDRSRPRTNRQKARRRWRRAGMAPSGTPGRPSNGSTRGSKRSCSPTRSSSAPR

SEQ ID NO: 339328 - protein, 42 aa, Zea mays
  Clone ID: MRT4577_72637C.1.pep
KENWLAFKFPFGIKFPVQQLPNLGPALFCFFFFFIFLIDYFF

SEQ ID NO: 339329 - protein, 64 aa, Zea mays
  Clone ID: MRT4577_72638C.1.pep
RRSRFPTPNHFPFHLSFLLFFRCPSFFLATPLSFGPECAQDYRHHMFPFRFGRVVIFTVLYTSP

SEQ ID NO: 339330 - protein, 42 aa, Zea mays
  Clone ID: MRT4577_72639C.1.pep
GITGFNTHNTNQLEAWQHALATKHLPDHTQDKWDRNSLGSPT

SEQ ID NO: 339331 - protein, 101 aa, Zea mays
  Clone ID: MRT4577_7263C.1.pep
VRGGRSRVELETDFGDLLVVGAPWAGARTPPYLFTAASAMLHAVCRTCHRCDSAGGISMACVNTLLRCSRHTPWLNSGESAAAIYAAGSRIECPMAEEFAD

SEQ ID NO: 339332 - protein, 92 aa, Zea mays
  Clone ID: MRT4577_72640C.1.pep
DLGKEPLYRVLNTRHRTALGKGGSQQRAISGHPKADGRQSLPRANDWHSAKSSLPSVNWVTLGKVNDIIFPSVPWVTLGKDAFPTRPTRRVP

SEQ ID NO: 339333 - protein, 63 aa, Zea mays
  unsure (1)..(63): unsure at all Xaa locations
  Clone ID: MRT4577_72641C.1.pep
TGEYNVYILFRKFSXSVXALPVQSLFFLAXRSPLSALCXACCRMLCQRLXCCLVGXGRVRRPG

SEQ ID NO: 339334 - protein, 104 aa, Zea mays
  unsure (1)..(104): unsure at all Xaa locations
  Clone ID: MRT4577_72642C.1.pep
MARIKVHELRGKSKTDLQAQLKELKSELSLLRVAKVTGGAPNKLSKIKVVRTSIARVLTVIXDLRPKKTRAIRRRLTKHQLSLKTEREKKREKYFPMRKYAIKA

SEQ ID NO: 339335 - protein, 112 aa, Zea mays
  Clone ID: MRT4577_72643C.1.pep
MARIKVHELRGKSKTDLQAQLKELKSELSLLRVAKVTGGAPNKLSKIKVVRTSIARVLTVISQKKNLLPLDLRPKKTRAIRRRLTKHQLSLKTEREKKREKYFPMRKYAIKA

SEQ ID NO: 339336 - protein, 42 aa, Zea mays
  Clone ID: MRT4577_72644C.1.pep
VFTLFCFSHLAFILCVFLGRNIWVFSRVPCRLVSNFFSLPLF

SEQ ID NO: 339337 - protein, 123 aa, Zea mays
  Clone ID: MRT4577_72645C.1.pep
MARIKVHELRGKSKTDLQAQLKELKSELSLLRVAKVTGGAPNKLSKIKVVRTSIARVLTVISQKQKSALREAYKKKNLLPLDLRPKKTRAIRRRLTKHQLSLKTEREKKREKYFPMRKYAIKA

SEQ ID NO: 339338 - protein, 54 aa, Zea mays
  Clone ID: MRT4577_72646C.1.pep
NSARGRSLHSLYTIMESLMEQLWLLKSSGCSKALVILLVAHPCTLIRSERINLS

SEQ ID NO: 339339 - protein, 123 aa, Zea mays; identical to SEQ ID NO: 339337
  Clone ID: MRT4577_72647C.1.pep

SEQ ID NO: 339340 - protein, 122 aa, Zea mays
  unsure (1)..(122): unsure at all Xaa locations
  Clone ID: MRT4577_72648C.1.pep
PVASGRLGPSVSVALVFVVLGGLLXGVXGAVPVSXPVXRVSXLLRPPAPRAPPRARXPRRXRXSXXPGXAAPSRXSPPXPPXXPPPXGXGXFPRLGXPPPPSXXXAAAPPPXXAAEMGALLG

SEQ ID NO: 339341 - protein, 225 aa, Zea mays
  unsure (1)..(225): unsure at all Xaa locations
  Clone ID: MRT4577_72649C.1.pep
MDALNFEYLDYERLNKGAEGAKRKRVVSVLSRQAARMVREDEKTLKKKKSSPEPKLATSKKRKTATPEPKMAEIEEEAPSTPSTAEVEEILKVMTESLPIKLLSPLGPHLTKLLQKKDDPSTAKKVVGPKKRRIVTVMQAIEETPPSASASKMTPAAKADTSAEARAIEATNLESTLSVIDKVLLDMAAEETAVATEEALAVVPEKGKEIAEDNSEXKGFSFQNL

SEQ ID NO: 339342 - protein, 45 aa, Zea mays
  unsure (1)..(45): unsure at all Xaa locations
  Clone ID: MRT4577_72650C.1.pep
XXXHLRXXSSRXXIEPTDYHEXQKNXHHXSTIHTQLXFXXTHXTX

SEQ ID NO: 339343 - protein, 207 aa, Zea mays
  Clone ID: MRT4577_72651C.1.pep
MSDETATKFETVSDLPPSLAAAASQMVQYAGTCVELETDEVTKQDKRRFDWPSFKKCFDDYGGIDLAMLDYKEFTISRSEIDLSMMVQRIVESFVREFHIIGYENVTTLLRTTIEKTFTNLEEKSSNECLYFSKSAGGQGSFWEYGVHIAVPIPSSANSFHSFITTIKLEADVSDQNDWWGLTGSSRKNFSATMNGMKFEVEEGFKN

SEQ ID NO: 339344 - protein, 93 aa, Zea mays
  Clone ID: MRT4577_72652C.1.pep
MARAASSYISRRGLSAAITVAESSAKKVEEKAVKLGTVAKDIASAMATTTEEKTAFWEPDPETGFYRPVTGTKEVDAADLRAEMLKQRMLQQD

SEQ ID NO: 339345 - protein, 67 aa, Zea mays
  Clone ID: MRT4577_72653C.1.pep
PLCLAHLFKFLGYTGRTNQWDHQATTPGRRITCDLRKHRPIWGRTPKVSTVSPNWSSLTISGSHKSA

SEQ ID NO: 339346 - protein, 166 aa, Zea mays
  Clone ID: MRT4577_72654C.1.pep
MELLRDSISMVSLAVLVTAVCARAASSWLRPGLPRLASLLPMVAFLAAAPLAFSSAIIRGLAGFFLGWLGVFKVVLLAVGRGPLDPALPVLPFVFTTALPVKLRCSSTGAAAACRAKSVSLVSCAVKVAVIAAILHVYQYTDQLHLYTRLALYSVHIYCLLDFLLP

SEQ ID NO: 339347 - protein, 101 aa, Zea mays
  Clone ID: MRT4577_72655C.1.pep
SRSVHGWSAPIRHQCRAPESQAHGHGHARHVARKQPGTDGRATILAVAKPCHGKQAGAPARQQVGAAQRARYPYEVDPAVDAARVERVRAVAQPPHPVRRL

SEQ ID NO: 339348 - protein, 68 aa, Zea mays
  Clone ID: MRT4577_72656C.1.pep
GKRLQTVKLPVDKTTSCCFGGKNYSEMYVTCARDGMDPEGLLRQPEAGGIFKITGLGVKGIAPYSYAG

SEQ ID NO: 339349 - protein, 102 aa, Zea mays
  Clone ID: MRT4577_72657C.1.pep
MAAGKLGQQLMTRLHLARTRSSATADVPRGHLAVYVGEGRKRLVIPTACLSHPAFVTLLKRVEDEFGFDHRCGGLTIPCASETEFAHIVGAAAAAGDDHHHH

SEQ ID NO: 339350 - protein, 62 aa, Zea mays
  unsure (1)..(62): unsure at all Xaa locations
  Clone ID: MRT4577_72658C.1.pep
RDRAVRICCRCCSCLMPRCPPFFILLCLAVVWLWCTSSVYNSLPFELVSRPRHLXDLCFASS

SEQ ID NO: 339351 - protein, 50 aa, Zea mays
  Clone ID: MRT4577_72659C.1.pep
KNELCCRFTSCKDLYVISENEKDGLLSTFTVIILLWQLVYCNTVYFEGNL

SEQ ID NO: 339352 - protein, 104 aa, Zea mays
  unsure (1)..(104): unsure at all Xaa locations
  Clone ID: MRT4577_7265C.1.pep
ARAPVRSNGKAACAMDASPVTRRGRDVRVHAGTGAWVCIPCTAPPPAIPIRTQATPFFXSQKKLGASYIRTIFDDRSLCSFFQATCSLSSISLIPPISLIPQQC

SEQ ID NO: 339353 - protein, 70 aa, Zea mays
  Clone ID: MRT4577_72660C.1.pep
VPPSCLRIFPRPPLIGRGGAYFPSASLQREPSPPGSLAPPLRDSSPPVSCSAVRPIGSLSESPPPLGFFE

SEQ ID NO: 339354 - protein, 92 aa, Zea mays
  unsure (1)..(92): unsure at all Xaa locations
  Clone ID: MRT4577_72661C.1.pep
LVPPKHGSSXLHRHQPGFWVGTGAPSLPGXRGPWDVGDEDXRSFLRASHGXLLDAPSLVADTAALDHGVFTIPRTLSCLSXRSPVSQNTAXA

SEQ ID NO: 339355 - protein, 104 aa, Zea mays
  Clone ID: MRT4577_72662C.1.pep
THDLIRTVDHKTDDHRSILLNCYPRSNTYRWPRIQRPCSLPSPGHRNPTTPRPLRRRHGRSFPRTRFLCLNFIPKVVTSSGNDRISSRGLLTVIQVAPSPTHEA

SEQ ID NO: 339356 - protein, 85 aa, Zea mays
  Clone ID: MRT4577_72663C.1.pep
GMRHRGTFRRHEAGHSTYPSPVDQRGCHSRADSYTALIPILSDHVFMANFDTQYNKPAVVYTGTILPCATRVDVLNSMTRSDAQF

SEQ ID NO: 339357 - protein, 68 aa, Zea mays
  Clone ID: MRT4577_72664C.1.pep
PAHCVPSIPYGLYIYAAVKVCVLKRYSAQSGPMVDATLSQRDRGSTVKSWNPWRSLVTRLEMAPLIIP

SEQ ID NO: 339358 - protein, 140 aa, Zea mays
  unsure (1)..(140): unsure at all Xaa locations
  Clone ID: MRT4577_72665C.1.pep
QSTLPAKYVRTGLTPRGADLDINQHVNNVKYIAWILESAPITIFENHELASIVLDYKRECVRDSVLQSHTSVHEDCNIESGETTLHCEHVLSLESGPTIVKARTMWRPKXQGPRNSGSIWQKIRMVTSILYWKQITRTVT

SEQ ID NO: 339359 - protein, 55 aa, Zea mays
  Clone ID: MRT4577_72666C.1.pep
RPLQLFPYAVAVVNRLSFKVLLFRAHLISPLFFSFSFPQNVHSNPLKKRFPPEKL

SEQ ID NO: 339360 - protein, 90 aa, Zea mays
  unsure (1)..(90): unsure at all Xaa locations
  Clone ID: MRT4577_72667C.1.pep
LKGIQERVTFDITDATDYPSLLEDPPQYAGEIREHHWVLMGWTSIANLALTVQAYCICHNELMDMTVSLDEYARADLPAXHXQLPVGPTT

SEQ ID NO: 339361 - protein, 390 aa, Zea mays
  Clone ID: MRT4577_72668C.1.pep
GAWRRLTCGGVGGIVCCRHAPLDARPGCGPQEERAKSAVAVLGHETVPTPSSVPTTFYNQLPDWSMLLAAITTIFLAAEKQWTMLDWKPRRPDMLTDTFGFGRIIHDGLMFKQNFSIRSYEIGADRTASIETLMNHLQETALNHVKTAGLLGDGFGSTPEMSKRNLFWVVSQMQAIVERYPCWGDTVEVNTWVSANGKNGMRRDWHIRDSMTGHTILKATSKWVMMNKLTRKLARIPDEVRTEIEPYFFEHSAIVDEDNRKLPKLPEGQSTSVAKYVRTGLTPRWADLDINQHVNNVKYIAWILESAPISILENHELASIVLDYKRECGRDSVLQSHTSVHTDCNIESGETTLHCEHVLSLESGPTIVKARTMWRPKGTKAQETAVPSSF

SEQ ID NO: 339362 - protein, 232 aa, Zea mays
  unsure (1)..(232): unsure at all Xaa locations
  Clone ID: MRT4577_72669C.1.pep
PAVRSGFPGPASAAAWADAWEXRSWVSAKVKXGMRRDWHIRDPITGLTILKATSKWVMMNKLTRKLARIPDEVRTEIEPYFFEHSAIVDEDNRKLPKLPEGQSTSVAKYVRTGLTPRWADLDINQHVNNVKYIAWILESAPISIFENHELASIVLDYKRECVRDSVLQSHTSVHEDCNIESGETTLHCEHVLSLESGPTIVKARTMWRPKGTKAXRNSGSIFILIIVRCSRW

SEQ ID NO: 339363 - protein, 72 aa, Zea mays
  Clone ID: MRT4577_7266C.1.pep
LGSWHQQAPSFPPELSSPSKCRVFVVRPSPWSNQSRDFGRGPKLQSPQQGTSSTESTPDSQHGSAHGIASRS

SEQ ID NO: 339364 - protein, 127 aa, Zea mays
  unsure (1)..(127): unsure at all Xaa locations
  Clone ID: MRT4577_72670C.1.pep
GPLGPLDIIIINQTXGGVKHVSHLLKYDSTLDIVDVDVKPVCDDAISVDXEVIMRRTDRNPSKLPXYELGIDLVIQGTGVFDDLQVEXKLIQEAANIALITVPDKCDIPTYVRRINADRYNPDQPII

SEQ ID NO: 339365 - protein, 50 aa, Zea mays
  Clone ID: MRT4577_72671C.1.pep
HVCFSSFKIIIRCESDRKLGCENFISIIMYAIRFLCSYCTLPFYRICVSL

SEQ ID NO: 339366 - protein, 175 aa, Zea mays
  Clone ID: MRT4577_72672C.1.pep
FMSLCSKWVMMNKLTRKLARIPDEVRTEIEPYFFEHSAIVDEDNRKLPKLPEGQSTSVAKFVRAGLTPRWADLDINQHVNNVKYIGRILESAPISILENHELASIVLDYKRECGRDSVLQSHTSVHTDCNSESGETTLHCEHVLSLESGPTMVKARTMWRPKRTKAQETVVPSSI

SEQ ID NO: 339367 - protein, 142 aa, Zea mays; identical to SEQ ID NO: 210430
  Clone ID: MRT4577_72673C.1.pep

SEQ ID NO: 339368 - protein, 75 aa, Zea mays
  Clone ID: MRT4577_72674C.1.pep
SYTVSTIEISEYQVPPMSVHYVMALDYLLSGPKKVAIFYNFPLTQNNGQIKPVGIHPSFSIYANKFSCSLLGCIK

SEQ ID NO: 339369 - protein, 155 aa, Zea mays
  unsure (1)..(155): unsure at all Xaa locations
  Clone ID: MRT4577_72675C.1.pep
MGKTRGMGAGRKLKTHRRNQRWADKAYKKSHLGNEWKKPFAGSSHAKGIVLEKIGIEAKQPNSAIRKCARVQLVKNGKKIAAFVPNDGCLNYIEENVSSISPAHRTLHXDEVLIAGFGRKGHAVGDIPGVRFKVVKVSGVSLLALFKEKKEKPRS

SEQ ID NO: 339370 - protein, 142 aa, Zea mays; identical to SEQ ID NO: 210430
  Clone ID: MRT4577_72676C.1.pep

SEQ ID NO: 339371 - protein, 142 aa, Zea mays; identical to SEQ ID NO: 210430
  Clone ID: MRT4577_72677C.1.pep

SEQ ID NO: 339372 - protein, 63 aa, Zea mays
  Clone ID: MRT4577_72678C.1.pep
YASGTKKESSRLVSSANQHYNKPFSWKAPAIILAFEFLESIAYSGIALNLVWYLVGTLHLNMQ

SEQ ID NO: 339373 - protein, 65 aa, Zea mays
  Clone ID: MRT4577_72679C.1.pep
METLPNSSVNNTELNQENEKTMYASKYEEARDIFVYREDVLSLKSKEDVRGVVLEVAGEYDYDGS

SEQ ID NO: 339374 - protein, 147 aa, Zea mays
  Clone ID: MRT4577_7267C.1.pep
GYLEAGPASAMRTVDLPTAAAHRPSPRAQAPSCEPLAARCGGTPFWRPADRRGPLVAWRPPRLRRVACAALQQSHAVGWRLSPCALWPAPVAASPRPPSWWLVQWCCVVAPRCPGSQPSRPRLILGGSRPPICEVEVEVLVCPFEYH

SEQ ID NO: 339375 - protein, 142 aa, Zea mays; identical to SEQ ID NO: 210430
  Clone ID: MRT4577_72680C.1.pep

SEQ ID NO: 339376 - protein, 88 aa, Zea mays
  unsure (1)..(88): unsure at all Xaa locations
  Clone ID: MRT4577_72681C.1.pep
SLLXDCTTVFVCSLRNVTGALVSPATQHVILAGKIGSSEIFFLVPRPMSVKLAWCSTKQHLKKGYIKKPKWNVHCLPELEDHATKISE

SEQ ID NO: 339377 - protein, 524 aa, Zea mays
  unsure (1)..(524): unsure at all Xaa locations
  Clone ID: MRT4577_72682C.1.pep
MVVLAASIVSKSGKALVSRQFVDMSRIRIEGLLAAFPKLVGTGKQHTYVETENVRYVYQPIEGLYLLLITNKQSNILEDLDTLRLLSKLVPEYSPSLDEDGICKTAFEIIFAFDEAISLGNKENVTVQQVKQYCEMESHEEKAHKLMMQAKINETKDLMKKRANELDKMRMERGKLDKGGYSSISGPRVIEKTFSDMSISGSGFGSGSGLGGLSTDMDSFASKPKGRPSTAATAPGKGFGMKLGKTQKTNQFLESLKAEGEVILEDVQPSAVSTRSSALPPSDPVTVNIEEKLNVVVKRDGGISNFDVQGTLALQVLNDTDGFIHLQIESQDMPGLSFKTHPNINKDLFNSQQILGAKDPNRPFPSGQNETPLVKWRIQGMDESSLPLSVNCWPSVSGNETYVNIEYEASEMFDLHNVVISIPLPALREAPSVRQIDGEWKFDSRXNSVLEWSILLIDQSNRSGSMEFVVPPADPSSFFPISVGFSASSTFSDLKVTGILPLKEGNPPKFSQRARLLTANYQVV

SEQ ID NO: 339378 - protein, 142 aa, Zea mays; identical to SEQ ID NO: 210430
  Clone ID: MRT4577_72683C.1.pep

SEQ ID NO: 339379 - protein, 47 aa, Zea mays
  Clone ID: MRT4577_72684C.1.pep
FGKNTWPFEILNKRNEPSQWVVNLTIKFFGMSKNCLGQFLRKEKKKN

SEQ ID NO: 339380 - protein, 727 aa, Zea mays
  Clone ID: MRT4577_72685C.1.pep
MAPPPLPLFSPSLKAPPPPPWLHGSSTQSRDSAPPVPPLPAEATPSKFRTDSPKPAPARKNTKTAAKPLTAGVPGGRTHRAVLGIIRRVRSLELSDAPSPNSVHTSNSGAAAAAFHLTIELSPPREPGQYVVEKEKSRAVPWAAARDEGLKVALRREKKPREPTRAETELETHELRRLRRLARGIGRWARAKKAGVTDEVVKEVRREWASGEELAAVRIVEPLRRSMDRAREILEIKTGGLVVWTKGDMHFVYRGSKYQQNAKHSHTFLTNVHKDDAFQENDQSICGQKDEEPVKGTLYEREVNRLLDTLGPRFVDWWWDTPLPVDADLLPEFVPGFKTPYRLCPPGVRPTLADEELTYLRKLARLLPTHFALGRNTRLQGLAAAILKLWEKSLIAKIAVKIGIQNTNNEQMAWNLKHLTGGTVILRNKDFIILYRGKDFLPGGVAQTVIQREAQVHDEQVKEEEARLKAVDSLQMVGELSEESSLGTFREYQGFHAKFVHENTENSNTMIELEAEKYRLEKELKDHEWKLSVLNKKIERSNQALAKLHSSWSPSEQSADREHLTEEEKIMFRRIGRKMDGLVLLGRRGIFDGVIEEIHQHWKHKEVVKVITKQNQTRQIMYTASLLEVETGGILIAVEKLTTSHAIILYRGKNYRRPAKSSFSNLLTKREALRRSIEVQRRGSMKYFVRERQKSILELKRKLRYVTRQIRYRTPMIMKSLDSMVSK

SEQ ID NO: 339381 - protein, 116 aa, Zea mays
  Clone ID: MRT4577_72686C.1.pep
LGTSRPAGRPYHHHGSPYVLLPLGSWRDYYTDEPWQEQPRRATSKARASHNDTLRCSATTPRPSASRGAHRLATCVGVLRLLPPNILGDRGGLADPCMTITMANLLHLSPYHAAPS

SEQ ID NO: 339382 - protein, 115 aa, Zea mays
  unsure (1)..(115): unsure at all Xaa locations
  Clone ID: MRT4577_72687C.1.pep
LRYHSVQSELPGPTLQQHTTTNTLVALANPCXSYSAATTSFVPFQPNVAAXXNSGFLSCNNNILTHSXPAMLRAYXPSIFLSICNQLDSVCNLSVLIVPAGNQLPTXFSPAXAGX

SEQ ID NO: 339383 - protein, 131 aa, Zea mays
  Clone ID: MRT4577_72688C.1.pep
QHTILPPTSTHVAQSSTYSIVYPRYIHRSWETVTYDVLDAYYYKKPSVGLLHLQYQTPQTELADARYGTLLRSRISRRRRRWCFPVPVRRRGGPRREGHLRAGVEGSSRRPPRRRIRGSFWSAGVGGWTGL

SEQ ID NO: 339384 - protein, 76 aa, Zea mays
  Clone ID: MRT4577_72689C.1.pep
SCTGKVGNHRELVQRLHWHLGLARRSRIVRVIFRQILIIFNHRKIGHFILIKCYQISRLIGEFIECFHLLQSTKPY

SEQ ID NO: 339385 - protein, 66 aa, Zea mays
  Clone ID: MRT4577_7268C.1.pep
RPGRAYHSTTPLRSHLRTVQRHRGATYDDDVVCATHGIPALRRRAPVPRPPVLRRAQVYGVGAVVR

SEQ ID NO: 339386 - protein, 105 aa, Zea mays
  Clone ID: MRT4577_72690C.1.pep
PGKIGHFFRRRRPFLPGTRQLFLYPHVSTTKNGGRKAKKPFVTAKTSPQGQGNFPPGALFQRGPFQNGVGRVVIKFFFFFFFFFFFFFFFFFKTFFFFFFFWFFF

SEQ ID NO: 339387 - protein, 77 aa, Zea mays
  Clone ID: MRT4577_72691C.1.pep
PRSHVQCPAVDKALGWLWANNNDISLKGKEKRGQVWPNRPRLTPYNAAATKQNPCSLSSTSNLVLIRLLDLSDRKAL

SEQ ID NO: 339388 - protein, 103 aa, Zea mays
  unsure (1)..(103): unsure at all Xaa locations
  Clone ID: MRT4577_72692C.1.pep
NTIATTTQQGGPKHLRGVRNLANTTCVANATQIPQCSQAAITYLIPPYLPSIIASPCEHPTIQPYTLQQAIEASNIPQSTMLLQQXNHISXMQSSLQTMRAQT

SEQ ID NO: 339389 - protein, 180 aa, Zea mays
  Clone ID: MRT4577_72693C.1.pep
MAAPTVVLIPFCVTGHLTSMLQAGKRMLMSGGGDLAMSLTVLLAPLPMARFAHIVEREATSGSGFDIRFHRLPDVELPAFSGPEDMISSFIQLQASNTKAAIAGLASPVAAVVMDYFCTTLFDVARELALPVYVYFTSPASMLALMLRLPTLDREVAGDFGEAETAFNVPGMPPVPAAFL

SEQ ID NO: 339390 - protein, 77 aa, Zea mays
  unsure (1)..(77): unsure at all Xaa locations
  Clone ID: MRT4577_72694C.1.pep
RSYLSIPRCSLTQCDAPTCSDSFPCTQTFRCPGQMGRSSLSPSTPTXTPHHLXSRQLDHGSHHPWIPAQVLRAALPG

SEQ ID NO: 339391 - protein, 74 aa, Zea mays
  Clone ID: MRT4577_72695C.1.pep
VSTPCGDSGLCISVPIDWSSVPVRTSHGTHSTPARDGPLTTPGGSSNITLARMIGYQHQTQPCQPWDGWWHGRS

SEQ ID NO: 339392 - protein, 49 aa, Zea mays
  Clone ID: MRT4577_72696C.1.pep
FLGFFLPVSLSVSTSPDARGCRIQRYKQAALLIYWRHLRNLLLCVSAPT

SEQ ID NO: 339393 - protein, 67 aa, Zea mays
  Clone ID: MRT4577_72697C.1.pep
QSSIPSMILQQSVSRTNWRWRIPWTCAAAAATRRFPPRSGQSRTSAPATRRRRRLRTARRRYGRRTP

SEQ ID NO: 339394 - protein, 118 aa, Zea mays
  unsure (1)..(118): unsure at all Xaa locations
  Clone ID: MRT4577_72698C.1.pep
TXNQRKNXQGRKKXQNPPPEXEDTTKKKXKEGPQRQKKPRRPEGASTTKKKNKEQQTQKQPREGAKKKKRKKRKKEKNKERKKTHRNDQQNTHKNKKKKKKKTKPPHQKHNTKTSDEP

SEQ ID NO: 339395 - protein, 45 aa, Zea mays
  Clone ID: MRT4577_72699C.1.pep
ESHIIYYVISRDVLHCSMLFAIIILPSSVIFNYLFFFLFRKCGYG

SEQ ID NO: 339396 - protein, 95 aa, Zea mays
  Clone ID: MRT4577_7269C.1.pep
ENRTHHAPIFNTIILLVATSGNNHRYKGIGSHDYRMIHRQPKAKCFCVLDHSYTVAWAGLHGKPMNNPTVPSRTTSFAYTRAIIIPWSIYAISGF

SEQ ID NO: 339397 - protein, 226 aa, Zea mays
  Clone ID: MRT4577_726C.1.pep
HSCGVVPISWLCYVSSSWCDAGNRASGRTPLDWETRSAVALAAARGVAHIHSTGPTASHGNIKSSNVLLTKNYEARVSDHGLPTLVGPSFSPTRVSGYRAPEVTDIRRVSQKADVYSFGVLLLELLTGKAPTHAVVNEEGLDLPRWVQSVVREEWTAEVFDQELLRYQNVEEEMVQLLQLAIDCSAQHPDRRPAMSEVATRIDEIRRSSLGDRQVADSAEGDEPSL

SEQ ID NO: 339398 - protein, 115 aa, Zea mays
  unsure (1)..(115): unsure at all Xaa locations
  Clone ID: MRT4577_72700C.1.pep
MPAFSQSIAGIPXRSIARQGLSRLFLVAKAYCLIHVANDHLCSETXGGGLSFFSFLNLADYTEAMDKVXSARLCRFLHADIVLMIXSPEDPRKALDKQVIYMQVDSATYLVNPAK

SEQ ID NO: 339399 - protein, 62 aa, Zea mays
  Clone ID: MRT4577_72701C.1.pep
AQSQWSTNQELHGMNSIRSYDNLFVYVSNPEMSITLLSYKSVCKYIAPAILLKSILSLLYME

SEQ ID NO: 339400 - protein, 127 aa, Zea mays
  Clone ID: MRT4577_72702C.1.pep
MATTADSSLDSTYLFNQLDNYQWDDDQEFQNGLKAITGSTEDQAQLEHLTLRAKCFYYARKSGTKVDFEGYKRWVENGKGDGQINGLGSQSVEEAPAVQVAASQSTTQDRVLWEMHRNPLPSPRSVK

SEQ ID NO: 339401 - protein, 76 aa, Zea mays
  Clone ID: MRT4577_72703C.1.pep
LGPLDNAVQACDAWCRCRLCVMINRPLLMLHRLHLASLSNYSWSIPSYSYSYIYFSYKDVFNLHIGLGCNERVTCS

SEQ ID NO: 339402 - protein, 81 aa, Zea mays
  Clone ID: MRT4577_72704C.1.pep
LKPVSIWIMHILLFSGGKPQRGGFKNTPHFSRPQKKQNKFPPPGNKGRLIPKLHNKKAFYITHPKNLDLGEKIFSIEGAGK

SEQ ID NO: 339403 - protein, 231 aa, Zea mays
  Clone ID: MRT4577_72705C.1.pep
VETLLNSRPNISSNGEIFSVKERRSNITAITKTLDRLYNLDWYSSAAKNECTAAVGLKWMLNQGLMKHHQEIVEYFNRRGVSAIFLLRRNLLRRYVSILANAHDSAMKQLNGTHKAHVHSKHEAEILAQYKPTIDKKTLITELKRSDKLAADALVNFKNTRHVVLYYEDVVSNRTMLMDVLDFLRLPKRKLFSRHVKIHTKRLCDHIDNWADVTDFLKGTPFESFLNGSRR

SEQ ID NO: 339404 - protein, 64 aa, Zea mays
  Clone ID: MRT4577_72706C.1.pep
PACCSCLQMLMDVLDFLRLPKRKLFSRHVKIHTKRLCDHIDNWADVTDFLKGTPFESFLNGSRR

SEQ ID NO: 339405 - protein, 44 aa, Zea mays
  Clone ID: MRT4577_72707C.1.pep
KAQQKSLRTQIILSDWPASFELEKTYTTLKRPVGDLNSNLETTK

SEQ ID NO: 339406 - protein, 42 aa, Zea mays
  Clone ID: MRT4577_72708C.1.pep
RILIQAILYLLSGFTPLAVLPPSSEASCSSLCRDETSIIPRA

SEQ ID NO: 339407 - protein, 45 aa, Zea mays
  Clone ID: MRT4577_72709C.1.pep
CALLQLTSVHSLCLSVPLSGLKPVILPSGHLVRPSSICAHGASAH

SEQ ID NO: 339408 - protein, 45 aa, Zea mays
  Clone ID: MRT4577_7270C.1.pep
LCSFWLLRAARIEHRLSITLEYVSKSHHFLVQEARTKSKLIRSVV

SEQ ID NO: 339409 - protein, 71 aa, Zea mays
  Clone ID: MRT4577_72710C.1.pep
PQFFRVLGVPWEGHYQSFLGSPTVFGYFLVFCHKRPFLSRKGLIGSLIFPPCFVFPFFPLELKGYFFFWCP

SEQ ID NO: 339410 - protein, 110 aa, Zea mays
  unsure (1)..(110): unsure at all Xaa locations
  Clone ID: MRT4577_72711C.1.pep
XPAVTPRSTQQVPQGRRARGRGGGAGAGGGHEWVSLIHAPARSAARSSLLCASVDKEESNTLVTVIGMDLVNTYSSVGDYKNKKCQDHHLCLCLSVSPPDWAAFTHSDRL

SEQ ID NO: 339411 - protein, 96 aa, Zea mays
  unsure (1)..(96): unsure at all Xaa locations
  Clone ID: MRT4577_72712C.1.pep
RKTEKGFYQLLFHFQFFLKLNAAKKKKRKGGLITIFFFFNHPPFFQHSNQKTMEGEIFSPVGXCESKKKKKKKKKKKKKKKKKKKKKKKKKKKIKH

SEQ ID NO: 339412 - protein, 187 aa, Zea mays
  Clone ID: MRT4577_72713C.1.pep
ITPIPNPIRPRIGCHGNAAAAIDDNARLPPEENRALDLRNRPLPSRAKRPRRLRKARGVVHRSHLLHTKDSRVLAYGCYEDTIHTPTNASLNIALAASTSADSCIYAVLYYTARQDVQDNGRQKEGGQDHYVPVHVKNMVPDDRIGVHRLIVSQDCLQKHLCMMKSTQRSTTGITALCFQEKKKKYG

SEQ ID NO: 339413 - protein, 71 aa, Zea mays
  Clone ID: MRT4577_72714C.1.pep
MASVTRFPVVALVLLLAASAFLASEEAACGDCPKPTPPPSPPPPSPNRTPRPPPPSSSGDNRRTNTLQSAC

SEQ ID NO: 339414 - protein, 106 aa, Zea mays
  unsure (1)..(106): unsure at all Xaa locations
  Clone ID: MRT4577_72715C.1.pep
MACTNNAMRALFLLVLFCIVHGEKEESKXIDAKESGXGGXFDITKLGASXNXKTDSTKAVKXEWAXNADGTGKXKVFILKGADLVLQCHXKGHWQGDVPXXVDGNL

SEQ ID NO: 339415 - protein, 95 aa, Zea mays
  Clone ID: MRT4577_72716C.1.pep
KEPALNSAVSLTGSMLTPVNHLTERLLNILVETESTLDNAKGQNLYVFHKPTDQLSLMFTRMLQKDVRTVAKHKDQEETINALVLQASCIMNHCE

SEQ ID NO: 339416 - protein, 85 aa, Zea mays
  Clone ID: MRT4577_72717C.1.pep
SLFFFFFFFFLVVFFFFFFGGPNRMPLKSSSNRRETWLLKKKQQTFAPGDRWFKRGSPKRRFFPSKANYELFLKQNWGGLKFHFW

SEQ ID NO: 339417 - protein, 36 aa, Zea mays
  Clone ID: MRT4577_72718C.1.pep
LLSPLSSSCSSSRQGHILFWHISPVSSTAHYVISRE

SEQ ID NO: 339418 - protein, 63 aa, Zea mays
  unsure (1)..(63): unsure at all Xaa locations
  Clone ID: MRT4577_72719C.1.pep
VLIXWRFSVDDASSTECLYVIGNESEFHYLGICKKKTPSMTGTSTSTRRLSVLRQVHARGGAR

SEQ ID NO: 339419 - protein, 118 aa, Zea mays
  unsure (1)..(118): unsure at all Xaa locations
  Clone ID: MRT4577_7271C.1.pep
MHSPVPLLLLLLLCTAAAASDGSQPQAQAQAPGAARRGMVPVAXGGGAXAMKALALNGTRRRLGGSFQLCAPCTCCGGASGACILAPCCYSINCNIPNRPFGYCSFTPKSCQCVGCNL

SEQ ID NO: 339420 - protein, 220 aa, Zea mays
  unsure (1)..(220): unsure at all Xaa locations
  Clone ID: MRT4577_72720C.1.pep
MAMPRAVSLSVAVLLALLASAESWLYEEFTTDGNVRADYNAQGQQVASLVLTQQSGGGAFGSRQKYLYGQFSIQMKLVPGNSAGTVTSFYLSSGDGPGHDEIDMEFMGNATGQPVVLNTNVWANGDGKKEHQFDLWFDPAADFHTYTIIWNDKNVLFKVDDLFIRSFRRYADLPYPGAKPMSVHATLWDGSYWXTQXGQVPSDWSGPPFVVSYXGYTADA

SEQ ID NO: 339421 - protein, 66 aa, Zea mays
  Clone ID: MRT4577_72721C.1.pep
ADVGAGTTAVAPIQEESEEEEVDDTGVEEKDVDLVMLQANVSRAKAIKALRNNGYDLVNAIMALTM

SEQ ID NO: 339422 - protein, 402 aa, Zea mays
  unsure (1)..(402): unsure at all Xaa locations
  Clone ID: MRT4577_72722C.1.pep
VISFTLCFCRLCEGGELLDRILAKKNSRYSEKDAAVVVRQMLKVAAECYLRGLVHRDMKPEXCKTVPIFLXNFLFKSNKEDSPLKATDFGLSDFIKPGKKFHDIVGSAYYVAPEVLKRRSGPESDVWSIGVITYILLCGRRPFWDKTEDGIFNXVLRNKPDFRKRPWSSISPGAKDFVKRLLVKNPRARLTAAQALSHPWVREGGEASDIPVDISVLSNMRQFVKYSRFKQFALRALASTLNEEELSDLKDQFDAIDIDKSGSISIEEMRHALAKDLPWRLKGPRVLEIIQAIDSNTDGLVDFKEFVAATLHIHQMAELDSERWGIRCQAAFSKFDLDGDGYITPEELRMHTGLKGSIEPLLEEADIDKDGKISLSEFRKLLRTASMSNVPSPRGPPNPQAL

SEQ ID NO: 339423 - protein, 559 aa, Zea mays
  unsure (1)..(559): unsure at all Xaa locations
  Clone ID: MRT4577_72723C.1.pep
MGACFSSASAAPAGAAVDERRPSKEGDGKKRRRAAGASPDGRGAXRVEFGYERDFEARYEVGRLLGHGQFGYTFAATDRGSGDRVAVKRIDKAKMTRPVAVEDVKREVKILKALKGHQNIVHFYNAFEDDSYVYIVMELCEGGELLDRILAKKNSRYSEKDAAVVVRQMLKVAAECHLRGLVHRDMKPENFLFKSNKEDSPLKATDFGLSDFIKPGKKFHDIVGSAYYVAPEVLKRRSGPESDVWSIGVITYILLCGRRPFXVTAAQALSHPWVREGGEASDIPVDISVLSNMRQFVKYSRFRQFALRALASTLNEEELSDLKDQFDAIDIDKSGSISIEGMRHALAKDLPWRLLWSPCAGDNRSKXAALIDAIDIDKSGSISIEEMRHALAKDLPWRLKGPRVLEIMQAIDSNTDGLVDFKEFVAATLHIHQMAELDSERWGIRCQAAFSKFDLDGDGYITPEELRMVQHTGLKGSIEPLLEEADIDKDCHTIAMCSLGSSECHVMFLVFSIQVMCAVQPRVSFEVNIQCFLFLSGRVKGGGQNGRQDSPSSFLYTVQ

SEQ ID NO: 339424 - protein, 49 aa, Zea mays
  Clone ID: MRT4577_72724C.1.pep
PFGIVKMILGSGKVSFFQKVSPPPILSVLEIFQGRLDWFLNHLFTPIFF

SEQ ID NO: 339425 - protein, 184 aa, Zea mays
  unsure (1)..(184): unsure at all Xaa locations
  Clone ID: MRT4577_72725C.1.pep
MAVVATIRQRRCFVLVLGTAIVVAFSALFGTTSGAALVGDSCRASSSTSDGGGCGKGLRCTTCVPPPGTGPAACARTTPVDPKTHGTGLPFNRXDSVTDQLKNGVRGLMLDAYDFNDAVWFCHSFHGRCLTFTAYVPALSVLTEVRVFLDANPSEVVTVFLEDYAAPGSLSNTFNAAGLSKYWF

SEQ ID NO: 339426 - protein, 103 aa, Zea mays
  Clone ID: MRT4577_72726C.1.pep
KRAHFRERVAPPLKAGDFPLWGQVFRGGPPIPQGGGGVGSPIYVPPRGRRTRGCALVGGVLGPLFCFKKVHPGGWSKRLLGPLKRWAGSPPLAWRGGFDFFFP

SEQ ID NO: 339427 - protein, 138 aa, Zea mays
  unsure (1)..(138): unsure at all Xaa locations
  Clone ID: MRT4577_72727C.1.pep
PQNKHPGRENQPHPTPKGRQTPPPPEAAPKKTKKQKNKATTQQPTPPHRGGRTKKSRGHPTPTAPPRXTQASSHNRXGPSKHKSXATPPXPKEGKQGGEGTNTSPNHPQPRGRTTTTPKQKKGPHKRAQNRPPRAGTP

SEQ ID NO: 339428 - protein, 424 aa, Zea mays
  Clone ID: MRT4577_72728C.1.pep
MAVVATIRQRRCFVLVLGTAIVVAFSALFGTTSGAALVGDSCRASSSTSDGGGCGKGLRCTTCVPPPGTGPAACARTTPVDPKTHGTGLPFNRYSWLTTHNSFAVVGTKSPLGSAIISPPNQEDSVTDQLKNGVRGLMLDAYDFNDAVWFCHSFHGRCLTFTAYVPALSVLTEVRVFLDANPSEVVTVFLEDYAAPGSLSNTFNAAGLSKYWFPEAQMPSPSKGGGDWPLLRDMIADNHRLIVFTSKKGKQGTEGLAYQWDYVVETQYGSEGMADGSCPKRTESKPMDSKAQSLVLLNFFTSNPSQSWACSNNSAPLISRLNACYHASAKRWPNYIAVDFYMRSNGGGAPLATDIANGRLQCGHDNIAHCKISSASAPAPASASSPAPASASSPSPAPAPDFAATSPAISSSPGPAPGPLNSYY

SEQ ID NO: 339429 - protein, 81 aa, Zea mays
  Clone ID: MRT4577_72729C.1.pep
KKGPRHTVNQNLLALKNHGWITSNMDALNKWKWGRGSSCMREWDITGRASRTRTKYLVASSRIFGERPGLTMALTVSGCFS

SEQ ID NO: 339430 - protein, 117 aa, Zea mays
  Clone ID: MRT4577_7272C.1.pep
MHGPVPLLLLLLLLCTAAAASDGSQPQVRHASRQRLLFPYPRLAASTPPAAIDPSSRCASAQAQAPAAARRGMVPVAPAEAELGAMVALALNGTRRRLGGSFQLCAPCTCCGGASGA

SEQ ID NO: 339431 - protein, 156 aa, Zea mays
  unsure (1)..(156): unsure at all Xaa locations
  Clone ID: MRT4577_72730C.1.pep
MASLAHPDRFQTEAALNLVRGLLGWSALGLAGRICAGAAPLGDLAVGEFVLFVSYISCGLALPISPFFLLLLEEFGLQLQHLTPHSILQVAIFVHLCEMFIGVAPVLXLFRHFFVLVKSGKDKDHLGAYYFQTRPDSAEAYISTFGGARWENWRGD

SEQ ID NO: 339432 - protein, 58 aa, Zea mays
  Clone ID: MRT4577_72731C.1.pep
SYGYSICAHACTGCEHLNHRRSGTANELFTLRRADWARHSDLHEYGNTSTNVCSHLHN

SEQ ID NO: 339433 - protein, 56 aa, Zea mays
  unsure (1)..(56): unsure at all Xaa locations
  Clone ID: MRT4577_72732C.1.pep
SLLSRQSRLVPRMWRYLAGMVEPEESLEFIFSLETWDXTSIYLVQDIYYISQLWFC

SEQ ID NO: 339434 - protein, 78 aa, Zea mays
  Clone ID: MRT4577_72733C.1.pep
FECSLYSAKKEIWSIEIRFQDSDHDHLYNIASAQMVTCFLWLSRFDVKLSMFTSRRSRGAGCSDIQQGPPPPPGQSPY

SEQ ID NO: 339435 - protein, 55 aa, Zea mays
  unsure (1)..(55): unsure at all Xaa locations
  Clone ID: MRT4577_72734C.1.pep
PTPPAFANPXNPPPIIFLIHFSLKRLIFAQLQQSLNHKIPLIHPLNQPSPYITKH

SEQ ID NO: 339436 - protein, 106 aa, Zea mays
  unsure (1)..(106): unsure at all Xaa locations
  Clone ID: MRT4577_72735C.1.pep
VSSAXHXQQQQAPISQVPAADRQQFPPARQLAALKSPADLQQRQSLALSQPAGVSRATFLTQPQTPPLXQPGARTAGTLFLPQHPLPSNQXAFANSAAFPQHPTHW

SEQ ID NO: 339437 - protein, 80 aa, Zea mays
  Clone ID: MRT4577_72736C.1.pep
ISARKPVTTALRCGSLPAQYRGGGCACRCRSDAIGRDLALPDHLPESRPLEEQVRRTVEKALGLVLTGCAVLHVQRLTTR

SEQ ID NO: 339438 - protein, 92 aa, Zea mays
  Clone ID: MRT4577_72737C.1.pep
SIATDPSAIAIVCWKGKTNLCVMVSPLDGKELLERISLRFGLKIPKGDKEKPSEEIAGSDELLDCATEVDDQECFPESKASDIEISDAKDAD

SEQ ID NO: 339439 - protein, 124 aa, Zea mays
  Clone ID: MRT4577_72738C.1.pep
VIKAPFFFFHFIFFIFLETNKPGSSDSMALPKRVWITKQSPALFLMGKQPLVTGYTFQPPDWKKGGTNTSFQTKHTIQKARGGGSKTNKKVPGLPLFFISAAYFNRGGGHLFYDIWSIVYFFKD

SEQ ID NO: 339440 - protein, 88 aa, Zea mays
  Clone ID: MRT4577_72739C.1.pep
QSEAPFLLPFSFLDPPTGAKRVGRGNFIYPNEKLFRFHGALGELAEKTLIARPIWEASIIDLTYEPEPKPKKYGGIQGGGKENKGPTP

SEQ ID NO: 339441 - protein, 54 aa, Zea mays
  Clone ID: MRT4577_7273C.1.pep
DQEKSMIVSPLKYSGTIELMCTFARHRISCMEPPLNVWMNGGSINQSMAFSSVP

SEQ ID NO: 339442 - protein, 69 aa, Zea mays
  Clone ID: MRT4577_72740C.1.pep
YFFFFFFFWFVMRIIIVKKNSLVWVNNQKPCYDELKLFGLGNIMTLSGNGTSHFNSNEVFWTPGTRLFK

SEQ ID NO: 339443 - protein, 54 aa, Zea mays
  Clone ID: MRT4577_72743C.1.pep
IRPGNHIQCKLLHNPKEIYLSPWMSNTMKRATFNHTMVENPPHISFPNLLPARI

SEQ ID NO: 339444 - protein, 207 aa, Zea mays
  Clone ID: MRT4577_72744C.1.pep
MRSSWADSVANAEESAPATAAANGSVATHSTSRPTRSSYVPPHLRGRSAGAAVEAQAGLVAPAQGGPLPLAAAQPSGQGAAVGGPRWAGIVNGGGGGGSIGAPRQGHGGGGGGRGAWNSRPGGWDRRDREPDPFAKAEAEEIDFDGQENTGINFDAYEDIPVETSGHDVPAPVNTFAEIDLGDALNDIFRRCKYVKPTPVQRYAIPI

SEQ ID NO: 339445 - protein, 502 aa, Zea mays
  unsure (1)..(502): unsure at all Xaa locations
  Clone ID: MRT4577_72745C.1.pep
HVRPGSCQASRCALTSAETSRAGREAHRVFLSPSQQHGCRRRNGGGDQEEEPLGRCAAVAGGQATVHAGGHQEGHPAALLPALGAQVLLVPPPRPRHRGRSPVPWRCRHPGAPERRAPPLRGVAALLGGAGQRADGRLGHRARVRPPRLLRLPAPGQRRRLRAPLRAAHALLRLEVQPPAPPRQHRLHGERRGVRGQDPGRAAVVHAARVRQPGRPAGVHRAAAHPRVAALPGVQPLRAELRRPHXSGSALRTRSFKLDSYLDPSFMSIIKDPDLRRKXEQWEKSAQAQKGFNYARLFGYGDLGCPSLSAAEEYSLHSRYLTKANSLNLSEIAEMKIIYRGGVDIEGRPVMVVVGAHFLLRCLDLERFVLHVVKEFEPLIQKPYTIVYFHSAASLQPQPDLGFMKRLQQILGRKHQRNLHAIYVLHPTLGLRTAVLAMQMFVDGEVWKKVVYVDRLVQLFRYVPREQLTIPDFVFQHDLEVNGGRGLIVDPRTKHIYQRTSS

SEQ ID NO: 339446 - protein, 141 aa, Zea mays
  unsure (1)..(141): unsure at all Xaa locations
  Clone ID: MRT4577_72746C.1.pep
VAHVINFALPXNDIDDYVHRIERTGRAGKSGLATAFFNESNTTLARPLSDLMKEANQEVPKWLDGYAARSAYGGGGGRNRRQGSGARFGGRDFRRDRGSGGSYGEGGGGGGGYGGSSGYGGAYGGGGSSGYGGGQSTSSWD

SEQ ID NO: 339447 - protein, 145 aa, Zea mays
  unsure (1)..(145): unsure at all Xaa locations
  Clone ID: MRT4577_72747C.1.pep
RTRSTARQTAGKATPKAPGTXPPAAEDSDQARKAXQGRSTNEARTSTTPGQRDAAQRRTSRRANAEGNREAAPRTTTDETAGEXERAANRGTADPAERDAAPANEATRKGKPRNRGRDDEGSTRTTRAERPHQKGKRRAGKRAGP

SEQ ID NO: 339448 - protein, 210 aa, Zea mays
  unsure (1)..(210): unsure at all Xaa locations
  Clone ID: MRT4577_72748C.1.pep
MRSSWADSVANAEESAPATAAANGSVATHSNSRPTRSSYVPPHLRGRSAGAAVGAQAGSVAPAQGGPLPLAAAQPSGQGAVVGGPRWAGIVNGGGGGSVGAPRQGYGGGGGGGGXGAWNSRXGGWDRRDREPDPFAKAEAEEVDFDGQENTGINFDAYEDIPVETSGHDVPAPVNTFAEIDLGDALNENIRRCKYVKTTPVQRYAIPISI

SEQ ID NO: 339449 - protein, 83 aa, Zea mays
  Clone ID: MRT4577_72749C.1.pep
IRLEDVLWSNRKRPGHLYFEFFEVGSPYGRVPLIDKVYELSQGFPGLTSLKSAELSPVSWMSVAWYDQIYVCCLCSSERTKNS

SEQ ID NO: 339450 - protein, 123 aa, Zea mays
  unsure (1)..(123): unsure at all Xaa locations
  Clone ID: MRT4577_7274C.1.pep
PSKQIISTNHPPHPTSKTTSTTSLTIQTRKVSPNRTXRAKYSTAQPKAGPRPPVSFNTSGLFNGFIVRXRIHRSLLQVLIRLLHGSRRFPEHTPNTSLSFXIPKPAYIVHQAXIHLLAHVNPY

SEQ ID NO: 339451 - protein, 61 aa, Zea mays
  Clone ID: MRT4577_72750C.1.pep
QNQHGRKRHHLGCKLHTVVAVVAVSTRLLIRPPSRCARNRHGYADNADVEDAAKANIFLCE

SEQ ID NO: 339452 - protein, 647 aa, Zea mays
  Clone ID: MRT4577_72751C.1.pep
MRSSWADSVANAEESAPATAAANGSVATHSTSRPTRSSYVPPHLRGRSAGAAVEAQAGLVAPAQGGPLPLAAAQPSGQGAAVGGPRWAGIVNGGGGGGSIGAPRQGHGGGGGGRGAWNSRPGGWDRRDREPDPFAKAEAEEIDFDGQENTGINFDAYEDIPVETSGHDVPAPVNTFAEIDLGDALNDNIRRCKYVKPTPVQRYAIPISIAGRDLMACAQTGSGKTAAFCFPIISGILKSPKPHQRSRSTRTACPLALILSPTRELSVQIHEEARKFAYQTGVRVVVAYGGAPITNQLRELERGVEILVATPGRLMDLLERARVSLQMIKYLALDEADRMLDMGFEPQIRKIVEGMDMPQRGERQTMLFSATFPKEIQRMAADFLADYIFLAVGRVGSSTDLIVQRVEFVLASDKRSYLMDLLHAQKANGTHGKHALTLVFVETKRGADALEDGFFRNGHPWTSIHGDRTQQEREHALRSFKSGATPILVATDVAARGLDIPHVAHVINFDLPNDIDDYVHRIGRTGRAGKSGLATAFFNESNTTLARPLSDLMKEANQEVPKWLEGYAARSAYGGGGGRNRRQGSSARFGGRDFRRDRGSGGGYGGGSYGGGGGGGYGGSSGYGGAYGGGGSSGGGYGGGQSTSSWD

SEQ ID NO: 339453 - protein, 63 aa, Zea mays
  Clone ID: MRT4577_72752C.1.pep
NCKLVTEKPHYIPFKEVLSTRCGARSTSEYLSHQSHEKRGAPNPNRIPSTGKNRINGKDATWN

SEQ ID NO: 339454 - protein, 81 aa, Zea mays
  Clone ID: MRT4577_72753C.1.pep
NCRHLCCSFGPESRSSITPVHNSCESRGCYHTFPSRLGRNLVHHKAFTPVTHSHWKFIPPFRLQAPGLGKERGSNNILSSY

SEQ ID NO: 339455 - protein, 74 aa, Zea mays
  Clone ID: MRT4577_72754C.1.pep
VAQVRKLEFGRPTAAVFFFLKLFAFFFFFFFFFFFFFFFFFFAAEILLPNFTGYKNFTLFYRSDYKSISLKYIC

SEQ ID NO: 339456 - protein, 80 aa, Zea mays
  unsure (1)..(80): unsure at all Xaa locations
  Clone ID: MRT4577_72755C.1.pep
NISVNEAQSLYASAVDXTCGSCSVRVGVGYVDAGVRDGVGGCAGAGANGSDGGGYGGGGGGSSGANSGGGYGNSYGNWRT

SEQ ID NO: 339457 - protein, 58 aa, Zea mays
  Clone ID: MRT4577_72756C.1.pep
VIVAQATISLGQGGIHRNQSIKHLTTENSARMGANTKRVCGISIDRSHDMLYRMQYCS

SEQ ID NO: 339458 - protein, 58 aa, Zea mays
  Clone ID: MRT4577_72757C.1.pep
KIMTCVIMALIYIYLLLKKKKKKKKKKKKKKKKKDSGVLTHGNFIGSFFASDLSPCAY

SEQ ID NO: 339459 - protein, 122 aa, Zea mays
  unsure (1)..(122): unsure at all Xaa locations
  Clone ID: MRT4577_72758C.1.pep
VRRYDSCWLNTGKICGTGVGCKSKIYRRNXRRVDKVHKKSYSGNERKKFPVGLLYVKGTASEKTGTEVKXQSRHLQACLRIXSAKNGKKTVVPALNDGRPNHTEENDDASTVGPXCKGYVAG

SEQ ID NO: 339460 - protein, 89 aa, Zea mays
  Clone ID: MRT4577_72759C.1.pep
MRVGRVALALLALAWSATFKHTSGGCSCQPSPAVHIPAAVHMPTPDHLTPSEHIRPPVHLPTPVHLAPSVHVPPTINLTPAPCHYPTQP

SEQ ID NO: 339461 - protein, 653 aa, Zea mays
  unsure (1)..(653): unsure at all Xaa locations
  Clone ID: MRT4577_7275C.1.pep
MLLKSKFKLATAIGIVLSMLSLLVHLFLANYSAGGITKYSMHMDDVLPFGPRPRPRRLWGPLVPLDHLHPFVKPSKSYAVPSKHNGFIYAKIYGGFEKIQSSICDLVAVARLLNATLVIPEIQATTRTKGISSKFKSFSYLYDEDHFIHSLSSDVVIVHGLPKDLREARKKIKFPTVSPRNSATPEYYIKEVLPRLVKSKVLGIIVNGGNCLQSILPASLEEFQQLRCRVAFHALRLRPQIRALXEPSLXRLRASGRPYVAYHPGLLRDTLAFHGCAELFQDIHTELIQYRRNQMIKRGTVKEQLTVDSVSRKMAGLCPLMPEEVGLLLQALGYPPTTIIFLAGSETFGGQRMLIPLRAMFANLVDRTSLCSQRELFDLVGSEDPLTSDLPQPPPPKSEKQLIEEWKRAGPRPRPLPPPPARPFYAHEKEGWYGWIGENDTEPEASLIEFRRQAHRLLWDALDYFVSVEADAFFPGFHNDGSGWPDYSSLVMGHRLYQTPSGITYRPDRKIIAALFEEVNDHRYHPPRNWTIAAREHLNRSASVEGIVSSAMLSKPVSFLAHPLPECSCRTPKSPAVQPVKDSNGRFLFGGEEECAGWMARSPAMASARNNEPQIEDYEDKLPEEGSSPDTQESDRSDSNKSSEQDEEMDLDD

SEQ ID NO: 339462 - protein, 462 aa, Zea mays
  unsure (1)..(462): unsure at all Xaa locations
  Clone ID: MRT4577_72760C.1.pep
MLPYFDPEYENFNQRINPPRVCIDNTTCSDCTLVKVDSMNKNGILLEVLQVLSDLDLHIFKAYITSDGGWFMDVFHVVDKQGQKITDDKTIKYIEKALGPESNLLGAKGSNSAGRSVGLHSIGDHTAIELKGPDRRGLLSEIFAVLADLQCNVLAAEVWTHRMRVACVVYVNDVATGQAIDDPDRVARVEDRLRHVLRGYGGGGGAGDDDDGSGAHANFAAASSTPHHVDRRLHQLMHADVDAVHGDGAHAAAGGEGDRPAVTVEHCEEKSYSVVNVKCKDRSKLLFDIVCTLTDMEYVVFHAAVSSEANYGIQELYIRRKDGKTLLKDEAEKVIRCLEAAISRRVSEGFTLEVCGRDRVGLLSDVTRVLREHGLTVSRADVTTAGGQATNVFYVRNPSGQPVDMKTVEGLRGQFGQTAMLNVKSVGVPAXRWXQSGGAXSSGSMVRSSFFSFGSLFAKLRA

SEQ ID NO: 339463 - protein, 228 aa, Zea mays
  unsure (1)..(228): unsure at all Xaa locations
  Clone ID: MRT4577_72761C.1.pep
DGVDCEEKXYSVVNVKCKDRSKLLFDIVCTLTDMEYVVFHAAVSSEANYGIQRFRVQTMQCKCKCKQHAGSXASFHCSXQELYIRRKDGKTLLKDEAEKVIRCLEAAISRRVSEGFTLEVCGRDRVGLLSDVTRVLREHGLTVSRADVTTAGGQATNVFYVRNPSGQPVDMKTVEGLRGQFGQTAMLNVKSVGVPAXRWXQSGGAXSSGSMVRSSFFSFGSLFAKLRA

SEQ ID NO: 339464 - protein, 132 aa, Zea mays
  Clone ID: MRT4577_72762C.1.pep
HSHHRHSTSSARARRRPSPPALPRCCLSVDSPRMNSSGKIVFQGLELERSSISPCSFHAAAPKPRFRAVDRSYSSACVRVAPVVLNVSVCPRPVFGFFKDRKDSSARSSSLGRRAPPPPQGWSGEMVARSSG

SEQ ID NO: 339465 - protein, 262 aa, Zea mays
  Clone ID: MRT4577_72763C.1.pep
QSVPNTGGGGQIGGGGDGGGGGGGGYVNAGVEVEDKACPCGVGSCLVLTSNTPKNPGRKFYKCPMRDGGCNFFEWCDAPSPAPANARNNMVVHSETSATDMLCPCSAGTCLILTTKTGKNSISGARRGQITQGGGGGSCGFFKWCDELQPRVGAPLQASAQYQADSMPSIQNPSQRSSSSCFKCGQENHWARDCPNQPSDPYPDKGGRPVAPAGSPGACYNCGRSGHWSRDCPTSNSGGGGGTGTSRARSSSALSSWNSQRY

SEQ ID NO: 339466 - protein, 101 aa, Zea mays
  Clone ID: MRT4577_72764C.1.pep
PHPGRHGDGRNKRRSAAVLLRDGLHELGGLVQAEPHRLRQLDAGCGRTADNCPRPEPILIDLSFLTTHMPILEYALDTDSYRLPCTSGACLPPTPQLVLAL

SEQ ID NO: 339467 - protein, 248 aa, Zea mays
  Clone ID: MRT4577_72765C.1.pep
SQNGGSGDGSSSGSGGYVIAGVEVESKACPCGVGSCLVLTSNTPKNPGRKFYKCPMRDGGCNFFEWCDAPSPAPANARNNMVIRSETSATDMLCPCSAGTCLILTTKTGKNVGRQFFCCPLNQGGGGGSCGFFKWCDELQPRVGAPLQASAQYQADSMPSIQNPSQRSSSSCFKCGQENHWARDCPNQPSDPYPDKGGRPVAPAGSPGACYNCGRSGHWSRDCPTSNSGGGGTGTSRARSSSALSSVE

SEQ ID NO: 339468 - protein, 48 aa, Zea mays
  Clone ID: MRT4577_72766C.1.pep
LSSKIAQGVQLAPPKVVTLVCTLHSDHSMQIMRSHLVMNSGGLARHPA

SEQ ID NO: 339469 - protein, 86 aa, Zea mays
  Clone ID: MRT4577_72767C.1.pep
DWWSIDRPSPIMHAAILSRSRMDRCRATSACSGDRSRQHVQPLPGAPLVARILPPPPTNNHLSSTCRAPLCLCSFILIAPIIPFAL

SEQ ID NO: 339470 - protein, 207 aa, Zea mays
  Clone ID: MRT4577_72768C.1.pep
MEARQHTVLDGLAAETEPELDQFMEAYHEVLVKLREELTRLLQEAMKFMQKMELQLSLLSISGRSLHNTLSSERWRKKRRPHEHLAEVGEDGRLKDGVERKVLMLEAELLQQQQDERPDRQHQPTGEAGDEEHELPGGETAEERGADADPSGEHRRAPSEQVAHQVECHLGLEAPGMDWQSHGNYGGGKQRSANAMGCGELEGERAH

SEQ ID NO: 339471 - protein, 64 aa, Zea mays
  Clone ID: MRT4577_72769C.1.pep
GAPAAKRTSTLSIMSGIGVGGQCMGTQIRRMPIYAQTALSDRALDVTRRLTYLVALNFIGHSSI

SEQ ID NO: 339472 - protein, 57 aa, Zea mays
  Clone ID: MRT4577_7276C.1.pep
YTNMGGLHAHRDEMKKAHDLSLTHAELSGDTCLPLSKSRYTVLKNPKQQKLYADRLV

SEQ ID NO: 339473 - protein, 214 aa, Zea mays
  Clone ID: MRT4577_72770C.1.pep
RVIQLSGGALRAHCKGASEIVLASCTRYLDERGSAVALDGATADRLRATIDSFANEALRTLCLAYVDVGDGFSPSEQIPTDGYTCICVVGIKDPVRPGVKESVAICRSAGITVRMVTGDNINTAKAIARECGILTDGGVAIEGPDFRVKTEEELQELIPKIQVMARSSPLDKHTLVKHLRTTFDEVVAVTGDGTNDAPALHEADIGLAMGIAGT

SEQ ID NO: 339474 - protein, 65 aa, Zea mays
  Clone ID: MRT4577_72771C.1.pep
ENALPGGHDGVQTAALKSAYTTAAAAATSISSSVAAAGTTHALWSRKCCQFSDLRWNSRDCSLRC

SEQ ID NO: 339475 - protein, 148 aa, Zea mays
  unsure (1)..(148): unsure at all Xaa locations
  Clone ID: MRT4577_72772C.1.pep
KTRYQPPGHPSLPAGPXGRYHNPXNXRXXQXPXXRXPXXTXXXLRGAQSMKACEGRTSNSXDAHLXXKHXXNTRARTXGXXXXRXXXAXXEXRERYVXYGVYPAQDPXPSSQYHXVHPSSXVTXLLIYKIKTATTXEMHKLXXSSVAI

SEQ ID NO: 339476 - protein, 55 aa, Zea mays
  Clone ID: MRT4577_72773C.1.pep
LGSTWALSQDLSSSASIVGSNEPAGLLCPVLDVFIAPSRHRRCPHFLCNSGINRS

SEQ ID NO: 339477 - protein, 97 aa, Zea mays
  Clone ID: MRT4577_72774C.1.pep
ALYNFFREGGPAGRLGSVIPGPADLSWFLLFFFFCWTNLEENPETPLLSLDLQFGARPLSERPITVLNLNGSAGEGTVFNQGFLHLLVNRHLDPSLG

SEQ ID NO: 339478 - protein, 1130 aa, Zea mays
  unsure (1)..(1130): unsure at all Xaa locations
  Clone ID: MRT4577_72775C.1.pep
MSSEGRGLLYLSLRFLDEEIFXETVHKLEXGSGFDFNMKYFEEEVANGNWDEVEVYVCGFLSDEXNASASRYSYEIRKQKYLEALEKHDRSKAVXILVNDLKVFASFXMELFRGITQLLTLENFRENEQLSKYGDTKSARAIMFVELKKLIEANPLFRDKLQFPSLKNSRLRTLINQSLNWQHQLCKNPRPNPDIKTLFVDHSCGQPNGARAPSPANNPLLGSMPKPGGFPPLGAHGPFQPSPTPVPPLAGWMSNPPAVTHPAVSGGAIGFGTPTNPAALLKHPRTPTTANPGMDYPSGDSDHISKRTRPVGMSEEVNLPVNMLPVTYPQSHNYQQDDFHKTVARTLSQGSTPMSMDFHPLQQTLLLVGTNVGDIGLWDVGTKDRLVVRNFKVWDLSKCTMILQASPVFHHAVSVNRIIWSPDGTLFGVAYSRHIVQIYSYNGGDDIRQHLEIDAHIGGVNDIAFAHPNKQLCIITCGDDKTIKVWEATSGAKQFTFEGHEAPVYSVCPHYKENIQFIFSTALDGKIKAWLYDNMGSRVDYDAPGHWCTTMAYSADGSRLFSCGTSKDGESHLVEWNESEGAVKRTYQGFRKRSMGVVQFDTTRNRFLAAGDEFMIKIWDMDSTGLLTTIDADGGLIASPRIRFNKEGTLLAVSTVDNGIKILANADGLRLLRTLENRSFDASRNASEAVTKPLINPLTAAANAAAASSSGAGAPSAVTAMNGDTRSLVDVKPRIADESLDKSKAWKLMEITESTQCRSIKLADNMRTSMISREIYAFSGLAILALTSSAEHLLWKWLGDGFQGSQGKRECVISTTEVCPXACINICIGLRVRSPSISFXCFVCGAVNXYVMSASGGKISLFNMMTFKTMTTFMPAPPAATFLAFHPQDNNIIAIGMDDSTIQIYNVRIDEVKSKLRGHSKRITGLAFSNVLNVLVSSGADAQLCVWNTDGWEKQKNRFLQIPSGRQSNILDTRVQFHQDQMHFLVVHETQIAIYETTKLEPVKQWPVRENSPPITHAAFSCDSQLIYASFMDATVGIFNASSLRLQCRILPASYLPPNISPSVHPVVVAAHPSEASQFALGLTDGGVFVLEPLESDRKWGNPPPVENGSASNLSAPPPNGASSSDQPER

SEQ ID NO: 339479 - protein, 74 aa, Zea mays
  Clone ID: MRT4577_72776C.1.pep
ITPKPDELDDRAVSPGRRIRCRLLGTDGYPSAMLYLCSEIGHPTYGSSVIVCVLSQNVYDLAMANASSPDNMSY

SEQ ID NO: 339480 - protein, 95 aa, Zea mays
  unsure (1)..(95): unsure at all Xaa locations
  Clone ID: MRT4577_72777C.1.pep
RGARLFYTLRLWVXKAPIVXXYFFTXLICFXCCLIFFVYXSLICSXXQIYXFXXLVFLGFXXHRFXFIFXLDIFWVLCFWFNSNCVXRKVLMYHK

SEQ ID NO: 339481 - protein, 85 aa, Zea mays
  unsure (1)..(85): unsure at all Xaa locations
  Clone ID: MRT4577_72778C.1.pep
PXXKHIHSXNKQNTEQTXXVXFXTDSNKRLVSLSTXPSTPXYKIXSIIDXSXXXIXDXXTXXXXISXSKXQSTXXXCXSVADEMC

SEQ ID NO: 339482 - protein, 128 aa, Zea mays
  Clone ID: MRT4577_72779C.1.pep
IPDSIKLQLCNVITNHVVNTSEVVGSLIRISHQSTQINTLRLAAHISSSTAAGSHSYTNTRGARRYHVHCHLTRRQKHLLVALCFLHQPCRHHPESHHRSIPPHSSNSKTGNGNGRSLWRDENSSVDI

SEQ ID NO: 339483 - protein, 118 aa, Zea mays
  Clone ID: MRT4577_7277C.1.pep
SAPGLPPQHYAAAGAGRRSSSSPAASCILAVLFLLLAACVAAVLLFVFFRPRAPAIAVTAVQLPAFAVANGTVAFTFQQLASVRNPNRSPLAHYDSSLHVAYAGGEVGSMYIPAGQID

SEQ ID NO: 339484 - protein, 53 aa, Zea mays
  Clone ID: MRT4577_72780C.1.pep
IKWVMILCLQSSPIPLGLKKKERKWGQQKRSPVLTRKKKKKKKKAAPARAAAR

SEQ ID NO: 339485 - protein, 67 aa, Zea mays
  Clone ID: MRT4577_72781C.1.pep
GGWFLTWFWDQCLKKPPCCQILLEEIKDPRPSLMEKSCWPIFLFQTGSFKSMIFLIQRHHILSLNHP

SEQ ID NO: 339486 - protein, 231 aa, Zea mays
  Clone ID: MRT4577_72782C.1.pep
MKQSPSQNQSPKTPSRSAPEPWLVAAAAASASDDSCVNDVDSFARTVAAVKSKAASCARPDMLASVLSHYAAKWLPDVAPPTASSASGRFLPPESPTATWLKKRLLLESLVAALPPDPPAGGGGGCCAAAAVAAAVADDGITCDFLLKLLRAGSMVGADAALLRDLEARAARRLDQATLGAVMIPAFGHGGEHAPALLLDVPLVLRLVRGFLKEGGGSKAGGGAALVGGGG

SEQ ID NO: 339487 - protein, 48 aa, Zea mays
  Clone ID: MRT4577_72783C.1.pep
RRILFKTQGTAKVLIETSTNTMLPLPPIIHIQQFMRYLKFYKHNITLD

SEQ ID NO: 339488 - protein, 750 aa, Zea mays
  unsure (1)..(750): unsure at all Xaa locations
  Clone ID: MRT4577_72784C.1.pep
CALLCLGALGLLLETARRAFSADAMEPAEGILLIVESLTMEANESDISIAQSVFTTSTEAIGAGEEARKIVLMFLERICHPSGXKKSNKQQRNEEMVARILPYLTYGEPTAMEALIQHFEPYLRDWSEFDQLQKQHEDNPKDDNISQKLSTQRSAIDNFVRVSESLKTSSCGERLKDIILEKGITKAAVEHVKESFASAGQTGFRTSEEWTTGLKLPSIPPILSMLKGLAKGHLPTQKCIDEEGILPLLHALEGVPGENEIGARAENLLDTLANNENNGDGFLGEKIQELRHATRDEMRRRALEKRVMLLQGMGMRQEFASDGGRRIVVSQPTIEGLDDVEEEEDGVACMVCREGYTLRPTDMLGVYAFSKRVNLGATSSGSGRGDCVYTTVSHFNIIHYQCHQEAKRADAALKNPKKEWDGATLRNNETLCNCIFPLRGPSVPLGQYTRCVDQYWDQLNSLGRADGSRLRLLTYDIVLMLARFATGASFSTDCKGGGRESNSRFLPFMVQMASYLSDGSANQQRHVMAKAVTTYLSGSPTLESPIRVSASLSGSRGGSGSSEETVQFMMVYSLLSESYESWLQHRPVFLQRGIYHAYMQHRHGRSTLKLSSDSSSSAVRADESSSSDTSDNKKLFAIVQPMLVYTGLIEQLQQFFKKGKSSSLIKTDEKDESSASLQQWEIQMKEKLGNMKEMVGLSKDLLSWLEDMTSSGDLQEAFDVMGALTDVFSSGYATCEGFVRAAMNASRSWS

SEQ ID NO: 339489 - protein, 59 aa, Zea mays
  Clone ID: MRT4577_72785C.1.pep
SVKWFLHFFFVRVYPVVLYNMFLMRPFGHQKKKSARGRMRHEAEILSTEIGASLTRAFL

SEQ ID NO: 339490 - protein, 82 aa, Zea mays
  Clone ID: MRT4577_72786C.1.pep
KNISMRCIFFYLFIGHLTNLILLIEYKKTNNLQKFHNPKTSTYNIYIYLFYDFSLIQIFGLYIPAYSGLLPLLPRTLRCYHC

SEQ ID NO: 339491 - protein, 89 aa, Zea mays
  Clone ID: MRT4577_72787C.1.pep
RVLACVIRIALRTVAPNGQGLEPQAPPGEGQTSGRPLRGPTRRGQRKQGQGQGPSPQAPLRTWPLALRSRDRSLSPALDVLRPTIPSIR

SEQ ID NO: 339492 - protein, 88 aa, Zea mays
  Clone ID: MRT4577_72788C.1.pep
AQVIQVSRLQNHTYFKFHSPVHLVKRLINYPTQNACHCNGTIYHPIITPNNSMHPLLTFALPITTPLPRDRENPAATPGPSPPMTQPN

SEQ ID NO: 339493 - protein, 443 aa, Zea mays
  Clone ID: MRT4577_72789C.1.pep
RVDAFYRSIPEAIYWPAFIIATLAAVVASQATISATYSIIKQALALGCFPRVNVVHTSKKFLGQIYIPDINWVLMILCIAVTAGFKNQSQIGNAYGTAVVIVMLVTTFLMVPVMLLVWKSHWILVVIFLVLSLTVELPYFTACINKVDQGGWVPLVIAITFFVIMHVWHFCTVKRYEFEMHSKVSMAWILGLGPSLGLVRVPGIGFVYTELASGVPHIFSHFVTNLPAIHSVVVFVCVKYLPVYTVPAEERFIMKRIGPKNYHMFRCVARYGYKDIHKKDDNFEKMLLDRLLIFVRLESMMDGYSDSEDLTVMEHKAERSTRSLQLIEKAGGNNTMSSTGDLSYSSSQDSIVLAKSPLTGNSLTRYSSQTPGDELEFLNRSKDAGVVPFLGNTVVQARRDSGILKKVTVNYVYAFLRKMCRENSVIFNVPHESLLNVGQIYYI

SEQ ID NO: 339494 - protein, 162 aa, Zea mays
  unsure (1)..(162): unsure at all Xaa locations
  Clone ID: MRT4577_7278C.1.pep
MPGVHGLRLRMLVLLSRLFRKKGYLPXLTTYLLIYKIGYYVNVKAHGAXNNVLPXKFYHGRRGRFXTASNAIFGEEINKYVNALIIXRKRILDRVEHVHPSRCQQXLRLMKEIHDHLREIXKRNETMLSAPRXPKLPIPGSMHEGTTIDSVTTIPYDEVQDL

SEQ ID NO: 339495 - protein, 227 aa, Zea mays
  unsure (1)..(227): unsure at all Xaa locations
  Clone ID: MRT4577_72790C.1.pep
MQDPPPTGETPDSGPIAPMCNPKGSPSQQDDDSRGGEVIRSLDDLPEDICRRIHTRMSLQNAARLACASHTFRRSWRCYPNLDLRQRTLGLNGDHISKVDHILQNHSGVGMKKLRIELFDCDKVDSCYISSWLRIAVTAGIEELTLYLPATPEDEAYYSFPYSLLFNGSENSIRYLDIGICAFRPTAGLGRWRSLAILSLSNVLIADDELEGLLXHCAALEHLALLN

SEQ ID NO: 339496 - protein, 107 aa, Zea mays
  Clone ID: MRT4577_72791C.1.pep
LVAHWFSPCINHLGYPRSNKAGGGGGVEGQQHDPSTAANASGSSARKMKTPEFNFTGAQQGQQLGAAAGHLSRISEDGAFPGGMMGDCAGRGSAGESSGAVESGRSY

SEQ ID NO: 339497 - protein, 164 aa, Zea mays
  Clone ID: MRT4577_72792C.1.pep
MTPSIAPARKRVAYEAFQAKAPAAAVKAKGDEEQAMEMAAHRGSCGRLVEQLSAVLRDRAQGVIRLQRRRMEVQWQIQPGWQEEHDLRARMLQRAQRQLRHTVAGACALPPNKGRRAYGSAYEGVPPWTVSYAFCHPVASRQGMSMSYWDAAQAGLVSRVGKWW

SEQ ID NO: 339498 - protein, 76 aa, Zea mays
  Clone ID: MRT4577_72793C.1.pep
LAARVRYIQICVIDEILVAGTCDIILSCIVRCVFLSEDLNLLDMRLLSMLDGSGTCAYVHKSFAIATYTLISSRNS

SEQ ID NO: 339499 - protein, 34 aa, Zea mays
  Clone ID: MRT4577_72794C.1.pep
VLDLMEKTPTGPADRPLAEIRLNRVTVHANPLAG

SEQ ID NO: 339500 - protein, 90 aa, Zea mays
  unsure (1)..(90): unsure at all Xaa locations
  Clone ID: MRT4577_72795C.1.pep
TRRGEPNTXXXXRRSNXXEPXXXDXXGPXEGXPXGXGSSSXRGAAXPRTSXETAAXXGARXDGKEXPEAHXRKADXPGXTKEEAKAEAED

SEQ ID NO: 339501 - protein, 62 aa, Zea mays
  Clone ID: MRT4577_72796C.1.pep
PLPGCVEMRERASVIVNALSLIWPATCSQVRRLGHLGRTFLSPPLGAPWEYFDPAVFVFAPS

SEQ ID NO: 339502 - protein, 96 aa, Zea mays
  Clone ID: MRT4577_72797C.1.pep
MNNGKAVMTTNLCNQTIRYKLQHTRRKKGIKKEKKSKVSSSYKCSTAIDLSLHDMESASVAAFSRPTRLHICSASETRQAVTKSSTLPKILNISTA

SEQ ID NO: 339503 - protein, 354 aa, Zea mays
  Clone ID: MRT4577_72798C.1.pep
AGLKGRFLFSVAGVGDDLYVVGGRSGGSDASKVKTHKGVLVFSPPTGSWRKAAPMRSPRSRPVLGVFEMSASCSILHTRVEKNVRRGKSRLGGASAVYEDPHRLSLRRLRIRDMLDEDTDSTERASYHHGRSAGHEEGKEGQPRLAIVAVGGRGRWDEPLVSGEIYDPVVDKWVEIAGFPTDVGLACSGVVCGRTFYVYCESDTLVAYHLDKGSWAVIQTLRPPPRLRDYAPTLVCCASRLFMLCVSWCDRHEPVSRREKVVRKLFELDLGSLQWTDASAHPDAPMDPHAAFAVGQDRIYAVEMFRIFGKVLDFVTACRVSDAEQKWSRVGRENAATEADSMSCRLKSMAVLHL

SEQ ID NO: 339504 - protein, 128 aa, Zea mays
  Clone ID: MRT4577_72799C.1.pep
PPQVRAPRSPTPQKAVALDPSKKGGPGAWPEEGPKTGAPLYSGSPPPAGDQCLGPCCSQSPPRLLAPWMWGPPRSSGGSPTFNCANGVMASPQKCVLGACPFFLTSFMVWSQSWPFLVIKCSNGLCFP

SEQ ID NO: 339505 - protein, 135 aa, Zea mays
  unsure (1)..(135): unsure at all Xaa locations
  Clone ID: MRT4577_7279C.1.pep
LPQPPPXKSEKQLIEEWKRAGPRPRPLPPPPARPFYAHEKEGWYGWIGENDTEPEASLIEFGRQAHRLLWDALDYFVSVEADAFFPGFHNDGSGWPDYSSLAMGHRLYQTPSGITYRPDRYRLLYFCGYILFCAA

SEQ ID NO: 339506 - protein, 70 aa, Zea mays
  Clone ID: MRT4577_727C.1.pep
ISTEHIRPHCSLDRQSIEWMDIMVTHMYGIAHLISYREPNLWPMPMLCMQWRNRFLRRSSVWGPYKGQWS

SEQ ID NO: 339507 - protein, 363 aa, Zea mays
  unsure (1)..(363): unsure at all Xaa locations
  Clone ID: MRT4577_72800C.1.pep
KLNYQANQGVPRTPLPLLWQAVNLYTPTIFELFRKECEQSMDCMAYGCGEFGSFSEYMITIKNKSKDQLVRFDSSDASVACTCKKFENSGLLCCHILKVYELRNIKEIPPQYFLKRWRKDAKLVMDETDGFNFDTKSSIPGRYAALCRLFYRIAAKAAENEETFALMASQSDNLLVGVERTLLSTLSDKSSGHSLTDQLTRMAENDYLLSGGLEGIGSTGKSVXARRRNGLDTNKRKKAKKGQPDATDGGPTGRELNIGQASFHSEPSNASNQFIPDQLMQGHYVLGHNFGPGSSHNLHDNLNQFDQASSAPTLQQQPFTGNGQLTQGYPGDMHALQFVEPTPQIDHQDGDEGQSSIPVWDFL

SEQ ID NO: 339508 - protein, 50 aa, Zea mays
  unsure (1)..(50): unsure at all Xaa locations
  Clone ID: MRT4577_72801C.1.pep
LLGRGNGLLVINYVGDGGRGMCWKGRSIGIGFGFLLFCMLLXIXXFFGVR

SEQ ID NO: 339509 - protein, 65 aa, Zea mays
  Clone ID: MRT4577_72802C.1.pep
VWSNLTSPSVNSKHMRRVHFDRGTILIGINGIRRIGRLDARAIVHSEDVLLLFGTTNHITTVIIY

SEQ ID NO: 339510 - protein, 74 aa, Zea mays
  Clone ID: MRT4577_72803C.1.pep
WNQPSLFLLFKASFYANMATRAHYEETSHQTKPVRGTTATNQQRTLHKHTTMRAILRTVIPTVTGPQGQPQWLS

SEQ ID NO: 339511 - protein, 108 aa, Zea mays
  Clone ID: MRT4577_72804C.1.pep
FGLCRGFPGHNFVKGRPVTFYSPPLGGNWAPQMQARRAPSFMDIGRIPPFPTAAPGRGSCLLNNCNRSLVFLCSTQSFCPYILSFPFRWFTQVLGGPGDPWSWVTLCY

SEQ ID NO: 339512 - protein, 406 aa, Zea mays
  unsure (1)..(406): unsure at all Xaa locations
  Clone ID: MRT4577_72805C.1.pep
MFLHKRCSCHVINXIVKAGLKHLKAYIDDFKTAITFLNASNQRIAAYKSYCMSMAIRPRKFGVDMDVRWNSTYLMLKHLVPYKSSFSVFIKTQYPLHSDGTPLLTDDHWTIAEKVLSFLELFYESTVALSGVYYPTATLMLHHILRIARHLNAFENDRLLRAAVVPMKDKFLKYWRDIPILYAVAFILDPRAKMRGFNKLLVRLASLTGTNYSNVPIEVRSKLSKIFQLYEAKFGDTRLRANQHPTSLGSGKKKMAWDEIYGDDDYDGELSVGRRPGSSSISTAASTSELASYLDSDTITEFDEDFNVLSWWHQHKLTYPILALLAKDVLTVPASTISSESTFSLAGRVIEERRRRLAPDMVEVLSCIKDWELADAHLQHTVEEETRELEAEHENLYLDDPEEHNQ

SEQ ID NO: 339513 - protein, 65 aa, Zea mays
  Clone ID: MRT4577_72806C.1.pep
FRKQNKLAPPIFRLKLQALTGKQATLWSIHPPLLKLGKKILNLLADLGRLLLLNQMAPPRDYNHP

SEQ ID NO: 339514 - protein, 84 aa, Zea mays
  Clone ID: MRT4577_72807C.1.pep
IRLEEVIRWLLLGIHSKPLRPINVGGHYDLSAGVHRRGGCATVYHALGAPHFDTVPATPGNSIRSWRSTMTGMTRTRLLPSLSG

SEQ ID NO: 339515 - protein, 75 aa, Zea mays
  Clone ID: MRT4577_72808C.1.pep
PMALYLGGDRPNDQPNHSSRYVSSFATLFLEYVEFGFPEWFRSHCLWLQDRPYNAPKNSFSYMNIFPSVCLENVE

SEQ ID NO: 339516 - protein, 401 aa, Zea mays
  unsure (1)..(401): unsure at all Xaa locations
  Clone ID: MRT4577_72809C.1.pep
MAATSMIRAPIGPNPRLACHAPARGGGVVRCSLQGAVVGGRAEWQSSCAMLSSKVAALGTHSINGHVAPAPAVLDLVPVSSMNGAVAKNLPQPLRIAHLSPAPMHGSELRVAYQGVPGAYSEKAAGKAYPGCDAIPCDQFEVAFQAVELWIADRAVLPVENSLGGSIHRNYDLLLRHRLHIVGEVQLPVHHCLLALPGVRRELLTRVISHPQALAQCELTLNAMGLNVARXGGLRDTAAIASARAAELYGLQVLAAGIQDDAGNVTRFVMLAREPIIPRTDRPFKTSIVFAHDTDGTSVLFKVLSAFAFRDISLTILESRPHRRRPIRLVDDGNIGTAKHFEYMFYVDFQASLAEPRAQNALAEVQEYTSFLRVLGSYPMDMTPMTAGSSSTVSSSDPSSS

SEQ ID NO: 339517 - protein, 71 aa, Zea mays
  Clone ID: MRT4577_7280C.1.pep
CFLINHPSHFLICHIHVSNLRVELQQNIVLSLEITQFTNITISLSVSSVLWHIPGRQKNLNLSSLMANVDY

SEQ ID NO: 339518 - protein, 427 aa, Zea mays
  Clone ID: MRT4577_72810C.1.pep
MSAAGITRAPIGQNPRLGCYAPGRGGGVVRCSLQGAVVGGRAEWQSSCAVLSSKVAALGTHSVNGHVAPAPAPAPTQNGAVLDLVPVSSSSINGAITKNLPQPLRIADLSPAPMHGSQLRVAYQGVPGAYSEKAAGKAYPGCDAIPCDQFEVAFQAVELWIADRAVLPVENSLGGSIHRNYDLLLRHRLHIVGEVQLPVHHCLLALPGVRKECLTRVISHPQALAQCEHTLTAMGLNVVREAFDDTAGAAEYVAANGLRDTAAIASSRAAELYGMEVLADGIQDDSGNVTRFVMLAREPIIPRTDRPFKTSIVFAHDSDGTSVLFKVLSAFAFRDISLTKIESRPHRHRPIRLVDDANVGTAKHFEYMFYVDFQASLAEPRAQNALAEVQEYTSFLRVLGSYPMDMTPMTAGSSSTVVSSSDDPSSS

SEQ ID NO: 339519 - protein, 64 aa, Zea mays
  Clone ID: MRT4577_72811C.1.pep
VVCRSDCSRHVYASLHVQILDGRFVLICVMSGIQEHDSSIWGHRTPSLGTKSHGLVSGTEWLLV

SEQ ID NO: 339520 - protein, 111 aa, Zea mays
  Clone ID: MRT4577_72812C.1.pep
NGGAQQPGKGLKKKKILGRIQMANSPKNTPFGRGGEKFIFLPRGKCPDPRGKTRGPSFKFRKGGVPKKGTGETKHPAIEGPRGPKGERAKKQLAPAYTKRGGKKKGFLGAF

SEQ ID NO: 339521 - protein, 79 aa, Zea mays
  unsure (1)..(79): unsure at all Xaa locations
  Clone ID: MRT4577_72814C.1.pep
LXDFEPIIILEGDLVLKSKPAISLFFVVNLRCVRDLLVDPNDLSSNCALVALNSEATCHARSWRSLSHRRFSEFQAGFR

SEQ ID NO: 339522 - protein, 125 aa, Zea mays
  unsure (1)..(125): unsure at all Xaa locations
  Clone ID: MRT4577_72815C.1.pep
LDGLHEAELQVYLPAWLQRRNPSHSVRYSPPTNADQYVGVSMVAMDSXTCADSMDTVNKGGVIEKNDVALSDHTAICDETEVSELAADALDTAEIDVDLCESIILMCRIVIATMIATVEDASDHL

SEQ ID NO: 339523 - protein, 55 aa, Zea mays
  Clone ID: MRT4577_72816C.1.pep
TRQGPKSKCLKLVGAARTRTPSSTNYDVHSPTWGDGRPACPPSAMWTTDPGHGPS

SEQ ID NO: 339524 - protein, 107 aa, Zea mays
  unsure (1)..(107): unsure at all Xaa locations
  Clone ID: MRT4577_72817C.1.pep
PLRGGFACGLRCSWCGRAPRARRRPLPSASLCLGSRCLSSFSASARLPVRRRWRLLPLLRSPLGFPVALRRRSFSAAVLFGAAVVLPGGWXLPAFVXPWGGGAGPGR

SEQ ID NO: 339525 - protein, 85 aa, Zea mays
  Clone ID: MRT4577_72818C.1.pep
GAKPFLSLLQLKMSKNNQAVLFLTKKLGGPPPGGLGKRGDFKKTGGGGGTLVQKKKPPNKMSLGANIQTGKREYPGHRNGHHWLT

SEQ ID NO: 339526 - protein, 171 aa, Zea mays
  unsure (1)..(171): unsure at all Xaa locations
  Clone ID: MRT4577_72819C.1.pep
MTTTDCSKLMLPLINQXDLANLSPYSQHQQLDLHLNQXLSTHEPXRSILHQQLLPXNQLXTSYXSLQQTXLLPFNQLNALNPAAYLQQHILLPFIQLAAANRAPFLTQKQVLPFYHXFAANPATLLQLQQXLTSAQLALTDPADFYQQHIMWWCHSFRLLISSNSIIKIFG

SEQ ID NO: 339527 - protein, 151 aa, Zea mays
  unsure (1)..(151): unsure at all Xaa locations
  Clone ID: MRT4577_7281C.1.pep
NKMLLKSKFKLATAIGIVLSMLSLLVHLFLANYSAGGITKYSMHMDDVLPFEPRPRPRRLWGPLVPLDHLHPFVKPSKSYAVPSKHNGFIYAKIYGGFEKIQSSICDLVAVARLLNATLVIPEIQATTRAKGISPKFKSXSYIYDEDHFIH

SEQ ID NO: 339528 - protein, 76 aa, Zea mays
  unsure (1)..(76): unsure at all Xaa locations
  Clone ID: MRT4577_72820C.1.pep
SSSLHLARPFLAFLPXLHSALWKIPFRXHVLYTIICLHIFLLYYHISLYHIHSTTVSYPFYCIHATIASNPLTNIH

SEQ ID NO: 339529 - protein, 43 aa, Zea mays
  Clone ID: MRT4577_72821C.1.pep
SGTCGALRGCTHCGTTTTTPGASRPCCLMSGTTVGLLRRITVH

SEQ ID NO: 339530 - protein, 77 aa, Zea mays
  Clone ID: MRT4577_72822C.1.pep
MLIQDHVCCTGCSDMMNQSLFLVGEIGGNDYNGPLLSGVPFEEIRAITPSVVAKISSTISVSISFIVGAVAVNNIYR

SEQ ID NO: 339531 - protein, 130 aa, Zea mays
  Clone ID: MRT4577_72823C.1.pep
WLEASQRQVLCPCKRSHRCTKDGCSQLVLDGLGGTCPLVCRRLQGGGASVDIGLRAPLAAVPHIALRPAAGVGCHLLARGHRVQGRGALAVSLAGEVLGPRDRLRNPPLLVAMESGGTWVYNGARAEFRA

SEQ ID NO: 339532 - protein, 138 aa, Zea mays
  unsure (1)..(138): unsure at all Xaa locations
  Clone ID: MRT4577_72824C.1.pep
HIESTLAFQQWLATIFRLLMLLGIPPSAATAIIFXHSSQAPIACLHPPYLSPPXSYRCETXLVQPSAIQQAIAADLLPLVPLLHHQQLAQLQQFPPGXILSQTIRHTHLYNFLLQKLAAYSSLQXLAPLHQIACIELC

SEQ ID NO: 339533 - protein, 112 aa, Zea mays
  Clone ID: MRT4577_72825C.1.pep
YSEQGGGPSPLRGANNGKRGRGGALWLLPRRGKGGGFPPALSGVNPGFPRAPIGKTGPGNFEKAPQKGDWGPLNQGPKAPRGEGNFRNPPLEGPPRAGKNIFFQFFCFFFWL

SEQ ID NO: 339534 - protein, 175 aa, Zea mays
  Clone ID: MRT4577_72826C.1.pep
EQGRHHPEMRYAGYFQRPNTMTRRIKSVPLDAFAADGVGTDTDTVLFRASGAPDHRALAGACVGEARDRLGAAEVPRFTLLVVARDGVGDNPRAMTVETCAADSLSVPGGSTGDKPEVAQWQDLGLEEFALRESKPVHVSCSIVTAGDEGLVIVMPDGKGFLVTVTVRLSEFVKI

SEQ ID NO: 339535 - protein, 166 aa, Zea mays
  Clone ID: MRT4577_72827C.1.pep
RQFSSTSPCGGSVGGYVTVLGSHCGGLAFVLGFGPGGGGRGIYAASRPAFVFMRAPGGRGSPELVRARHGLSQAWASCSAPPAPCRRGASTLPRAAGGVARAGPSWPPGRGRRPSRGRRLTAAAAGPGPLRPPCYPCSRAGTAPAGNSPPRAPHPVGITGPGPRAP

SEQ ID NO: 339536 - protein, 132 aa, Zea mays
  Clone ID: MRT4577_72828C.1.pep
MAPKILAVLGFLGGASAAGLACFHGIEMVANKPTYSTVLKILQDTKGAGEANQPRAGTIVVAPDKITKTLASLPANNVRTAAENHGLLSYLYPIQLDQMKTHTGILPTMLYDTDKKLRVLNYTRVDYGEMDF

SEQ ID NO: 339537 - protein, 78 aa, Zea mays
  Clone ID: MRT4577_72829C.1.pep
DPELGVHRSGGHRAGGIRAPLPSPAEVRWHAAAKPRFPSPPPPRDQVEPPLRRRLVVGPDRSSPQNFWPSMECSWSAE

SEQ ID NO: 339538 - protein, 165 aa, Zea mays
  Clone ID: MRT4577_7282C.1.pep
MGCSLSGLNALYDAATGGGDVWINERRFRVLRQIGEGGFAFVYLVKEHDASSYAARDRHPSHVSDDGTYAMKKVLIQSREQLDLVKEEIRVSSLFNHPNLLPLLDHAIIAVKSTQGDWSHEAYLLFPVHLDGTLFDNAAVMQPRKEFYSVVDVFAIFQHICEAMK

SEQ ID NO: 339539 - protein, 75 aa, Zea mays
  Clone ID: MRT4577_72830C.1.pep
IYRWGSLIRGNGPMGPPALTSRWGVLLGIPRAGGVERGLFGPITGGARGLTAAPQKGKGILGGGDYNVNGGDVSL

SEQ ID NO: 339540 - protein, 87 aa, Zea mays
  Clone ID: MRT4577_72831C.1.pep
RGFMTRAHMHSPSWKQGGLCRRNRKTVSQSPIMTIGWRHQSHLVTSLVKDSSQEKTLRVPNQIYSRVMQRVLLWNDDPTRGFELHGN

SEQ ID NO: 339541 - protein, 142 aa, Zea mays
  unsure (1)..(142): unsure at all Xaa locations
  Clone ID: MRT4577_72832C.1.pep
SRLSYVFGPFSLDVWDAFEGYPXFGCRSPSRLFPSFPRTSSXTAAVAGAXRIDRCETPEAHVYLVDLSCSKNEEVXKVEVEDRNVLLISGERNKEQEEXTDTCCRVXRSIVGLLRKSRLPENAETDXITVAMXNGVLTVTVP

SEQ ID NO: 339542 - protein, 77 aa, Zea mays
  Clone ID: MRT4577_72833C.1.pep
THPSTRRTLQARQQSDSPPTTTMSTAVSPINRKSEAIPYVDHVGHMPDRTSSGSDEILLSCGSMGTCVKITSGTCDS

SEQ ID NO: 339543 - protein, 103 aa, Zea mays
  Clone ID: MRT4577_72834C.1.pep
SNLTPWQSQPPHGARHGLVQNVRAVLVLPSLLQSSHALHPQRQAPPWRTAAAAGPRNERVPSRNWPACSASSPRAATGASRGRSWRVCLRAWPSARRTLRWRA

SEQ ID NO: 339544 - protein, 92 aa, Zea mays
  Clone ID: MRT4577_72835C.1.pep
ALASCPPSSPAIIIRKESSLHHALCLGGGQSVLGRFSCRCACVVRGPLSPSWFSKHMVLLPSAVLVWVPPWAGCVVCALEPGLLHIINKSDV

SEQ ID NO: 339545 - protein, 122 aa, Zea mays
  Clone ID: MRT4577_72836C.1.pep
WPGEAQGSRDASSGTYYSKEAPVTECRGRASSPTPAGSQAKRSQSTERRPVTPSRPSSGGSRPSTPSRISAPASPSSATSSPSSFSSSSTPVADAVPETQIALRRLPGGRAPDGLGPSMRSL

SEQ ID NO: 339546 - protein, 87 aa, Zea mays
  unsure (1)..(87): unsure at all Xaa locations
  Clone ID: MRT4577_72837C.1.pep
PWLSAVPVVVLRSSPCVGLFAPVFGSCVVFXPSCAXFVLPXCCPCRVRSSPLSVGFRCFSLFVFAFACPASGALFPCAVLXLLXRVG

SEQ ID NO: 339547 - protein, 100 aa, Zea mays
  Clone ID: MRT4577_72838C.1.pep
PWHSKEDSVRQGNPVHLQILDEPSASYRHQARLQHRLSPLKVSPMCGVKRFQVKGKLAPRFVGPYPIIGRVGPAAYRLELPESMSDIHNVFHVSQLRKCQ

SEQ ID NO: 339548 - protein, 54 aa, Zea mays
  Clone ID: MRT4577_72839C.1.pep
RGPLETFAAACCPDATIAPSREWPSAPSASYILMGQDVGEQSGCFARAYAASDR

SEQ ID NO: 339549 - protein, 55 aa, Zea mays
  Clone ID: MRT4577_7283C.1.pep
SHSCYLPLPHDARSIHHRPALALRAACAHHAAARCPGQRHLPTASRCTSAACNHC

SEQ ID NO: 339550 - protein, 47 aa, Zea mays
  Clone ID: MRT4577_72840C.1.pep
PLRSFRKILLRLHFLTVLPRFYFFLYLLLPFTHVFHRKISPITPTLH

SEQ ID NO: 339551 - protein, 120 aa, Zea mays
  Clone ID: MRT4577_72841C.1.pep
RSPAIHRSSAARHDELQKQRRRRRRARKHATRTGDKGDVRTEGVNQRAALGAHGFEAAGHGEVKARQGADGADPVVSRRSWRLAARRRWTHGHGWSSGTVRRRGERRLVAGAGARWPERR

SEQ ID NO: 339552 - protein, 80 aa, Zea mays
  unsure (1)..(80): unsure at all Xaa locations
  Clone ID: MRT4577_72842C.1.pep
RRRTLLKDIITRDSEVEKTYLMNQYVNKKFSIQDMATIDTYFLTNEVQFEDRLFTLQIWDTAGQXRFQSLGSAFYRRVHC

SEQ ID NO: 339553 - protein, 39 aa, Zea mays
  Clone ID: MRT4577_72843C.1.pep
NAGVDPPINDRNLHGNHLSFSRVRLNIAGIMAKHSYCVK

SEQ ID NO: 339554 - protein, 322 aa, Zea mays
  Clone ID: MRT4577_72844C.1.pep
DGHYEIIAAHGKGVFSKVVRAKDLKASKDDPEEVAIKIIRNKETMYKAGKQEVSILEKLASVDREDKRHCVRFISSFMYRNHLCLVFESLNMNLREVLKKFGRNIGLKLTAVRAYSKQLFIALKHLKNCKVLHCDIKPDNMLVNEAKNVLKLCDFGNAMLAGMNEVTPYLVSRFYRAPEIILGLAYDHPLDMWSVGCCLYELYTGKVLFPGPSNNAMLRLHMELKGPFPKKMLRKGAFTMQHFDQDLNFHATEEDPVTKTAVRRLILNIKPKDVGFLILNSPGEDPKMLSSFKDLLDKMFILDPEKRITVSQALSHPFITGK

SEQ ID NO: 339555 - protein, 81 aa, Zea mays
  Clone ID: MRT4577_72845C.1.pep
APTFEGPGMEIAGPSSPHHGFSSPSTVLHVINKGSDVLMRSSTTCQNRIESKISQIFIFASMEANLDLTNHHLKKVGSKHP

SEQ ID NO: 339556 - protein, 78 aa, Zea mays
  unsure (1)..(78): unsure at all Xaa locations
  Clone ID: MRT4577_72846C.1.pep
PQILLYLSFKGXVTIDLSEDDVITLRXEVDTYMIDADLQPCTHVAIERLYDIMCYMGIQXLXGLPARGPRTMLNCLTL

SEQ ID NO: 339557 - protein, 746 aa, Zea mays
  unsure (1)..(746): unsure at all Xaa locations
  Clone ID: MRT4577_72847C.1.pep
RPAGLYFRYREKGDYTNGSRANLRDGSDHESNDRNGKSGRHTTRTHGSERERSSSHGIHDRHGDRYSDRRASQERHRDDRIYRDKIDSLEAAPRHRERSRSHSRSDPRENTRLRDQSRERERRSGSSRHRDHDSKRDTSKDRHRESDRVNSAHERDRGREARDREWHRVKGSETHRAKEGRDKVSDNDRHRDSTRSKYSVSDGYKERTRSGEKGRDADHKNRKFEEMKENSLKEEDEEEYQEKIEQQLAMQEEDDPEKIKEEARRRKEAIMAKYRQQQSQKEDMESKPSGNDXSKSNGWKRSYTSXMISIAALWAMSKLKISMXSEVFDGKTGFNVGRSPAHNYASTSTGAFTDERTIGVSGLGEGSPKSERSADMFCDDIFGESPTGIRKLGKDDGLHIERNALHDNWDDADGYYTYRFGELLDGRYEIIAAHGKGVFSTVVRAKDLKASKDDPEEVAIKIIRNNETMYKAGKQEVSILEKLASADREDKRHCVRFISSFMYRNHLCLVFESLNMNLREVLKKFGRNIGLKLTAVRAYSKQLFIALKHLKNCKVLHCDIKPDNMLVNEAKNVLKVCDFGNAMLAGMNEVTPYLVSRFYRAPEIVLGLAYDHPLDMWSVGCCLYELYTGKVLFPGPSNNAMLRLHMELKGPFPKKMLRKGAFTMQHFDQDLNFHATEEDPVTKTAVRRLILNIKPKDVGSLFPNFPGEDPKMLSSFKDLLDKIFTLDPEKRITVSQALSHPFITGK

SEQ ID NO: 339558 - protein, 330 aa, Zea mays
  Clone ID: MRT4577_72848C.1.pep
MEPHHANKPRPKLSATKHSKFISCKLYISESRNATAVDAVERASKSDPQVVVVSQFGDHHYNRFRYTLVSYIVVDDDGVDGGGSSAAGEATVVHSPIRKVLLAMIEAAFSSIDLESQSGAHPRIGVVDDLSFHPVGQATIEDAASLARQVASDIACIAAVPVFLYAAAHPAGKSVGAVRRELGYYRPNYRGNQWSGSVLPNVLPVKPDVGPAHVVSHKRGATTVGVTPWIENYNVPVLCKDVATVRRITRGVTGRSGGLPTVQALALFHGDDCTEIACLLDPDHASAYQVQTVVEQIAGDQGLEVEQGYYTDITKDEALDKYLKIACADD

SEQ ID NO: 339559 - protein, 100 aa, Zea mays
  unsure (1)..(100): unsure at all Xaa locations
  Clone ID: MRT4577_72849C.1.pep
LAAPRPFGPPWEAAGXRRWTSXPVGMTCRXXPISKPAXXMXXXXXAARKESXXAVKXDKKKKVAEEDGIRXRELHHLLAVFXRVGGSCELPIRRTPGIXG

SEQ ID NO: 339560 - protein, 29 aa, Zea mays
  Clone ID: MRT4577_7284C.1.pep
VISLYIDSRLVKTISLLKYYEHKTHTMLY

SEQ ID NO: 339561 - protein, 82 aa, Zea mays
  unsure (1)..(82): unsure at all Xaa locations
  Clone ID: MRT4577_72850C.1.pep
DYVERPXKDDLAKSAYGYDYAVVAVGEPPCAETAGDNKNLTMPVAEPXVIKDLCGLLRCVLLLRCGRPLLLQADVDFMDAVG

SEQ ID NO: 339562 - protein, 146 aa, Zea mays
  Clone ID: MRT4577_72851C.1.pep
LEAGRAGLCYNDPDFMDYTLYGMMAVALTPTAEIATGLSLTIFVVWNFFSGFIVTVKAMPVWWRWMYWACPTAWTLYGLVSSQLGDHKELIRVLGQPDQPVITFLQEYLGLENGYLPLVTALHFVLSALFCFVFCVGIKYLRFQKR

SEQ ID NO: 339563 - protein, 92 aa, Zea mays
  Clone ID: MRT4577_72852C.1.pep
HATAGKGLPLTLHQPPSNSRRSLGAEGLHLAHTLTCTEPQIWVHARCVTNHHRKGSAPYTLYTPEQSTQITGGSGAAYNGCACAHTESGVAH

SEQ ID NO: 339564 - protein, 42 aa, Zea mays
  Clone ID: MRT4577_72853C.1.pep
SEKFNENQLLFVTSTLVSSDKSTDLTCDYSYHKHRSSTPASN

SEQ ID NO: 339565 - protein, 154 aa, Zea mays
  unsure (1)..(154): unsure at all Xaa locations
  Clone ID: MRT4577_72854C.1.pep
MPWECTSVSRHRRLSHDREQKKFIAPDKLSERGISSGGPNAAAXENDDNLLTTGEASGYSYVHVCDVSPDEVPVLARXKLRISNEELSPTDEDIRDWLDGSGYCVERDQDDQRIRVLLRKGXMIVMPARMHHRFTLEREDYTEATRLSAGETVW

SEQ ID NO: 339566 - protein, 237 aa, Zea mays
  Clone ID: MRT4577_72855C.1.pep
MSTERERLDEIGKIKREPDTAALAVAAASASTVPADNHIPRRLGHGGALNTLTPCAACKLLRRRCAQECPFAPYFSPHEPHKFAAVHKVFGASNVSKMLLEVVEGERADTASSLVYEANLRLRDPVYGCMGAISILQQQVNALEAELEAVRAEILKHRYRQATGNRLMDDVRATASFVLAPASAPMHVNDVVSVVEAGQEVTATGGASGVYIAEAEQPSSTNNYSSLNPSEHPAYFG

SEQ ID NO: 339567 - protein, 79 aa, Zea mays
  Clone ID: MRT4577_72856C.1.pep
IRLELQPGRPFLLRCKLTQSLPVNGHKRVCFHAHGSSHAALLWTRTNAGKATCLLVHSPGEFHEFYHFKLCLPTERTKH

SEQ ID NO: 339568 - protein, 96 aa, Zea mays
  Clone ID: MRT4577_72857C.1.pep
PNAEARILQAGLHKCAPRTEMPNNKIDTLNMLDKGAGGKALVPHDKLPGLTILLIPNRREPPINIVSLAAFTTKLPLAMEALALELFDNLHYYLFE

SEQ ID NO: 339569 - protein, 110 aa, Zea mays
  Clone ID: MRT4577_72858C.1.pep
RNPAAAHTLPPTLPINFNYNIGGGGLPPLREFVQNGRRQNRLFRSRYLDPGQRPFPCLFPRRRGLPLSVPCFAPLPSSIHPCLLIFFSNFFSFSPLFFLYIFLFFIFLFY

SEQ ID NO: 339570 - protein, 55 aa, Zea mays
  Clone ID: MRT4577_72859C.1.pep
GHGLLNVSHLVGSRLFLVLQNSLQPLVRRLGHLRLWRGECRLAVSGLFACAPFAL

SEQ ID NO: 339571 - protein, 80 aa, Zea mays
  unsure (1)..(80): unsure at all Xaa locations
  Clone ID: MRT4577_7285C.1.pep
DDSARXRNQSRVCIDFPFFGAFRGFSGTETVVPRNQDPGLADLPATGAAGKNPNPKGVNDGSNLESIPPGNPTRVALDNL

SEQ ID NO: 339572 - protein, 102 aa, Zea mays
  unsure (1)..(102): unsure at all Xaa locations
  Clone ID: MRT4577_72860C.1.pep
MTSSSSPSRKALSMIACNRLQKELAEWQLNPSVXFKYMVXDXLQRWVIXEDTGADSLLFSPSCPFLYIPTLPFSLSFSYLIFLFISFLISFHFYSLFFSFFL

SEQ ID NO: 339573 - protein, 61 aa, Zea mays
  Clone ID: MRT4577_72861C.1.pep
DYVGHLSLLITSYVSYILILASFATGVYIVQYLSGPDVSHTNLIAPENVIQDSIYIIPQML

SEQ ID NO: 339574 - protein, 91 aa, Zea mays
  Clone ID: MRT4577_72862C.1.pep
LLISEPLLFAPHTTKKHSYVSVLDQGALRTFTSRLPLQLSILLIWALFPWPRTRRTTPLLLPSDRRSCDIRSRSRRNPRLRLEQRDAHAVA

SEQ ID NO: 339575 - protein, 114 aa, Zea mays
  Clone ID: MRT4577_72863C.1.pep
SVFSSANKIAYGDSRTYLRDVMADCQHVTTYPNSNHKCNLIHTNTIISYALSTTTTSHILSYTITNVPHTIISSIITELKPKLIYSIMTQLNKPITPTPTSLILSTHKIHNHPT

SEQ ID NO: 339576 - protein, 108 aa, Zea mays
  Clone ID: MRT4577_72864C.1.pep
RVLTVRPSASLSLSGSPSLPHPARPPANLLQCTEANSCRTGLRRRRSCFNNYPPRAQVSPAPAHSPEVSNAFPPAAVCLIWVYSSSPLVVSSREFPIQFGLGLLPFLL

SEQ ID NO: 339577 - protein, 55 aa, Zea mays
  Clone ID: MRT4577_72865C.1.pep
PPSCCCFFSFFVCTGGKTKDIGVHINSIPLGKHRANGCVPVYQFQACYLINHHHV

SEQ ID NO: 339578 - protein, 39 aa, Zea mays
  Clone ID: MRT4577_72866C.1.pep
QCRKFSSDQVTYTSYSTHGTFSPSLVMDLYTRIHAKEPH

SEQ ID NO: 339579 - protein, 74 aa, Zea mays
  Clone ID: MRT4577_72867C.1.pep
GGPRVRLHVRGHFDGRSPFSVSTWGGLYSAVGQHFFTISPTPWPNTMPQYLPPLPHYSDHQHMTTTAKGDSIPT

SEQ ID NO: 339580 - protein, 110 aa, Zea mays
  unsure (1)..(110): unsure at all Xaa locations
  Clone ID: MRT4577_72868C.1.pep
IGPSGPPKGGPEPSFCKNPLNGAPQRAYWGGPQPQWMGGEXEFKPPPRXKPPICPKTPQTPGLGEPRPXPKYKXVPPPAGLAEKPYQAXPPCPGGTKXLAYPKPANTPPQ

SEQ ID NO: 339581 - protein, 97 aa, Zea mays
  Clone ID: MRT4577_72869C.1.pep
QYIDYLMTWVQDQLDDDTLFPSKIGVPFPKNFMSVAKTILKRLFRVYAHIYHQHFDSVMLLQEEAHLNTSFKHLIFFVQEFNLIDRRELAPLQELIE

SEQ ID NO: 339582 - protein, 74 aa, Zea mays
  Clone ID: MRT4577_7286C.1.pep
AMERRRELGIFSWAIHRARGTVERWQLLAGLHNLPSFVDSALPPQTPIATHRSEVTRNLKPNYWEAPEDLESQV

SEQ ID NO: 339583 - protein, 55 aa, Zea mays
  Clone ID: MRT4577_72870C.1.pep
TGTSCACVTLIRTLILTRIRFPYISFLIELMALALYSLSILLTTPLLFFPYYSNS

SEQ ID NO: 339584 - protein, 60 aa, Zea mays
  Clone ID: MRT4577_72871C.1.pep
KQVIGSQWFIYSFPSTSRLGYPSTVYYLDSSKSSTLDYGSRVAMMDFRVNGLSSYQRYQN

SEQ ID NO: 339585 - protein, 35 aa, Zea mays
  Clone ID: MRT4577_72872C.1.pep
LTVVRSGRLVRAGPRPWFRVCACCVCASTPNTAFP

SEQ ID NO: 339586 - protein, 116 aa, Zea mays
  unsure (1)..(116): unsure at all Xaa locations
  Clone ID: MRT4577_72873C.1.pep
SSADPFCGSKLLPFXQLAPGSCPHQRLLPFIHLAXLNPAAYLQRAILLPFSQLAAAKRASFLTQDRVLPFYHQFAGIPAPLLLLQQLLPFEHLALTDPEGSYHLHVVGGALFSIAY

SEQ ID NO: 339587 - protein, 90 aa, Zea mays
  unsure (1)..(90): unsure at all Xaa locations
  Clone ID: MRT4577_72874C.1.pep
PPRGALSGASPFFGGSRPFPGXFPRVSAXFXXLFRGKAFLRWGPGEGMVXMGFPQAESPLTVLVSEYPQSPDAPVDEEAGFEGGGALPDE

SEQ ID NO: 339588 - protein, 102 aa, Zea mays
  Clone ID: MRT4577_72875C.1.pep
FGPRGSCSGPPHPVFWTRSKRGLEWPSLKTPGGIPRCLRGPKTALKSPRAPPSPPPRGGAPSFLGPLGAEGRAIKKVFGFSQRGGIMHKNVGPQRSLVLLGF

SEQ ID NO: 339589 - protein, 231 aa, Zea mays
  unsure (1)..(231): unsure at all Xaa locations
  Clone ID: MRT4577_72876C.1.pep
MPTEGEPQPEEGTGVLPNPDWVMLGRIGRTRCHNSLGAARVALNKNKTAALLHMAGGPFCYVSFTLAAPRKGVSYLNLHWPEGQDAAIPPAYPSVRAADKELILFDISTPAQTDSYLVPPDLFVYTAAGSSPSVQRLPPCTERGKKPFLMDNLATGILRLKAEDRYIVADLNVYSEEAGLRAELCVFDSYLNKWEITPKIAFDDHINGGQFTNLWXTHHVFAFAGRFLCWM

SEQ ID NO: 339590 - protein, 42 aa, Zea mays
  unsure (1)..(42): unsure at all Xaa locations
  Clone ID: MRT4577_72877C.1.pep
DGSDNGGRREGGAAGNGGGGGXGGRREGGGDGNDGGGGGWRK

SEQ ID NO: 339591 - protein, 46 aa, Zea mays
  Clone ID: MRT4577_72878C.1.pep
LSVSLLSTGVVEVEEELVVLTKSSRRDQVAGSVASSRTLTPPPFVG

SEQ ID NO: 339592 - protein, 62 aa, Zea mays
  Clone ID: MRT4577_72879C.1.pep
RACSRARSITNTMALRTRRLTHPCYVTMQASFICALWAGRRPSTLSHPPKGTDCDPHSYGNI

SEQ ID NO: 339593 - protein, 73 aa, Zea mays
  Clone ID: MRT4577_7287C.1.pep
LFSRTNRLSLTDEYTIPPCSALPPYYHQQKASSKSNGHNFKDALKERNKHGAGPMNSCSYSNSNNRFFPLTCA

SEQ ID NO: 339594 - protein, 106 aa, Zea mays
  Clone ID: MRT4577_72880C.1.pep
MGWFSDDSNPAQAYEQVTQRPHEAEWSHELIGGAAAYEAAKAYEDHVARNGQPDSHAKAKEILAGFVGAFVDREVETRGLDFIDAEKAKRHGRDHVEEQLTVDSWQ

SEQ ID NO: 339595 - protein, 236 aa, Zea mays
  Clone ID: MRT4577_72881C.1.pep
MSSPPPPVKLIGFFGSPYAFRAEAALCLKGVPYELILEDLFGSKSELLLHHNPVHKKVPVLLHGDGRAISESLVIAEYVDEAFDGPPLLPADPYARAAARFWADFIETRLTKPFFMAIWVEERDARLRFEEEAKELVALLEAQLEGKRFFAGDRPGYLDVAASALGPWRSVIEELNGVALLSEDDHPNLCRWTRDYCAFEALKPCMPDREKLLAYFTKNFDRYKAAVNATLSQSQQ

SEQ ID NO: 339596 - protein, 95 aa, Zea mays
  Clone ID: MRT4577_72882C.1.pep
MKLWGSSSSEADPSHDVRMSIADVLHASMEDELMAARDGGAGTSRRWCHGGNSKGGRSSSRRSLQDGTDTKRLPPAGRSCFSSKSGRGRGPDHPM

SEQ ID NO: 339597 - protein, 114 aa, Zea mays
  Clone ID: MRT4577_72883C.1.pep
AHISAAALPFFFFFFFFFFFFFFFFFFFFFWGGGPSKLTRNGPVAQTSIGKTPLGPSKARLTKNLFSKLQHKQMFFEEKFDQLISLHNPICPAGNPRAQIRTLLSHGSREGKAF

SEQ ID NO: 339598 - protein, 92 aa, Zea mays
  Clone ID: MRT4577_72884C.1.pep
TRENSQHKGDCHTQGSPFYGSTLGHPSPEHTGANPVCCRLGHPLNTYLIKKERTGENLTGTLFFRTYYRDRKQGFQETRGGGGLPTGRAFYD

SEQ ID NO: 339599 - protein, 69 aa, Zea mays
  Clone ID: MRT4577_72885C.1.pep
FPFEARVSLSVFAALVSVVPFMYILIWGGAVSFGGNTRVARAVMNPQGGLRWMEWWEFIPPVPVRTVHR

SEQ ID NO: 339600 - protein, 39 aa, Zea mays
  Clone ID: MRT4577_72886C.1.pep
RLIDYWPQRTKDLLHKLRGTWGLQLLKTGAFKGWDRELM

SEQ ID NO: 339601 - protein, 39 aa, Zea mays
  Clone ID: MRT4577_72887C.1.pep
RDLAELLAIAAAAAGILIWQSSLDQPPTTELPRERQQAP

SEQ ID NO: 339602 - protein, 91 aa, Zea mays
  Clone ID: MRT4577_72888C.1.pep
ANNIPTRANPPSSKFKEIEKKGFFLFWGPPQKNHLSSFRANPTIHFLQPPKHCNKRQQRPILAPQKNTLTLFLFKKGSTGPLNFAPGKTGE

SEQ ID NO: 339603 - protein, 80 aa, Zea mays
  Clone ID: MRT4577_72889C.1.pep
SLTAPFFFFFYVTPFVGMQELSPHLTSLDTSYFRLHTAHKYYALTIQRCNIITNNHGQAPYPAHLFHSTLALNRKLDQPP

SEQ ID NO: 339604 - protein, 93 aa, Zea mays
  unsure (1)..(93): unsure at all Xaa locations
  Clone ID: MRT4577_7288C.1.pep
MTVRPGWVVWVAHGSAEXKKRLACKTDSLASIRVINQNKCTSNTPKYRFVVRFTNKDITGQIISAIIVGDMGFASAYSHELAPYGLEDCLTNY

SEQ ID NO: 339605 - protein, 73 aa, Zea mays
  Clone ID: MRT4577_72890C.1.pep
SAPGYMGDFQISLLGIIGAIKVSSKAFFFFFCSFGAPNVVGENVVAANVCYLLNGPWGGGFGDTSCCYLFGFF

SEQ ID NO: 339606 - protein, 92 aa, Zea mays
  Clone ID: MRT4577_72891C.1.pep
MVGLSEGEKHFIRGGIAQDLRADGRRRLQFRALTVETGIIPQANGSARVRMGATEVIASVKAELGKPTILHPDKGKVSIYVDCSPTAAPMFE

SEQ ID NO: 339607 - protein, 71 aa, Zea mays
  Clone ID: MRT4577_72892C.1.pep
NRNSRSCLSLKKERSYRTRITDHRSHKHISCLKRLTRKLIACLVREMRLVIISLISHFLILVLGIINDMDK

SEQ ID NO: 339608 - protein, 89 aa, Zea mays
  Clone ID: MRT4577_72893C.1.pep
VLKVMLCKPTILNINPYNGIDSYKRANPTGSDHHSQRSRLISCDNTRGRWPDDYHWWSMFLPNTGSKHTPRWPRYQLDQEINYVCWPPV

SEQ ID NO: 339609 - protein, 154 aa, Zea mays
  unsure (1)..(154): unsure at all Xaa locations
  Clone ID: MRT4577_72894C.1.pep
VPRGRPGYDYXLPNGSLDYHLHTTPPRHKNNRIDLQWAQRXHIVRGIASGLXFYLHEDWEQVVIHRDIKTSNVLLDSEMNARIGDFGLAXRSHDHGAXDAHTTRVAGTWGYIAPEIARXGKATKATDVFAFGVLMMEAVCGRRPIWADDASREP

SEQ ID NO: 339610 - protein, 89 aa, Zea mays
  Clone ID: MRT4577_72895C.1.pep
KSVFPIACFLLKGPNFVLFFCPFSGPVHFFFLPPASPFWGPFFNLPLVPFTRSVGIFMAFPLHHPSPQSPFLQGVMDPLVRPPFSPFSR

SEQ ID NO: 339611 - protein, 65 aa, Zea mays
  Clone ID: MRT4577_72896C.1.pep
MDGKGGDDGGHESGGSDHDDMDMRKPLLVNTGSWWYAMRKSHVSAFLCTLIVALGPIQFGFTGGF

SEQ ID NO: 339612 - protein, 395 aa, Zea mays
  Clone ID: MRT4577_72897C.1.pep
MEPNLQSAMEEQLKILREISDRLAAQEARWRSRESTVVQHSRSIHDLEVAMASAPSATLRAELDAPVAVTYERLDATEAASAARVSALESTTATFDMLFDNSDVVEKFDAEVVADDWGGLFGQHAHPLDSGGARLLLPSAALPFASATDTTFSSIYGIECGTIHTYTAALARPAALHDPLVVAHAKCSTPGHNRVCAETQRQGPRQARRQCRLRVHVRRLHFTGLQLHVRQHGRRRQHVVHVQRVLPGAEPDGRGLRLPWPRVAHGDRPFRAHLQLHHIDPDGGGGGGHGITPPERWLSRAGAYNAATPNEADVLHWALKGVLWPRVTYCIAGWIDLGDGVAEGADHAVRVRFRVDDGCVVEGGTVCAESGSWTEIKGVFRLKRNARVMEVYVQG

SEQ ID NO: 339613 - protein, 84 aa, Zea mays
  unsure (1)..(84): unsure at all Xaa locations
  Clone ID: MRT4577_72898C.1.pep
VVLGXGTNHKRGVLALILCLTKVHGLIVLRVLPCHKHLFLHYAWFQSQCRGGGGVPPPGSLLRVTCPRNANFLLTRSALARVSG

SEQ ID NO: 339614 - protein, 216 aa, Zea mays
  Clone ID: MRT4577_72899C.1.pep
TGFISIVGAVSPAGGDFAEPVTSATLGIVQVFWRLEKRLAQRKHFPAINWLYSYSRYLKSLDPWYEDFDPEFVGLRTKCKEILQMEEDLTEIVQLVGKDSLAESDKVTLEVARLVRDDYLQQNGFASYDRYCPFYKSVWMMRNFLTYYNLAQQALESSSADNKVPWNVIRQHTQDVRTKLSSMKFQDPADGQEKVVAYYKAFQEEIQNCFRTLNEQ

SEQ ID NO: 339615 - protein, 142 aa, Zea mays
  Clone ID: MRT4577_7289C.1.pep
RPERPVARPYHTFVIQQWVSLTSTLLSTNGGQLKNLLKRDPKSYEAEFEQQYRHYEASLSIFKLKPDDEAKDLGDLINFISQVSQCFPHRTAEFPGQMIELLEEHYQVLNPDLRKNIVQALILLRNKNVVDNTPLLPLFFTL

SEQ ID NO: 339616 - protein, 79 aa, Zea mays
  Clone ID: MRT4577_728C.1.pep
MLLVELATLTNQGFMFHLYIQIPTALDPFGEGNARDSRAGTRSKDYLHTHIHHRDGRKSLTTGQGLKNEVNYNKILIDL

SEQ ID NO: 339617 - protein, 81 aa, Zea mays
  Clone ID: MRT4577_72900C.1.pep
ILSNITCAWIRICSREMVTIIRLPTVNGNHQRSGGKLHGSLKQVTIFCNQGLHALGALAYACHAGSLYTPFKFVPCMHVPY

SEQ ID NO: 339618 - protein, 179 aa, Zea mays
  Clone ID: MRT4577_72901C.1.pep
ARVGCWIIWCRREWAGGSGMGGSGAGDWRSTGGSRFTHSTQDSYHDAPHSQRETISGRRRSVSFPVQDGIRSSSSSGSSNYPTGQDPVYNPYAWQWQPSQGTYGPPPPSGEAPPSIMYGYGNYGPPPPPYSNLSNMYPPGPQYGYGQVPAAPAYHYQYDGLDQYHDPSNMPEYYHYDSS

SEQ ID NO: 339619 - protein, 76 aa, Zea mays
  Clone ID: MRT4577_72902C.1.pep
CILPWLEMHSSCPVCRHQLPTEEPAEAIGSDKGAGVESSGNARGGDGGNGGGRRHWFSWPFGGLFSQRSSGNSSSS

SEQ ID NO: 339620 - protein, 55 aa, Zea mays
  Clone ID: MRT4577_72903C.1.pep
PVPQQMPLLVGLICPNHMRQARLGLGQQLGRGCGAARRHPGLREEAWECPSVEQH

SEQ ID NO: 339621 - protein, 252 aa, Zea mays
  Clone ID: MRT4577_72904C.1.pep
LRAAHWMVQRENGNTLHQEYANSAPYCVPFDFVHKNSRMFYNPFNGNISSQPEPSPPYISGGILADEMGLGKTVELLACIFAHRRPISLDFSVFQNKTEMDQIKRQKVERVECICGAASESSAYTGLWVQCDICDAWQHADCVGYSPKRNILFADTTEDVVSTNKKSTMKSGFRRKKKPRCSIVETEDKYICALCLELIEATQTNILSHATLIVCPAPILAQWHSEITRHTRPGSLKVCIYEGARNLDPSTI

SEQ ID NO: 339622 - protein, 235 aa, Zea mays
  unsure (1)..(235): unsure at all Xaa locations
  Clone ID: MRT4577_72905C.1.pep
MEIRAPPTSLRLATPPSTASFRPVALRTSFLSGSVSLRAVQVRQSNVNRFKCNAIRSNLFDRLTRVVRSYANAILSSFEDPEKILDQAVLEMNDDLIKMRQATAQVLASQKRLENKYKAAEQADADWYRRAQLALQKGEEDLAREALKRRKSYAENASSLKAQLDQQKSVVEXLVSXTRLLESKIAEAKQKKDTLKACAXISKTATKVSEMLXNGDTSGALSAFEKMEEQVMTME

SEQ ID NO: 339623 - protein, 80 aa, Zea mays
  Clone ID: MRT4577_72906C.1.pep
MGWKGVLGFDYGVVQAPLGPDISGPELAAAVANAGAIGLLRLPDWPAPDHVRELIRRTRSLTEKPFGAAIVLAFPHEENL

SEQ ID NO: 339624 - protein, 93 aa, Zea mays
  Clone ID: MRT4577_72907C.1.pep
FREPVCRGQSFPRKRRGKQRGAPPTDGRPHTNMKHAPPPGVHVRGGEFIDHLEGNIMGTGHKPGGEADRKGNAPGPRGWQPKKKGRGAFWPWG

SEQ ID NO: 339625 - protein, 81 aa, Zea mays
  Clone ID: MRT4577_72908C.1.pep
YALHGRGEVSVLVLQAYMVYHYPHRACDQLLVGVPSNSVHCKYTSITPERTTHQVGDLVHTSPKAHELQLQQWGCLNGNHK

SEQ ID NO: 339626 - protein, 96 aa, Zea mays
  unsure (1)..(96): unsure at all Xaa locations
  Clone ID: MRT4577_72909C.1.pep
LLAKKFTFGPWVNNPFHNTKFSVYKXITQLNNLFISXXHYNYLYLAPKKNVSTLSSNTSICIPYHYFYSLHKVLVYTQLINKXNXHNMKSLNIFNK

SEQ ID NO: 339627 - protein, 92 aa, Zea mays
  Clone ID: MRT4577_7290C.1.pep
RFSPKEKWGEKVFRPSKPPDNAKKKKILFLSQGFFLMFTKRGNSANGPTVLKRGPPEFKKNSRHRRNKKKAHVGFPEPVLGIVKTRGLPFAR

SEQ ID NO: 339628 - protein, 83 aa, Zea mays
  Clone ID: MRT4577_72910C.1.pep
NQVPWGINPPLLLGWTNRCLGQLSGDLQGFKSPTHFSPWWHIYNTSRHMYLLSLKRLHQMGNMLQLFPRGAKKKKKGAARDLE

SEQ ID NO: 339629 - protein, 63 aa, Zea mays
  unsure (1)..(63): unsure at all Xaa locations
  Clone ID: MRT4577_72911C.1.pep
IRVMPSMTSSRWPXPEXYGXXSRRRDXAGGQPSFXRVIGQMALMAFALCRPHSLQXLQACRHI

SEQ ID NO: 339630 - protein, 54 aa, Zea mays
  Clone ID: MRT4577_72912C.1.pep
GGILLIHTNKILGGRIITTFQHYHNSCSHSQKRGILTKKKNFLGPSTLRNHKFL

SEQ ID NO: 339631 - protein, 242 aa, Zea mays
  unsure (1)..(242): unsure at all Xaa locations
  Clone ID: MRT4577_72913C.1.pep
MSAASPLMGGPSSADAPTDGEHRMGTTIVGVCYAGGVVLAADSRTSTGMYVANRASDKISQLTDNVYVCRSGSAADTQIISDYVRYFLHQHTIQLGQPATVKVASNLVRLLAYQNKSMLQAGMIVGGWDKYEGGQIYSVPLGGTILRQPFAIGGSGSSYLYGLMDHEWKEGMTQEEAEKFVVKVVSLAIARDGASXGGVVRTVTINEEGVKRSFHPGDKLPLWHEEMEPQNSLLDILAAGSS

SEQ ID NO: 339632 - protein, 234 aa, Zea mays
  Clone ID: MRT4577_72914C.1.pep
MDSTLFIIGVIGNIISVLVFISPIKTFWRIVWSGSTEEFEPAPYVFTLLNALLWLYYGATKPDGLLVATVNGFGAAMEAIYVVLFIVYAANHATRVKTVKLAAALDICGFGVVFVATTFAINELNLRIMVIGMICACLNVLMYGSPLAAMKTVITTKSVEFMPFFLSFFLFLNGGIWATYAVLDRDIFLGIPNGIGFVLGTIQLIIYAIYMNSKVSQSSKEIASPLLSIQGESS

SEQ ID NO: 339633 - protein, 102 aa, Zea mays
  unsure (1)..(102): unsure at all Xaa locations
  Clone ID: MRT4577_72915C.1.pep
TRLPVKYSQVPTRCSQPKTSSKQCIRKWHHARALQNAGTLVERCVTVVESXRGGSGCCXRRSGRWSRTYPQRASEPQQRRSCRGRKNRCQCRQQRRQWCKAY

SEQ ID NO: 339634 - protein, 139 aa, Zea mays
  Clone ID: MRT4577_72916C.1.pep
MWYRACKTCNKKVTETFGSGYWCEGCQKNDSECSLRYIMVIKVSDPTGEAWFSVFNEHAEKIIGCSADELDRIRKEEGDDSYVLKLKEATWVPHLFRVSVTQHEYNNEKRQRITVRSEAPVEHAAESKYLLEQIAKLTA

SEQ ID NO: 339635 - protein, 78 aa, Zea mays
  Clone ID: MRT4577_72917C.1.pep
HFNLFLSRTNCHFLLVSTEFVPSPRVVDGLAVVDSAVTGHRGDGGPRQAGARYSIVPVSCLRGKFILDAPVEGKPNIF

SEQ ID NO: 339636 - protein, 173 aa, Zea mays
  Clone ID: MRT4577_72918C.1.pep
MARWCQLAAVLLAVSMAASTSVAQDALQTKCQEDLQKLSDCMDYATGHEDTPSAKCCEDTADTQKSRPECLCSIIQQVHSGSHGVQQLGLRFERLLAQPAACKLPNANVSLCINLLHLTPSSPDYALFANASKITPSTTAPARDTADGFKVPTGLGYGVVAAAVVSALISSIF

SEQ ID NO: 339637 - protein, 161 aa, Zea mays
  unsure (1)..(161): unsure at all Xaa locations
  Clone ID: MRT4577_72919C.1.pep
QEKPVFFSLYCPISXLKPDQNMWYRACKTCNKKVTETFGSGYWCEGCQKNDSECSLRYIMVVKVSDPTGEAWVSVFNEHAEKIIGCSADELDRIRKEEGDDSYALKLKEATWVPHLFRVSVTQHEYNNEKRQRITVRSEAPVEHAAESKYLLEQIAKLTAC

SEQ ID NO: 339638 - protein, 74 aa, Zea mays
  Clone ID: MRT4577_7291C.1.pep
MQLRDGINNKSKQLCCCAKKKKKKKKKKKKKKKKKKKKKKKKKKKKKKKKKKKKKKKKKKKKKKKKKKKFFFFF

SEQ ID NO: 339639 - protein, 68 aa, Zea mays
  Clone ID: MRT4577_72920C.1.pep
HPVCNIRQSIYEIHVNIPSKEKKQKRKKKQKKINNTKNTHQKKLKQNPIITHLNTLSTHPTYPSLHHT

SEQ ID NO: 339640 - protein, 70 aa, Zea mays
  Clone ID: MRT4577_72921C.1.pep
AQLADLHARGLRSTSRLADARRDVHRGVHDLLHLAGCRRARLHRPHFFSRQLFWVAYLLAFLVDVAYQLG

SEQ ID NO: 339641 - protein, 90 aa, Zea mays
  Clone ID: MRT4577_72922C.1.pep
ISPNWDEAGTVALLIFLKRMGTIPYFDHASFLGTKAEETNLLPNFVGSNEGTSSTKGGEGGGKLMDSIDNSHRWVPITKIEGLMNNPPHH

SEQ ID NO: 339642 - protein, 672 aa, Zea mays
  unsure (1)..(672): unsure at all Xaa locations
  Clone ID: MRT4577_72923C.1.pep
MAGNGAIVESDPLNWGAAAAELAAVASAKDASGVAVELDEEARPRVKASSEWILDCIAHGGDIYGVTTGFGGTSHRRTKDGPALQVELLRHLNAGIFGTGSDGHTLPSEVTRAAMLVRINTLLQGYSGIRFEILEAITKLLNTGVSPCLPLRGTITASGDLVPLSYIAGLITGRPNAQAVTVDGRKVDAAEAFKIAGIEGGFFKLNPKEGLAIVNGTSVGSALAATVMYDANVLAVLSEVLSAVFCEVMNGKPEYTDHLTHKLKHHPGSIEAAAIMEHILEGSSFMKQAKKVNELDPLLKPKQDRYALRTSPQWLGPQIEVIRAATKSIEREVNSVNDNPVIDVHRGKALHGGNFQGTPIGVSMDNARLAIANIGKLMFAQFSELVNEFYNNGLTSNLAGSRNPSLDYGFKGTEIAMASYCSELQYLGNPITNHVQSAEQHNQDVNSLGLVSARKTAEAIDILKLMSSTYIVALCQAVDLRHLEENIKASVKNTVTQVAKKVLTMNPSGELSSARFSEKELISAIDREAVFTYAEDAASGSLPLMQKLRAVLVDHALSSGXRGAGALRVLQDHQVRGGAPRGAAPGGGGRPRGXVAEGTAPVANRIADSRSFPLYRFVREELGCVFLTGERLKSPGEECNKVFVGISQGKLVDPMLECLKEWDGKPLPINVK

SEQ ID NO: 339643 - protein, 84 aa, Zea mays
  Clone ID: MRT4577_72924C.1.pep
MRAPPRRPSPAPAPAPCAASSPPSPYAAFASPGPGPVFAGGGGAGPSLSPPLIAMLAVVGAALLVVLYARLVSRVFRAARAAVE

SEQ ID NO: 339644 - protein, 209 aa, Zea mays
  Clone ID: MRT4577_72925C.1.pep
MGTLVVRPSNTRPLLRLFFSTGTSPPPPATARPQPTTPQRSNGAQAVTVDGRKVDAAEAFKIAGIEGGFFKLNPKEGLAIVNGTSVGSALAATVMYDANVLAVLSEVLSAVFCEVMNGKPEYTDHLTHKLKHHPGSIEAAAIMEHILDGSSFMKQAKKLNELDPLLKPKQDRYALRTSPQWLGPQIEVIRAATKSIEREVNSVNDNPVI

SEQ ID NO: 339645 - protein, 253 aa, Zea mays
  unsure (1)..(253): unsure at all Xaa locations
  Clone ID: MRT4577_72926C.1.pep
HWVPRGPAGLSTSGFQAQPQGGPRHRQRHVRGLRARGHRDVRRQRPGRPVGGPVRRLLRGHERQSSTYIVALCQAVDLRHLEENIKASVKNTVTQVAKKVLTMNPSGELSSARFSEKELISAIDREAVFTYAEDAASGSLPLMQKLRAVLVDHALSSGDAEREPSVFSKITRFEEELRAVLPQEVEAAXVAVAEGTAPVATRIADSRSFPLYRFVREELXGCVFLTGERLSPPXRECKQVFVGISQGQLVDPC

SEQ ID NO: 339646 - protein, 102 aa, Zea mays
  unsure (1)..(102): unsure at all Xaa locations
  Clone ID: MRT4577_72927C.1.pep
MAGWTNIRTNNCALNEIIVDKDTVTGFLMGDVVNVDLRKKTSYLLVDNMTTVKQTKDTIKEYTGRXDFASELMSQNIADMIRFLEERYNKPRPAIMDTPIKD

SEQ ID NO: 339647 - protein, 235 aa, Zea mays
  unsure (1)..(235): unsure at all Xaa locations
  Clone ID: MRT4577_72928C.1.pep
MAGNGAIVESDPLNWGAAAAELAGSHLDEVKRMVAQARQPVVKIEGSTLRVGQVAAVASARDASGVAVELDEEARPRVKASSEWILDCIAHGGDIYGVTTGFGGTSHRRTKDGPALQVELLRHLNAGIFGTGSDGHTLPSEVTRAAMLVRINTLLQGYSGIRFEILEAITKLLNTGVSPCLPLRGTITASGDLVLLSYIAGLITGRPNAQAVTVDGRKVDAAEAFXVAGIEGGFF

SEQ ID NO: 339648 - protein, 114 aa, Zea mays
  Clone ID: MRT4577_72929C.1.pep
AVLTPLRQLIALAQPVSASARGKWPNKRKASPRALALSLRVVGFQVSPGETGFLAPPRSFRLAHFLCVPGLTRYAWVFYFVWSCGRICDFAQGSPFPTVTPCAPFPPTKGIKTW

SEQ ID NO: 339649 - protein, 46 aa, Zea mays
  Clone ID: MRT4577_7292C.1.pep
KLNLYYKDSTLWAIINSLIKQCPNKFKFHSRARINIPSLPKSFHNF

SEQ ID NO: 339650 - protein, 164 aa, Zea mays
  Clone ID: MRT4577_72930C.1.pep
MAGNGAIVESDPLNWGAAAAELAGSHLDEVKRMVAQARQPVVKIEGSTLRVGQVAAVASARDASGVAVELDEEARPRVKASSEWILDCIAHGGDIYGVTTGFGGTSHRRTKDGPALQVELLRHLNAGIFGTGSDGHTLPSEVTRAAMLVRINTLLQGYSGIRFE

SEQ ID NO: 339651 - protein, 703 aa, Zea mays
  unsure (1)..(703): unsure at all Xaa locations
  Clone ID: MRT4577_72931C.1.pep
MAGNGAIVESDPLNWGAAAAELAGSHLDEVKRMVAQARQPVVKIEGSTLRVGQVAAVASARDASGVAVELDEEARPRVKASSEWILDCIAHGGDIYGVTTGFGGTSHRRTKDGPALQVELLRHLNAGIFGTGSDGHTLPSEVTRAAMLVRINTLLQGYSGIRFEILEAITKLLNTGVSPCLPLRGTITASGDLVPLSYIAGLITGRPNAQAVTVDGRKVDAAEAFKIAGIEGGFFKLNPKEGLAIVNGTSVGSALAATVMYDANVLAVLSEVLSAVFCEVMNGKPEYTDHLTHKLKHHPGSIEAAAIMEHILEGSSFMKHAKKVNELDPLLKPKQDRYALRTSPQWLGPQIEVIRAATKSIEREVNSVNDNPVIDVHRGKALHGGNFQGTPIGVSMDNARLAIANIGKLMFAQFSELVNEFYNNGLTSNLAGSRNPSLDYGFKGTEIAMASYCSELQYLGNPITNHVQSAEQHNQDVNSLGLVSARKTAEAVDILKLMSSTYIVALCQAVDLRHLEENIKTSVKNTVTQVAKKVLTMNPSGDLSSARFSEKELISAIDREAVFTYAEDAASASLPLMQKLRAVLVDHALSSGXRGARALRLLQDHQVRGGAPRGAAPGGGGRPRXVAEGTAPVANRIADSRSFPLYRFVREELGCVFLTGEKLKSPGEECNKVFLGISQGKLVDPMLECLKEWDGKPLPININ

SEQ ID NO: 339652 - protein, 59 aa, Zea mays
  Clone ID: MRT4577_72932C.1.pep
VNEMLAVSLVQGRNSRAQNKNLVLSMNPEPIFFLKWHCRFASLLLESELAPNKVGFFTQ

SEQ ID NO: 339653 - protein, 706 aa, Zea mays
  unsure (1)..(706): unsure at all Xaa locations
  Clone ID: MRT4577_72933C.1.pep
MAGNGAIVESDPLNWGAAAAELAGSHLDEVKRMVAQARQPVVKIEGSTLRVGQVAAVASAKDASGXVAVELDEEARPRVKASSEWILDCIAHGGDIYGVTTGFGGTSHRRTKDGPALQVELLRHLNAGIFGTGSDGHTLPSEVTRAXAMLVRINTLLQGYSGIRFEILEAITKLLNTGVSPCLPLRGTITASGDLVPLSYIAGLITGRPNAQAVTVDGRKVDAAEAFKIAGIEGGFFKLNPKEGLAIVNGTSVGSALAATVMYDANVLAVLSEVLSAVFCEVMNGKPEYTDHLTHKLKHHPGSIEAAAIMEHILDGSSFMKQAKKLNELDPLLKPKQDRYALRTSPQWLGPQIEVIRAATKSIEREVNSVNDNPVIDVHRGKALHGGNFQGTPIGVSMDNARLAIANIGKLMFAQFSELVNEFYNNGLTSNLAGSRNPSLDYGFKGTEIAMASYCSELQYLGNPITNHVQSAEQHNQDVNSLGLVSARKTAEAIDILKLMSSTYIVALCQAVDLRHLEENIKASVKNTVTQVAKKVLTMNPSGELSSARFSEKELISAIDREAVFTYAEDAASGSLPLMQKLRAVLVDHALSSGERGAGALRVLQDHQVRGGAPRGAAPGGGGRPRGXVAEGTAPVANRIADSRSFPLYRFVREELGCVFLTGERLKSPGEECNKVFVGISQGKLVDPMLECLKEWDGKPLPINIK

SEQ ID NO: 339654 - protein, 77 aa, Zea mays
  Clone ID: MRT4577_72934C.1.pep
SSERKRKCSSQYCNELTAGISTLSSTACTVKMQYHSREVWHTTTHDSLDPVAAKLRSYGRNHPEISVIYSRSRCPEC

SEQ ID NO: 339655 - protein, 254 aa, Zea mays
  unsure (1)..(254): unsure at all Xaa locations
  Clone ID: MRT4577_72935C.1.pep
MAGNGAIVESDPLNWGAAAAELAGSHLDEVKRMVAQARQPVVKIEGSTLRVGQVAAVASAKDASGVAVELDEEARPRVKASSEWILDCIAHGGDIYGVTTGFGGTSHRRTKDGPALQVELLRHLNAGIFGTGSDGHTLPSEVTRAXAMLVRINTLLQGYSGIXRFEILEAITKLLNTGVSPCLPLRGTITASGXDLVPLSYIAGXLITGRPNAQAVTVDGXRKVDAAEAFKIAGIEGGFFSSTPKEGLAIVNGT

SEQ ID NO: 339656 - protein, 64 aa, Zea mays
  Clone ID: MRT4577_72936C.1.pep
CSCPASTKTMVVGGPPLCFSLTRFFFFPDFNFYWVWFFVIAYAGARPPPVFGPGLLLLYQNAPV

SEQ ID NO: 339657 - protein, 87 aa, Zea mays
  Clone ID: MRT4577_72937C.1.pep
AGGMGGRWGSTGILKAIPTVSSIGSQHQVRRGVIRRWFKMLTGLPNQWIKKSVSRSIPNATTYVEQGKEYSSGSQTHSSGISLKKQM

SEQ ID NO: 339658 - protein, 174 aa, Zea mays
  Clone ID: MRT4577_72938C.1.pep
MYADQISTGRKRSIHDRLDADLAPDRGGADAAGRARNALSKRQRQTDDKWKHDLYRDDESASRSVDPRDLRFKLQRKSSQQGFAGQKGSEVRDLREMLSGTMHAQPSNVDPQKRKPVSEVVKVTRRENVDGRPVRLSKKVSKPSTSKKTSQPKAESPLDSFLKSLGLEKYSITF

SEQ ID NO: 339659 - protein, 77 aa, Zea mays
  Clone ID: MRT4577_72939C.1.pep
MDGRDQVCGHAFTGENYRAGGANGNASQRGTLRETAGAAVYAICIGKPLVPPFIRCWSQSSFYQSIYIYRCTSSCIF

SEQ ID NO: 339660 - protein, 123 aa, Zea mays
  Clone ID: MRT4577_7293C.1.pep
LPEGLLVRSKEVGLLVRSWAPQTQVLAHSATGGFLTHCGWNSTLESLVHGVPMVAWPLFAEQRLNAVMLSEGAGASIRLSENKDKETIAPVVRELVMTTPPTLATALGWIEQALKKTQALGCC

SEQ ID NO: 339661 - protein, 65 aa, Zea mays
  Clone ID: MRT4577_72940C.1.pep
MSLIFLFISRRPIGAWSYILKTMSGCFYFVIVGHHDNPVFEMEFLPPGKSESKDDHRHLRPFIAH

SEQ ID NO: 339662 - protein, 56 aa, Zea mays
  Clone ID: MRT4577_72941C.1.pep
WGGLIPLNQINMIISPEPGSILFGEIKISNPFYLHKLVSLISRICLEDCLSCLPGP

SEQ ID NO: 339663 - protein, 89 aa, Zea mays
  Clone ID: MRT4577_72942C.1.pep
KTHWGLWNPPRKKVYLPFFLATVMDPKGSPFGFFSQAQLLMKFALKKKKFFLSPHPKKPPPNPSFKLWGGLNPFSFGRSIFVPPGEKVY

SEQ ID NO: 339664 - protein, 86 aa, Zea mays
  Clone ID: MRT4577_72943C.1.pep
EDLGSVRAPSRIGAERRCSWLGPTLLRTPANLLVLQSIRAPYYHPTKSMLCQSAVSPLIRLSPGSELIICYTDAPEPYMKTVSLVS

SEQ ID NO: 339665 - protein, 220 aa, Zea mays
  Clone ID: MRT4577_72944C.1.pep
SPAPTSTPSPSARSPRSPSEACSSSPRSDLSPWTMTHGHACRRLRARAGDPSKSLTMLLFLKGVCKFYNGKSGSLAKLQGAVVPSPLKKLPKQERPSPRKRKGLLPFSLKWGKPQNKEVFPEDDAIGSPTNCVRMAISPAATSSSGSNSGSDDEHNRCQKPSSRRPHRRPSSVMGVFASPPAPRPPQQFSAVMRSQSMLDLQDATDSTDLVTPRDKRIKN

SEQ ID NO: 339666 - protein, 79 aa, Zea mays
  Clone ID: MRT4577_72945C.1.pep
AWGEPPFFLASFVHCAIREAIRAPRKEFWVCTGPANSPITFQMEVPATMPVVKKLSGLNVVKRYLKRVWAASPTNPVKA

SEQ ID NO: 339667 - protein, 129 aa, Zea mays
  Clone ID: MRT4577_72946C.1.pep
LCVQCNNRRTAWDATTIQATWVEFAGIALAFPTMLFPCDHRMNQSNSTAKRCVARRGSKIDPTDILCGVMVRRLSIFSSNIKGVLKFLDASVFPIVLSYTVCIVHTRITVSQYVDCFTVVLFPQDLRVC

SEQ ID NO: 339668 - protein, 60 aa, Zea mays
  Clone ID: MRT4577_72947C.1.pep
IKAPKSMTSFIKAQDTYMLSCSSRKVDSYISLQQEGVLALVITLPMFWVIVMGTGPREVS

SEQ ID NO: 339669 - protein, 92 aa, Zea mays
  Clone ID: MRT4577_72948C.1.pep
FFIGEGASGGGLGDSFKLPKGFFKKPFFFFPFFIQEGPVWLAPCPVYCPPRRALFGVSPLGCKPSALLFLFFCFAIKPPPAAGKKKAWGLSP

SEQ ID NO: 339670 - protein, 78 aa, Zea mays
  Clone ID: MRT4577_7294C.1.pep
LKLDHVWVHFPNMLHVGFFWLNFLRALQGVNLQVAVNSFTGLVQTLKHLHSPPLVGLHKCTEFGTCVDSNSAKLFFNS

SEQ ID NO: 339671 - protein, 113 aa, Zea mays
  unsure (1)..(113): unsure at all Xaa locations
  Clone ID: MRT4577_72950C.1.pep
RAGGVYAFLGKNKALPPPGVXGGKKAPGKILALQKRGVAVFNXAPRKGPCEPLAIKENADPCPCPENIXMVFQKVPPLGGYARAILAKGRWGFPPSVKGGPGESKVDENFPAR

SEQ ID NO: 339672 - protein, 98 aa, Zea mays
  Clone ID: MRT4577_72951C.1.pep
GKTIKTMPFYWFITIPFFFIRSDSSGRPHEGPPRDKTHGWGGAWGYPNPTHLRDRLKLTDRGGFICPTATKSPIKRRNPGVGPAQKKPFLYAGAGMLF

SEQ ID NO: 339673 - protein, 78 aa, Zea mays
  Clone ID: MRT4577_72952C.1.pep
TNVRPAAPFTRSSSGPSPATSIYQKRGSHSIGASFLFHRRFRCLMSQDDMNHMGLDSCMNSGFIVDLGSVRCKTWSSH

SEQ ID NO: 339674 - protein, 159 aa, Zea mays
  Clone ID: MRT4577_72953C.1.pep
NTVLHLKAPCRRLKEAFFTLKFNPKIRLRLTTNSSGKKKNTKLGNGSCGTAFQKKSPKPKALFGQMEPTEPPSGLQNGGCSKTFFTGGSKLEENRVYLKSNQQKNSFGRDGEPTSKYPQSWPPFSWARGKHEIWGENLGTSPLRMASTPPALYDINPIL

SEQ ID NO: 339675 - protein, 157 aa, Zea mays
  unsure (1)..(157): unsure at all Xaa locations
  Clone ID: MRT4577_72954C.1.pep
MASQKRPSQXHGSKYLASASAMDHARHGFLPRHRDTGILDSLGRFFGGDRGVPKRGSGKDGHHAARTAHYGSLPQKSQHGRPQDENPVVHFFKNIVTPRTPPPSQGKGAEGQKPGFGYGGRAPAHKGLKGTDAQGTLSKIFKLGGRDSRSGSPMARR

SEQ ID NO: 339676 - protein, 67 aa, Zea mays
  Clone ID: MRT4577_72955C.1.pep
PPHGFFWRQHTDKKGRRLLCQLFFCRHRPRPKNRGAGALGLNLPVTGHHRCHVGPAYQKPGEQTYVA

SEQ ID NO: 339677 - protein, 180 aa, Zea mays
  unsure (1)..(180): unsure at all Xaa locations
  Clone ID: MRT4577_72956C.1.pep
XDSAATPERLSAMASHKDPPRRQCSHLLASASASVNARHGFLPRNQVPGILKSLGRFFGGDRGVPKRGSGXDXHHAAICAHYGSLPAGSQHGRPQDENPVVHFFKNIVTPRTPPPSQGKGRGLSLSRFSWGAEGQKPGFGYGGRAPAHKGLKGTDAQGTLSKIFKLGGRDSRSGSPMARR

SEQ ID NO: 339678 - protein, 109 aa, Zea mays
  Clone ID: MRT4577_72957C.1.pep
KRSLARVERLGELPPADALERGAHEELSARMSMNIQMTPYERRPKAAIAHKRSIPYSTGEVPEAVHKRGGRHFDTPTPDTIWDRRCYCRIRRTNQGNPSNRTFIHEEET

SEQ ID NO: 339679 - protein, 46 aa, Zea mays
  Clone ID: MRT4577_72958C.1.pep
GQSTHTDSGRSVARQQIPFFGVTNLPELPPADYCKTPAGWHTKKKN

SEQ ID NO: 339680 - protein, 94 aa, Zea mays
  Clone ID: MRT4577_72959C.1.pep
KNPWKIAIIYYSTHCICVKAISSTPAVAVNLLTCTHKDRQDPGNEMEAGRAVFQKFSVRARQQRSYNELIPSELLPSSRELLGAMLGMHGSEPC

SEQ ID NO: 339681 - protein, 143 aa, Zea mays
  Clone ID: MRT4577_7295C.1.pep
GGGFFFFFFFFFFFFFFFFFFFFFFFFSHPGWDISQKRGGKVSHEHKPAPGGNSKNPPFIFWESQTTHWVTNFGEFIQDRPIQWPKNFPPLIWPPENGALLCNRERGNRFNGGSRTRPPLGTGKVNQFVGGGRLKYFAPPYDF

SEQ ID NO: 339682 - protein, 122 aa, Zea mays
  Clone ID: MRT4577_72960C.1.pep
MINIKRTKYYFPGAIKLTGRRHLDQVKLLVVRLLFDHLLFTGVWQRRLGPQDGGTAVEEESRRAIRRQHELHTHDDCHERVPDMSANHQRGFLLLMRHCRCGSTAAAVGRLGGGVRLRLRWI

SEQ ID NO: 339683 - protein, 47 aa, Zea mays
  unsure (1)..(47): unsure at all Xaa locations
  Clone ID: MRT4577_72961C.1.pep
SSNQXSAPKGEGTXTEQTNXXDXQNGNKGDXGTNHXXGGPGKNXNXP

SEQ ID NO: 339684 - protein, 168 aa, Zea mays
  Clone ID: MRT4577_72962C.1.pep
GTPTLSLRYSSPRHAECPEEIIAAIEAGRAPSPNPRTAAPRRLRRCSGSQERPEREASPALHLTCLLPNDSAAPSVPRRGSGICRPRCSAAFSLAPAGGSSLGRLAGASGHDASWPRALPTTAPLLQLPIDASGFVRPAVPRPSAHPCYPDCPCPVLALYGVSIGRQI

SEQ ID NO: 339685 - protein, 98 aa, Zea mays
  unsure (1)..(98): unsure at all Xaa locations
  Clone ID: MRT4577_72963C.1.pep
GFREPGPNTLTPLQNAQNSGGKQRGRGALHNETRGAFVQEPTDKKTFPGGDQAKKNGGKPILRAPKGVQEEVPHHPAPREALGGRTPXRGAPPQAFPF

SEQ ID NO: 339686 - protein, 84 aa, Zea mays
  unsure (1)..(84): unsure at all Xaa locations
  Clone ID: MRT4577_72964C.1.pep
XFSXIXXXXVQILKAYVWGAQTCMGHARDRSRIYTTWTXGLWGFXKTLTTFFVGXYCRGGGCFSRVVSVGNRXHLGDDWVHPGA

SEQ ID NO: 339687 - protein, 167 aa, Zea mays
  Clone ID: MRT4577_72965C.1.pep
CPCIPIPLQDRARLPRPRERSAATTSHSPPSPNPRTAAPRRLRRCSGSQERPEREASPALHLTCLLPNDSAAPSVPRRGSGICRPRCSAAFSLAPAGGSSLGRLAGASGHDASWPRALPTTAPLLQLPIDASGFVRPAVPRPSAHPCYPDCPCPVLALYGVSIGRQI

SEQ ID NO: 339688 - protein, 203 aa, Zea mays
  unsure (1)..(203): unsure at all Xaa locations
  Clone ID: MRT4577_72966C.1.pep
LXEADRLLELGFSAEIQELIRMCPKRRQTMLFSATMTEEIDELIKLSLNKPVRLEADPSLKRPATLTEEVVRIRRARESNQEAVLLALCLKTFKRSVIIFSGTKQSAHRLKIIFGLSGMKAAELHGNLTQAQRLEALELFRKQEVDFLIATDVAARXYLHRVGRTARAGREGYAVTFVTDDDRSLLKAIAKKAGSQLKSRIVA

SEQ ID NO: 339689 - protein, 117 aa, Zea mays
  Clone ID: MRT4577_72967C.1.pep
SRRSWALDVIKTTCLGREQARHTQGRRDGSDTRWDPAELDTAIEMEGKGRARPGGELSIEVLAPRDSQLCSAAVGELEARLAAGSEHRRGEEDGKRGERRWRISPLSSSLVAPGVRW

SEQ ID NO: 339690 - protein, 219 aa, Zea mays
  unsure (1)..(219): unsure at all Xaa locations
  Clone ID: MRT4577_72968C.1.pep
CPIRRREKIRRINWSTRVILIDRSSSSWASSSSPSSPPPFSSXPSSSPSLSPIASSSPLPSISSSSVPPSTPPSSSLSSSSSSSSPLSPSISSSSLSSSPLPLTSLPESSGTTGFPRSWRRSEIFSSMEVVRRRACSAATDSAYDENSHGDCTGPPRGGAPAASSSELSGSNRKLGSMAKWEGRRMDANWFFRRREGRGWRDEGFGTGFPVVEESSRDR

SEQ ID NO: 339691 - protein, 92 aa, Zea mays
  Clone ID: MRT4577_72969C.1.pep
EPKNHSFIPGEKGEETPNLGGSGAPPKKLLKNQNGTAFDQALFLGKDPPLLWARGVKKGGTPAPQGVGVLPKTPSRTPRSPHPGPLLFGNPP

SEQ ID NO: 339692 - protein, 187 aa, Zea mays
  unsure (1)..(187): unsure at all Xaa locations
  Clone ID: MRT4577_7296C.1.pep
MMGGRALLLLLVSALLVQIRASDPLLYEPFDEDFEGRWIVSKKDEYQGVWKHAKSDGHEDYGLLVSDKARKYAIIKELDEPVTLNDGTVVLQFEVRLQNGLECGGAYIKYIRPQDAGWDAKEFDNETPYTIMFGPDKCXDKLSHVYTTILKPDNEVRILIDXEEKKKANFLSADDXEPALIPSKTIP

SEQ ID NO: 339693 - protein, 692 aa, Zea mays
  Clone ID: MRT4577_72970C.1.pep
EEIEGSGDEEAIGDREGDEDGGDEKGGEFGTRENDRDEEEDTVDQNDTSGPVDPSNFFSSSDRASFHANSFLELNLSRPLVRACEALGYQKPTPIQAACIPLALTGRDICGSAITGSGKTAAFSLPVLERLLFRPKRVPAIRVLILTPTRELAAQIHSMVEKLAQFTDIRCCLIVGGLSTKIQEVALRSMPDIVVATPGRIIDHLRNSLSVGLEDLAVVILDEADRLLELGFSAEIQELIRMCPKRRQTMLFSATMTEEIDELVKLSLNKPVRLEADPSLKRPATLTEEVVRIRRARESNQEAVLLALCLKTFKRSVIIFSGTKQSAHRLKIIFGLSGMKAAELHGNLTQAQRLEALELFKKKEVDFLIATDVAARGIDIVGVQTVINFACPRDVKTYLHRVGRTARAGREGYAVTFVTDDDRCLLKAIAKKAGSQLKSRIVAEKPVAECARLIEQLEGQISIIIREERVEREARKAEMEIAKAENMIAHKDEIYSRPKRTWFATEREKKLLAAAAKESLDHGKSTSGVISAKKAEDLRLKEKRRREHEKNLPRKKRRRLEAQREMLEDEDDEEAKENDRGKQLMKGQSLVDAAYRKAKSLKAASKRGPGARKGKKEKNERQYSEKAPNRHEEMRELFQNDMSEWKQGRSSKKNNKFAHKKSKAFNSKARYKRANRRLGHPRIYLHSRLNFD

SEQ ID NO: 339694 - protein, 70 aa, Zea mays
  Clone ID: MRT4577_72971C.1.pep
IVIGTFVAMTLLVVCKTFKNTFLIDQLKIQQREHGESYFLVKKKKIKKKKKKKNKKKKKKKKKKNKKKKE

SEQ ID NO: 339695 - protein, 124 aa, Zea mays
  unsure (1)..(124): unsure at all Xaa locations
  Clone ID: MRT4577_72972C.1.pep
MKLVAAYLLAVLAGNANPSAEDLTAILETSGCECDNERMQLLLSQLTAKDITEILAAHREKSASFTCGGFVATVAICSPAAGSTAPTAEAKNEXKAKEKEYSDDDMYFSLFDYDDHSLQYCFKH

SEQ ID NO: 339696 - protein, 98 aa, Zea mays
  Clone ID: MRT4577_72973C.1.pep
QTRKASGLVSWNSCRPSSAYYTISTYPSRRVGSAPPRTTGQRAAGAGARPRSRRLDAPDSDAARRAALALLAGVAPDGDKVSPADAAYSEADKVYSIT

SEQ ID NO: 339697 - protein, 360 aa, Zea mays
  Clone ID: MRT4577_72975C.1.pep
MGALLRSVPKEMWRLLGEKSTVKEAWEAVKSMRVGADRVKDANAQRLLMDFENIIFNDGETVDDFAMRISGMASDLRSMGEIVEDAKVVKKMLRVLPKRYAQIAISIETLLDLKSLTLEELVGRLRMAEDRMEMESVTEKTGKLMLTEEEWVSKNRHRLLPEPSSTGGGEKRNGFNPAKHKGVARDGGGRGDRKEPVIKFTSEGTPRRKGRCRNCGIYGHWKVDCKRPKKGERGEEAHHVQAEKEPALLLATVNAVRVQGATRRVQSHVVNLNEKKVVPADRDEDSDVWVLDTGASNHMTGRRDVLTSLDTSIGGTVRFGDGSLVPIEGMGSVMLQTKKDGHKNAHCSHTHLVLGIVYIY

SEQ ID NO: 339698 - protein, 55 aa, Zea mays
  Clone ID: MRT4577_72976C.1.pep
HQIIAKIKSEPPAWILPGAKPLVTPYQLFSGVCFLFLLTSLQVGSLPSTSVPVLT

SEQ ID NO: 339699 - protein, 192 aa, Zea mays
  Clone ID: MRT4577_72977C.1.pep
TVFQRLANDKFCERNRCIVITGRGYPDIPTRRFLRYLVELLHLPAYCLVDSDPYGFDILATYKFGSLQLAHDANLLRVPDIRWLGVFTSDFEEYCLPDCCLLRLSPEDRRKAEGILARCYLHREAPEWRSELEAMLQKGVKFEIEALSANSISFLSHEYIPQKIKQACIYKIGHSCIRPGCVIEYNLFLSDY

SEQ ID NO: 339700 - protein, 93 aa, Zea mays
  unsure (1)..(93): unsure at all Xaa locations
  Clone ID: MRT4577_72978C.1.pep
SILDKTPHERIDXVEAPSACLIGDGQVRSRTFIMPGSVLRGDANIIQLDSSTNVHDSGIIHVDQYNLRTKAFSTTLDYNTTNGHSAREQACTG

SEQ ID NO: 339701 - protein, 81 aa, Zea mays
  Clone ID: MRT4577_72979C.1.pep
PTLGQEVKIMEMVLRMLRTMAHRAPMLTATRRLRTMISPHDGCAKSLLGNNTYAERSLLSNMQTANAKFYATHATERLQCS

SEQ ID NO: 339702 - protein, 56 aa, Zea mays
  Clone ID: MRT4577_7297C.1.pep
EKVTCNITFLMAHVVPQYNQRKRLNISKMAHGPDKLSQNSISHLLQFQPTRLRTRG

SEQ ID NO: 339703 - protein, 65 aa, Zea mays
  unsure (1)..(65): unsure at all Xaa locations
  Clone ID: MRT4577_72980C.1.pep
FRAAARAGTYNSGSNYLIHLRRLTHWSPPSCNSNISAIQPISLMNPALXRQQPILEVPFLDYNES

SEQ ID NO: 339704 - protein, 198 aa, Zea mays
  Clone ID: MRT4577_72981C.1.pep
AARLHFLMPHPDARAMMAVRDERAATARPRRRERRCPLRTTAVVPRRGGGDDDPGGASGQRLVRRCRPKVCAMVEVPRVRTAATTPSRGRARRDCLQRRRPHEARVAPAVSVVAQGACCKGLWSARRFRRPSITNSSDLVVSVASSDDDLPQSFVSYMRLLGDHILGFFSLIMMYDVSIYATFYNDLYRKKKKKKFAA

SEQ ID NO: 339705 - protein, 85 aa, Zea mays
  Clone ID: MRT4577_72982C.1.pep
RRTQTGSYWISSCSLRVRFALKLTALEKLLTCHARRDATRDAMYLADPFQAPQLDTAIKTINVDMKEFATLSRLHETYNEMAASR

SEQ ID NO: 339706 - protein, 90 aa, Zea mays
  unsure (1)..(90): unsure at all Xaa locations
  Clone ID: MRT4577_72983C.1.pep
LTDRLQPQNCQNTPLTQLNXLASHTSFFSWLNNXKERTYRPSQQINSQNDXRYAPSINALITAGARSTNTKTDTFISHLPYARFPYFLSF

SEQ ID NO: 339707 - protein, 70 aa, Zea mays
  Clone ID: MRT4577_72984C.1.pep
GSRCSCGISCNCMSPDVVTAAASTIDTMVLAAPTTNAITCRFEAATHGGGCYCNTCNCSTSCGCSCWSCN

SEQ ID NO: 339708 - protein, 65 aa, Zea mays
  Clone ID: MRT4577_72985C.1.pep
LFLLGRKPRMPFRSVSLYPRPDAHLLPPCQRISEIGNTNTVKASRHLFLNRKKVSYKSEQPARQV

SEQ ID NO: 339709 - protein, 70 aa, Zea mays
  Clone ID: MRT4577_72986C.1.pep
VLLYYYTPFISTKPQVLTDLSNCILHLFYLFNLQLPLMLCVQIIFMIEPEHGLRSQLLRYSIFISNFSQP

SEQ ID NO: 339710 - protein, 45 aa, Zea mays
  Clone ID: MRT4577_72987C.1.pep
IVCLSQVGQIRTLQARGRAASQAVIGVDVQRCVFYTSANGLSQLD

SEQ ID NO: 339711 - protein, 295 aa, Zea mays
  Clone ID: MRT4577_72988C.1.pep
MEVGFLGLGIMGKAMATNLLRHGFRVTVWNRTLAKCQELAALGATVGETPASVVSKCRYTIAMLSDPSAALSVVFDKDGVLEQIGSGKGYVDMSTVDAATSTKISEAVKQKGGAFLEAPVSGSKKPAEDGQLVILAAGDKPLYDGMIPAFDVLGKKSFFLGEIGNGAKMKLVVNMVMGSMMNSLSEGLCLADKSGLSPQTLLDVLDLGAIANPMFKLKGPTMLQGSYSPAFPLKHQQKDMRLALALGDENAVAMPVSAAANEAFKKARSLGLGDQDFSAVYEVVKGAGGSGSGQP

SEQ ID NO: 339712 - protein, 126 aa, Zea mays
  Clone ID: MRT4577_72989C.1.pep
SWYVRHTEEDRHGTVSEKIPGAVHRPLVDYSSWLLGQEDEVTDYSASRTDFLPIDCSNYTAADAGVTASGIATDADASSAVDIPDSDFVLTAEVDYLRNGDDCCSRAEVHQSYVFDLSSLCACSQL

SEQ ID NO: 339713 - protein, 66 aa, Zea mays
  unsure (1)..(66): unsure at all Xaa locations
  Clone ID: MRT4577_7298C.1.pep
NHILIISTNINTITTKLLLPLILKTNSYKSHQTSSKTFPPPXNLKXFHILQKTKITYYIPILTNIH

SEQ ID NO: 339714 - protein, 174 aa, Zea mays
  Clone ID: MRT4577_72990C.1.pep
MAAAVPLVLLLLPTTLMAASAASGGEKSTHIKLYWHDVVSGPSPTAVPVAQAAVTNTSKTAFGMVVVIDDPLTEGPDLKSSKPLGRAQGTYVGAGKDELSLMMNMNFVFQAGEYNGSTVAIMGRNAVFDAVREMAVVGGTGAFRMARGYAQARTHTFDLNTGDATVEYNLYIKH

SEQ ID NO: 339715 - protein, 174 aa, Zea mays
  Clone ID: MRT4577_72991C.1.pep
MAAAVPLLLLLLPTTLMAASAASGGEKSTHIKLYWHDVVSGPSPTAVPVAQAAVTNTSKTAFGMVVVIDDPLTEGPDLKSSKPVGRAQGTYVGAGKDELSLMMNMNFVFQAGEYNGSTVAIMGRNAVFDAVREMAVVGGTGAFRMARGYAQARTHTFDLNTGDATVEYNLYIKH

SEQ ID NO: 339716 - protein, 62 aa, Zea mays
  Clone ID: MRT4577_72992C.1.pep
WGGGFPFLREGGTVRPRGMVVEICRCWFFEFGYLARVGGGWVSLVSVGGWLVFGWGDGWCAI

SEQ ID NO: 339717 - protein, 176 aa, Zea mays
  Clone ID: MRT4577_72993C.1.pep
MAAAVPLLQLLILPLLVASAAGGGGGGEKSTHMKLYWHDVVSGPSPTAVQVARAAVTNTSKTAFGAVVVIDDPLTEGPDLKSSKPLGRAQGTYIGAGKDELSLMMSMNFVFQAGKYNGSTVAIMGRNAVFDAVREMAVVGGTGAFRMARGYAQARTHALDLNTGDATVEYNLYIKH

SEQ ID NO: 339718 - protein, 98 aa, Zea mays
  Clone ID: MRT4577_72994C.1.pep
GIPGRMEPFPFNGEKKQVFAGIPIFFSVFGVPWGFLTRGGKHQFPPDFMGKGYKARSKRLFFGQSFALKKKKLDCPFWAPTLKTCHRSNPGLICPPRV

SEQ ID NO: 339719 - protein, 56 aa, Zea mays
  Clone ID: MRT4577_72995C.1.pep
LGFCLKEKWVFPDGRFSPFFVSLYKIAPNVSPLSSFPEGNLAVISFGQLFHAFNHL

SEQ ID NO: 339720 - protein, 54 aa, Zea mays
  unsure (1)..(54): unsure at all Xaa locations
  Clone ID: MRT4577_72996C.1.pep
FPGSTPRRLVPLRLESHXXLRARATAFHSNXSALXXTCRWXRIXGPTHXXGDPG

SEQ ID NO: 339721 - protein, 52 aa, Zea mays
  unsure (1)..(52): unsure at all Xaa locations
  Clone ID: MRT4577_72997C.1.pep
PPSLILGGAXLGRTVMVLTMRELGAGFFXVVLPAGRQRRGGNRLLMERLFFF

SEQ ID NO: 339722 - protein, 425 aa, Zea mays
  Clone ID: MRT4577_72998C.1.pep
MGCGPSIPDKYTIGGKGRKRRSVIQEVAVFVPTIRIPVASDIAHPLRGIVSKDLVDRLSTLRAHVASLAEEIYHADVSAVQELQHALEEYLPVVLGLTTKESRLESSVQFRWKTLDDDQECCLASAWYEVLSVVHMMAMLALFEANLLLIPKSSQGGGERKVAEDAKKDVVDSLLRASGCLDYSVHRILVQIPAQVKKGFPSYLQEGMLEAISIQALAQCVEIQLGLASECEKATLSVKRRLACEQVSYFSQAHYCLSGCDTSDSYGKKLLLFLKWKWMEAKAVAYYYHGLVLDKGGEPANHTSAVCCLSAADDLLSDSKRACLSFCLANPVTRVPPPWGVMKNMHKKIPDVANKKFQAHGHLFEQNKNSALQSVPDLPEFALSLRPDGYELPITDSIWENVDGQPQIQSLKEHMIDDEDEVGTK

SEQ ID NO: 339723 - protein, 74 aa, Zea mays
  Clone ID: MRT4577_72999C.1.pep
KRGGLGIPFFPLIKKGDPPRGGDPSPGSKRAELNKPKTPSGRWTGGNNGGLKRTPPTGQKREGGAGPSSGGPNW

SEQ ID NO: 339724 - protein, 532 aa, Zea mays
  Clone ID: MRT4577_7299C.1.pep
MMGGRALLLLLVSALLVQIRASDPLLYEPFDEDFEGRWIVSKKDEYQGVWKHAKSDGHEDYGLLVSDKARKYAIIKELDEPVTLNDGTVVLQFEVRLQNGLECGGAYIKYIRPQDAGWDAKEFDNETPYTIMFGPDKCGSTNKVHFILKHKNPKTGKYVEHHLKFPPSVPYDKLSHVYTAILKPDNEVRILIDGEEKKKANFLSADDFEPALIPSKTIPDPDDKKPEDWDERAKIPDPDAVKPDDWDEDAPMEIVDEEATKPEGWLDDEPEEIDDPEAAKPEDWDDEEDGEWEAPKIDNPKCEEAPGCGEWKRPMKQNPAYKGKWHAPMIDNPNYKGIWKPQEIPNPEYFELDRPDFDPIAAIGIEIWTMQDGILFDNILIADDEKVATSILEKTWKPKYDVEKEKEKAEEAAAGADGLSDFQKKIFDVLYKIADIPFLAPYKTKIIDVIEKGEKQPNITIGILVSVVIVFVTVLFKLLFGGKKPVAPVKPAAEAKKPKAAETDGAGSSGDKDEKEDEKEETGPRRRTRRET

SEQ ID NO: 339725 - protein, 83 aa, Zea mays
  Clone ID: MRT4577_729C.1.pep
MGYNRTGSSGGPTTVQHTSVSSIITTSMFHNILSHRRYSICPCTFYTYHTLIEAFSKLPSYCTTCDHPNRLHKLDSFFCQTYH

SEQ ID NO: 339726 - protein, 111 aa, Zea mays
  Clone ID: MRT4577_72C.1.pep
GLILIGGERSRQSTSPNIIWSAEFFSASAFLSSTAGAHARPASSAGVSAAAGASFSFRHDGEDQVPLYALFQQFVDESRPVVLGWHASRLRGSAIFSPVMVMAWPWRMRPA

SEQ ID NO: 339727 - protein, 51 aa, Zea mays
  Clone ID: MRT4577_73000C.1.pep
FFKKKRFIFPKKKEISLKKGVAKLISKLRGKRGLKSRVTKPALKLGQPFGH

SEQ ID NO: 339728 - protein, 258 aa, Zea mays
  Clone ID: MRT4577_73001C.1.pep
GRDRQTSSATALPSAGPCLPASGSSAVTCRDWHAAAPCLSSSSPSPTSPTGLIIFLRHLCEGSPSQPGQTGTDTSPPPLTRDDTKLVDALLAALLDHRRANPAAELPVPSLSNTLPSLSSAISDLLPSPPPPHLPLHLLLRLLALRRGVPLPEAVAFFHHVSPSLPADSLPDLYASMIVLLAKHRHFGLARHLLDEMRERAVPISRQLILALTRRYVRAEMPSEAADLFRRMEEYGAGASDPATLASLWLLSPERLAS

SEQ ID NO: 339729 - protein, 86 aa, Zea mays
  Clone ID: MRT4577_73002C.1.pep
MDHNEAACQAPYGPILCINNCCFFCSAATINMFSKCHKDMITKHHHANLASSSIYNILNRIYPFIHPLLSFNNTLLPYSQLHFKQL

SEQ ID NO: 339730 - protein, 46 aa, Zea mays
  Clone ID: MRT4577_73003C.1.pep
RDKRPCIFWGGHNGGIVMDPSSLSQWTSVARWQQGKDPASDRFLFL

SEQ ID NO: 339731 - protein, 152 aa, Zea mays
  Clone ID: MRT4577_73004C.1.pep
PACTSSPQDAMTNKSQHRIGPNPATHTLRSREQNRIHQKTIIAERVNRKPNNPAKPNSARSRRRAEAKRLQGICESTETQSSRTNQPVKKKLTPLEIETGYREGIMKNASARKPDGRRASAPRRRRDTGQDKDRRGEAPEQRRKERKPSCRI

SEQ ID NO: 339732 - protein, 78 aa, Zea mays
  unsure (1)..(78): unsure at all Xaa locations
  Clone ID: MRT4577_73005C.1.pep
XILEXAVXTSXXEVFXXXIXSXASPPQKEDLLPGXXARPXPXPHSXRYSKXASGQAQXEAXAMACEEEXXXXXRXXEG

SEQ ID NO: 339733 - protein, 82 aa, Zea mays
  Clone ID: MRT4577_73006C.1.pep
GAARGRRLNCDPRAVFNRVKLTCLTPVLTQLAFQRGGGPIQPLCERPSAMIASPHPPPSQTDWQGMLFFPFFVIPSITFLTP

SEQ ID NO: 339734 - protein, 112 aa, Zea mays
  Clone ID: MRT4577_73007C.1.pep
FFVTEPSRPRGLVTCDSSPFQSTSCYSSPFQNPHWNRNLHLQSNPTPEPPPCCIPIPHEHHPLYSPPLHLIGWCTYSLLCTDPPSLLVLRQRGCTRLQLWQSGDPAGVQRPA

SEQ ID NO: 339735 - protein, 57 aa, Zea mays
  Clone ID: MRT4577_73008C.1.pep
SYYSLSMNGPLHRLLPIILHIILQKIRSITFSIKFIFKIILKIKLCIKFIIQFIIQI

SEQ ID NO: 339736 - protein, 50 aa, Zea mays
  Clone ID: MRT4577_73009C.1.pep
SRSHSRLFPSRAAADAASASCLYYGHWGVMHQPREVRIYVVGAVVSRVTP

SEQ ID NO: 339737 - protein, 69 aa, Zea mays
  Clone ID: MRT4577_7300C.1.pep
LVPWLKKTKDKGLSSLVGEACVVLSCDNSVQEVANMLVDILNPDSLAEIRGGDGEQGTASSVPFGPSDI

SEQ ID NO: 339738 - protein, 99 aa, Zea mays
  unsure (1)..(99): unsure at all Xaa locations
  Clone ID: MRT4577_73010C.1.pep
EISSQTTPPQKPEXIPTRPALPXQAATSSGKKSWRKEAEAACSLRLVDLNQRTNGWASPPGDLSHLRARGYFSSSGGKRGMAPHPPDWRLLPTGVYCQP

SEQ ID NO: 339739 - protein, 118 aa, Zea mays
  Clone ID: MRT4577_73011C.1.pep
KWLLFFSVMPPSSHMRKFIPCLTWHRRLPYCLAQAYVKKYTGAPLSFCLSGPGHPKGTKPLVFFIHPIPNRIRNWTLLFHFACENCKQCLKLWPSCSMWQDTLHISTLEVIKLHNLIC

SEQ ID NO: 339740 - protein, 121 aa, Zea mays
  unsure (1)..(121): unsure at all Xaa locations
  Clone ID: MRT4577_73012C.1.pep
LVGPRLRLFLRLLCPGGLPXCLPXRLGWRLLRWGCLRFVASCXCLLRPLGSARAGFSRXXXXXCSPVWGXRXXFWPLVXVXXPLSRWXXCRRAXCXGGVFLGRPCSSRGASXFPFLPRLLV

SEQ ID NO: 339741 - protein, 116 aa, Zea mays
  Clone ID: MRT4577_73013C.1.pep
PTEIELKMSPAGSSTSTTATVFRSYSTYCTGPYNPYGHMVPFKGAAGALFMTGPSSNSPFGLLSPATPTRLTGANPYDLLQNFTRAPGRPRRASDIYTHVTEGSGSDYHEYYTRRR

SEQ ID NO: 339742 - protein, 58 aa, Zea mays
  Clone ID: MRT4577_73014C.1.pep
MVTDLYSQFVATMNQLGGPHVATPKKIRELMKVNGLINDEVKSHLQVRHAPCLLSLSI

SEQ ID NO: 339743 - protein, 74 aa, Zea mays
  unsure (1)..(74): unsure at all Xaa locations
  Clone ID: MRT4577_73015C.1.pep
PEKNPPPLYRRNPEGVDMVGYFFGLWIXRILGXFFKGEVQIISMEGYRTGKKIFLXRLGDLCESLPYRNICVDL

SEQ ID NO: 339744 - protein, 66 aa, Zea mays
  unsure (1)..(66): unsure at all Xaa locations
  Clone ID: MRT4577_73016C.1.pep
DANEYPDHQIRQLGKRIRNDKTAIFYVRLYMYAIRSLGIVCTSRVTLWSPFPSIIQGVQKGFXMLS

SEQ ID NO: 339745 - protein, 484 aa, Zea mays
  Clone ID: MRT4577_73017C.1.pep
MPAVASLWAPPAAARRRRFSPVVSSSLRRVASGGGSSWRSERRLMSELERTVTAGATERVIRSYVGTKSERAALAALSRLLMDSDPLAIPFYEAVTQARWFKWSSIHAAAVAALLEANGRAGESRSLIADSVSQHLQQSTDEVALFYCDLIAAFSSRGLKDRATEFHMELRSMPPLSGRKAYAAMVKSLCLLGMPAEAEAALREMVSRGHRPEAAQFGAVARCYGRAGSPADMERVIASMADAGGIRLGAGAADAVLSCYSACRDHARTLAWLKRMRKLRVAVTAKGYNLVLNSCPSLASVVRELGPELPLSTAGLVGWLRSASTTPAPAAEVEVVRELLASSASVLDRAMEWSEAEAKLNLHGFSTVAAYVLVLQWVDAVRGRARALPLEVSVVCGVGKHSDVRGESRVRELAQEVLGRMGSPLKLSARNRGRLVAKRDRVEQWLASLPVPEDGTDPSPDAANEEPFVFALFRKLGQFFSNLM

SEQ ID NO: 339746 - protein, 81 aa, Zea mays
  Clone ID: MRT4577_73018C.1.pep
FSNSADRDSAGDIFEKLVYIALDFQHESVTVKISCSRENSYDLRYGQVITIRADRFRCAEVLFQPCMLDLEDDDIHDTTYN

SEQ ID NO: 339747 - protein, 51 aa, Zea mays
  unsure (1)..(51): unsure at all Xaa locations
  Clone ID: MRT4577_73019C.1.pep
CGYPXRGRPGLTPPLGRHPLFLPLGWTPGIDMRRITALLTRTRGSRTRYGP

SEQ ID NO: 339748 - protein, 534 aa, Zea mays
  unsure (1)..(534): unsure at all Xaa locations
  Clone ID: MRT4577_7301C.1.pep
MMGGRALLLLLVSVLLVQIRASDPLLYEPFDEDFEGRWIVSKKDEYQGVWKHAKSDGHEDYGLLVSDKARKYAIIKELDEPVTLNDGTVVLQFEVRLQNGLECGGAYIKYIRPQDAGWDAKEFDNETPYTIMFGPDKCGSTNKVHFILKHKNPKTGKYVEHHLKFPPSVPYDKLSHVYTAILKPDNEVRILIDGEEKKKANFLSADDFEPALIPSKTIPDPDDKKPEDWDERAKIPDPDAVKPDDWDEDAPMEIVDEEATKPEGWLDDEPEEIDDPEAAKPEDWDDEEDGEWGAPKIDNPRCEEAPGCGEWKRPMKQNPAYKGKWHAPMIDNPNYKGIWKPQEIPNPEYFELDKPDFDPIAAIGIEIWTMQDGILFDNILIADDEKVATSILEKTWKPKYDXXXXXXXXEEEXXXXXXXXDXFQKKNFDVLYKIADVPFLAPYKTKIIDVIEKGEKQPNITIGILVSVVVVFVTVLFKILFGGKKPVAPVKPAAEAKKPKATVTDGAGSSGDKDEKEXEKRETAGPRRRTRRET

SEQ ID NO: 339749 - protein, 119 aa, Zea mays
  Clone ID: MRT4577_73020C.1.pep
MEDEAAAAQAQTQAPPVFVVRPRSRELLPPPSSNYEAWDLSDSESAPASSWATLPNRYTVAPRSVGAQGQARSRQPGRAASASRATTGRGMPARYGRYWRWPAMDSSSGDPIRGDVLGT

SEQ ID NO: 339750 - protein, 113 aa, Zea mays
  Clone ID: MRT4577_73021C.1.pep
DHQGQLQQGSGCHCQGVDPHHTPSPTSPPRPVTSPPRNSLGRSPSLSSIKCNIIGNGRRALNHLQPRRSLFPPPCHAYLCRLNFRLSPSSASERPDTPYSLKIFIFRLFPSHL

SEQ ID NO: 339751 - protein, 59 aa, Zea mays
  unsure (1)..(59): unsure at all Xaa locations
  Clone ID: MRT4577_73022C.1.pep
SSLLRSSGFLPASQQACAQLHSXSLQGYSWLGETLPLWGSHLLTVVRPSLQLXWAHTNA

SEQ ID NO: 339752 - protein, 58 aa, Zea mays
  unsure (1)..(58): unsure at all Xaa locations
  Clone ID: MRT4577_73023C.1.pep
TYIYLEVRVSYLYRPESAEKYYYNTWEVKTPPIKFFTQKFLRRTRPPAASLLIXFTFT

SEQ ID NO: 339753 - protein, 65 aa, Zea mays
  unsure (1)..(65): unsure at all Xaa locations
  Clone ID: MRT4577_73024C.1.pep
PALGXWQPQRAHCAHPPAGAALAPLEQGGAIPPSGCLAEESPIGFAHIRYKDSCFKFYSLQGDSS

SEQ ID NO: 339754 - protein, 888 aa, Zea mays
  unsure (1)..(888): unsure at all Xaa locations
  Clone ID: MRT4577_73025C.1.pep
DREEQVAPKGKVDMKKLPKHVREMQEALARRKEAEERQKREEEERLRKEEEERLRREEEERKAEEAKRRRKEREKEKLLKKKQEGKLLTGKQKEEAKRLEAMRRQFLEQSELQKAEDAAPETKKRPIYDSKKKKAQSKATETAKVVEEQQEELNEVNNDEEEYVLVDQESQSQVEESDEKTEPDQETEEPKPEEDEEDEDEWDAKSWDDIDVNLPLFPAFVLGLARPLVRSPAPPQRRGFTSAQPAIPAAKKLVPSVADSKKSETDDEGASNGHAKRHKKKGPVKEDNSKSGSDLCRYRSGIPGTVYVSETKLLDCIRRTNVQEGEAGGITQQIGATYFPTENIRERTRELKADATLKVPGLLVIDTPGXHESFSNLRSRGSSLCDIAILVVDIMHGLEPQTIESLNLLKSRDAVFIVALNKVDRLYGWKKCPNAPIVKALKQQNEDVKREFNMRLTDIVTQFKMQGVNTALYYKNKEMEDTFNIVPTSAVSGEGIPDLLLLLVQWTQKTMEEKLTFVDEVQCTVLEVKVVEGHGTTIDVVLVNGILHEGDQIVVCGMQGPIVTTVRALLTPHPMRELRVKGTYIHHKEIRAAQGVKISAQGLEHAIAGTALYVLGPDDDLDKLNEAVMEEMTRVRSRIDRSGEGVYVQASTLGSLEALTEFLKSPAVNIPFCDFSIGPVHKKDVMKASVMLERKKEYATILAFDVKVMPDARDLAEESGVRIFVADIIYHLFDQFTAYIKNLKEEKKKESAEEAVFPCVLKIMPNCVFNKKDPIVLGVDVLEGIAKVGTPLCIPSKEFIDIGKIASVEINHKQVDMATKGQKVAIKIIANNSDEQQRSFGRHFDMEDELVSRISRRSIDILKQNYREDLTTEDWKLVVKLKSILKIQ

SEQ ID NO: 339755 - protein, 59 aa, Zea mays
  Clone ID: MRT4577_73026C.1.pep
DTKSYSLLNVVHILKWKADTLPRVMVLYFEQKQMYCTGMESYRGYIRCLPIISVPQDAR

SEQ ID NO: 339756 - protein, 282 aa, Zea mays
  unsure (1)..(282): unsure at all Xaa locations
  Clone ID: MRT4577_73027C.1.pep
GNSDEXNXPDQETEEPKPEEDEEDEDEWDAKSWDDIDVNLPKISAFDEEEAKPIVKKAEPVQKQENNKAQPAIPAAKKLVPSVADSKKSETDDVGASNGNVKRHKKKGPVKEDNSKSGSDLRSPICCILGHVDTGKTKLLDCIRRTNVQEGEAGGITQQIGATYFPTENIRERTRELKADATLKVPGLLVIDTPGHESFSNLRSRGSSLCDIAILVVDIMHGLEPQTIESLNLLKSRDAVFIGALNKVDRLYGWKKCPNAPIVKALNNXNEDVKREFNMRLT

SEQ ID NO: 339757 - protein, 293 aa, Zea mays
  unsure (1)..(293): unsure at all Xaa locations
  Clone ID: MRT4577_73028C.1.pep
SRPAAQAYAVRNLSSSARRAAEVELTIDGKKVSIEAGSSLIQACEKAGSVVPRYCYHEKLMIAGNCRMCLVEVERAPKPVASCAWPVQPGMVVKTDSPQVHKAREGVMEFLLANHPLDCPVCDQGGECDLQDQSMRYGADRGRFHEMTGKRAVEDKNIGPLVKTSMNRCIHCTRCIRFANDIAGAPELGSAGRGNSIEIGTYLETALDTELSGNVIDLCPVGALLSKPYAYKARPXELYHIETVDVLDGIGSNIRADVRGLQVMRILPDLXDDVNEEWITTRQIPCDGLSTHV

SEQ ID NO: 339758 - protein, 50 aa, Zea mays
  Clone ID: MRT4577_73029C.1.pep
LKSAISPWFFKSYWIENVLMPYTTPVKPGLILLWIWQSRICRSITWMCIR

SEQ ID NO: 339759 - protein, 534 aa, Zea mays
  Clone ID: MRT4577_7302C.1.pep
MGGRALLLLLLVSALVFQIHASDPLLYEPFDEDFEGRWVVSKKDEYQGVWRHAKSDGHEDYGLLVSEKARKYAIIKELDEPVTLKDGTVVLQFEVRLQNGLECGGAYIKYIRPQDAGWDAKEFDNETPYTIMFGPDKCGSTNKVHFILKHKNPKTGKYVEHHLKFPPSVPYDKLSHVYTAILKPDNEVKILVDGEEKKKANFLSADDFEPALIPSKTIPDPDDKKPEDWDERAKIPDPDAVKPDDWDEDAPMEIVDDEATKPEGWLDDEPEEIDDPEAAKPEDWDDEEDGEWEAPKIDNPKCEEAPGCGEWKRPMKQNPAYKGKWHAPMIDNPNYKGIWKPQEIPNPEYFELDKPDFDPIAAIGIEIWTMQDGILFDNILIADDEKVATSILEKTWKPKYDVEKEKEKAEEEAAAGADGLSEFQKKIFDVLYKIADVPFLAPYKTKIIDVIEKGEKQPNITIGILVSVVVVFVTVLFKILFGGKKPVAPVKPAAEAKKPKATVTDGAGSSGDKDEKEDEKEETAGPRRRTRRET

SEQ ID NO: 339760 - protein, 440 aa, Zea mays
  unsure (1)..(440): unsure at all Xaa locations
  Clone ID: MRT4577_73030C.1.pep
TLEGRGKDFQEDAEGVVWFKDSLCVPNVQSIWELILKEAHETSYSIHPGSEKMYQDLKKKFWWYGMKREIAEHVAICDSCQRIKVEHQKPAGLLXPLRIPQWKWDEIGMDFIVELPRTRAGYDSIWVVVDRLTKSAHFILVKTSYNSAVLAELYMSRIVCRHGVPKKIVSDRGTQFTSQFWQQLHEALGTHLNFSSTYHPQTDDQTKRTNQVLEDMLRASWRKASVWARYSARSRREHQDGSGESKDSVGPMLRRRRSSRKKRPSAEAVCHLRTSPQQIAQSRQPSYADTRRRDLSFEVGDFVYLKVSPIRGVRRFGVKGKLAPRYVGPYQILVKRGEVAYQFSLPEDLSAVYDVFHMSQLKKCLCVPQKQLPVEGLEVQEELTYIEKPTQILETTDRVTWRNTIRMCKVRWGHHSEEEATWEREDDLMAKYPELFVGQP

SEQ ID NO: 339761 - protein, 295 aa, Zea mays
  unsure (1)..(295): unsure at all Xaa locations
  Clone ID: MRT4577_73031C.1.pep
MAAAEVEPRPNPPPTMASDLPNGSKTKSRESDRRRRRRKVKXNKSAADVXSSDAKENADPNPEPMVEVEIEYVLEKAELDDPLLDDFKTIFEKFTFKDAAAAAAEDDKKDEGVSDATKKGLLDDDDEEDDAHEANKKKDGGLSNKKKKLERRMKIADLKQICNRPDVVEVWDATAADPKLLVYLKAYKNTVPVPRHWSQKRKFLQXDGCNNWGGWSCWCXILXGKRGIEKQPFQLPDFIAATGIEKIRQAYIEKEDSKKLKQKQRERMQPKMGKMDIDYQVLHDAFFXYQTNPIV

SEQ ID NO: 339762 - protein, 62 aa, Zea mays
  unsure (1)..(62): unsure at all Xaa locations
  Clone ID: MRT4577_73032C.1.pep
NISLIQYKLFIITHSTFLISASKQKPCSPXXRTXPRQRRFRSRRPCTSSSRAAETILARGMM

SEQ ID NO: 339763 - protein, 116 aa, Zea mays
  Clone ID: MRT4577_73033C.1.pep
RSRQQCCPHQLGLLEVQSFAQQFQIFFQLWGAAPPNNTLFEPFFLQQHHQFLAAQGLTPLALILGQNIPPLGGLSQSQLPSFRPTPCGVSAALPPYCYFFIFGKSPLPLSPLLYRE

SEQ ID NO: 339764 - protein, 49 aa, Zea mays
  Clone ID: MRT4577_73034C.1.pep
MQFVNFTEIMSRPVPASKKEAEFALSALMEIPEQFKAAINLQLLGYFTV

SEQ ID NO: 339765 - protein, 128 aa, Zea mays
  unsure (1)..(128): unsure at all Xaa locations
  Clone ID: MRT4577_73035C.1.pep
LARVPRRRRRRRPTRSSQRDPTERRLQAEXRXRRRRNPSLPPLVQXGSARRQTEPCRTPTKXYTARSITPPXDRDSGSKSPPPRRRAASKSPPLPPPPPFPPKGVRTISRSPPPSSTRRSVSRSPPPK

SEQ ID NO: 339766 - protein, 55 aa, Zea mays
  Clone ID: MRT4577_73036C.1.pep
NTPLVFRSKRKDHCPHRHLASHVVGFVPGAFHLTTQTLYTTPGISLWYPATGGVG

SEQ ID NO: 339767 - protein, 42 aa, Zea mays
  Clone ID: MRT4577_73037C.1.pep
RKREIFKKKKKKKKKKKKKKKKKKNKKKKKTKKKKKKKKKKL

SEQ ID NO: 339768 - protein, 81 aa, Zea mays
  Clone ID: MRT4577_73038C.1.pep
LATVLYKHYVVNLMNDRTTPIRSKALFLKFVHLVIGHRVIVKGSNPRPSNQSFCGPILTKDLHKRGDIGRRCRSRILLCSP

SEQ ID NO: 339769 - protein, 161 aa, Zea mays
  unsure (1)..(161): unsure at all Xaa locations
  Clone ID: MRT4577_73039C.1.pep
ALPPDRAYRSACCWGCSPSSWTLTARSSAEVITLTXRTFSDKIKDKDTVRFVQGGVPWCKHXTHASHRGLNGCWLIMERSFYCREHDTLSVSXCRKNLGTLWXDLRKAMEGATEIETGQEDCGASKPGCGKVDLHSYPTFXLXYEGEEVLKYKGPTDAESL

SEQ ID NO: 339770 - protein, 69 aa, Zea mays
  unsure (1)..(69): unsure at all Xaa locations
  Clone ID: MRT4577_7303C.1.pep
VFSRLVPKFALFFPQRGFFPWYVGEGLEKGCFSQAPGDLAAFLKAFXEVGPKGPNSQGSEGHSFLVPGL

SEQ ID NO: 339771 - protein, 81 aa, Zea mays
  unsure (1)..(81): unsure at all Xaa locations
  Clone ID: MRT4577_73040C.1.pep
MASRSYSNLLELAGGADRDQPLPSLGQPRIPXVMTASGIVPXLDRSDXPADADADAXSXGSDDQPDQPXRERTIIVGNSSH

SEQ ID NO: 339772 - protein, 57 aa, Zea mays
  Clone ID: MRT4577_73041C.1.pep
KWVSYMGKKSNLLHLDPTNSPGLEQKNLELGGGPNIKYNSPHFNKILGVFKKLCTRY

SEQ ID NO: 339773 - protein, 244 aa, Zea mays
  Clone ID: MRT4577_73042C.1.pep
GAVRPGHNARRRHHPAVCVAARGTPAAGRGQRRRRAPRGWSRISTPSSPRCDLLDQQTQQELEVAVAERVTEQSKNGRAGRKRICDRDGVQGEEEIRARFSEATRNGIGAKEVARSAETNFPFPERSGTFRSKGTEHGGRAAPSQVLLLPPPTRPPHRQIAATGQEKTPPPIPRTSINQQQIFERGWRKLRGNSADWRRRTRRRREERRWWQEEAGLIVGRRAAVALEDRRGWAGVGSIYHDYK

SEQ ID NO: 339774 - protein, 64 aa, Zea mays
  Clone ID: MRT4577_73043C.1.pep
MDVERKVVEADDYGRVRTGTVWTATTHAITVVIRSGVLPLPWTVAQMGWVLGPVGLLTCDYITY

SEQ ID NO: 339775 - protein, 71 aa, Zea mays
  Clone ID: MRT4577_73044C.1.pep
SSLFLIIEGGGVGFLGLPPPSPLLLPPLPCPLILHSSLLQSPFSVCALSSFLFHSLSVLSLLSLACRFRSL

SEQ ID NO: 339776 - protein, 80 aa, Zea mays
  Clone ID: MRT4577_73045C.1.pep
LHPRGKRGTTAMLGWARFPTPPPCPTWTYTWRLRRIRRACLPLGADRCPELTREVLLLDWTRVVGLLLRSGRHNPVARRG

SEQ ID NO: 339777 - protein, 92 aa, Zea mays
  unsure (1)..(92): unsure at all Xaa locations
  Clone ID: MRT4577_73046C.1.pep
YRFGIPGSTHSSAHSSAHASANSWEKKKKKKKKXKKKKKKKKKKKKKKKKKKKKKKKKKKKKKKKDHHFKESNLTFPCLQHKTFFISSPKLN

SEQ ID NO: 339778 - protein, 78 aa, Zea mays
  Clone ID: MRT4577_73047C.1.pep
TTLSLLPTPHEIFYPRPNPTTPSGFIFGKDLTHNQIPYMREAFSLFDTDGDSLIAPFELFVLIRILFCNPTQAQFLYI

SEQ ID NO: 339779 - protein, 43 aa, Zea mays
  Clone ID: MRT4577_73048C.1.pep
PLESCTWYLSNVTLECCQCVTYIGSYSMYEFVNGNWAGPKCFP

SEQ ID NO: 339780 - protein, 82 aa, Zea mays
  Clone ID: MRT4577_73049C.1.pep
MAAPAVSGLSRQVRCFSTSVVRPFAKLVRPPVQVYGIEGRYATALYSAASKQNKLEQVEKELLRVAQILKEPKVAASVLNPY

SEQ ID NO: 339781 - protein, 125 aa, Zea mays
  Clone ID: MRT4577_7304C.1.pep
SPATGVAPGGAGGATRDPHLPPPKASGQSELRSPARRHASGDYATMNSIEPFNRPGRLAARAYYDGTMKGDNQPKTPRGDNRGMAPDDQDALTRQQKTQKHIMLQLLMTANPTLRREKRKQSRTH

SEQ ID NO: 339782 - protein, 38 aa, Zea mays
  Clone ID: MRT4577_73050C.1.pep
FARVLFLIGEGNSQHTWLQSMRGVHSCQHSITFDIPSV

SEQ ID NO: 339783 - protein, 82 aa, Zea mays
  Clone ID: MRT4577_73051C.1.pep
EFYCLFTVATSTTIQTGGFCFFSYLLYTTTICYPSTCTLVPNFWYSYYNCYNCLTIKQLIFYKPSIVSTNNPLFFVSNFRFL

SEQ ID NO: 339784 - protein, 38 aa, Zea mays
  Clone ID: MRT4577_73052C.1.pep
PLPENLPGGGPHLARPPLNNSLFFFFFFFFFFFFFLII

SEQ ID NO: 339785 - protein, 57 aa, Zea mays
  unsure (1)..(57): unsure at all Xaa locations
  Clone ID: MRT4577_73053C.1.pep
AAPKTSSSAGSLLGVGMPLVSTPPWRLVLGSAESILNDGPRCGEESGVPAGPXGTQK

SEQ ID NO: 339786 - protein, 122 aa, Zea mays
  Clone ID: MRT4577_73054C.1.pep
KKKANFLKTGPGGGGKNSRGPFKTNRLQKGPHFWKKGIHNFNPPRSQVCLGGGKKGGVQGFGETKNGWPPPRKGGVFAFKNFKPTWKNKNKTKTGKGHHPQIRGKVTSYKLAPREQGIIGTK

SEQ ID NO: 339787 - protein, 41 aa, Zea mays
  Clone ID: MRT4577_73055C.1.pep
NTGPKCKRETVLQLILKQEGIEGLTLKNAPPYLCKMNPECV

SEQ ID NO: 339788 - protein, 55 aa, Zea mays
  Clone ID: MRT4577_73056C.1.pep
ASIVLDPCRTSIGTIWIVPVRRSTKGNGVLSSSPFSMATHLYPQFHTTHCLRNAQ

SEQ ID NO: 339789 - protein, 126 aa, Zea mays
  Clone ID: MRT4577_73057C.1.pep
GFLNKGATTLPGFYRGGKKPRGGPSQAKNPLRRPKRSLHLKKKTKLKVAYILATLRVFNQKEHSPPWGFTGRKKRKGVHGRKKTKGFHWKKKTKRVSKRDRNNAWGFHHWRKKRKQLGTFWQFYYP

SEQ ID NO: 339790 - protein, 83 aa, Zea mays
  Clone ID: MRT4577_73058C.1.pep
SVGRWLPEMVQASLPPLSLVNVPGILVVLGLREQQRPVRFSLRLSPFFACFPVVSDVGGGNMVLALTRKRLSCNRVFQLDWKP

SEQ ID NO: 339791 - protein, 83 aa, Zea mays
  Clone ID: MRT4577_73059C.1.pep
HDDWERILMDALPKCRIRISHRYVHQHNKRDWRKDNRACRHISTLSHVPEDCRKNQRKGPKPLWHQVLQTPQQLDGTKGHIVI

SEQ ID NO: 339792 - protein, 135 aa, Zea mays
  Clone ID: MRT4577_7305C.1.pep
PPPIKPVGGGPPRVEKKLPPFNFSTFFNGPPNWFLGNFVNPYHQYLGFPPRNRSFCGQEVFPKSFGGLRFSSNPLQGYKGFFSPESFFWGGPFQKICPRGFLVDFWPARFWDFWGGNKTILWLPVNKKILRGWAP

SEQ ID NO: 339793 - protein, 325 aa, Zea mays
  unsure (1)..(325): unsure at all Xaa locations
  Clone ID: MRT4577_73060C.1.pep
MAEQWWGSASHRSHGTSACSAAAPPPLTVTGRVACGSTFPTAAVESTSSVTFQDPYRNSTHQPLSDAASSLGDPHLDWTQTFLSGRSDASFQAVLQEPSATNDPLIRDHMDMGAGFLADQAQLAPSPYGGTEPSQAQALFDATAAVHNILMYGDSESSVSYDAAAASMQFSQLXGPRCPRLXTQGDGVAVGAPMQYLSGSSYLPFGGPLPSHLLLQALQAAKPNSRSSNANSPTAKVRKEKLGDRITALQQLVSPFGKSLSSPYLKNGIPMKQFQHKGSEDSKDNGDTKQDLRSRGLCLVPVASTYTVAAETPEFWHPTFGGTFR

SEQ ID NO: 339794 - protein, 54 aa, Zea mays
  Clone ID: MRT4577_73061C.1.pep
STVLTTTEAQQMGWQEKTRSAKEELGGFIKKKTGTQSRLDKDLNLGDLSVHPHH

SEQ ID NO: 339795 - protein, 63 aa, Zea mays
  Clone ID: MRT4577_73062C.1.pep
ESYVVHDLYRFVNVGISLKASPSARRARIPPRNGACSSLTVARRKKISSSRQYTQARLPQAGL

SEQ ID NO: 339796 - protein, 238 aa, Zea mays
  Clone ID: MRT4577_73063C.1.pep
MVSGAIAKIQGDSLFPHTPSAAGGVHPLTRDAMTCVELLARHRTTLDLILAGADERGSLAGVVSDLIAGLERNLQRRFAVACADAGGSRHLFLANNISFVLSRVADNDGVASLLGDAWAARRRSRVEQHVASYAASSWGPVVALLDTTACGRGKSAKVLAEFNAAFNRSRDSEMCREVPDPVLRAVLRNAVSEMVVPAYCAFLQKQPKLGKSARYTADDLVELLSELFEGESTDGIKI

SEQ ID NO: 339797 - protein, 172 aa, Zea mays
  unsure (1)..(172): unsure at all Xaa locations
  Clone ID: MRT4577_73064C.1.pep
ECLISQTXPQKVCTQIGLCVFDGAHSVSNPIESVVEKQKRGSDLFCTACEMAVVWIQNQLRENKTKELILNYANQLCERLPSPNGESTVDCHQISKMPNLAFTIANKTFTLTPEQYIVKLEQAGQTICISGFMAFDVPPPRGPLWILGDVFMGAYHTVFDFGENRIGFAKSA

SEQ ID NO: 339798 - protein, 75 aa, Zea mays
  Clone ID: MRT4577_73065C.1.pep
METQTCKTAGCKCGTDCKCDAGTCGTLECCKNCATNKCKTAGCNCGSDCKCDAGTCGTLECCKTCGKGGEKSCCS

SEQ ID NO: 339799 - protein, 63 aa, Zea mays
  Clone ID: MRT4577_73066C.1.pep
PQRTQRRSNWRGKKGKCTFKPFLRLLVINWATQGPKRGSMQSGVQRADQVTSMFLDLVHCFMD

SEQ ID NO: 339800 - protein, 103 aa, Zea mays
  Clone ID: MRT4577_73067C.1.pep
LNYANQLCERLPSPNGESTADCHQISKMPNLAFTIANKTFTLTPEQYIVKLEQAGQTICISGFMAFDVPPPRGPLWILGDVFMGAYHTVFDFGENRIGFAKSA

SEQ ID NO: 339801 - protein, 135 aa, Zea mays
  Clone ID: MRT4577_73068C.1.pep
MDCRCARPELFRNITGDPKVRENKVGRAAGVTENHEEGRRNAMDGPRRQAHEKTPEIMPGVTQHSLTLRETRCLGHLTLLTIATEEYTLCRPPQMQRTMVNPDSYLRAWWLPGKPLTVANVDANQSQEQLQQFLA

SEQ ID NO: 339802 - protein, 57 aa, Zea mays
  unsure (1)..(57): unsure at all Xaa locations
  Clone ID: MRT4577_73069C.1.pep
PRVRPRLLFLFFGHVFPHTGVSQKQKEAXPHIASNNKTLITQTFPTIFKISDRSHYL

SEQ ID NO: 339803 - protein, 38 aa, Zea mays
  Clone ID: MRT4577_7306C.1.pep
HYSGTLALKVDFVCYVKLTTQGILNDLRNALSRYYLNN

SEQ ID NO: 339804 - protein, 106 aa, Zea mays
  unsure (1)..(106): unsure at all Xaa locations
  Clone ID: MRT4577_73070C.1.pep
IFFFGXXXKGELGGGDNMRGIILLALNKQGESSFPAHLKKTQMLQAPLSKPKKGGGNLLTQNCQIFGPGKIYPLVGMAPFRYLSVSSLYWGRGTLQSRERTPFDIF

SEQ ID NO: 339805 - protein, 52 aa, Zea mays
  Clone ID: MRT4577_73071C.1.pep
HAFAYSFALSMFVPQKPQGCFRRFSVTYKDDYHYNKILFSPLFSHHINPILN

SEQ ID NO: 339806 - protein, 89 aa, Zea mays
  unsure (1)..(89): unsure at all Xaa locations
  Clone ID: MRT4577_73072C.1.pep
TLEPPPSPPLFFRAPYPSPGQRRFRAPPAITFKRRNGLRNKHLRDHVKYIRCSNCSKCCPMDKAIKPLLLRNTLXHTAIRDEHKDYVHD

SEQ ID NO: 339807 - protein, 137 aa, Zea mays
  Clone ID: MRT4577_73073C.1.pep
CFQLKFLFACVTLILGNIFSMDLTWESFFKPTPNMNPCLLLENPEQTPLAGGTRVGVAHRRQEKTWRLPVRPLKTVLRLDPPLGPDCRLDPVQNGCSALSIDKQGDLMVVANVGDSWVVLGTAFDDDIIESRLEGGE

SEQ ID NO: 339808 - protein, 121 aa, Zea mays
  unsure (1)..(121): unsure at all Xaa locations
  Clone ID: MRT4577_73074C.1.pep
TIPNERTMQLLGQLQVEVENFVLRVAAEFSSRKEQLVFLINNYDMMLGVLMERAADDSKEVESFQQLLNARTQEFIEELLSPPFGGLVAFVKEAEALIERGQAERLRGEEGXLTQLIQLYH

SEQ ID NO: 339809 - protein, 20 aa, Zea mays
  Clone ID: MRT4577_73075C.1.pep
CLFHECSGQRQDKPIALYEF

SEQ ID NO: 339810 - protein, 48 aa, Zea mays
  Clone ID: MRT4577_73076C.1.pep
LAGRVVMAPQAISVLGGFRPQGKTIDNVVKVVETTLAMQEAGCFSVVY

SEQ ID NO: 339811 - protein, 75 aa, Zea mays
  Clone ID: MRT4577_73077C.1.pep
MSISSDPFSLMDMLIFKAVEEQVKKRVENKARIFEQNATDSECKVDPKVLSKLYDQWVMPQTKDVEVEYLVRCLD

SEQ ID NO: 339812 - protein, 226 aa, Zea mays
  Clone ID: MRT4577_73078C.1.pep
SEFLSQALEAKDLLTESIIFEQYTDNNLQTGSQIHIENPESIDISDELHQKAEQSEIDELKQRLCELTEAKTQLETHNQKLQEESMYAKGLASAAGVELKALSGEVTKLMNHNERLANDLALARNSTRVRSGHRVGRRDSYTKRLEPASRRDVHASSERESALEVMLMAKDQREAELQKKIEESKQKEAFLEGELANMWVLVAKLKKGQVIDQDDVSMPYPMDRDS

SEQ ID NO: 339813 - protein, 58 aa, Zea mays
  Clone ID: MRT4577_73079C.1.pep
RKLIGLHEGGRKVGCCKRTDSFFMFRFFYFFVFFFLFFFPSFFFFIFSLNKFFFFFFF

SEQ ID NO: 339814 - protein, 131 aa, Zea mays
  unsure (1)..(131): unsure at all Xaa locations
  Clone ID: MRT4577_7307C.1.pep
GSLPGXXXXCVRFVFPFXFGRRVGASXGXVGPRWFLRVALGRGGLAXCSXSLVXLAPPPPVVXRPRCPLVGAXAAGGPPRALARARPGAWLRLLRPPXAGWRWWRRPPSFPVRGRPCVGAGLPRXSGPVLR

SEQ ID NO: 339815 - protein, 93 aa, Zea mays
  unsure (1)..(93): unsure at all Xaa locations
  Clone ID: MRT4577_73080C.1.pep
HISGXPASQARPRGRRRKRPTASRAEXSASRQTTRANXXPAHEXXTHPQEKXXXEKTGXXEQQKKKEXKKPRXXXXXXANAPXQRPXXTXXXX

SEQ ID NO: 339816 - protein, 53 aa, Zea mays
  Clone ID: MRT4577_73081C.1.pep
FADFPRLLRRARDSYLGGTATHIATPTSGPIRALLSVASIMDRNDTCRFLVRR

SEQ ID NO: 339817 - protein, 93 aa, Zea mays
  unsure (1)..(93): unsure at all Xaa locations
  Clone ID: MRT4577_73082C.1.pep
VPAAPASSDRTTGPPTGRVVTSAGIMNAYPTANXDYLNAVDKAKRKLRGLIYKKNCAPLILTLSXHFASTLDADTKTGGPXFSTINNHPFQAL

SEQ ID NO: 339818 - protein, 47 aa, Zea mays
  Clone ID: MRT4577_73083C.1.pep
MGEFKTAHFSGYNTVSEGTLKNTCVIQSLGETTWRKNWWRFTHRNNS

SEQ ID NO: 339819 - protein, 54 aa, Zea mays
  Clone ID: MRT4577_73084C.1.pep
HSPLRVRNFLKSLYFWASSLLPQLSKKNISPRKLNWLTTGFFQSQSFKITPNQF

SEQ ID NO: 339820 - protein, 34 aa, Zea mays
  Clone ID: MRT4577_73085C.1.pep
AIAAGAGTRAGAGYIYLAIDCVIDSVTGVYRLPD

SEQ ID NO: 339821 - protein, 97 aa, Zea mays
  unsure (1)..(97): unsure at all Xaa locations
  Clone ID: MRT4577_73086C.1.pep
DIQLGASISIIAKEILYRRGHISFNYYSTCPCGSCXQSRMKYPHLNETNTHKHDTILLHINTQKNANPEILTAKLYSAXAFHCCICLCNCNSDPFNC

SEQ ID NO: 339822 - protein, 147 aa, Zea mays
  unsure (1)..(147): unsure at all Xaa locations
  Clone ID: MRT4577_73087C.1.pep
PRVRSDYVGYLCGLYSSXEXVSLIARRPVDCSAATVIPESLLNYPSVSVVFQPTWNRSTPVVVERTVKNVGEEVSTVYYAAVDIFDDDAAVAVFPSELVFTKVNREQSFKVMVWRSHNNKGAKVVQGAFRWVSDTYTVRSPMSISFT

SEQ ID NO: 339823 - protein, 90 aa, Zea mays
  Clone ID: MRT4577_73088C.1.pep
AVVTTQSTFFFFFFFFFLAVVLNTELDHALDELSRARVEIARLWAERVERRHLDDGSPAPVETQHPYRSPRRGHQSYDNPDCKTKISLEP

SEQ ID NO: 339824 - protein, 109 aa, Zea mays
  Clone ID: MRT4577_73089C.1.pep
FFFFFFFFFFFFFFFFFFFFFFFFFFFWGALWPLGFIKGKTRPNNKYRLVRFKRGFSGRVIGNKRKNNLKSENETIRWANAAVFPLQRTKKTRSNQGLMATLPETLPIN

SEQ ID NO: 339825 - protein, 71 aa, Zea mays
  unsure (1)..(71): unsure at all Xaa locations
  Clone ID: MRT4577_7308C.1.pep
CFLFLGGVSVGLLWCVPLFLCVGALGLVGCFLCWSVLLWLXVVVPGCLFXLLLSPGLPFFRFFSFLVASCA

SEQ ID NO: 339826 - protein, 70 aa, Zea mays
  Clone ID: MRT4577_73090C.1.pep
YYNLDYYLHYNYKLKELESSVDTVKVVFPCSSLQCVEVPFPTYDLWWSSCSSVFVSVSVRSVGWAVGRRV

SEQ ID NO: 339827 - protein, 105 aa, Zea mays
  Clone ID: MRT4577_73091C.1.pep
TKGVVVWPGPTRLGWLLQSLGRLLGSSFLVSTNLTTGGLGGFVFFVPAKRVGDWGFRGILNTRPGKKRGLNFGGGWGPQRPLGFPFNNGIVRTSCSLSRLGPGGH

SEQ ID NO: 339828 - protein, 108 aa, Zea mays
  unsure (1)..(108): unsure at all Xaa locations
  Clone ID: MRT4577_73092C.1.pep
ANHDTSDSSKDSYYSIVSIQRTADEEDLYWDXFKIYDSINXKKGGIHTSSPALKDDLLKRLIIVEYYYDLSWDIEDYDDNSLMPLVVLKCQLYFYIFDLPLLSQVTVI

SEQ ID NO: 339829 - protein, 57 aa, Zea mays
  Clone ID: MRT4577_73093C.1.pep
GNRSSTACCCMCRASNHHDSAGGNSHYNDDGGYNQMVLMRARHEQLHYLQVRVLTSG

SEQ ID NO: 339830 - protein, 73 aa, Zea mays
  Clone ID: MRT4577_73094C.1.pep
WENPPKKNGGGPFGPPGVFLGGSPGGRSWKPPPGGNGGSRGKKNFSPSPTPGGFPPRGGGPFHGQNSGPQGGF

SEQ ID NO: 339831 - protein, 51 aa, Zea mays
  Clone ID: MRT4577_73095C.1.pep
SNQCRTNPLTIPTSWKRTNKLTISHSHATQKKKKWVDAHDFKPPPFMDSWV

SEQ ID NO: 339832 - protein, 43 aa, Zea mays
  Clone ID: MRT4577_73096C.1.pep
RGEPDRAGRELLVMPYYMKEGELLTPANARGDAEDTHRNTGIG

SEQ ID NO: 339833 - protein, 39 aa, Zea mays
  Clone ID: MRT4577_73097C.1.pep
RKTGGDTLEFHSFYKNFSSELKDIVWKAESDANNKQTNK

SEQ ID NO: 339834 - protein, 97 aa, Zea mays
  Clone ID: MRT4577_73098C.1.pep
HDPTGACAECSPMRSDPAKINLARRPSNSHALIGFSCRNLPEATLHSDGTRELMITGENVSYYSPPPPPSSHSLGTNVTDQGLTRMTTLTSCAPSRP

SEQ ID NO: 339835 - protein, 69 aa, Zea mays
  unsure (1)..(69): unsure at all Xaa locations
  Clone ID: MRT4577_73099C.1.pep
MKVRSVALALLALAASAASSTSGCCGCQTPPFHLPSPFYMPTPFYLSPYHXPQPWXYPTXPPHLSPCQQ

SEQ ID NO: 339836 - protein, 85 aa, Zea mays
  Clone ID: MRT4577_7309C.1.pep
HYESLTFMHACRARDPVVAYGGRPFFFFFFKKPQQTRVSFGFSNRSNQPVKCTLSRLGTIVSLGMGLIHLLPFFINHIKLPPGAT

SEQ ID NO: 339837 - protein, 156 aa, Zea mays
  Clone ID: MRT4577_730C.1.pep
AGRAGHFSDKIVIWILVKKKKITRVSGYRAPEVTDIRRVSQKADVYSFGVLLLELLTGKAPTHAVVNEEGLDLPRWVQSVVREEWTAEVFDQELLRYQNVEEEMVQLLQLAIDCSAQHPDRRPAMSEVATRIDEIRRSSLGDRQVADSAEGDEPSL

SEQ ID NO: 339838 - protein, 117 aa, Zea mays
  Clone ID: MRT4577_73100C.1.pep
MHAFPREGMVKRETSFTSQCTAQEIMTKIEDACGPLGFNVRKQNYKMKLKGDKSGRKGHLSVATEVFEVAPSLHMVELRKTGGDTLEFHSFYKNFSSELKDIVWKAESDANNKQTNK

SEQ ID NO: 339839 - protein, 82 aa, Zea mays
  unsure (1)..(82): unsure at all Xaa locations
  Clone ID: MRT4577_73101C.1.pep
DIQSCGKLARTDGRRREDDWICPNXQNDYFDFRTAWNMRNCNQARAANHTNXADPGSLSHVXGYMSTGTLPYMYLGGGAPPY

SEQ ID NO: 339840 - protein, 65 aa, Zea mays
  Clone ID: MRT4577_73102C.1.pep
FLGGGGWAFLGEKSFFGVLGPGSTKSSFRRVCSSPVGVSFERANPLGVVFLGGKRRSPPPGYYFF

SEQ ID NO: 339841 - protein, 256 aa, Zea mays
  Clone ID: MRT4577_73103C.1.pep
MVGLLRPLSAAATLLLAPATPLTGSSVSASSVGGRRWRSVRADAGGGWLSGLLGGKGGGASTAMMVTPGTVKAGDPVLHEPAQEVAPGDVLSEKVQGVIDRMVDVMRRAPGVGLAAPQIGVPLRIIVLEDTQEYISYAPKKDIEAQDRRPFDLLVIINPKIKSTSKRTALFFEGCLSVDGYRAVVERHLDVEVSGLDRNGSTMKVRASGWQARILQHECDHLEGTLYVDKMVARTFRVVENLDLPLPTGCPQLGAR

SEQ ID NO: 339842 - protein, 166 aa, Zea mays
  unsure (1)..(166): unsure at all Xaa locations
  Clone ID: MRT4577_73104C.1.pep
IGVPLRIIVLEDTQEYISYAPKKDIEAQDRRPFDLLVXILPRSRPPIKHLEPFSRSVLFLGHTQVIINPKIKSTSKRTALFFEGCLSVDGYRAVVERHLDVEVSGLDRNGSAMKVRASGWQARILQHECDHLEGTLYVDKMVARTFRVVENLDLPLPTGCPQLGAR

SEQ ID NO: 339843 - protein, 76 aa, Zea mays
  Clone ID: MRT4577_73105C.1.pep
KHNPLIAYHRARIKFSEFAFPTVPNSTGYTNVCGASFFLLPGPRENIQQALSRIRNPWPALHYGPKPPSLNIRGTP

SEQ ID NO: 339844 - protein, 92 aa, Zea mays
  Clone ID: MRT4577_73106C.1.pep
RAQRKTQKFFLPYSGQNGAQGAPGELYNGGGGKPWPLFLTPRAPRWATPKQGGARFFKGPQGGGLLWEPPGCAYPSREPVLGGGGGLETPQK

SEQ ID NO: 339845 - protein, 39 aa, Zea mays
  Clone ID: MRT4577_73107C.1.pep
DGAIGLKVGSHVPEKQTSGHGDGDEGAPLGQQATGWFSL

SEQ ID NO: 339846 - protein, 35 aa, Zea mays
  Clone ID: MRT4577_73108C.1.pep
LQIQHHLLVLSGFLSQALFGGLLSEQALQFLNWLA

SEQ ID NO: 339847 - protein, 186 aa, Zea mays
  Clone ID: MRT4577_73109C.1.pep
PPLEQRRKGKKSRARLRISAAGAAGWGRDGEGARSSTISSRSSLVVSLVEFGEMPEFGFMPMEAVSLARPSRVRWLLELTLMVVVSWLLLLLAGVNPASPVISSRCPCLWKRLLFLFLEPDATMEVEKELRRGSQMVLAGIRAHQQQLQSSGATTPVSAGELLLLQAERWPSLFLLALMPYRRQLL

SEQ ID NO: 339848 - protein, 45 aa, Zea mays
  Clone ID: MRT4577_7310C.1.pep
GILIINRPRKTSVLIPFFAWTSRVHSTGGGKQSLQNMVRVQDPQH

SEQ ID NO: 339849 - protein, 162 aa, Zea mays
  Clone ID: MRT4577_73110C.1.pep
MAAQAAPPPPPEQKMMVAIDESECSHYALEWALRNLAPRRLILFTVQPFSPLSYLPAGSPLGPSVASPELIRSVTEHQRQLAQALVDKAKAICAEHGVDAETTIEVGDPKETICEAAEKLNVDLLILGSHSRGPIQRFFLGSVSNYCSHHAKCPVLVVNKKE

SEQ ID NO: 339850 - protein, 136 aa, Zea mays
  Clone ID: MRT4577_73111C.1.pep
LGPSRPAGVHSTSIRLLRPLLFVVLVSSHPQPQGEKGEARRRPGPQQPADRDLCSAQSIHGGRPLPKFGEWDVNDPASADGFTVIFNKARDEKKGGNGQDTDSPSKDPRTERVESYAAKPSTKKWFCCVTSSPTQS

SEQ ID NO: 339851 - protein, 80 aa, Zea mays
  Clone ID: MRT4577_73112C.1.pep
MAEESGRPLPKFGEWDVNDPASADGFTVIFNKARDEKKGGNGQDTDSPSKDPRTERVESYAAKPSTKKWFCCVTASPTQS

SEQ ID NO: 339852 - protein, 80 aa, Zea mays; identical to SEQ ID NO: 339851
  Clone ID: MRT4577_73113C.1.pep

SEQ ID NO: 339853 - protein, 53 aa, Zea mays
  Clone ID: MRT4577_73114C.1.pep
GRQAKKAWLGRQCLVWRSLVGPFSRASAAFSGGWHPIRLPFAARQAGRQQTTA

SEQ ID NO: 339854 - protein, 124 aa, Zea mays
  Clone ID: MRT4577_73115C.1.pep
PRGRPGPLLFVVLVSSHPQPQGEKGEARRRPGPQQPADRDLCSAQSIHGGRPLPKFGEWDVNDPASADGFTVIFNKARDEKKGGNGQDTDSPSKDPRTERVESYAAKPSTKKWFCCVTASPTQS

SEQ ID NO: 339855 - protein, 36 aa, Zea mays
  Clone ID: MRT4577_73116C.1.pep
IKKKKKKKKKKKKKKKKKKKKKKKKKKKYKKKNKKI

SEQ ID NO: 339856 - protein, 236 aa, Zea mays
  unsure (1)..(236): unsure at all Xaa locations
  Clone ID: MRT4577_73117C.1.pep
MRPSITVRYHTLHASNPTPRPADVIGDHVLDLPGFAKGDGFSGNPDAQKHADVFSQSSVNGFAALGRPVHRVVRSYLQDIFAKDTIYAQILKDNQKLLETALLKSSDVKNHVPLNIGDYTDFYVGKYHAFHVGCLFRGPDNALQPNYTHLPVAYHGRASTVVISGTPIRRPWGQILRPGNKVPDLAPCXKSDIELDMSMFICRENALSEPIPISEAEDXVFGYVLLNDWSARDVQA

SEQ ID NO: 339857 - protein, 75 aa, Zea mays
  Clone ID: MRT4577_73118C.1.pep
HHPLCAGLSTVYQSCSRHLWFWFRVGWSASLMLVAASHLVIKCKAGSGMCCIPFPLSVVLQSWLFGINGMHSCKC

SEQ ID NO: 339858 - protein, 80 aa, Zea mays; identical to SEQ ID NO: 339851
  Clone ID: MRT4577_73119C.1.pep

SEQ ID NO: 339859 - protein, 37 aa, Zea mays
  Clone ID: MRT4577_7311C.1.pep
GVRIFIYIYISNPNLFIKLRSRPIHNTEIILWVFCPL

SEQ ID NO: 339860 - protein, 97 aa, Zea mays
  unsure (1)..(97): unsure at all Xaa locations
  Clone ID: MRT4577_73120C.1.pep
IRGTELRLAFQACLKVEEFVDLILKATEPQMGLFNLYDDWLXTMSSYTAFSRLILILRALYGNNDRATQTRTVNKHCDEIMTCTTSNYETQTFSSET

SEQ ID NO: 339861 - protein, 80 aa, Zea mays; identical to SEQ ID NO: 339851
  Clone ID: MRT4577_73121C.1.pep

SEQ ID NO: 339862 - protein, 75 aa, Zea mays
  unsure (1)..(75): unsure at all Xaa locations
  Clone ID: MRT4577_73122C.1.pep
GYLGGCGGSIATIDVEYRCFSAGLXWATSNESLENAFAXYGEILDFMVITNRGTGRFGCYRFLTLSNKTSCFKVL

SEQ ID NO: 339863 - protein, 80 aa, Zea mays
  Clone ID: MRT4577_73123C.1.pep
MAEESGRPLPKFGEWDVNDPASADGFTVIFNKARDEKKGGNGQDTDSPSKDPRTERVESYAAKPSTKKWFCCVTSSPTQS

SEQ ID NO: 339864 - protein, 99 aa, Zea mays
  Clone ID: MRT4577_73124C.1.pep
IGYLEGRPGLCYLNPGRCSESRPNFVECTTTALQILDGTFCGRIAALTHLSDLAFRCPYFPDLCGHLTWSPLTPIQGSLGTPVNSTRPPPPTPAQMTTC

SEQ ID NO: 339865 - protein, 98 aa, Zea mays
  Clone ID: MRT4577_73125C.1.pep
LALAGEKRLKSLIFKRQIPPPLEPQGVPKPKVCFFGNKKAGDPLMGESPPPKIPQAKGGPSPWAPYLTGGGLVPVEIPRRGKAPTVCPGLHTPIVFEF

SEQ ID NO: 339866 - protein, 125 aa, Zea mays
  Clone ID: MRT4577_73126C.1.pep
RPFPCPNWLACAYKTGPGGGPAGTPREKRAGRGGGATVRTGGGPHHRGHPGDTGLRGGNSEPAPGTPPTTGAGSNGPGRGRHRPHPHPREPVTRPAGTGRGNVGPPRTHARGHPAGGGGWTPGAR

SEQ ID NO: 339867 - protein, 203 aa, Zea mays
  unsure (1)..(203): unsure at all Xaa locations
  Clone ID: MRT4577_73127C.1.pep
EPETRQLRRLVVEGXDLLGQLNXSDHLPGLXDSTCRAPSPMCDRLVPLVIRFVXRXIVDEHRARNHXSAAPTGVSYFTDVLLSLTGDNRLTDGDMIAVLWEMWFRGTDTVAALMEWVLAMLVLHPDVQDRVHDELDRVVVPDRLGTESDMGSLVYLHAGIXEELMMHPIGPADXWVRLDTSDVIVDDDLILAVTAVMVNMCRI

SEQ ID NO: 339868 - protein, 68 aa, Zea mays
  Clone ID: MRT4577_73128C.1.pep
TLTTVWIRFQPRLGLGPLHHGRSQLQCNMVSSLLLLDFLITCICCLCTLLEDSMVLPHNYLQARAPAD

SEQ ID NO: 339869 - protein, 107 aa, Zea mays
  unsure (1)..(107): unsure at all Xaa locations
  Clone ID: MRT4577_73129C.1.pep
LLHXLGEFHLVAQNITSQQLQQLMLSNLAAYSQQHQFLSFNQLAALNSTAYLXQQLPFIHLVVDYPQQFLTFNQLSTLNSAAYLQQHQLLPFIHLADVSPASFLTQQ

SEQ ID NO: 339870 - protein, 90 aa, Zea mays
  Clone ID: MRT4577_7312C.1.pep
VPVDLPHQFSLRGFFAFSLQLPSLCVCARVCLPPVSSQLPPPPLPSCLSAPLSPPLSPGLFGPLLWAQIFWGCCSPGSQAPNKENSIMEV

SEQ ID NO: 339871 - protein, 68 aa, Zea mays
  Clone ID: MRT4577_73130C.1.pep
TRPTHAYDESEHTFFERFFSPTKTFLGVLHKKEEAYYTLYLNTYLHIDLIKINLLQFLKTTSENPLVH

SEQ ID NO: 339872 - protein, 55 aa, Zea mays
  Clone ID: MRT4577_73131C.1.pep
MGEKRDKALKELMDQVAMKQPNSMCHGNKDNFWESQGFRFIASMSMLALVILAKR

SEQ ID NO: 339873 - protein, 82 aa, Zea mays
  Clone ID: MRT4577_73132C.1.pep
NTHNEPPSRGTSERIFTPHQWALAPQKEAIVGELYNSPSGGLKIGQHTGVLQDPQGRNPWRAEPQRGGKNHGASSNYHTIWL

SEQ ID NO: 339874 - protein, 199 aa, Zea mays
  Clone ID: MRT4577_73133C.1.pep
MAATSVKVAHLTTLALFSPTPNPFGPKSSKHRARAPPPISISMDPALVDPAHLQALMLACGHSCTLRLSPALSVSAVEPVDLSKLRTALAHSFVVVSVFCGARFFTHDREREGEGQRFLGLEIGLDLQGERRLVGFGRAVSDLGLTASVHDIVVHPLLQRRGIGQKIVNKITRPFFEACGFGDDMMGSTTMLYTRKTQK

SEQ ID NO: 339875 - protein, 218 aa, Zea mays
  unsure (1)..(218): unsure at all Xaa locations
  Clone ID: MRT4577_73134C.1.pep
MAATSVKVAHLTTLALFSPTPTPFGPKSSKHRARAPPPISISMDPALVDPAHLQALMLACSYSCTLRLSPALSVSAVEPVDLSKLRTALAHSFVVVSVFCGARFFTHDREREGEGQRFLGLEIGLDLQGERRLVGFGRAVSDLGLTASVHDIVVHPLLQRRGIGQKIVNKITRVLHSRGIYDISALCTAKERPFFXACGFGDDMMGSTTMLYTRKTQK

SEQ ID NO: 339876 - protein, 88 aa, Zea mays
  Clone ID: MRT4577_73135C.1.pep
GTLEAGRDSLSSLAATPLATETRSPSPALATSVCEMPRCYWDYCYIYLTHDSPSVRKNIMLDTNTRRMIETTTIYSMISKLKVLLINE

SEQ ID NO: 339877 - protein, 73 aa, Zea mays
  unsure (1)..(73): unsure at all Xaa locations
  Clone ID: MRT4577_73136C.1.pep
AKNGATEPARPRFPVPFPSCNNRCPYPQLXAPPGAPAGVLLPPLARNQRPRDVSACXLATARFLRGRGHVVGG

SEQ ID NO: 339878 - protein, 90 aa, Zea mays
  unsure (1)..(90): unsure at all Xaa locations
  Clone ID: MRT4577_73137C.1.pep
VCFDRRGYLRGESFPQFPPFSHFSPPSSTPRFNITMRERISIHIGEAGVQAXNACWELNCLGPGIXADRRMPRDKPFGGGVDVFGTFFSE

SEQ ID NO: 339879 - protein, 240 aa, Zea mays
  unsure (1)..(240): unsure at all Xaa locations
  Clone ID: MRT4577_73138C.1.pep
GSVTRIGKLLQKRDFQPDPNENEDLHVLAEAHTPEALHAAAGMAQKLLTPMHDVFCEHXRYHLRSACRCLNGTIRARMIFCRTCAEAGHRSXYACPNKXHTCKSDVQCKICGHGGHPTIDCPLKGTSAKKMDDEYHNFLSELGGESAPDSMNKSEGPMLSLTGSVGSAGASTGTATNPPWSTGDGAASTXSMVSRTDYDETNLYIGYLPPTKYDAWLVRLLSQFAEIVMTKVIKDRYTVQ

SEQ ID NO: 339880 - protein, 149 aa, Zea mays
  Clone ID: MRT4577_73139C.1.pep
AYPLVLGLGIGIRVSLLCWLVAAAVEGACEEHERGEVWLEAAGGLCAILYIPLASSPLLSCACLFHSFCYAIICLQASEVHASAVALCPCGEETNSQTSLAFHSTQLYCIVLVLKVSQALRFVCLRFLESVFGLIARFYRFSYMQAHYP

SEQ ID NO: 339881 - protein, 543 aa, Zea mays
  unsure (1)..(543): unsure at all Xaa locations
  Clone ID: MRT4577_7313C.1.pep
MSAAQLLRHSRKLRSLQNAVGCENFSFVRHFSSGSGSFIARENGIGKRTRGTRFSQHNQPAKQLETFSAGVNGTCTWRIASNCLTPSTVSWLRSLITSAVGALRQQTFMCHHKPPSVSXILAIGFAEKWLIPGSADGLCEFGSFMSATLSCDHRVIDGAIGAEFLKAFKGYIXTRLRCCCEVRNDDLTQSLSRCLDNEAXNVXRLKSSKPNSTEPXISPGLIRIIVXPGPKALLGSLARAMDGPKNERSQHGGERIFSSPLARKLPEDNNVPLSSVKGTGPDGRILKADIEDYLASVAKGGLREAFADPGLGYVDIPNAQIRKVTANRLLASKQTIPHYYLTVDARVDKLVQLRGELNPLQDASGGKKISINDLVIKAAALALRKVPQCNSSWMNDFIRQYHNVNINVAVQTEHGLFVPVIRDADKKGLGAIAEEVKQLAQKARDNSLKPADYEGGTFTVSNLGGPFGIKQFCAIINPPQSAILAIGSAEKRVIPGSADGQFEFGSFMSATLSCDHRVIDGAIGAEFLKAFKGYIENPTSMLL

SEQ ID NO: 339882 - protein, 89 aa, Zea mays
  unsure (1)..(89): unsure at all Xaa locations
  Clone ID: MRT4577_73140C.1.pep
PPCSQLATTNXQQQQFLPFNQLAALNPAAYLQQQILLPFGQLATTSPASFLTQQQVLPFYQQFVANPATLLQLQLLLPFVQLALTNPAG

SEQ ID NO: 339883 - protein, 201 aa, Zea mays
  unsure (1)..(201): unsure at all Xaa locations
  Clone ID: MRT4577_73141C.1.pep
MAATLLLRDVRRRKIASPLGSLGANLQTTCGGKYAXQWGNFARPFSAKVLEMTIMGLNRYTNNSCDAVMEGNNPIVIENADRAITTSSVVEFTQKVERHAATLAQCHEKTTLHNTFIETXMMIGRRFDDPQTPNYMKHRRPTTIVQRSHXGDAXVHTTHGKQYSPSQVDAFMLTMMRATAESYLEKSVSXVEITAPAYFND

SEQ ID NO: 339884 - protein, 87 aa, Zea mays
  Clone ID: MRT4577_73142C.1.pep
HASGLFSLRLRPTRAFTYVSSQPSRAVFLPVIRFCLARSESGCSSARSYSRSGLIVISAVSVCTRCSVCLLAVRFQGLLYQELSAVF

SEQ ID NO: 339885 - protein, 60 aa, Zea mays
  Clone ID: MRT4577_73143C.1.pep
KGKSKNFTKPKGSGFQGYKHLILTGTIVVQRKKTMRGAPAHWGFKTVYNSCPCPKKTKLF

SEQ ID NO: 339886 - protein, 150 aa, Zea mays
  unsure (1)..(150): unsure at all Xaa locations
  Clone ID: MRT4577_73144C.1.pep
PYALXVGDEELSDHLGAYMPKKIANVEVTLLIACQPQELXAIMTHNRCSATIAAHTESVIAVPLTPDGKSLTSGSRDTTDCCGDLSTQTSLFTCXGHIHRVLCIAWSPDGKHLVSGTKXXELMLWDPITRNQSCTPLMVHRKWITGESWQ

SEQ ID NO: 339887 - protein, 69 aa, Zea mays
  unsure (1)..(69): unsure at all Xaa locations
  Clone ID: MRT4577_73145C.1.pep
QFPFRTLKXHMGGVFQMNGRVQYTTPFQNICKIFHILTLTNYQKKLLIFHLDSISQQIFILIVKAIFFL

SEQ ID NO: 339888 - protein, 48 aa, Zea mays
  Clone ID: MRT4577_73146C.1.pep
ILLTVNQKAALNKNQSSTDIKEDSLLFAAFLKKDIKGPLFVGVVLKTP

SEQ ID NO: 339889 - protein, 67 aa, Zea mays
  Clone ID: MRT4577_73147C.1.pep
LGSQIDYETFSHNNITHILYISYRNILALYITVATHGHSASNTEAVKCRQRERELALSKETRIYTMC

SEQ ID NO: 339890 - protein, 99 aa, Zea mays
  Clone ID: MRT4577_73148C.1.pep
GKFHRWAFPWGLFRPWVKGAQLALLGGGGEPPGGGAQNPLAGKTPASPPLIGRAPPPVLPVGAHTEEAFPTLPFPTWARGPPEKGRLLPRRFNRLPKGE

SEQ ID NO: 339891 - protein, 117 aa, Zea mays
  Clone ID: MRT4577_73149C.1.pep
EIVLGRHTSLHLSSALFPFLAVPGLGSPLSQAVSFPPSYKYPDMDDDDDSPPPPPRRPAPPPLSPPHTPAPPTAAPAPTTTTTLTTPGSSTSTSASSTACIYIYLRAKVINRVPAYP

SEQ ID NO: 339892 - protein, 200 aa, Zea mays
  Clone ID: MRT4577_7314C.1.pep
VPCVTPINRLRGELNPLQDASGGKKISINDLVIKAAALALRKVPQCNSSWMNDFIRQYHNVNITVPVQTEHGLFVPVIRDADKKGLGTIAEEVKQLAQKARDNSLKPADYEGGTFTVSNLGGPFGIKQFCAIINPPQSAILAIGSAEKRVIPGSADGLYEFGSFMSATLSCDHRVIDGAIGAEFLKAFKGYIENPTSMLL

SEQ ID NO: 339893 - protein, 234 aa, Zea mays
  unsure (1)..(234): unsure at all Xaa locations
  Clone ID: MRT4577_73150C.1.pep
MDDDDDSPPHESAAAAAADLSLTLAPAPALAPPAPPPALPAVASDGGVATARVDGKDVRLFPCLFCNKKFLKSQALGGHQNAHKKERSVGWNPYFYMTPPHXSPMRRRRAPPPRRPPTRRAASSPRRTRPTCTPPCRRTRGRGRRRPRASCLPRARATPRPRTSSRPSSPAACGPAPPPLSPLHTPAPPTGAPAPTTTTTLTTPGSSTSTSASSTACIYIYLRAKVINRVPAYP

SEQ ID NO: 339894 - protein, 59 aa, Zea mays
  Clone ID: MRT4577_73151C.1.pep
ERFRADFTSASSSFVHTPVFISNMELFAQLALEPINSRITRHVTNLATVLMGIMSLIQG

SEQ ID NO: 339895 - protein, 310 aa, Zea mays
  unsure (1)..(310): unsure at all Xaa locations
  Clone ID: MRT4577_73152C.1.pep
GFLPSWFGSAPWPMGSGGFAAAVAACPSAAEAFLKYYGIVSGGTSAESRQALVELSLAIDGIEGMRDVIFADIPKLIPFIDLEDMSLFSCFYDFVFFICREXGQKSVTIQRAVAAWRIVLSGRFRLLDRWCNFVEKYQRHNISEDTWQQLLAFSRCVNEDLEGYDPRGAWPVLIDDFVEQMHRIYHSTDCSSAMESQCNISSTLKGLDPQPGSKRKCPHLKSNEEDVELSDSFTRSVHLTPIKRVKESHDARYGAGESAKTTHFSNSSSGGYHEDMNLHNSRGCLQNSPCNVEDALSKGFEGCISMKCPF

SEQ ID NO: 339896 - protein, 97 aa, Zea mays
  Clone ID: MRT4577_73153C.1.pep
LTLTNTVTVAYTHITFAGGPNLTHVKQIVATKAVAPVAVTEAPTCRAYETCPTTKQTEHRKNLTPASELPNPQPRAGNLVRLPNGNQIQTTNLLTLT

SEQ ID NO: 339897 - protein, 227 aa, Zea mays
  unsure (1)..(227): unsure at all Xaa locations
  Clone ID: MRT4577_73154C.1.pep
DGDAASPRSVAPLCSLPHARHTIHALSLPFPFGLSSGLLFSSRRIRKASGTHGASKKRLPAPDPVHQPKPPAPDRVAVWHDNGNVTHALDADLFVLSRLSQPGKQAQMSRDGAEPLTVTAKLLQTVGSDPGRRALDPTAHRRGASXVVIRFLWPRHNFLIICRDRQHIFETSNPVTAVHCLSVKQTGCWLSQFPLDKKKKNRASKRPASCLQKLCCCLSNSLQHRNF

SEQ ID NO: 339898 - protein, 100 aa, Zea mays
  unsure (1)..(100): unsure at all Xaa locations
  Clone ID: MRT4577_73155C.1.pep
GFXPXXXXGSWAFXXXXRLFXFALXGXXXVWLSFLVVGFAXLLGLFXSXAFGXXSSVRXAVSGWXXPFLPXXFXXCLPALLGLPSLFVGGFFCFFFLFCS

SEQ ID NO: 339899 - protein, 187 aa, Zea mays
  unsure (1)..(187): unsure at all Xaa locations
  Clone ID: MRT4577_73156C.1.pep
MPEVDAPADPHPLEGLLHGPQLPPFLSKTHQLESEPXLHGVISXGAADNSFTGCDPSTFARDGLPHNFQHNHFSTFARXINTYGLRKAHADTRQIAREDLLQDTKHLLKTMVRRRTSPRKQGGVLPGLSSVESSLDPELSRXDEREEPLLEEVARVTQEHLLTIDAMNTLNHWLVSAEDRQMXMVSF

SEQ ID NO: 339900 - protein, 91 aa, Zea mays
  Clone ID: MRT4577_73157C.1.pep
KWYVVSRQKTRGVSNDWATYQEPVSGFSNNSSKSYSSRDEVVNAFFYNKQAISPLFQNTEEIAVKPEQSIWCVKDPTTFDVIKMFCIMCFG

SEQ ID NO: 339901 - protein, 124 aa, Zea mays
  Clone ID: MRT4577_73158C.1.pep
PPPPPWIGTCERRGRNRALRVLVQFGFAGHSPGFLRGTGKKKVGGGVSVPSGWGFWDRRRRVKGNIPRPFGSASRKFRMSPGPSKRGGFFNWTPKRCPRLTSAEAFVKNYKNGKKRVYGYDEKV

SEQ ID NO: 339902 - protein, 313 aa, Zea mays
  Clone ID: MRT4577_73159C.1.pep
MMTSHSSVLVAGLVCLSAAVVVPMPWLAAGESSIGGAECKRSCGGVEILSISPEQGEAKVLLPISSYCYDSASRTMVADEWHWSLGANYRFSSTANKFTVVGCRALAYIGDTRKKRNNVAENNYLTGCVSTCFSRTISLNTCSGMGCCQTVIPNGPPYFHVWFDAGFMDISGIDGGADLFGRCSFAVLMDSSNFTSWTSSSSNISSPEFVNNVSSLLQFFNSSRGGKAPVVLDWSIGEDDCKNPAGYACRSVNSFCSSAASGRGYICKCNQGFDGNPYLPNGCQALFRRRSDDAVGDLSLWFPFRLGHLGEGK

SEQ ID NO: 339903 - protein, 543 aa, Zea mays
  unsure (1)..(543): unsure at all Xaa locations
  Clone ID: MRT4577_7315C.1.pep
MSAAQLLRHSRKLRSLQNAVGCENFSFVRHFSSGSGSFIARENGIGKRTRGTRFSQHNQPAKQLETFSAGVNGSCTWRIASNSLTPSAASWLSGSFSCGQVVSARPFSSSADLPPHQEIGMPSLSPTMTEGNIAKWLKKEGDKVSPXGEVLCEVETDKATVEMECMEEGYLAKIIHGDGAKEIKVGEVIAITVEEEGDIEKFKDYKPSSSAEPVAPAEPKAEPEPSQPKAEEKKPTQAPETKTPKIEEASQSGDRIFASPLARKLAEDNNVPLSSVKGTGPDGRILKADIEDYLASVAKGGLREAFADPGLGYVDIPNAQIRKVTANRLLASKQTIPHYYLTVDARVDKLVQLRGELNPLQDASGGKKISINDLVIKAAALALRKVPQCNSSWMNDFIRQYHNVNINVAVQTEHGLFVPVIRDADKKGLGAIAEEVKQLAQKARDNSLKPADYEGGTFTVSNLGGPFGIKQFCAIINPPQSAILAIGSAEKRVIPGSADGQFEFGSFMSATLSCDHRVIDGAIGAEFLKAFKGYIENPTSMLL

SEQ ID NO: 339904 - protein, 63 aa, Zea mays
  Clone ID: MRT4577_73160C.1.pep
LFPPELHAGEEVPELGALVKLVLHLRLVSGVPVTMRIASWVAGEPRVVRDQDPLGLVRCCLRH

SEQ ID NO: 339905 - protein, 84 aa, Zea mays
  Clone ID: MRT4577_73161C.1.pep
MGFVGDTMESIRSMQIRQVLMQIISLGMIVTSALIIWKGLIVFTGSESPVVVVLSGSMEPGFKRGDILFLHMSKDPIRTGETIY

SEQ ID NO: 339906 - protein, 56 aa, Zea mays
  Clone ID: MRT4577_73162C.1.pep
GEGFSLMVKKNRGWENRGKVTFGRGFPPFQRFKAFAPIDGKTPALKKFNCYKGLLF

SEQ ID NO: 339907 - protein, 180 aa, Zea mays
  Clone ID: MRT4577_73163C.1.pep
MGFVGDTMESIRSMQIRQVLMQIISLGMIVTSALIIWKGLIVFTGSESPVVVVLSGSMEPGFKRGDILFLHMSKDPIRTGEIVVFNIDGREIPIVHRVIKVHERQDTAEVDILTKGDNNFGDDRLLYAHGQLWLQQHHIMGRAVGYLPYVGWVTIIMTEKPFIKYLLIGALGLLVITSKD

SEQ ID NO: 339908 - protein, 86 aa, Zea mays
  Clone ID: MRT4577_73164C.1.pep
LFLLLNCPPREGGEGINAGRGREISSCEAARADLREQVTWGHQQRRHPSSFFFFFTKPWGGGGRTPKINPIFRDGGAVRTSHSMPI

SEQ ID NO: 339909 - protein, 156 aa, Zea mays
  unsure (1)..(156): unsure at all Xaa locations
  Clone ID: MRT4577_73165C.1.pep
MIPSAALTSRRTRGPREEEPAXERXDKDPTPKNPKARAWRLPAGKXQRRSSEGEEGXTKKVKNAVHTYLIXSFKVXLRWWHPCIGLSCKAMSIMNSFINDIFENLAAESAKVLRYDEKATLTSREMHTSERLALPGELGQHAXSQGSKGGTKLTSS

SEQ ID NO: 339910 - protein, 54 aa, Zea mays
  Clone ID: MRT4577_73166C.1.pep
VFSCSCYLRIIELVRRVSVQWLRCAMISVRQYLLLASSPNRAHKEANLVFLVAS

SEQ ID NO: 339911 - protein, 49 aa, Zea mays
  unsure (1)..(49): unsure at all Xaa locations
  Clone ID: MRT4577_73167C.1.pep
CXHRRPTTSNEWIITETRLSRAEALMQQSHARISRRRLRRDKLKRFTNF

SEQ ID NO: 339912 - protein, 142 aa, Zea mays
  unsure (1)..(142): unsure at all Xaa locations
  Clone ID: MRT4577_73168C.1.pep
MDAIVGVILGTGNAPPLISAVCNDALLTLYVITLERVIFTKEKSLPMYHYAARNSCVHYIAGRATLNSISAAQRMLYTTAAXTNCMECIEKDKVGDRIXESTQAAGXVTAHYYDDETASTGACARCLDGDERSLIADLSEVN

SEQ ID NO: 339913 - protein, 121 aa, Zea mays
  unsure (1)..(121): unsure at all Xaa locations
  Clone ID: MRT4577_73169C.1.pep
KTGKKAKRGKKKXPATAADNQHDTPTKTAEKGPQQTAXXRHKGATGETKPPPKGPNHQNKRGXNPHKKKGXXAGKKKKKPRQAGDNQDQDNAKQXNERGTTGNDSQXARIVLSVVAAATTL

SEQ ID NO: 339914 - protein, 57 aa, Zea mays
  Clone ID: MRT4577_7316C.1.pep
RQQCCQQFRHVEPQHRYQAILGLFLQSILQQLPQSGQVSVNDTACIAHYLTAICIIN

SEQ ID NO: 339915 - protein, 155 aa, Zea mays
  Clone ID: MRT4577_73170C.1.pep
MGNALAGRRRAAKVMTVDGATFRYKTPAAACAALRGHPGHQLLESEEVRRLGVRARPLDRDAPLKPGKLYFLVQIPRGGAGDGDDPRAPRKTWSGALRVGARERLEGLMLSRRTVSDVSSILPPPAAASSPSSVEVGADGAVRLRMRLPKPTWRG

SEQ ID NO: 339916 - protein, 340 aa, Zea mays
  Clone ID: MRT4577_73171C.1.pep
ADLTSYDYDAPIKEHGDVHNAKYKALRRVIHECTGTPLHPLPANIKKASYGIMKLQKVVSLFDIIDNINDPLKVSVSEHPLYMEQIGQMFGFLLYMSEYQGKLPSSILSIPKVHDRAQVFVSCSAGVRTLRYCGVIERWSNKTLEIPNLRCSSKTSLYILVENMGRVNYGPYIFDRKGILSPIQIDGITLRHWKMYPLALNSLDILPKLQLITQIPYAGASKMSIHGDSEKILQDSSCCSNESTSAEPAFYEGHFLIDNETELRDTFISFRGWNKGVAFVNNFNIGRFWPARGPQCTLYVPAPILRPGDNIVVIFELHAPNHELTIDFTTDPDFTCGPEQ

SEQ ID NO: 339917 - protein, 240 aa, Zea mays
  unsure (1)..(240): unsure at all Xaa locations
  Clone ID: MRT4577_73172C.1.pep
WGLFCQMFGFLLYMSEYQGKLPSSILSIPKVHDRAQVFVSCSAGVRTLRYCGVIERWSNKTLEIPNLRCSSKTSLYILVENMGRVNYGPXYIFDREVFEIQGMLAPIQIDGITLRHWEXIKMSIHGXNSEKILQESSCCSNESTSAEPAFYEGHFLIDNETELRDTFISFRGWNKGVAFVNNFNIGRFWPARGPQCTLYVPAPILRPGDNIVVIFELHAPNHELTIDFTTDPDFTCGPEQ

SEQ ID NO: 339918 - protein, 178 aa, Zea mays
  unsure (1)..(178): unsure at all Xaa locations
  Clone ID: MRT4577_73173C.1.pep
LMLIGLFEKGATKARLPQCXQSPXASLLAACLSXSQSSKGDNPRDQPYRKQQALVTGXTIITLDPLXQPEWLLQQLPLIHMVAQXIRRNNVQKLVLAXLAAYSEWHQFLXLNQLATLNSGVYWQHQLPFKHVAGVYPXQFVPFNQLAALDSAGHLQNDQLLPFSRVGDMSPAALLTQQ

SEQ ID NO: 339919 - protein, 50 aa, Zea mays
  unsure (1)..(50): unsure at all Xaa locations
  Clone ID: MRT4577_73174C.1.pep
QSLVFIIPSFVCGRSCYCVYCSALLACAHISIKLVPSCYFXFCKKKNVIF

SEQ ID NO: 339920 - protein, 51 aa, Zea mays
  Clone ID: MRT4577_73175C.1.pep
PPCAVYLYIIGDTFVRSIYTRQGLIYQFSITNHKLYALPSSRHSLRPRSGH

SEQ ID NO: 339921 - protein, 75 aa, Zea mays
  Clone ID: MRT4577_73176C.1.pep
RGSRRPLLGLLEYGAGPREFYFLGGIPQKKKIFVSNPGNPGVHLKRALPRNSIRGFFEHPLIHDHVRNLFPKKNF

SEQ ID NO: 339922 - protein, 124 aa, Zea mays
  Clone ID: MRT4577_73177C.1.pep
NNTPVFFLRDPTKFPVFIHTQKRNPQTNLKDATMFWDYLSTHQESAHQVMHLFSDRGTPYSYRHMNGYSGHTFKWIKPDGTFNYVQIHCKTDQGNKTLTNEEAGELAKSNPDWHTQDLFQAIER

SEQ ID NO: 339923 - protein, 102 aa, Zea mays
  Clone ID: MRT4577_73178C.1.pep
TSPTLFSRHQNRTQHSQLIKTGKWGLRDTYHAGGRGHGAREPPRPSALLGRRDLQPQAGNGSLGIKGLSGCPPPTATEALRPGRSLSIGFPTLTCVLAPPLL

SEQ ID NO: 339924 - protein, 81 aa, Zea mays
  unsure (1)..(81): unsure at all Xaa locations
  Clone ID: MRT4577_73179C.1.pep
DPLVRGFQSLQPLSNNKDNDEIFIKLFYDKDDKKENAXLNERAKNSVIINKFLKPTEGYMYYGRLHRLMLRDHRHTFRCLY

SEQ ID NO: 339925 - protein, 393 aa, Zea mays
  unsure (1)..(393): unsure at all Xaa locations
  Clone ID: MRT4577_7317C.1.pep
MQIKMGDGCGAGRFFHCYKRGVDRVFVDHPLFLERVWGKTEEKIYGPVAGTDYRDNQLRFSLLCQAALEAPRILSLNNNPYFSGPYGEDVVFVCNDWHTGPLSCYLKSNYQSHGIYRDAKTAFCIHNISYQGRFAFSDYPELNLPERFKSSFDFIDGYEKPVEGRKINWMKAGILEADRVLTVSPYYAEELISGIARGCELDNIMRLTGITGRDKYIAVKYDVSTAVEAKALNKEALQAEVGLPVDRNIPLVAFIGRLXPGKVRAVVKFNAALAHHIMAGADVLAVTSRFEPCGLIQLQGMRYGTPCXLSVDCNVVEPADVKKVATTLQRAIKVVGTPAYEEMVRNCMIQDLSWKGPAKNWENVLLSLGVAGGEPGVEGEEIAPLAKENVAAP

SEQ ID NO: 339926 - protein, 41 aa, Zea mays
  Clone ID: MRT4577_73180C.1.pep
RVHSRLFTNESDRTMHSQMVPQALQYLGDSAHQSLEQQPSS

SEQ ID NO: 339927 - protein, 135 aa, Zea mays
  Clone ID: MRT4577_73181C.1.pep
DKAPVQIRTRKFIRNVLLGRRQCIVDVIHPGRANVSRSELQEKLGQLFKVSETNLIYVFGFRTAFGGGSSTGFALIYDSVEAAKKFEPRYRLARNGLAKKREGSRKQIKEKKNRQKKVWGVGRRIARHKAKKNAD

SEQ ID NO: 339928 - protein, 118 aa, Zea mays
  Clone ID: MRT4577_73182C.1.pep
RTLPATRAHLAPWRCTATPRSQTSLPLCRRAWLPCVPAPTVLRARKGPKEQDGMVVTWSGQQHSGINSSLKVDKASELLLRATTTTKNRTDGRTVGTPSRSRLILAPTRPPTRPPTRP

SEQ ID NO: 339929 - protein, 86 aa, Zea mays
  Clone ID: MRT4577_73183C.1.pep
RPGRPIPSNLVFAAAPVCFPVIMAAAAAAKAVRGRPSARPRRSAPPDRHSGLCVTGNSSRKISVHWAVGRYAVGSPVHEQLPSQGN

SEQ ID NO: 339930 - protein, 41 aa, Zea mays
  Clone ID: MRT4577_73184C.1.pep
PLVLRRSQLYAMPSVARCFRASHSRAPGILSKQVLLVVLQR

SEQ ID NO: 339931 - protein, 98 aa, Zea mays
  Clone ID: MRT4577_73185C.1.pep
AHFCEKPPSVSYSILESVSKAKFAAGSVVSFKCMEGFVLNTSAKIECMRGGQWNPSPMYIQCIPVRCGEPPSIMNGYAMWSNYSFGAMVAYSCNKGFY

SEQ ID NO: 339932 - protein, 97 aa, Zea mays
  Clone ID: MRT4577_73186C.1.pep
TQKLRAAPFRGSKLPSARGRRLHLVLAAQHFNYPGRPFTTAVLGKSLPCPPFITLGATSTFPLAVFNPMAHSHRLLLGWNPLGGEGVAPYQGHQHGG

SEQ ID NO: 339933 - protein, 50 aa, Zea mays
  Clone ID: MRT4577_73187C.1.pep
GLGLLHRSSLGPKLQWILAGPRYAHRQKFISQYARGLLARVVASPGDSAA

SEQ ID NO: 339934 - protein, 54 aa, Zea mays
  unsure (1)..(54): unsure at all Xaa locations
  Clone ID: MRT4577_73188C.1.pep
TQFRYTQTPSKVLYLENMPWQCTEEELVELXKPFMRVVNTMCSDGDNRNQATGE

SEQ ID NO: 339935 - protein, 67 aa, Zea mays
  Clone ID: MRT4577_73189C.1.pep
MASMKVTWVVVIMCMAVVGAPMMAQAMTCNDVTVNMAQCLSYLMQGGTPSTLCCSGVKNILGSAVTT

SEQ ID NO: 339936 - protein, 82 aa, Zea mays
  Clone ID: MRT4577_7318C.1.pep
LIYNLDLPYRSGHHAYSGPSSTPIITSSNLLFNLRNLFYLHAYQASIINSYDPRLDSNSYSELDTIQYRSYIALGSYHLVII

SEQ ID NO: 339937 - protein, 147 aa, Zea mays
  unsure (1)..(147): unsure at all Xaa locations
  Clone ID: MRT4577_73190C.1.pep
MTFKRRNGGRNKHGRGHVKYIRCSNCAKCCPKDKAIKRFQVRNIVEQAAIRDVQEACVYXXYVLPKLYAKVHHCVSCAXHAHIVRVXFRXKRXDRXPPERFKRREDTPAXDKGGPRPGPWWLLLQDPSSTQPVAAPPIRGLSFFDRC

SEQ ID NO: 339938 - protein, 73 aa, Zea mays
  Clone ID: MRT4577_73191C.1.pep
LEPDESLWYTLTGLDTQLHNNTSAYNKQSLVHLPGHKPYKEYCAIGSSISLFRSRYYVIKIIRLTETKVFFLY

SEQ ID NO: 339939 - protein, 98 aa, Zea mays
  Clone ID: MRT4577_73192C.1.pep
ARHPPNTSPGGNITASVSFQLPRLASMSSRTSAPLLHDGAMYLARNILCYHPSPKRLISPHSPPALPQSGARGAVLETGEWRRRRLELLLLLAHAVSD

SEQ ID NO: 339940 - protein, 159 aa, Zea mays
  Clone ID: MRT4577_73193C.1.pep
MGHGECAGRAGLLRLQDSTSCAAAMTFKRRNGGRNKHGRGHVKYIRCSNCAKCCPKDKAIKRFQVRNIVEQAAIRDVQEACVYDGYVLPKLYAKVHHCVSCAIHAHIVRVRSREKRRDRKPPERFRRREDRPAGGQGGPRPGPGAAAPAPAPAPVAARP

SEQ ID NO: 339941 - protein, 144 aa, Zea mays
  Clone ID: MRT4577_73194C.1.pep
SILLPVLSPQTFKRRNGGRNKHGRGHVKYIRCSNCAKCCPKDKAIKRFQVRNIVEQAAIRDVQEACVYDGYVLPKLYAKVHHCVSCAIHAHIVRVRSREKRRDRKPPERFRRREDRPAGGQGGPRPGPGAAATAPAPAPVAARP

SEQ ID NO: 339942 - protein, 75 aa, Zea mays
  Clone ID: MRT4577_73195C.1.pep
TFLRWCLTLPDDSWLTVTPSTQRSGVPGDTAPEGTLSLDVRHAPPRGAPSILPVSNLAQYLATLIDHRAFLGSMI

SEQ ID NO: 339943 - protein, 62 aa, Zea mays
  unsure (1)..(62): unsure at all Xaa locations
  Clone ID: MRT4577_73196C.1.pep
EVALDHCSAFWKRNPRVLVPLEGIGKYEVLRINGAPEGLLSPVIVWAHPTFRGPPPVXSPPR

SEQ ID NO: 339944 - protein, 49 aa, Zea mays
  Clone ID: MRT4577_73197C.1.pep
NPILTNHYLNLYPFLFYTPNKTPSMFTKTFLLKNFHLIQSKVFKIISTF

SEQ ID NO: 339945 - protein, 155 aa, Zea mays
  Clone ID: MRT4577_73198C.1.pep
MSLVSGEKSNFQYIIRLLNTNVDGKQKVMYALTKITGVGRRYSNLVCKKADVDLNKRAGDLTSEELERIVTIIQNPLQYKIPSWFLNRQRDIVDGKNSQILANGVASKLREDLERLKKIRAHRGLRHYWGLRVRGQHSKTTGRRGRTVGVSKKKG

SEQ ID NO: 339946 - protein, 83 aa, Zea mays
  Clone ID: MRT4577_73199C.1.pep
VVVVAPQAPFLPLSSSPVTSSKSAQTLDVASLFLGRLSRAVLPPVAVGLEEAVTGAASTSTGSTLLPVAVPIPNKANSSKRSL

SEQ ID NO: 339947 - protein, 162 aa, Zea mays
  Clone ID: MRT4577_7319C.1.pep
LVLLGTGKKKFERMLMSADVLAVTSRFEPCGLIQLQGMRYGTPCACASTGGLVDTIIEGKTGFHMGRLSVDCNVAEPADVKKVATTLQRAIKVVGTPAYEEMVRNCMIQDLSWKGPAKNWENVLLSLGVAGGAGPLISRVVQRCWDIFLYMLFRLCDMDKYV

SEQ ID NO: 339948 - protein, 1980 aa, Zea mays
  Clone ID: MRT4577_731C.1.pep
MRSRSRAALRRRSLALGRRSSSAATRQPSRPAVLPTAPAPAPSSGGIAAAATPVLTIASTSGLEAGEGNYHSFPLTVSPTKGDFCLQEQIKDALPHVFHSRRDKVPSDLDLQKHAATANGTSLLAASASAPKSTRKFYSETSSIGDPVDLLAPARIPVLEKRKWAVGSSPVFPPDCNEVDFNFNASNATSHQLAVDGGHDLRSYGRLHFGQHKADAPVLEEGGWSVVRPKFWWRKTVENLKRSPTQQQHDTKGTSTFKTKLQGKCYNCLSPDHFAFRCSALTRCWQCLHFGHRARACPGIYYRSRHNSTPPQPEPVQHSMQYTSNVNSRHQQHQRQLNSLLKEQKQAPEPVLNFSPVQHNKSYLRAAQEGQNMEARYPGDPRARPSRAFCAVSATGSIRRRRDDLISKAVVCSFDGNSHEVDTIVAGDMLREKFNLCHGQYQLVKHFPEQFFIIFPDARTKQWAIDRRSVSYRGREFHFGDWSEESYARKTSWEFRVKVRVEGIPVHCWGEEVASRALGRSCTIHYVQERSRRRERTRSFDLWAWCSDPCEIPKEVWLTVSEPDPELPPISTPLPLVGAHHAEPTDLKKGHVYTLRNHIEVVEDLCFIHGRNTRGGPMNRKPRREFVWSYGVSDSAGEKRERSEEFRGRETMRRDWDHDDDEDFHQHRHQGTRRQRSLSGWARSSRCRGGVEDCYSSSGRYRPSTPFRRRGMGMGQPGRWTPKIKNKKVSFADPVITAIWPTDVSKGHISAENSISLGGMDLGTQAMEEYQCSAHPKVSVPIASYSVNALIHSWSTRGTDSAPVPIISGSHLANETIQGDLCIQNVQVESNFSNSEPNSQRNVVANEDRQCILPTNEVPPIGHESSTHSTPRPLENQLNSNDRLQIFIESITNTPEPPLILSPPNSNTLATSPVLGGSDNLDANVTINAGTPAIQYQGSSASISNNHVNSFEQIEGLFSRPLNKDQMEWRNGYYPMNTNCCIFSWNVRGLNDPAKRESVRQTILSTHATLVCLQETKIMNWTNDLLKDTVGYKLAKQTAHLPSIGASGGILIACDEDFFDITPVTYASTYSLSVRLLELDLIGKKFTWSNEQDDPTMSRIDRLMATTEWHGLYPAANLQALCSMTSDHSPLLMQGHSPCNFYKGFRFESYWVHIDGFKDVVQQAWTTTVNSSDAILRLHVKMVRTAKALKAWRRRTVGNIKVQLAIIKIVLTMLEKAQENRTLSSEELDFRRRLKIKILGLAGIQLSIARQHSRQTWVRLGDANTNFFHLMANHRKRKNFIRSLNCGDCLLTSQEDKLREAHRHFLEILGTRGGRTSVVRWENLGYSPFELSELDTMINDDEIRNAVMGMHSEKAPGPDGFIGLFYKECFEVIREDLSKAINDFYHHKCKSLHLVNEANIVLLPKRENPDRIDLFRPISLINSCMKIITKIMATRLAPRMNEIVSTTQNAFIQKRSIHDNFLYVQKVIKKLHKSKQAALFVKLDISKAFDSLNWAYLLDVLKALGFTQKWRDWIATILGSSSSKIIINGQQTKEIKHMRGVRQGDPLSPFLFILAMDPLQRMIERAAHEGLLGQVLPNGAKFRCSLYADDAGVFVRADKLDLKVLKRILEAFEWCSGLKINFEKTEIFPIRYPESLWSNLMEVFPGKYSNFPGKYLGLPLHFRNIKRIEFQPLIEKINKRLAGWKDVDLFNASTIVTIGDGKMADFWRSSWIQGQAPKNIAPTLFMKAKRKNISVCQALTNNRWMHFCSPYTHEDEIKEFISLWQGSRVPCQSTGLRPDLNRGENGRKQPKAAVYFRTWRGHLQNLLGYALSVYCVYKMLKSLQSAVFKKSGSVDPVTITITIFLRHFDIGIDVALLSQYISLMFIGMLVVISVRGFLANVMKFFFASSRVGSRSTTNVVLVLSEIMARYFISSILLIRKSLANEYRYSGDHYCGVLGGDIQFDFYHRWFDAIFLASAFLSLLLISAQYTTRQTDKHPID

SEQ ID NO: 339949 - protein, 97 aa, Zea mays
  Clone ID: MRT4577_73200C.1.pep
KKKNLLQDQLAKKGRAERIWFFKGIKPPPFKITQITSRWKAGGLGCNFSPFNFWGGMFMGWVFLGLLVPWLAPKGACFPFIKLFCLSTAPFFSPWFG

SEQ ID NO: 339950 - protein, 135 aa, Zea mays
  Clone ID: MRT4577_73201C.1.pep
MAEKFDHLEEHLEKFVENIRQLGIIVSDFQPSSQAGLNQKLNFIVTGLQDIDKCRQQLHDITVPLEVFEYIDQGRNPQLYTKECLERALAKNEQVKGKIDTMKKFKSLLIQELSKVFPEDMAKYRSIRGEDHPPS

SEQ ID NO: 339951 - protein, 195 aa, Zea mays
  unsure (1)..(195): unsure at all Xaa locations
  Clone ID: MRT4577_73202C.1.pep
RGPAGAGEKXXXKKKKKKKKKKKKKKKKKKTYPGSRRKKVPETQSRGPKGGGAGNNERGQRHHLHLVLLGTSPVGSRVPGPVPPGIPTTPSASAWASPLQLQGSARGGWGTREPLLLHIQGGGNPVLGPGPKEARRRRLEFGHEGGGGGRRFRPDQGEGGGVVGGGRLGVGGLLLRPHAPGARARPAVGHAPGAR

SEQ ID NO: 339952 - protein, 93 aa, Zea mays
  Clone ID: MRT4577_73203C.1.pep
QPCTNCRSMRDTTKLICYLRCSANPSRRRSGTRNGSRAAGVDRPTSSRAQGLGVNKQEALLTWIFGNGTRAAGPNEQVSSRAAGARTDRRAGG

SEQ ID NO: 339953 - protein, 89 aa, Zea mays
  Clone ID: MRT4577_73204C.1.pep
TRHEGLSLHQTDAQGLRSRGTRRTGSLGRQRLMFDSSKLENGSQSRRTRARVLGSCSGEVDGTTSADGAMAEMSGVLGGSWLKAGCPGR

SEQ ID NO: 339954 - protein, 132 aa, Zea mays
  Clone ID: MRT4577_73205C.1.pep
GSRGLRGTGASPASPRLTSGQASVGVSSRLLRGDRSSVDHDRQVPTLLKILINIRKHQIAMQPVVRGRGWRLCKPCSEKVSNVCYLRLWTASAHARRPARSSVGGAPASCSALPDRPLSWLPVWSLDDSGAP

SEQ ID NO: 339955 - protein, 52 aa, Zea mays
  Clone ID: MRT4577_73206C.1.pep
FYPIHFLSIRINLGYPIQLSSVPLNSVSNYSFLFPQKKNNNEKPSTLRCYHC

SEQ ID NO: 339956 - protein, 62 aa, Zea mays
  Clone ID: MRT4577_73207C.1.pep
DAKANMGLANLCPALLEANFAVIIISETNWFYLNGVSMAYSLRRLNKDEVSVMKPPEQQHKD

SEQ ID NO: 339957 - protein, 64 aa, Zea mays
  Clone ID: MRT4577_73208C.1.pep
MLGKLGSKSCGWTISWGRSKMPYELNFGSGNVYAAHLGDVQILEAAAGKMIYGMVNCSRTRLLL

SEQ ID NO: 339958 - protein, 79 aa, Zea mays
  unsure (1)..(79): unsure at all Xaa locations
  Clone ID: MRT4577_73209C.1.pep
NHELVRTPTLVKSALVQVDAAPFKPWYLPXYGVDLGRKKKTPAAKKDNAEGPEVEAAAEETKKSHPVPRKLEKCKEGRT

SEQ ID NO: 339959 - protein, 48 aa, Zea mays
  Clone ID: MRT4577_7320C.1.pep
GDSSSSIWISKAGIALNGQFIKLVSWCGKECGSSNRVVDLIRRMFKPQ

SEQ ID NO: 339960 - protein, 131 aa, Zea mays
  unsure (1)..(131): unsure at all Xaa locations
  Clone ID: MRT4577_73210C.1.pep
SVRPAYAQRTRSVRPASGNIQSGSHSNNRATQATNQSAILMISAHCTCDANXTITPQGSQAPKANLLTPYVPTSKARMCENPAIQPYTLQQAIAASNTPGSPLETKQSPALPTMQTAEQTSRAHQPPQLAL

SEQ ID NO: 339961 - protein, 56 aa, Zea mays
  Clone ID: MRT4577_73211C.1.pep
LWGLYKVYQSPTPGGKLGSLQGGAHGFKGACIYLSPFSHPGPGNTRGGECPCHAFN

SEQ ID NO: 339962 - protein, 75 aa, Zea mays
  Clone ID: MRT4577_73212C.1.pep
IQKPYAKLWWRGPLIVPSIYIIVLFLNNIHYVFILNCYYVPLLLQTCYGYTCFFVVLQIYNIFLPFHIKDKSFRC

SEQ ID NO: 339963 - protein, 35 aa, Zea mays
  Clone ID: MRT4577_73213C.1.pep
SSDRYLIHGYTYVVFVRDVARCYWNRSPDWVSERS

SEQ ID NO: 339964 - protein, 62 aa, Zea mays
  Clone ID: MRT4577_73214C.1.pep
SLFFFLRGAFYGQRYLKNGRQHNSNFSYLVLCARTIILEFGNFLLNERGVVLHFFNYSSLSF

SEQ ID NO: 339965 - protein, 119 aa, Zea mays
  Clone ID: MRT4577_73215C.1.pep
PNPANTAPRTPTAGKPRTTKTRPPPGAPENSTPNGHNHRRQHRKEPSRDTRKHTPIGSTSMKPYTKPTNTEGGAHRQQPVSTARTARTTTPDRKNRPTVPPRPPTSSPSTTAQPPPRDT

SEQ ID NO: 339966 - protein, 103 aa, Zea mays
  Clone ID: MRT4577_73216C.1.pep
TVVVQSISTIKRHAHFINRSSNPAKAANTKTNFILHNTIQTKLKFHLKFCFFNDISDQGSMEAVTQIKGTTFQGSKLYCGNEHAIKMLKSDELLTNLCQANII

SEQ ID NO: 339967 - protein, 42 aa, Zea mays
  Clone ID: MRT4577_73217C.1.pep
YLGNNCGDCLNWQAKWNALKNLSKISWQAFPVLVNQRPTKVC

SEQ ID NO: 339968 - protein, 106 aa, Zea mays
  Clone ID: MRT4577_73218C.1.pep
CIMFEKSPLSLSSCLSFPPPIDTASYTAGERGSATTGLLPRPSATSSTGLLPGLSATSANNPQLLFHNPHNFFKSHNTLRLFSMGRFHICVSKMPHKQERNEIFVE

SEQ ID NO: 339969 - protein, 72 aa, Zea mays
  Clone ID: MRT4577_73219C.1.pep
VRVGVFDGSVGDILWFLLCLQAVSSLVKIWSAGIMVYPFMAVAYPVIVSRLVFLGVFDITPVLWGNMMPCVC

SEQ ID NO: 339970 - protein, 591 aa, Zea mays
  unsure (1)..(591): unsure at all Xaa locations
  Clone ID: MRT4577_7321C.1.pep
MAALATSQLVATRAGLGVPDASTFRRGAAQGLRGARASAAADTLSMRTSARAAPRHQQQARRGGRFPSLVVCASAGMNVVFVGAEMAPWSKTGGLGDVLGGLPPAMAANGHRVMVVSPRYDQYKDAWDTSVVSEIKMGDGYETVRFFHCYKRGVDRVFVDHPLFLERVWGKTEEKIYGPVAGTDYRDNQLRFSLLCQAALEAPRILSLNNNPYFSGPYGEDVVFVCNDWHTGPLSCYLKSNYQSHGIYRDAKVAFSAELNXPSSFSMLVYTSSGXYEKPVEGRKINWMKAGILEADRVLTVSPYYAEELISGIARGCELDNIMRLTGITGIVNGMDVSEWDPSRDKYIAVKYDVSTAVEAKALNKEALQAEVGLPVDRNIPLVAFIGRLEEQKGPDVMAAAIPQLMEMVEDVQIVLLGTGKKKFERMLMSAEEKFPGKVRAVVKFNAALAHHIMAGADVLAVTSRFEPCGLIQLQGMRYGTPCACASTGGLVDTIIEGKTGFHMGRLSVDCNVVEPADVKKVATTLQRAIKVVGTPAYEEMVRNCMIQDLSWKGPAKNWENVLLSLGVAGGEPGVEGEEIAPLAKENVAAP

SEQ ID NO: 339971 - protein, 98 aa, Zea mays
  unsure (1)..(98): unsure at all Xaa locations
  Clone ID: MRT4577_73220C.1.pep
NCQTEPQAGILLAYLTLLKRTALFHHCLIAERPRRYLVMDNSLDASRIGSMHIQHXHRYHTSRKSCMLARHGWSIAHMLTHIRRDTRRSQDVTIQRKS

SEQ ID NO: 339972 - protein, 64 aa, Zea mays
  Clone ID: MRT4577_73221C.1.pep
SEPLSSSNLDFAIRHINSVKGIAEALWSFNVVTSGHVQFQALALNIPSNKKRCNAYCNEAPVVL

SEQ ID NO: 339973 - protein, 181 aa, Zea mays
  unsure (1)..(181): unsure at all Xaa locations
  Clone ID: MRT4577_73222C.1.pep
RGAAARGRGRGRAAARGSCRHGGRRRGRPGRTGRGGRRAPRGARGRGGAGARARRIGGGRTRGAGAGGGGARASGSRGXGTKTSVGAGGGGGAGCXGGGRVGVVGXEGAAAARGEAALGARAPSXVAGRRRRGCHRRRGCGRSGGSGWGWVQFRSGLRGXGSGSNRNLTRGRCPGRPRGTQ

SEQ ID NO: 339974 - protein, 391 aa, Zea mays
  Clone ID: MRT4577_73223C.1.pep
AVFGEITYEQLVLATGGFGDDQLIKHGHSGDMYHGVLENGSHVIVKKVGAKGANRHASELDFYVRYSHERIVPLLAHLSNDDDELMAYKYMPKGDLTHALHKKPVDTADGLPSLDWITRLKIATGVAEAMCFLHEECSPPLVHRDIQSSSVLLDDKYEVRLGSMSDICIQQSGGSQNVFTRILRSSKSLDKHTSGPPATCSYDVLCFGKVLLELVTGNLGISGPNDAASEEWLSNTLNHINGGDRASIAGIMDPLLLVDEDHLEEVWAVAVIAKTCLSAKPSRRPSARYVLRALENPLRVVRQGSSRSNSARQQLRSSSSRSSWQSVFQGNHRVQSLDASATAALALDRRHSLRSHGSGGEASFSFKRALPVPTDTAPEPAAALDEDAVIV

SEQ ID NO: 339975 - protein, 73 aa, Zea mays
  unsure (1)..(73): unsure at all Xaa locations
  Clone ID: MRT4577_73224C.1.pep
VMLMSDPLNRWLNVRLLILLFLHSFFFFRLCGCLACIYALVHGNQGGCSWLVRFRGGLPLKITIXFFLXXKQG

SEQ ID NO: 339976 - protein, 146 aa, Zea mays
  Clone ID: MRT4577_73225C.1.pep
RRISLVLTSVFPCVGRPRTPSLLQISPWPPLSLPQVASSPLHSCSPNLHFPVPATSHGRQPSAMDAEPPLFSAFLCSPYVPVRVRCLYKCSRGVLCRGQPFWRRRMFDVLRIPSTTPSSIGEDSFLLCRFIDRRLFANVNLCLCAY

SEQ ID NO: 339977 - protein, 114 aa, Zea mays
  Clone ID: MRT4577_73226C.1.pep
MPLARRSAPRTTRTTARPSLKTRLMGGRKTRTHTKRAPAGTTTTTTTTRTTRTTGGHHGHAAPVHHHKRHATMGDKVSGMMMKLRGSLTRRPGLKAAGTRRMHGTDGRNARRVY

SEQ ID NO: 339978 - protein, 386 aa, Zea mays
  Clone ID: MRT4577_73227C.1.pep
MSLCALRFPRVPIYQLRSTPRLRHLFFPTQYIRSFSALDKPTAMDKAPGQESKGSITDWVKPGDKSGEFKRQTSVFRNWIENKPNAEFPPEKGRYHLYVSYACPWAHRTLIVRQLKGLEDIISYNSVHWHMAEKGWRFASSDERIPGNTTPDPLHQDYTHLRDIYFEQNPDYEGRFTVPTLYDKKTNKIVSNESAEIIRMMYTAFDDIIEEKYKKVDLFPKDLQKDIEEMNEWVYNDVNNGVYKSGFATTEEAYTKAVTQLFKSLDRLEESLSQSKTPYLLSAPHVTEADVRLFTTIIRFDPVYVQHFKCNIRDIRSGYPHIHKWLRHLYWDYPAFKDTTNFEHIKKHYTKSHGQINKFQITPIGPLPDILNKEDEVPSVKAALAK

SEQ ID NO: 339979 - protein, 94 aa, Zea mays
  Clone ID: MRT4577_73228C.1.pep
GYQRSPESAGSPHPRGGLKKKNNVSDVCEGRGFASSVACCQRRVSSRHCGVSVRRRVIGHVRLVIGFWPLLDTWSRPDPMECEIKTNRHFRVSV

SEQ ID NO: 339980 - protein, 122 aa, Zea mays
  unsure (1)..(122): unsure at all Xaa locations
  Clone ID: MRT4577_73229C.1.pep
MTTNIYCGLMLHALSACVANATIFPQRSQATITCLIHQYLPSMIDSACENPTLQPYMLQQANASSNLPLSPSLFQQSPSLSLVHSLVQTIFAQQLLXLLLLVINQVALSNLFSYSXQQQFLS

SEQ ID NO: 339981 - protein, 98 aa, Zea mays
  unsure (1)..(98): unsure at all Xaa locations
  Clone ID: MRT4577_7322C.1.pep
VSSSTDHSAHFLMHTWSNXRVLLQTWLSVVICVFRMTGIKYASTCLVVEPVAPDHDFAIDVLCQQQLKGIIVNIQRRDNFRVFVNNESFLPLFAVDQV

SEQ ID NO: 339982 - protein, 409 aa, Zea mays
  Clone ID: MRT4577_73230C.1.pep
GRALRPSASVFPKDSRPLPCLLLTSLLLLLTLHFLSSSPTPSPPPPQPRLAPLPSTASAGPAPSALAFLLTGSAGDADRLQRLLLATYHPRNVYLLLLDRAASAADRARLARSARAAPGRDNVHVVGDPGFANPRGASALAATLHGAALLLRVDQGWDWFVHLDADEYPLVTPDDLLHVFSYLPKDLNFIQHTSYIGWKEERQIRPIIVDPGLYLSSRNDIFYATQKRDIPNAYKLFTGSSSVILSRKFIEYCIVGMDNLPRTLLMYYTNMPLPHRKYFQTVLCNSAEFNKTVVNHDLHYSTWDARSKNEPRLLTIDDVENMTESGAAFGTRFPKDDHALDRIDEEILHRHPGELVTGGWCIGVGHDSPCDISGNPDVLRPGPKAIKLAKFLSERLSYRNFYSQQCIWD

SEQ ID NO: 339983 - protein, 117 aa, Zea mays
  unsure (1)..(117): unsure at all Xaa locations
  Clone ID: MRT4577_73231C.1.pep
SEAFLPTQKEPHPTYREPAMATVAMDILKPTPAASGDEATAAANGMMRSGGXGAAEYYLQHMHDLQLQXIRHKTHNLNRLXAQHNDLNFPVRMLMEELXLLQEPVSYVGEVVNAMGK

SEQ ID NO: 339984 - protein, 110 aa, Zea mays
  Clone ID: MRT4577_73232C.1.pep
SIMNGVNKEVCAAVVAILLDRACHGRSTDGHGRPLASRSRATWIPRHDAQCDDAVLTRCATAPDTCTIDCIASLLPCSCNYGASCMLHHIYSCRLRHSRSHKLLHACSAR

SEQ ID NO: 339985 - protein, 147 aa, Zea mays
  unsure (1)..(147): unsure at all Xaa locations
  Clone ID: MRT4577_73233C.1.pep
PPEFHAPSWLNEKNSWGSPPPHRSFFPYPPSASPPPKGSLPPXPVSPPPPPXLLPPKIIPPPPFFLGIESSSLPPGRIPVSWEGPPPPPLFFEWDFNLPFLPPIFSSFTNKSKTFPNPPPPKKKKKKKKKKGGRVGGRAAGRVGGRW

SEQ ID NO: 339986 - protein, 105 aa, Zea mays
  Clone ID: MRT4577_73234C.1.pep
MAACVDKWNPAYSCHRISRSIYRFMPDCTVTAPAGAPVNGNGGDEVWEELYGEAQADAQDEPLLGMLYSELVLSHPSLEAALAAHLSAKLCIPGALPHDALRDIL

SEQ ID NO: 339987 - protein, 101 aa, Zea mays
  unsure (1)..(101): unsure at all Xaa locations
  Clone ID: MRT4577_73235C.1.pep
RPASPYPSTLEGLLVTIPQXQNVHISHTHDKLTTTNVLDYTNTELQNMNITNQNLALDNEKHLKINLXRPDITPKILIDSIMIYYSTGTTCXPPLEKLLGT

SEQ ID NO: 339988 - protein, 102 aa, Zea mays
  Clone ID: MRT4577_73236C.1.pep
SNKGNPPLFKNKNLFWYNWKTNVESNRLINLGKKFFFWGVKIQLKCLNNRTKLLVGGVTESFFFLPPKLWVCLAFICGWWFPGIYPLISSKFFFFLTLFFFF

SEQ ID NO: 339989 - protein, 134 aa, Zea mays
  unsure (1)..(134): unsure at all Xaa locations
  Clone ID: MRT4577_73237C.1.pep
MAAIQFSVVMHLGLRASAAIATVVPQCLHAPIAFLLPPYLSPAXGFMREDPMDAPYLIQQALATSIXAVSPLLHQQPSSLLQELPXVDAVAQHILAQQLQQLVLANLDAYSQQHQFLPFYQLAASNYAAYLQQQ

SEQ ID NO: 339990 - protein, 478 aa, Zea mays
  Clone ID: MRT4577_73238C.1.pep
MQQLYDSSHGTIHTSLSSGDRMKLCLQRTEEILDLALKLPGHGKHNLQLHASVKLRDTGNIGLSESCATALPLPHEMMGHAAWKECSASLTQGSAVVDALSQKESIVDSPSKKTPSYGSNDYSKMTVFEVTGFPQPFQGLQKPKSVASHISNEVHEMDISSVHPHSWKPTPGVRAKSVLEIQAEERLETQREIALENTKVTTTTASGLSIHWVDLVETSGQQFGDQARPMCDKKNGNISQSNRSHLHDLLAREELIKSNANAGVIINSADDTSFPPLAPSITQSDAHIHDGADFIEFKGTRKISNRGKKPKGSAVKTPASHANVIPGPATDPAQVREPCSLRNIQVEEEQESANLQQLVPASSHAKGPMDQHIHGNNSSWQGSESPPSRGNELLKMTSHVSSHSTPNSEEYLFWEPREHAKQDKPRLQSPPSSVVNTRSAALDIQKKGKKGTKLSTSALGFKVQSTRIMMGEIAHVDE

SEQ ID NO: 339991 - protein, 47 aa, Zea mays
  Clone ID: MRT4577_73239C.1.pep
TNASASNVSIILMEIKDCLLCIARGDFATCTCAGERDDGGRPLPTRP

SEQ ID NO: 339992 - protein, 129 aa, Zea mays
  unsure (1)..(129): unsure at all Xaa locations
  Clone ID: MRT4577_7323C.1.pep
WKTGADHRRPPHASVDFKAGCLPAKLGLEPGALGVVKGAKRRKIHALKXKSRFGQLEFAQNKGQIAWQQFXTXKGKAKKGGFFSGGRRGSILRXPADHRGRGVVTGGGKGLADFQRGGKLWYLKGGSGD

SEQ ID NO: 339993 - protein, 276 aa, Zea mays
  unsure (1)..(276): unsure at all Xaa locations
  Clone ID: MRT4577_73240C.1.pep
MEPTRLLLLLLVLGVSLQGCIAQGGGGGGGLTRGSFPKGFVFGTASSAYQYEGAVKEDGRGKTIWDKFAHTFGKVADLSNADVAVDQYHRFEEDIQLMADMGMDAYRFSIAWSRILPNGTGQVNQAGVDHYNRFIDALLSKGIEPYVTLYHWDLPQALEDRYNGWLDRQIVYDFAEYAETCFEAFGDRVRHWVTLNEPHTVAVQGYDAGLQAPGRCSLLLHLYCRSGDSATEPYVVAHNFILAHAKVSDVYRKKYKXAAQNGELGIXVDVRWFEPM

SEQ ID NO: 339994 - protein, 210 aa, Zea mays
  unsure (1)..(210): unsure at all Xaa locations
  Clone ID: MRT4577_73241C.1.pep
RVIWYEPMTNSTIDIEATKRAQEFQLGWFADPFFFGDYPATMRARVGERLPKFTADEAALVKGALDFMGINHYTTFYTRHNDTNIIGRLLNDTLADTGTISLPFDKNGKPIGDRANSIWLYIVPSGIRKLMNYVKERYNSPTVYITENGMDDGNSPFTSIQDALKDSKRIKYHNGYLNNVAASIKEXGCDVRGSXAWXSLLDNWEWAXRV

SEQ ID NO: 339995 - protein, 560 aa, Zea mays
  unsure (1)..(560): unsure at all Xaa locations
  Clone ID: MRT4577_73242C.1.pep
LLETNAGVSACDCRKLNAVFFSFPFCNCVAHTDSLKWCPKNSGQRFSTLLSSRCSRHPGCGGKIPDLSNADVAVDQYHRFEEDVQLMADMGMDAYRFSIAWSRILPNGTGQVNQAGIDHYNKVINALLSKGIEPYVTLYHWDLPQALEDRYNGWLDRQIVNDDAAYAETWFKVFGDRVQQCSTLHEPQTVAVQCYDAVLHVLGHWSVALHLHCQXGSTSWTTQITSRGTPRTRSXVQDPAELQLKASHGXVIGLTIYPTPIPLSCCVKHSSSNQCKXYFQLGWFADPFFFGDYPATMRARVGERLPKFTADEAALVKGALDFMGINHYTTFYTRHNDTNIIGRLLNDTLADTGTISLRESSSCVFASSFQLKKKKPXMRNLEGCYXLQTDNTCQASYLSVQKNFXTLEIXPWVADTSQFHSLRXNGKPIGDRANSIWLYIVPSGIRKLMNYVKERYNSPTVYITENGMDDGNSPFTSLQNALKDSKRIKYHNGYLNNVAASIKEDGCDVRGYFAWSLLDNWEWAAGYTSRFGLYFVDYKDNLKRHPKNSVQWFKTLLSSS

SEQ ID NO: 339996 - protein, 69 aa, Zea mays
  Clone ID: MRT4577_73243C.1.pep
DALQPQVSYLLRCNVYEMQCPDPEISLGTDWIRLALHVRFFTEGLGAYVNLFRLFYRPACTSEHHHTYL

SEQ ID NO: 339997 - protein, 89 aa, Zea mays
  Clone ID: MRT4577_73244C.1.pep
DYPATIRARVGERLPKFTADEAALVKGALDFMGINHYTTFYTRHNDTNIIGRLLNDTLADTGTISLRESSSCVFASSFQLKKRNLEGCY

SEQ ID NO: 339998 - protein, 55 aa, Zea mays
  Clone ID: MRT4577_73245C.1.pep
MAAPKLATLALAVLLASIVVAPPAAVRSAMSCSTVYSTLMPCLPFCQMCGAMPPQ

SEQ ID NO: 339999 - protein, 65 aa, Zea mays
  Clone ID: MRT4577_73246C.1.pep
THTLYQQLSLKASVSQTSGEVEICITSALKINPVRLATIYKKLSLLLQVPDNGVNSQSYTIDPPG

SEQ ID NO: 340000 - protein, 65 aa, Zea mays
  Clone ID: MRT4577_73247C.1.pep
LGDDDLDLSRTQHNILQAPHPVVPVLDRASIRNYHGDDVPRLRADATKSTRISRSPLSLRAQSRP

SEQ ID NO: 340001 - protein, 87 aa, Zea mays
  Clone ID: MRT4577_73248C.1.pep
IRGGVFTLSKWFLKNKKMLKRIVVTKALLGTFKTLGESSGLWADIIVCSFFRDDTIFSPNGPKNVGELIEPFLQKLCVKLEECGPLG

SEQ ID NO: 340002 - protein, 166 aa, Zea mays
  unsure (1)..(166): unsure at all Xaa locations
  Clone ID: MRT4577_73249C.1.pep
MADWEEHHLKLKATAGVVKTYPQEVGAARKNGNMGIXNGPCLGAEESTXKXGEHGHALCHVXDIDMFXAKELEDIETYHHNCDMPDGIRPDILMDDRCQDVXMRPVTLNGNALDDATLPTDDILDDNIKEWKDSEADLVETAQDGIGEDTICALQEGGPTDVTSLA

SEQ ID NO: 340003 - protein, 605 aa, Zea mays
  Clone ID: MRT4577_7324C.1.pep
MAALATSQLVATPAGLGVPDASTFRRGAAQGLRGARASAAADTLSMRTSARAAPRHQQQARRGGRFPSLVVCASAGMNVVFVGAEMAPWSKTGGLGDVLGGLPPAMAANGHRVMVVSPRYDQYKDAWDTSVVSEIKMGDGYETVRFFHCYKRGVDRVFVDHPLFLERVWGKTEEKIYGPVAGTDYRDNQLRFSLLCQAALEAPRILSLNNNPYFSGPYGEDVVFVCNDWHTGPLSCYLKSNYQSHGIYRDAKTAFCIHNISYQGRFAFSDYPELNLPERFKSSFDFIDGYEKPVEGRKINWMKAGILEADRVLTVSPYYAEELISGIARGCELDNIMRLTGITGIVNGMDVSEWDPSRDKYIAVKYDVSTAVEAKALNKEALQAEVGLPVDRNIPLVAFIGRLEEQKGPDVMRPPIPQLMEMVEDVQIVLLGTGKKKFERMLMSAEEKFPGKVRAVVKFNAALAHHIMAGADVLAVTSRFEPCGLIQLQGMRYGTPCACASTGGLVDTIIEGKTGFHMGRLSVDCNVVEPADVKKVATTLQRAIKVVGTPAYEEMVRNCMIQDLSWKGPAKNWENVLLSLGVAGGEPGVEGEEIAPLAKENVAAP

SEQ ID NO: 340004 - protein, 45 aa, Zea mays
  unsure (1)..(45): unsure at all Xaa locations
  Clone ID: MRT4577_73250C.1.pep
TQTTTRVLVTFSFTKTHLLLSQIHNLNPSSVFCLXWXGLILLLST

SEQ ID NO: 340005 - protein, 46 aa, Zea mays
  unsure (1)..(46): unsure at all Xaa locations
  Clone ID: MRT4577_73251C.1.pep
MAIRAGRSALHLHALAFLMLAGXPCLQVQALVDHXKQVDWGRPNFM

SEQ ID NO: 340006 - protein, 76 aa, Zea mays
  Clone ID: MRT4577_73252C.1.pep
KGPTLSIVPGTTLGLTKIPVTTHTIAQEPDSLQAKCTYLLYTSDNVYFTHTQHNACVWYPAWASLFFFFPHLMLGQ

SEQ ID NO: 340007 - protein, 41 aa, Zea mays
  Clone ID: MRT4577_73253C.1.pep
RDSIDIVVFLCICVMVICYYFSVLFINFVFFVCLVVCVFFL

SEQ ID NO: 340008 - protein, 159 aa, Zea mays
  unsure (1)..(159): unsure at all Xaa locations
  Clone ID: MRT4577_73254C.1.pep
MTTLHMDPPAPPARRSLSTSCDLHPGEAFTGFCAACLRERLQGLEASAAAASAPGRKSTSAIRSLFARPFAAGSSSASGPAEPPDLRRCKSFSCGHGGDALAAAAAAAAGAAATRADEPQRRSCDVRGRSTLWALFHQDDRDRVRDGTAFAAFXPPHRP

SEQ ID NO: 340009 - protein, 529 aa, Zea mays
  Clone ID: MRT4577_73255C.1.pep
MPAPTAEPALPAAFLCVPSPLLSTPLPGAALSASPAPSSHHASFLPRPRGGPRALSVAISVPGPTFSVASRLHQMWGEFARFVRLHGNQIAPLGFASMGLGFGGGGGDNVGGGGGGGGGDVDGVGEVEEAAARAEAPKKVLILMSDTGGGHRASAEAIKAAFTQEFGDDYQVFVTDLWTDHTPWPFNQLPRSYSFLVKHGPLWKMTYYGTAPRVVHQPHFAATSTFIAREVAKGLMKYQPDVIISVHPLMQHVPLRILRSKGLLDKIPFATVITDLSTCHPTWFHKLVTRCYCPSTEVEKRALKAGLKPAQIKVYGLPVRPSFVKPVRPKDELRRELGMDEDLPAVLLMGGGEGMGPIEATAKALGDSLYDENLGEPTGQILVICGRNKKLVNRLQSINWKVPVQVKGFVTKMEECMGACDCIITKAGPGTIAEAMIRGLPIILNDYIAGQEAGNVPYVVENGCGKFSKSPKQIAKIVADWFGPRSDEFRVMSQNALKLARPDAVFKIVHDLHELVREKCFVPQYACAT

SEQ ID NO: 340010 - protein, 111 aa, Zea mays
  Clone ID: MRT4577_73256C.1.pep
GAGVYRSRALLVPMAEPPGAGFVSFGAVKGGWKFRVEPFGACGLWGGPGEFRRLVVLMAPRFSLLSFSMLGSVVLLPSPAAAVKMLANCTALLLKTGASSKNNRNRRAVEY

SEQ ID NO: 340011 - protein, 62 aa, Zea mays
  Clone ID: MRT4577_73257C.1.pep
LINVPITMHAGGESYDRLRQGLGHCLHLGHIVSIAAGLECIDEHNEPQYYGFDGWRAHEQGV

SEQ ID NO: 340012 - protein, 76 aa, Zea mays
  Clone ID: MRT4577_73258C.1.pep
MYAETTVDSGSKALQFLGLHDQDSTVSPVHTHQLDVVGNQDVAVNLIITDYCMPGMTGYDLLKKIKVTTELLRHDH

SEQ ID NO: 340013 - protein, 116 aa, Zea mays
  Clone ID: MRT4577_73259C.1.pep
KGAAKIKKKKKKKKKKKKRGEGGDNKKDTSLGAGGAPFPAGLAAGVFTNSLDTANTLTRALRAGTVWVNCFDVFDAAIPFGGYKMSGIGREKGVDSLKNYLQVKAVVTPIKNAAWL

SEQ ID NO: 340014 - protein, 57 aa, Zea mays
  Clone ID: MRT4577_7325C.1.pep
RGRLFFLQIIKFTAFVYFQQRLQEHQPRGTVLFYKDHHGKWDLVSIPGDRRGTKPAL

SEQ ID NO: 340015 - protein, 103 aa, Zea mays
  Clone ID: MRT4577_73260C.1.pep
PAVRAVGSSSSPLLGPCCGLQVGSCRVCVPSLVCSFCHGSSGGWARWSGPYALLAVSGRGWFVLPRDGVRCSPPPGFQEPPRLRRCGRVQSSWVRLWARAGFP

SEQ ID NO: 340016 - protein, 190 aa, Zea mays
  unsure (1)..(190): unsure at all Xaa locations
  Clone ID: MRT4577_73261C.1.pep
RQARAEVPGQPAWLARLCLRWLPCHFGHIIRPPTGRRGVNKYTVDPFSKKDCQDIKIRSLFAAXNIAKTLSSSXRRAMIGSAAQQHGDFDDWLANVNADEAHAYMSIRLLAEHVKGRNELTNFWDMNFSTDKITSLRTKRXTLIDGHAGVSTTANYMCXVFCIRFTNTRPKHLKRTRYALACHILQSRPH

SEQ ID NO: 340017 - protein, 64 aa, Zea mays
  Clone ID: MRT4577_73262C.1.pep
CPMGFWGSLESQVFIHWPIVGLWSGMSSSLKRSLLFPPPWFWPPCFYVGPSFFRAVQDQGWVGH

SEQ ID NO: 340018 - protein, 244 aa, Zea mays
  unsure (1)..(244): unsure at all Xaa locations
  Clone ID: MRT4577_73263C.1.pep
MASQSGMVNPAVFQDLQARIDEDSAVRDELRDIIQALEKHNRNVSFVLSRAHSTPVSELSEILKAAQEPIGNVIDTVSKLSQAASKMPYYKFNNMWSRQMQGACESILFWGWLGGYKYEGGAVQCGRLLTIEELGEIFKIPVNLKERDEFHLSLEEYLHALMTLVEELTRLARNAVTLGDYERPLLINQFVKDLHAGFQILNLKNDSLRXRSDGLKYRVKDVEDVVYDLSLRNLVPKRESSSRY

SEQ ID NO: 340019 - protein, 65 aa, Zea mays
  Clone ID: MRT4577_73264C.1.pep
DAWGFTYRRENKGRVGKVLALLGRDDIGGGGRRGCAGLAYGLQWCSLTSTGGEIKLRRFCPNRPS

SEQ ID NO: 340020 - protein, 156 aa, Zea mays
  Clone ID: MRT4577_73265C.1.pep
MAMGIITIIHAVLAVFLIIELGLTAYLVDATSTWWSDSPASVSILIFCVVWSILILLYLALTPLFAPRMYHSMVALGVLALTTLLWFAGATALAAHIGVPKCHGITICQCAQAAVAFGYFIWAIFTGLTIMEGLAFMRSRGHSAHADNKPGHHSGV

SEQ ID NO: 340021 - protein, 200 aa, Zea mays
  Clone ID: MRT4577_73266C.1.pep
PCFFPSPRGGSSFPPGTPFFLGGGSKSGKPKNYFFPPGFFFPRVFWGLGWQRNPGPKITFLGGFFFKDKKFGVGLATLGLGWGGSHCSKSGNGAPSPGKNPVVNPGPFSVNGSPRGAFFKRFFPPGVVPPLGDMVLFGPGPRKKPGGPPPSGFFFFFPGGFPGKNVPPPPGLVGFLYGRKVGRAWAFFLGHPKKEGFLFL

SEQ ID NO: 340022 - protein, 44 aa, Zea mays
  Clone ID: MRT4577_73267C.1.pep
KLSIFWTVGRSDIFVVLTTPVEGVYGYKSFLHQLRIKFVIKNAP

SEQ ID NO: 340023 - protein, 168 aa, Zea mays
  unsure (1)..(168): unsure at all Xaa locations
  Clone ID: MRT4577_73268C.1.pep
MSFRAREIYKKVVRRVGGEGKLPAEVMDTVKNILPNSKVVMGRAKRGIFAGRHIQFGNKVSEDGGNKSRRNWKPNVQEKRLFSYIHDXHIRVKVTTHALRCIDKAGGIDEYLLKTPYNKMDTEMGIAWKAKIEKMYSELAGMEVGFFPPKEEAKIEQGFEEVRSAKRE

SEQ ID NO: 340024 - protein, 64 aa, Zea mays
  Clone ID: MRT4577_73269C.1.pep
ASAHAFADTPTHAFLQYSIQYTATTLPCLLPTYNYSPNTHTSLPLYARSLYGPKSIDHHQTDMS

SEQ ID NO: 340025 - protein, 252 aa, Zea mays
  unsure (1)..(252): unsure at all Xaa locations
  Clone ID: MRT4577_7326C.1.pep
MKQSVVLYPSAGTGHVVPMAELAKVFINHGFDVTMVVVPEFSSQFKRVAAANPSISFHVLPPVSPPPADVAGSGMHPLLSMLKTLRWYNEELERFLCSVTSRQHLHSLVIDMFCVDAIGVAARLGVPAYTFAPSSASALAVLTQVPTLLASSQRGLKELGDTPLEFLGVPPVPASHLNAELLERPEEELCSTVASVFRRGMDTRGVLVNTFQALEXRALQALGDPRCVPGKAALPPIYCVGALFGTAHGILL

SEQ ID NO: 340026 - protein, 208 aa, Zea mays
  Clone ID: MRT4577_73270C.1.pep
MTAGGKKRRPEQQLEGDRRTKARKHSAREPLPLDLNLSMSDDHTDAVDDSGGEGSRNSSSDLTVEHEQEYVQPAHSGRCSAAPLTVSELIKAVDGVVVFKPPVSLEPLKRSVSDLVVPAAKLGEITVGGWPVHVDDGLLGRLAARAAGAAAAGTPMEAWTTGEVLCPSSMRQFKRSLSSNDVDGATVEGSRRRKDGEMFPMPVTVDGN

SEQ ID NO: 340027 - protein, 167 aa, Zea mays
  unsure (1)..(167): unsure at all Xaa locations
  Clone ID: MRT4577_73271C.1.pep
LQIDPXAPSSGAFKGRDRCAWVSNVVGAGASLGILTSLMVAMLGQARYLCVIGRSGVMPAWLARVNPRTATPVNASAFLGLFTAALALFTELDILLNLVCIGTLFVFYMVANAVVYRRYAGAGATWPTLAFLLVFSLAALAFTLAWKLAPPEPRGLRAGLLAACAAL

SEQ ID NO: 340028 - protein, 76 aa, Zea mays
  Clone ID: MRT4577_73272C.1.pep
DATPGLIFFLKPNNLTQLLLSHRELVNIILIPFICSSRLFLFFYWHPTGTRVLLLSDTERNRPPSLTPGMSALLIL

SEQ ID NO: 340029 - protein, 63 aa, Zea mays
  unsure (1)..(63): unsure at all Xaa locations
  Clone ID: MRT4577_73273C.1.pep
MAPIDHAATKHDVPHPGQKRHIVKNNKESRSRHNRSSXSXHSSKGRCKRSFTPKPARPGSHNG

SEQ ID NO: 340030 - protein, 78 aa, Zea mays
  Clone ID: MRT4577_73274C.1.pep
VIFLLASWVHQGILSKDTIVEDDVLDLVAASRGHRHLASSRGGDIKRGDWKRKSETQGEGALDKRLLGLGALFVIAFS

SEQ ID NO: 340031 - protein, 98 aa, Zea mays
  unsure (1)..(98): unsure at all Xaa locations
  Clone ID: MRT4577_73275C.1.pep
YLPNAPLASIINLFGRCMWPTRNKKLXFXPXPLXSPXXFFPXPSFFFSSPPCGGGGGVFLSLPPTFGGGGGGAPLGGCPLLWAGLPCFLGPPFSLGVW

SEQ ID NO: 340032 - protein, 358 aa, Zea mays
  Clone ID: MRT4577_73276C.1.pep
MVAAAAAILLVLPVVAVLASSSAAADGSFITWDDLSTPSAAAVQGGVKAASGGGARELDTIVVAQDGTGHSRTVQGAVDMVPAGNSRRVKILVRPGVYREKVTVPITKPFVSLIGMGSRRTVITWNARASDMDRSGHQVGTFYSASVAVEADYFCASHITFENSAPAAPPGAVGQQAVALRLSGDKTMLYRCRILGTQDTLFDNIGRHFLYNCDIQGSIDFIFGNARSLYQGCTLHAVATSYGAIAASQRSSAEEDSGFSFVGCRLTGSGMLYLGRAWGRYARVVYSYCDLGGIVVPQGWSDWGDQSRTKTVLFGEYSCKGPGASTRNRVPWSRSLTYDEARPFLGPSFINGEQWLRL

SEQ ID NO: 340033 - protein, 186 aa, Zea mays
  Clone ID: MRT4577_73277C.1.pep
YSASVAVEGDYFCASHITFENSAPAAPPGAVGQQAVALRLSGDKTMLYRCRILGTQDTLFDNIGRHFLYNCDIQGSIDFIFGNARSLYQDGAVRGVQLQGPRGEHEEPGALVPLAHLRRGAGVPRPELHQRRAVAQAVDPIRPPGCRAELRRRRAMVPPSELCVGHATSLVFFGAYSVTSKQLVRL

SEQ ID NO: 340034 - protein, 109 aa, Zea mays
  unsure (1)..(109): unsure at all Xaa locations
  Clone ID: MRT4577_73278C.1.pep
MNICRIGHSTELGRYRATILVLLDVIARXKTIQLRXSFIGAFRRRQXLIVRGLFSIDFNPRVPAESASNTNELFLKVALDHGKAFGVVKSHVRVVVCQKVGDFSVVKIT

SEQ ID NO: 340035 - protein, 85 aa, Zea mays
  Clone ID: MRT4577_73279C.1.pep
PRARAQGCTLHAVATSYGAIAASQRSSAEEDSGFSFVGCRLTGSGMLYLGRAWGRYARVVYSYCDLGGIVVPQGWSDWGDQSRTK

SEQ ID NO: 340036 - protein, 157 aa, Zea mays
  unsure (1)..(157): unsure at all Xaa locations
  Clone ID: MRT4577_7327C.1.pep
MAAAKIAPSMLSSDFANLASEAERMVRLGADWLHMDIMDGHFVPNLTIGAPVIQSLRKHTKXEAENPVELVLVMTVEPGFGGQKFMPEMMDKVRTLRKKYPSLDIEVDGGLGPSTIDVAASAGANCIVAGSSIFGAADPGAIISVLRKSVEGSQNKN

SEQ ID NO: 340037 - protein, 58 aa, Zea mays
  Clone ID: MRT4577_73280C.1.pep
AERAMADLARRDFSERCRLMKRVHRWTWTLHPDARCPRCTLLQAPLRTGVERDAVERD

SEQ ID NO: 340038 - protein, 45 aa, Zea mays
  Clone ID: MRT4577_73281C.1.pep
SGVGRGGEREARGGGFGGGWIRSTGRRSVGSPSAGDLSGGGNCGT

SEQ ID NO: 340039 - protein, 55 aa, Zea mays
  Clone ID: MRT4577_73282C.1.pep
PVTPKILFHGVLLGQIWGFRLLLKPIRFLNLKNLKEKKVVWVGISKQGANKKQNL

SEQ ID NO: 340040 - protein, 102 aa, Zea mays
  Clone ID: MRT4577_73283C.1.pep
AARDKFRPGLRQLFRCDVIHVNNDREVHCFPRIIIGSTFHRAMGINPSRSRGGVSAAYCKLLLRLALQLERSRPGPRIGGTPSASDWNWLMLIAGFFHLESS

SEQ ID NO: 340041 - protein, 86 aa, Zea mays
  Clone ID: MRT4577_73284C.1.pep
MGRTIFLLISVVLVAYYIYIPLPDDIEEPWKIILGNTLLKLGGDLASFGELLGLNHFMDTVQLFMRCQVVPPTSDENVTVMETDFN

SEQ ID NO: 340042 - protein, 72 aa, Zea mays
  Clone ID: MRT4577_73285C.1.pep
GTQREKRKLGGNKKVPKIKTQTCYRKALGKGQILKPFWGTGLPFWGTGGPFKGTGFLCCRRGTPFPPPFGEE

SEQ ID NO: 340043 - protein, 163 aa, Zea mays
  unsure (1)..(163): unsure at all Xaa locations
  Clone ID: MRT4577_73286C.1.pep
MGSRSGGGSVSGSCLLLFPFLLLLHLISLRCPSAVLVSAAGSGEPYVGVTIGTQVTNLLSPSDLASFLRAQRITRVRLYDADPRLLSALAASGVRAIVGVPNDELLALGSSPATAASWVSRRVVPFXRELQHPEXVVSAIAVGDEVPTALPSALPVLLPAIRS

SEQ ID NO: 340044 - protein, 85 aa, Zea mays
  Clone ID: MRT4577_73287C.1.pep
KINLGPKKPAKKGPFKKKNIWGFPAGGGKPEPVNCVVFVPKAPPKKIKKFFPGFPKKVKSEPKLTLSKKGKKEKPTCKPGQKAQL

SEQ ID NO: 340045 - protein, 111 aa, Zea mays
  Clone ID: MRT4577_73288C.1.pep
TQTGSMAVLLNHYCPLFTLFAFSNEERVKQRLALYQGVIPIHKQFFDDAKKTFSKTINSLLKAQYVKKGDYVTFVQNGVTSIWKKESPPHIQIRKVQVLWAGWNWLCLKNF

SEQ ID NO: 340046 - protein, 63 aa, Zea mays
  Clone ID: MRT4577_73289C.1.pep
NASGYFCWYITHPGTSRIHPVFLSSPRLFTCIVLLDRSNGPYVCFFKFTLSQINCNFNLTLQT

SEQ ID NO: 340047 - protein, 91 aa, Zea mays
  unsure (1)..(91): unsure at all Xaa locations
  Clone ID: MRT4577_7328C.1.pep
SSPPTSARRGEEEWPVASSVAAAAXSTFLGSRLADPVPQNGRIVARFGFGGGKPKAAVPKKVAKTSISSDLPVWFPGAVAPDXLDGSLVGD

SEQ ID NO: 340048 - protein, 372 aa, Zea mays
  Clone ID: MRT4577_73290C.1.pep
MAKDGGPDWNGLLKWSLAHGDSTNPPRALSEEDRKWFMDAMQANTVDVVKRMKEITQVMKTPEDVLQSQGVTPENIEDMLDELQEHVESIDMANDLHSIGGLDPLLSYLKNSNAGIRAKAAEVVSTIVQNNPKSQQLVMESNGLEPLLTNFKSDPSTNARTKALGAISSLIRHNQPGVSAFRLGNGYAGLKDALGSDDARLQRKALNLIQYLLHNYKADRSVATELGLPKLMMHLVSSDDSLVREAALGGLLELARDKTSGNALPDQEKLKDMLKSRIEGISAMDTDDLHAAREERQLVDSLWKECYNEPSSLREKGLVVLPGEDAPQQPPPDVAGKMFEPPLRAWAAARPAQEDDSDSGSGKKDPPLLLKF

SEQ ID NO: 340049 - protein, 168 aa, Zea mays
  Clone ID: MRT4577_73291C.1.pep
MAKDGGPDWNGLFKWSIAHGDGTNPPRALSEEDRKWFMEAMQANTIDVVKRMKEITRVMRTPQDVLQSQGVTPENIEDMLDELHEHVESIDMANDLHSIGGLDPLLGYLKNSNAGIRAKAAEVVSTVVQNNPKSQQLVIESNGLEPLLTNFKSDPSTNARTKALGAIS

SEQ ID NO: 340050 - protein, 372 aa, Zea mays
  Clone ID: MRT4577_73292C.1.pep
MAKDGGPDWNGLLKWSLAHGDGTNPPRALSEEDRKWFMDAMQANTVDVVKRMKEITQVMKTPEDVLQSQGVTPENIEDMLDELQEHVESIDMANDLHSIGGLDPLLGYLKNSNAGIRAKAAEVVSTIVQNNPKSQQLVMESNGLEPLLTNFKSDPSTNARTKALGAISSLIRHNQPGVSAFRLGNGYAGLKDALGSDDARLQRKALNLIQYLLHNYKADRSVATELGLPKLMMHLVSSDDSLVREAALGGLLELARDKTSGNALPDQEKLKDMLKSRIEGISAMDTDDLHAAREERQLVDSLWKECYNEPSSLREKGLVVLPGEDAPQQPPPDVAGKMFEPPLRAWAAARPAQEDDSDSGSGKKDPPLLLKF

SEQ ID NO: 340051 - protein, 130 aa, Zea mays
  Clone ID: MRT4577_73293C.1.pep
HTKQHLKASQPKRTAPITVRGKRKKETPKNQYTCTIKLNCLNLWIYQHLAAACWYGEGLNHLCGLGRRRQGLNNVDLSRSSRRPRNVVNRPKVYLAVELPFLQNRVDSTHLQMPSSEKLLPGTTAFLPIA

SEQ ID NO: 340052 - protein, 76 aa, Zea mays
  Clone ID: MRT4577_73294C.1.pep
PQPPGAPPARAPPVENPFAAKTNGANQVSPGVSSQTNNFPRGDGQNPGNFPWGRPSPKVPPAPGGGSSLGPLFGGN

SEQ ID NO: 340053 - protein, 104 aa, Zea mays
  Clone ID: MRT4577_73295C.1.pep
VPFLWGPPRAKGLLKVPLFFVSGRETGGHSFSMPMFLGFTGSSIILGGPNGFSFLNAFIPKPRKGFPLKNCPGAQSTFKGFSCNPEGQIFFGPGTTRGVKLRSS

SEQ ID NO: 340054 - protein, 130 aa, Zea mays
  unsure (1)..(130): unsure at all Xaa locations
  Clone ID: MRT4577_73296C.1.pep
AWPRWPPSPPRPARRRAPAAAPARRPPRPPSPRAAAPQLPPAPPQYGSAPPPPPPPLPPDPPWATAPATAXRPPLQGSPXTATGPRPDPWRHEVSARGLAPPQSQAPIPPRRRDSGANGWRGARHRRLLL

SEQ ID NO: 340055 - protein, 395 aa, Zea mays
  Clone ID: MRT4577_73297C.1.pep
MAPNEAASITTPSEPESVGGSEMSSEDMAAASPLLSSSSPSPSPSAAPVLESIEELDRKYAPYARRDAYGPMGLGPVSAAEAARLAFAAVVLVPLRVVAGVLVLVVYYLVCRVCTLRVEEDREGGEGDGYARLDGWRRAGAVRCGRALARAMLFVFGFYWIREYDSRLPNAEDGHVDQSKEIERPGAIVSNHVSYVDILYHMSASFPSFVAKRSVARLPLVGLISKCLGCIFVQRESKTPDFKGVSGAVSERIHRAHQQKNAPMMLLFPEGTTTNGDYLLPFKTGAFLAKAPVQPVILRYPYKRFNAAWDSMSGARHVFLLLCQFVNYLEVVRLPVYYPSEQEKDDPKLYANNVRKLMAVEGNLILSDLGLAEKRVYHAALNGNSLARALHQKDD

SEQ ID NO: 340056 - protein, 74 aa, Zea mays
  Clone ID: MRT4577_73298C.1.pep
PPATPWRSAPQTSPRPAPRRTRLPPRPPLGAPTRRRHRRGPCHRTRGIAPAVAPKLVFLLNDRVVGLSLLIRLT

SEQ ID NO: 340057 - protein, 105 aa, Zea mays
  unsure (1)..(105): unsure at all Xaa locations
  Clone ID: MRT4577_73299C.1.pep
HRKYVFGGHVAAYMKXLRXDEPEKYQSHFXEYIKRGIEADGIEALYKKVHAAIRADPSLKKSEKQPPKEHKRYNLKKLTYEERKAKLIARVAAINSAADNDEDDE

SEQ ID NO: 340058 - protein, 225 aa, Zea mays
  Clone ID: MRT4577_7329C.1.pep
MAAAKIAPSMLSSDFANLASEAERMVRLGADWLHMDIMDGHFVPNLTIGAPVIQSLRKHTKAYLDCHLMVTKPSDYVEPFGKAGASGFTFHIEVARDNWQDLIQSIKSKGMRPGVSLRPGTPVEEVFPLVEAENPVELVLVMTVEPGFGGQKFMPEMMDKVRTLRKKYPSLDIEVDGGLGPSTIDVAASAGANCIVAGSSIFGAADPGAIISVLRKSVEGSQNKN

SEQ ID NO: 340059 - protein, 54 aa, Zea mays
  Clone ID: MRT4577_732C.1.pep
ESSSSGICTYEWPRPWCSLSGAGLHAEHSPRSWTVVVSSMSMTSNSQSLLRFTS

SEQ ID NO: 340060 - protein, 130 aa, Zea mays
  Clone ID: MRT4577_73300C.1.pep
LLKFPAPAHLAPTRAAPAFSSLVAAQRSSLSSLLLCRAPAPGPATRCLSQLAGRRVLLPSAWIKLLPPAMSSSPSTDTFCSATCHGARPAPVSMTGVPKLLPCASRFSLAQLAHCSPHALGPSLHRVMAT

SEQ ID NO: 340061 - protein, 62 aa, Zea mays
  Clone ID: MRT4577_73301C.1.pep
KVASENLGVYTFKPVLYQLANAISHHLWGMPVPRHKSPSGKSHQIFVSVTVWQGTALKIQLH

SEQ ID NO: 340062 - protein, 147 aa, Zea mays
  unsure (1)..(147): unsure at all Xaa locations
  Clone ID: MRT4577_73302C.1.pep
MRLSGGGHNCFQDSDEARLTFKRKFWKKVVEIDDLCGNDGAWWGIKGYMRDNFNHSNKVTSQKEHFXNSRLVKSLLDMYWELRPVTSSSLTHQTRYDPTRAVDPIIEDGHYTLFXKXLARLDASVFNCYTQMVFVQILGLMLSTNNI

SEQ ID NO: 340063 - protein, 147 aa, Zea mays
  unsure (1)..(147): unsure at all Xaa locations
  Clone ID: MRT4577_73303C.1.pep
MRLSGGGHNCFQDSDEARLTFKRKFWKKAMEIDDLCGNDGAWWGIKGYMRDNFNHSNKVTSQKEHFXNSRLVKSLLDMYWELRPVTSSSLTHQTRYDPTRAVDPIIEDGHYTLFXKXLARLDALVFNCYTQMVFVQILGLMLSTNNI

SEQ ID NO: 340064 - protein, 147 aa, Zea mays
  unsure (1)..(147): unsure at all Xaa locations
  Clone ID: MRT4577_73304C.1.pep
MRLSGGGHNCFQDSDEARLTFKRKFWKKVVEIDDLCGNDGAWWGIKGYMRDNFNHSNKVTSQKEHFXNSRLVKSLLDMYWELRPVTSSSLTHQTRYDPTRAVDPIIEDGHYTLFXKXLARLDALVFNCYTQMVFVQILGLMLSTNNI

SEQ ID NO: 340065 - protein, 50 aa, Zea mays
  Clone ID: MRT4577_73305C.1.pep
QQIVLGNYRCLMQHLDYSDFVGHIKSIIVGSQLHVSFFRAWAIKCLRRAA

SEQ ID NO: 340066 - protein, 156 aa, Zea mays
  unsure (1)..(156): unsure at all Xaa locations
  Clone ID: MRT4577_73306C.1.pep
MADSEEXHFQSKXADALAPITYPQQAAIVRKNAFVFINNRPCQVAEGSTSXTGKHGHAKXHFVAIDIFNDKKLEDIXPSPHNCDIPHVNRTEYQLIDISKDGFVSLLXTSYGNTKDDLTVPTEETLVAQIKEGFESCKDLVVTVQSAMWDDHICAL

SEQ ID NO: 340067 - protein, 82 aa, Zea mays
  Clone ID: MRT4577_73307C.1.pep
RLGAVVVEEQAMHSFGVPFCRRSKPRHPDSRKPQLVPWPRTHCSHCLSNQTRPSLELDRWPCRDGWLSSLMYFKFYPKKYSP

SEQ ID NO: 340068 - protein, 99 aa, Zea mays
  Clone ID: MRT4577_73308C.1.pep
RNNKKKAGVLRKDGSAPGPGLRPPAFAVAVAPHGGGAFFFSIPENYTINGSDRFIKPVDCVLMRAYDASKPPYISRVEAIDATEISNTNVRVQMHFYYP

SEQ ID NO: 340069 - protein, 39 aa, Zea mays
  Clone ID: MRT4577_73309C.1.pep
SRLCNKDVSITRKVLPNGLTDSFPYYEDLNLTIKQTRSS

SEQ ID NO: 340070 - protein, 60 aa, Zea mays
  Clone ID: MRT4577_7330C.1.pep
RLERLKSIYLKGEGLPHDRMVPPVGLIMGRLENPKVKLVFWNLGGQPGLRPYWGKYIGEA

SEQ ID NO: 340071 - protein, 281 aa, Zea mays
  unsure (1)..(281): unsure at all Xaa locations
  Clone ID: MRT4577_73310C.1.pep
GYLEAGRDFVNVDWLLEKRVIGMRLIDVSHSGSNIAERVATVVEEFKLIDKVFSVTLDNASANSNAMNILTPRFSGYVGSLFLHQRCACHIINLIVKSGLKRLKPYVEDFRTAISFLNASNQRIAAYKSYCVAMDVRPRKFGLEXMLDGTLHXMLKHVIPYKXHFSVFIQTHYXXVMGQTLLTQAHWGXGEKILTFSLRLFYXDSTVXLSGIYYPTXSPLMLHHIXIEIXXHLSNYENDILLXDIVVPMKSKFLKYXKNIPILXSFAFVLDPRAXKLRGFN

SEQ ID NO: 340072 - protein, 94 aa, Zea mays
  Clone ID: MRT4577_73311C.1.pep
KLDTRCIKQKTNNGLKAQNNAKDRRYLANLSGGKIGILVVGYCSPIRKQNSSPFWWGRGGLGLFLVASCTWDISTRNSRDQIVISSGFWTLIQQ

SEQ ID NO: 340073 - protein, 85 aa, Zea mays
  Clone ID: MRT4577_73312C.1.pep
FVNRVIVPLPQNDVGANVHAAAPQQVTATTVATRVAVVATTSLSTSTGRPNVWAPPGFGPVILSIYSIVSPFASVAVLVSVLPLD

SEQ ID NO: 340074 - protein, 63 aa, Zea mays
  Clone ID: MRT4577_73313C.1.pep
VCYVFYGYGFLLLLVLYAVICFWLVYAEGVIGFAVLSLECFGVRSFAGVVWNHVILLAVCLFF

SEQ ID NO: 340075 - protein, 45 aa, Zea mays
  Clone ID: MRT4577_73314C.1.pep
TCAVSSPLDVVWEVRSHFRREQSAVPGFSHILDVRSHEQLYSAPF

SEQ ID NO: 340076 - protein, 50 aa, Zea mays
  unsure (1)..(50): unsure at all Xaa locations
  Clone ID: MRT4577_73315C.1.pep
ATYGSRTCRSXSHGSHDFNFTRKFCNQSGLIYLLYIFTFYKYCNDYLRLI

SEQ ID NO: 340077 - protein, 51 aa, Zea mays
  Clone ID: MRT4577_73316C.1.pep
KNGGPPIFTGEVYNRLRTQKTSFQITFYRVIGQLQTLSPIFKAHKAGLTAP

SEQ ID NO: 340078 - protein, 64 aa, Zea mays
  Clone ID: MRT4577_73317C.1.pep
GTWTQVPSRVKPITCKNPQGSYFCGFPPNPDCPLLLFTKKACTWGRPFQSSRLPEDRDPPQLVL

SEQ ID NO: 340079 - protein, 56 aa, Zea mays
  Clone ID: MRT4577_73318C.1.pep
RNSPIPKMFLRPNGQGLLELNCYGNFYVLNLEGQRQHWLISQRTGGSVTSGGFCPK

SEQ ID NO: 340080 - protein, 51 aa, Zea mays
  Clone ID: MRT4577_73319C.1.pep
SALPFYTKERTNRAVLPAACPFLHILFLPINLCISHVHTLVPVALWSGLVR

SEQ ID NO: 340081 - protein, 116 aa, Zea mays
  Clone ID: MRT4577_7331C.1.pep
FFFFFFFFFFFFFFFFFFFFFFFFFFKKQNFRGVYHINGNIGKEIMGFLGRRGFIPGNFLNKDRLGVFYKIQKKCLQKQSFKPNPAHFGGGGASKMAHREKGKIGGKKNPCSPKVR

SEQ ID NO: 340082 - protein, 208 aa, Zea mays
  Clone ID: MRT4577_73320C.1.pep
LSVIPGVNAAIFEELEGRIFTAFSLYDARNVIKNGDFNNGLSCWNVKGHVDVEEQNNQRSVLVVPEWEAEVSQEVRVCPGRGYILRVTAYKEGYGEGCVTIHEIENNTDELKFSNCVEEEIYPNNTVTCNDYTVNQEEYGGAYTSRNRGYNEAPSVPADYASVYEEKSYTDGRRENPCEFNRGYKDYTPLPVGYVTKELEYFPDVLER

SEQ ID NO: 340083 - protein, 54 aa, Zea mays
  Clone ID: MRT4577_73321C.1.pep
LFFYNSTVGRYQLRAVCLTWQRCLSHSSILFAANNSCDGTNHTHAASPSIQSPR

SEQ ID NO: 340084 - protein, 84 aa, Zea mays
  unsure (1)..(84): unsure at all Xaa locations
  Clone ID: MRT4577_73322C.1.pep
YAPDYPELIGILTKHDHLGDGTASTDKSSCAGDKPVIKMLTTKLSFGPLHHTEGXDKLXPVRDEDATDTLLEARDIQDDLNGIP

SEQ ID NO: 340085 - protein, 77 aa, Zea mays
  Clone ID: MRT4577_73323C.1.pep
LIFGFKIGLYLNVWRNVVDNQWVGGSLMLCILTIIKCCIAGAVDKYEVWSHRENGVEYSLGGLKTIPQYFIKKKKKR

SEQ ID NO: 340086 - protein, 123 aa, Zea mays
  unsure (1)..(123): unsure at all Xaa locations
  Clone ID: MRT4577_73324C.1.pep
TRKFPTRRGGGGKKSRTLFFGGKLTLSGPQKRVFLTPPGAGFGGPPFFRGFKAKKXFSPKNYLEKEFLQKKPQTLKFAFQATVGNPNFSGQKIISQFPEGKKPQWAKKGGLLFWFLKRLFWPP

SEQ ID NO: 340087 - protein, 132 aa, Zea mays
  Clone ID: MRT4577_73325C.1.pep
LEAGRGPVSLSCSRRRTFLVPALGAGGPCCAATRWWKQSETEAVIAPGVPAVRPCAGGRAGSPAWATEAPGTVKGPRQQLQSRRHGKVWLVVGGGVDPRRCTLPLVVVYAFGKEEISALAEKNRKFRKFRKF

SEQ ID NO: 340088 - protein, 132 aa, Zea mays
  Clone ID: MRT4577_73326C.1.pep
MMGGRPVPPPLVVALVTIFAIAAAAADGDEVKCGGCSPCGGADCPVLYPSPPPPPYYYYSPPPPATYPGESSSYYQPPPPGAYIQIGSAPPGKGPLYPQDPGFIPAGAPGRAAPLAVVAALAPALACAWALL

SEQ ID NO: 340089 - protein, 59 aa, Zea mays
  Clone ID: MRT4577_73327C.1.pep
PTAANKIHGAGAALQSAMQTPCLAQKNTSYHPGSSSSRHLPLVRPRNCVFGHRRRPVCR

SEQ ID NO: 340090 - protein, 112 aa, Zea mays
  unsure (1)..(112): unsure at all Xaa locations
  Clone ID: MRT4577_73328C.1.pep
TTASRYVDTPACNDKGPGRLLRDRICLPSXRLSGTAQLQRDRGGPERLLLLREGSEAYLYPEAMKCGVFLCVDPMNVSDDLFRIADTSERPRARRGPRRERDAPAGGRRGRS

SEQ ID NO: 340091 - protein, 63 aa, Zea mays
  unsure (1)..(63): unsure at all Xaa locations
  Clone ID: MRT4577_73329C.1.pep
LSVSAMSGRGKGGKGLGKGGAKRHRKVLRDNIQGXHARRKTVTAMDVVYALKRQGRTLYGFGG

SEQ ID NO: 340092 - protein, 82 aa, Zea mays
  Clone ID: MRT4577_7332C.1.pep
QNSSNEGSFNFVNTNALREIIMCCSRNHSTEMITGSHSFTSWPIPESRCYSFPKYIHCTTLLNPTFSCTKHVTSTLIIPART

SEQ ID NO: 340093 - protein, 111 aa, Zea mays
  Clone ID: MRT4577_73330C.1.pep
GTRILFLEFSSTKFKVTAAKLSAMSGRGKGGKGLGKGGAKRHRKVLRDNIQGITKPAIRTLYGFGRLNRPISRWRITWWRWTVVVVLCVWSSVVCVVFIGAVFCGGCTASF

SEQ ID NO: 340094 - protein, 107 aa, Zea mays
  Clone ID: MRT4577_73331C.1.pep
LEAGRDPPISTQPSPTPEKSPVLWSASERRRRCLGAARAARVWARGGVKRISGLIYEETRGVLKIFLENVIRDAVTYTEHARRKTVTAMDVVYALKRQGRTLYGFGG

SEQ ID NO: 340095 - protein, 126 aa, Zea mays
  unsure (1)..(126): unsure at all Xaa locations
  Clone ID: MRT4577_73332C.1.pep
NAPAAMNPKALNRLLAVKSAVKEVGXTIRGGSRPRRACRCTMVNIFXVVKLVPPQVAFLSKAMAIMTXFFSDLSVELAGQGSHVARSDVYPTITGWYLLTSIGLVLPXLLSKHAFSQCHKSVSPFP

SEQ ID NO: 340096 - protein, 100 aa, Zea mays
  Clone ID: MRT4577_73334C.1.pep
YILPSNITNDSVTRLSNIDDNPLQQAEYFLRILRAQSAPDCQTLVAAPMPSDLLAGKGPHDLPVITLRRLKRQHTRSLEDLVCTTNTARTKASDVNLLLP

SEQ ID NO: 340097 - protein, 133 aa, Zea mays
  unsure (1)..(133): unsure at all Xaa locations
  Clone ID: MRT4577_73335C.1.pep
CLVVLLWSVPFALGAPLPGSVFVCCXCCFCLLFVXSCCRASXLSFLLLLVLGCPFFSLPVVCLRCLPLASAXVPLVRFAARCFPSWCXPGRFSXSXAAFRXLFVPSFLPSXPWSSFPFFSSVSXXXQNGPRLR

SEQ ID NO: 340098 - protein, 111 aa, Zea mays
  unsure (1)..(111): unsure at all Xaa locations
  Clone ID: MRT4577_73336C.1.pep
GGRDGTVTVYLGRWPDHAGSSVLGSRVEHAYLGVCLTGAGQRSSSSLEHGDARLREDVVGAGRGVCAEAREVRATVKQTSSIEIGTYMGCIVVMKVYGEWMLPXGRLERRT

SEQ ID NO: 340099 - protein, 177 aa, Zea mays
  unsure (1)..(177): unsure at all Xaa locations
  Clone ID: MRT4577_73337C.1.pep
CYLFHAFFVISIYIFPCLFQDKPQPPPEGRLPDATKGSDHLRQVFGKQMGLSDQDIVALSGGHTLXVAVHSCLLQEFNVYACTDLVFFEVLXGRCHKERSGFEGAWTTNPLVFDNSYFKELLSGDKEGLLQLPSDKALLSDPVFRPLVEKYAADEKAFFDDYKEAHLKLSELGYADA

SEQ ID NO: 340100 - protein, 193 aa, Zea mays
  unsure (1)..(193): unsure at all Xaa locations
  Clone ID: MRT4577_73339C.1.pep
PGSDHLRQVFGKQMGLSDQDIVALSGGHTLXVAVHSCLLQEFNVYACTDLVFFEVLXGRCHKERSGFEGAWTTNPLVFDNSYFXECMSCLLLKSNCIXKKYLKFVYLCYVITGQLNAVLEINSHPIYPTXPYFHRELLSGDKEGLLQLPSDKALLSDPVFRPLVEKYAADEKAFFDDYKEAHLKLSELGYADA

SEQ ID NO: 340101 - protein, 84 aa, Zea mays
  Clone ID: MRT4577_7333C.1.pep
RKAERWSDDTSKHSVDGRRVPQERWGDSNNKDGSYDQRRENKWTARWGSNDKEYENWRDRWGDSGKEGDAYREKGLSHHGKDAN

SEQ ID NO: 340102 - protein, 62 aa, Zea mays
  Clone ID: MRT4577_73340C.1.pep
MSGRGMGGKGLGKGGAKRHRKVLRDNIQGITYTEHARRKTVTAMDVVYALKRQGRTLYGFGG

SEQ ID NO: 340103 - protein, 421 aa, Zea mays
  Clone ID: MRT4577_73342C.1.pep
MWGRHYWGGGRRPSWAPGGNGAGTGGVVVMFAWLSSQERHVRAYVELYAAHGWACLVCHSDFLTLFFPEKAAMLADRVIGELVKVLKITPVPVVFASFSGGPKGCTYKVLQLIERRCEGQLSMDEYQLVRDCLCGQMYDSSPVDFVSDLGTRFLLDPSVLKMSEPPRVLSWMTKGIASGLDVLFINKFEEQRKDYWETLYSSVHFGPILILCSEDDQLATYSVVQNFGQHLLELGGDVSLIKWHSSPHVGHYKHHPEEYRAAVTELLKKASTLYASRRQLNGHAVGTSEHTDAPAPASTSKSNPHRDAASSVGRSRLIQAPADPAGQFPSIPSSMEYHESSSQGPPQPELLSMPGVESSGLRCGVLGQALYGVCVPKDVEDGWDLAPPSASSDALWGAAAAAAPPRRGSFRPMRCVRRSRL

SEQ ID NO: 340104 - protein, 44 aa, Zea mays
  Clone ID: MRT4577_73344C.1.pep
VLIPSFIKLLCIHFDYTQHSFLSSYPEGITLQGRRFLLFNIVLL

SEQ ID NO: 340105 - protein, 52 aa, Zea mays
  Clone ID: MRT4577_73346C.1.pep
HCKLAVNDHKHDLDWVEGRAIVDSNDAVHERCDADHAEQLGNHCRRRHPYAW

SEQ ID NO: 340106 - protein, 81 aa, Zea mays
  Clone ID: MRT4577_73347C.1.pep
NMAPLCQGMRPLVADMRKKHGHVDLLNADVDHKSTFDGQCSRQAMPTLLAINEEGLQDKDQCSRTGTASSAARTTHVLVYQ

SEQ ID NO: 340107 - protein, 108 aa, Zea mays
  unsure (1)..(108): unsure at all Xaa locations
  Clone ID: MRT4577_73348C.1.pep
HTTEHFHSLELLNSFTLLSHHNIQLYIPLDIFSTLSSINSITTSFLEPLTTTIFQTNTILTNAKXYPCSSKPPNSLLTPFHKHSVQLITSSKTNHNLFSNISKNSLTL

SEQ ID NO: 340108 - protein, 66 aa, Zea mays
  Clone ID: MRT4577_73349C.1.pep
LPFGCYIQREVSCFPGDFFHGLSLPPSPMDTQGLNIWKFFNVQGFYVSCWRIFVMVACRLLKPRFS

SEQ ID NO: 340109 - protein, 124 aa, Zea mays
  Clone ID: MRT4577_7334C.1.pep
MGSLTNRRIVEGAVLAELVNTQSCHPTNVPPGPNITTNYNYKRLTVRATCNRQPNSDYTPDNCGTCGIKNVNLSPYSNMTACGNTLIFKDCKGCVSCYEVRRKEKPEYSHNTGTVYITDMNYEP

SEQ ID NO: 340110 - protein, 55 aa, Zea mays
  Clone ID: MRT4577_73350C.1.pep
HAITNHLGACINTEGYQRLLREDQNMKRWTERRTTNPRIIIYSMNGYPTIASLNS

SEQ ID NO: 340111 - protein, 100 aa, Zea mays
  Clone ID: MRT4577_73351C.1.pep
MVVKKVCPREFIPAHIIAEAISTLHGLDLRWSGPITPSERQYVEQYVLAMYPQYSHGLIEDGSCDKDDLYSTYYMSPEAGGERQRSSPAGSPSSSGGTRA

SEQ ID NO: 340112 - protein, 125 aa, Zea mays
  Clone ID: MRT4577_73352C.1.pep
YARRYRSGIPGSTHASGQERMRSREDEDALEQARRAHEEARRRQEQQQQQQQQRQEQQQQQQQAAAVAAASAPQAQSSQPQSMLDQQRELARKREQERRRREAMAATIDMNFQSDLLSIFEENLF

SEQ ID NO: 340113 - protein, 79 aa, Zea mays
  Clone ID: MRT4577_73353C.1.pep
CSSMVVSISSGHLYRQGNLVLELSRDVCDKCPGRTISSWLSVAGEVLLEHVIEARSVSYARSTGACYTCLAGTGPRSKQ

SEQ ID NO: 340114 - protein, 84 aa, Zea mays
  Clone ID: MRT4577_73354C.1.pep
KSSPQVYTSLGTSTGPRDTRAGSNTTSAHHLSYIILGLHLHLHLHLKLPNIRNEKTGLDFVEALFASGGIDHHSSLYPDGDRRS

SEQ ID NO: 340115 - protein, 45 aa, Zea mays
  Clone ID: MRT4577_73355C.1.pep
GRCLLKDKVMLPAWRTLEKSVDLINCCFLVAMGFSSYSFYILANN

SEQ ID NO: 340116 - protein, 71 aa, Zea mays
  unsure (1)..(71): unsure at all Xaa locations
  Clone ID: MRT4577_73356C.1.pep
RVGLEVRVGFDTVWKRSFSXLIGGQPSLLALSLILALFLFKPAPLYIFYQVDAALDLLPHLKYFLNLHRFI

SEQ ID NO: 340117 - protein, 200 aa, Zea mays
  Clone ID: MRT4577_73357C.1.pep
MAGFASSRPASLALCGFLIFLNVFAFLLAVGAEQRRSTGKVVPDEYDERSYCLYDTDASTVYGVCAFFVLLLAQLLVTGVTRCLCFGPALSSRGCAVAAFAVSWLTFLIAEACLVGGSAKNAYHTKYLGYYTKHDLVSCAALRKGVFAAAAAMMLINLAASLVYYWSYSKAADGGFIKHQNEAGVGMTDYGLDRGGSPGL

SEQ ID NO: 340118 - protein, 143 aa, Zea mays
  Clone ID: MRT4577_73358C.1.pep
GDWVPRGRPDLLVHRKENRVGRGAESARARRRADFHWSSPRIPIKIDAGPTNPPGLFSGRSGDHCLRRRGYRRQRRLFRSAERRGRGDCAPNPRHNHGLDAASVELGWPQPPFRSVYFQADDLLDRTSQVVSPLLPSWQHGNL

SEQ ID NO: 340119 - protein, 49 aa, Zea mays
  Clone ID: MRT4577_73359C.1.pep
RRLLSPRCGLVVRGSHCEQRWEYLAGDDAGRPVHSPSPRGVGAGAARDG

SEQ ID NO: 340120 - protein, 114 aa, Zea mays
  Clone ID: MRT4577_7335C.1.pep
EKKGFCPARFWGGHPQNWFFGPPPSPLNPIKKLGWVPGTPRNRSPPPFTGWGGRGQPPPWYSPRGGPPPGGPRPTRGGGTRPPPPWGSPRSPPSRGPGWGPTPRGPSWGPSPPF

SEQ ID NO: 340121 - protein, 125 aa, Zea mays
  unsure (1)..(125): unsure at all Xaa locations
  Clone ID: MRT4577_73360C.1.pep
PVTGLPGARPRVPVHFTWVAGCPHAVARPWKDGLACRAGDHLTRTGGVVGRHXWYPHATTVGIPSAPWLGAYPGGAGRSDQPTRXMGTADAQGRKARAVMAMKQVKTPICLEAMPEARLDDERAS

SEQ ID NO: 340122 - protein, 68 aa, Zea mays
  Clone ID: MRT4577_73361C.1.pep
PRMTCLWLLGLPWLGLIKTLCTFFSPPRGLDHRQSPWLVRAGPLSETDISVSVGPRESIYAVQVQACS

SEQ ID NO: 340123 - protein, 175 aa, Zea mays
  unsure (1)..(175): unsure at all Xaa locations
  Clone ID: MRT4577_73362C.1.pep
QSPAPSMRDLWTNIRADLTKMQATLQKVEQGLLQIKAAVQHEQHQLALSARLRTSAAVGIQVAARGFLARQKVREMRRQMLEAALVTVDLDTRRRDLTLSDGHQQWHQAAISKCEHDTCPAGDELQLYGSGGREGTHLVINKGALFSATTFRYRPPLGRLHWLLLRPXPGAXPRT

SEQ ID NO: 340124 - protein, 101 aa, Zea mays
  unsure (1)..(101): unsure at all Xaa locations
  Clone ID: MRT4577_73363C.1.pep
VNLGGPIEIITNGIFKSPVPRVVTNPEKKRLSVVLFYSIDPERKIRPPAKLINENHPALTKKVKVKKYTAGLYEHFXQGKLVKKTAKIKLVPFGLKPWTNP

SEQ ID NO: 340125 - protein, 166 aa, Zea mays
  Clone ID: MRT4577_73364C.1.pep
SHASRILTAFLTQCLACLWKQSMSYWRNPPYTGVKYFYTTVIALLFGTMFWGVGRKRDSQQDLFNAIGSMYASVIFMGVQNSGSVQPVVSVERTVFYRERAAHMYSPLSYALGQVVIELPYIFVQSLIYGVLVYAMIGFEWTADTFFWYLFFTYFTLAYYTFYRMM

SEQ ID NO: 340126 - protein, 81 aa, Zea mays
  unsure (1)..(81): unsure at all Xaa locations
  Clone ID: MRT4577_73365C.1.pep
ARRSINIERPNYCNLNRLESGEISCITAHLTFDGAPNEDANKXRPNLLPYPCIHLMLYYYAPERSYTDVLHKQETVVDITT

SEQ ID NO: 340127 - protein, 54 aa, Zea mays
  Clone ID: MRT4577_73366C.1.pep
GARGSPAFIVLLHYSHSMRASIIKLSAIHALLPRIHATIGGSSWATPSVKQVSV

SEQ ID NO: 340128 - protein, 40 aa, Zea mays
  unsure (1)..(40): unsure at all Xaa locations
  Clone ID: MRT4577_73367C.1.pep
RRVSGVLSKAPFILKLACDHXVEKSKAVREAMCFLMDPQL

SEQ ID NO: 340129 - protein, 46 aa, Zea mays
  Clone ID: MRT4577_73368C.1.pep
VSIIKKMNIKQSINAPERHNKLTSRGRETRDSEYQGFKGAQGGLEP

SEQ ID NO: 340130 - protein, 52 aa, Zea mays
  Clone ID: MRT4577_73369C.1.pep
GFQKIFDNMQKTALVFDGRNIVVSKKLREIGFLVFSNGKPLNAWVKDMPPVA

SEQ ID NO: 340131 - protein, 54 aa, Zea mays
  Clone ID: MRT4577_7336C.1.pep
DAWEKKNDVFILGSSRPMRAAALTGAKIHAAACDRHNSLLRHQEKMERPGVYKQ

SEQ ID NO: 340132 - protein, 40 aa, Zea mays
  Clone ID: MRT4577_73370C.1.pep
LLRPRNRDNNLLGKFELSGIPPAPRGVPQITGSRWADAGS

SEQ ID NO: 340133 - protein, 355 aa, Zea mays
  Clone ID: MRT4577_73371C.1.pep
EDVEKLLQALSKEEEAVRARLRRRARASRQSAHNVLALAAALEIVAVGYAIMTTRSPDISWQMRAVRVLPMFLVPALAALIYSTITNLTKMLDNRDQQTLEKLRTERQAKIDELKERTNYYTTQQLIQRYDLDPAAKAAAATVLASKLGADSGLRVFLGDETSRDAAIGRSNDNNLGPTTGLRQRKGHVTNGAGRAQSLEPFDGSNVYDGSDEGPSPPNQTVEHFRGPSGNDGGWLARVAALLVGEDPTQCYALICGNCHMHNGLARKEDFAFVTYYCPHCNALNGSRQHDDHELVPDSGKESPDSQSGGIIGQAGASLATSGAASPVASSLPTLEELSAEEDSGEKASSDQPAN

SEQ ID NO: 340134 - protein, 53 aa, Zea mays
  Clone ID: MRT4577_73372C.1.pep
NSAYSGQGLMWPTLKAPLPKNTKAQRRFSFLILIFEFQTKKKLFRITPLHWFF

SEQ ID NO: 340135 - protein, 106 aa, Zea mays
  unsure (1)..(106): unsure at all Xaa locations
  Clone ID: MRT4577_73373C.1.pep
VSSPPPPVPVSSAPPFAKVPXPPQFKGPAPPTSRRSPPPLVKPPPPPPLVSSPPLPPMTSPPPPAVPSPPPPAPSSPPPSAPEEFILPPIMAQQYASPPPPLFQGY

SEQ ID NO: 340136 - protein, 329 aa, Zea mays
  Clone ID: MRT4577_73374C.1.pep
QPVSPQPSPPPSVKSKSPPAPAPAPAPISSPPPLIKSPPPPVPVSSPPPLLKSPPPPVSMSLPPPSVKSPPPLPPRSPPAPVKSAPPPPPVSSPPPPVPVRSPPPPPPSPISSPPPSMKSPPPPAPISSPPPPTKFPPPPVSVSSPPLVKSPPSPAYVSEPPPTVKSPSPPSPPPMIKSPPPPVPVRSPPSSVKSPPPSPLLSSPPPPAPVRSPPPLTKSSPPPPPIRSPPPPQANSPPPSAPISSPPPPMQSPPPPAPVSSPPPPIKSPPPAPVSSPPPLAQSPPPPAPVSSLPPPCKSPPPPAQINSPPAPPPYRSPPTPQANSPPP

SEQ ID NO: 340137 - protein, 166 aa, Zea mays
  Clone ID: MRT4577_73375C.1.pep
PPAPVISPSPPVKILPPPAPVSSPPPPIPVSSAPPFAKSPPPQFKSPAPPTSRRSPPPPVVPPPPPPLVSSPPLPPMTSPPPPTLASSPPPPVRSPPPPAPINSPPPPVKSPPPPAPVSSPPRPAVPSPPPPAPSSPPPSAPEEFILPPIMAQQYASPPPPLFQGY

SEQ ID NO: 340138 - protein, 346 aa, Zea mays
  unsure (1)..(346): unsure at all Xaa locations
  Clone ID: MRT4577_73376C.1.pep
APTVKSPSPPSPPPMIKSPPPPVPVRSPPSSVKSPPPSPLLSSPPPPAPVRSPPPLTKLSPPPPPIRSPPPPQANSPPPSAPISSPPPPMQSPPPPAPVSSPPPPIKSPPPVKSPPPPAPVSSPPPPVKYSSPPTPVNSPPPPVKLPPPLAPMVSPSSPMKSPPPTAPVSSPPPPVKSPPPPAPVISPSPPVKILPPPAPVSSPPPPVPVSSAPPFAKSPPPQFKSPAPPTSRRSPPPPVKPPQPPTLVSSPPLPPMTTPPPTGAASSSPAXEVPVXPPGIXPRHLHSSNPXPPAXVCSAXDPSPTDPAPPPHHIXPPPSAPEEFILPPIMAQQYASPPPPQFQGY

SEQ ID NO: 340139 - protein, 202 aa, Zea mays
  unsure (1)..(202): unsure at all Xaa locations
  Clone ID: MRT4577_73377C.1.pep
HWVPRGRPDRCLRDYNRLLQFIRTLTGATSKVSPLLHSTDTPQSEPATRHERSCRLLLVPSAGTAQSTHTLIHVTVDPENKYXPTIAVXPHPLDLTTNCGKIRFYCXIPHGQENAAALMDAYYIRGHXAIIMVDVTXRITYXNVPTKHTELCRCCENIPIVLCXNXVMSNNRQDKAKKATFRRKNNLQHYEMSDKSNYDFEK

SEQ ID NO: 340140 - protein, 43 aa, Zea mays
  unsure (1)..(43): unsure at all Xaa locations
  Clone ID: MRT4577_73378C.1.pep
AVTVARALSVRATSKCGVHVMSGCLGDLTLWIAVTXLNHSDVV

SEQ ID NO: 340141 - protein, 239 aa, Zea mays
  unsure (1)..(239): unsure at all Xaa locations
  Clone ID: MRT4577_73379C.1.pep
MSLHQRPHQKPPAAGDSLPVSSPTASTAASRPHPLLTLPYLFSLLAVLLFVALLVPWGPAARSTSSSSSWRSYTLQDAAAFAAAAGNGTVLLAAVSGPYLPFLSNWLISVRRAGRADQVLVIAEDYETLDRINAAWPGHAVLVPPAPDAQTAHKFGSQGFFNFTSRRPRHLLQILELGYSVMYNDVDMVWLADPFAYIVENHDVYFMDDMAPVKXTDHSHELPPXRKKGRTYXCSCMLF

SEQ ID NO: 340142 - protein, 105 aa, Zea mays
  Clone ID: MRT4577_7337C.1.pep
LQDVCQRLIGRLAAAVWPACCRRGSCVRREVPSRAVGVEVVPVRPRQDALRKLSAPLLVAASRRSGGVGPRRVVVTEPGESGDGRRVRGGALQVAALLVAWYHGA

SEQ ID NO: 340143 - protein, 90 aa, Zea mays
  Clone ID: MRT4577_73380C.1.pep
HLLSSLSTMISFVALLAAGAALASPIERQASTAGLPLKRVSNLTSPKSLVSKGQARLNKVNGVAVKAVSDVSSGSVTNEDVSYVAPVSIG

SEQ ID NO: 340144 - protein, 110 aa, Zea mays
  Clone ID: MRT4577_73381C.1.pep
RRQASLIEEAQDGVLHHKTWCSGTSCGGINPYTLMGLYGPHHQRWLGPQDEDVRRTTGRRAPQGYKILYQIGYFACNSVPSGYIRRGRGPLEDTSDHILSTQINTTRRRT

SEQ ID NO: 340145 - protein, 44 aa, Zea mays
  Clone ID: MRT4577_73382C.1.pep
LQSTILQDYVDPALACCHSSNCTASSRPEAFCLAMLMCFPIICK

SEQ ID NO: 340146 - protein, 95 aa, Zea mays
  Clone ID: MRT4577_73383C.1.pep
GQMPSQIGVLLRDQHGIPLVKSVTGSKILRILKAHGLAPEIPEDLYFLIKKAGAIRRNLERTRRDRDSKFRLILVESRIHRLARYYKLPRKFQPT

SEQ ID NO: 340147 - protein, 79 aa, Zea mays
  Clone ID: MRT4577_73384C.1.pep
KSPGRGPSHIRGGKGSRKPGGGRTLVWVLGPVLGFWALVFREKKPPPFVRKKKKKKKKKKKKKKKKKKKKKKKKKKKKK

SEQ ID NO: 340148 - protein, 106 aa, Zea mays
  Clone ID: MRT4577_73385C.1.pep
KEEGGRPQKSQARTPKGDEQKPPDREERRPARTMASSNHRGRGEQGDNNDKAENDAPPPPPPEARVARKQNITISSQEQDHTSVDITHVFTAVIFSLCFFLFFFFF

SEQ ID NO: 340149 - protein, 154 aa, Zea mays
  unsure (1)..(154): unsure at all Xaa locations
  Clone ID: MRT4577_73386C.1.pep
GRVGWNGSRPNGQKADEHLLGVATCSSSSSGTSTLDTPLDTNSCHRSAASTDQAKGTAISCMARLLSDDSRHGNDFVGTPPAAQNISEPDHLHRYQPCGLTNNPTWKAGKHACKSIKMRTIRSVGHEGKDRTXDSNNDHGCQKTKTGKHEAARD

SEQ ID NO: 340150 - protein, 52 aa, Zea mays
  Clone ID: MRT4577_73387C.1.pep
DHNRSLITRIAPRVRKAFGFRCSNTVASDIPQLVIATPLASCCFHSFFYPHF

SEQ ID NO: 340151 - protein, 112 aa, Zea mays
  Clone ID: MRT4577_73388C.1.pep
QPRKSWCGVVKIASRFVVIARRGWSCHVGPIGYVSGTKREAVGGTPLSALDVDSWCGMVSWAGVHICRDGPAGVNGPKSAGYEGCRVFCMTVCICSLLSIPLYCENLKEHGT

SEQ ID NO: 340152 - protein, 80 aa, Zea mays
  Clone ID: MRT4577_73389C.1.pep
QASIVSRIMAPWGGVAAGNANSYPACGNQQVGNMTQDVLGSAPVHGNSIHDNITMDWYATDGSPNNWDNQHRDNDGMDSG

SEQ ID NO: 340153 - protein, 103 aa, Zea mays
  Clone ID: MRT4577_7338C.1.pep
ARRGELFPHRLVTSRRIRIRLHGQQLSDPFLMPDAWCSRVGERGREPCYSRPASRKSSCQLVQQFLLFSHVAGAWCSRVGGVASFIFLSNLRHTHPQAIAIIN

SEQ ID NO: 340154 - protein, 136 aa, Zea mays
  Clone ID: MRT4577_73390C.1.pep
NVPDIALQLLGLYPSWVSWTFSIILNFSVSMALYALVLFYHLFAKELAPHKPLAKFLCIKGIVFFSFWQGFALDVLTQAGVIKSHHFWLDVEHIQEAIQNVLVILEMVVFSVIQQYAYHVAPYSGADRAKFEKKNE

SEQ ID NO: 340155 - protein, 115 aa, Zea mays
  Clone ID: MRT4577_73391C.1.pep
MAVSGRAIRYGCPRLDSDSGNIRETAGGTRLPVHVVGGWCEVLIGPGVRTQWAEAAWSWTASVGFSILGFTAMTCTVKFSAEAAMAWQAAQDGRSDRRKHHRPRSSSDGRHRFDG

SEQ ID NO: 340156 - protein, 64 aa, Zea mays
  unsure (1)..(64): unsure at all Xaa locations
  Clone ID: MRT4577_73392C.1.pep
PXFFFFSFFXKKKKKFLFRSRVIPLDRYLRIKGGFFFFFWFLKSFEKIYIGWEKVLVKPNIFYY

SEQ ID NO: 340157 - protein, 74 aa, Zea mays
  Clone ID: MRT4577_73393C.1.pep
VFFSFWQGFALNVLTQAGVIKSPHFWLDVEPIQKAIQNVLVILEMVVFSVIQQYAYHVAPYNGADRAKFEKKNE

SEQ ID NO: 340158 - protein, 97 aa, Zea mays
  Clone ID: MRT4577_73394C.1.pep
SDRRDLDYYGTSSQGIKYYSLVLDWVRWDLERQPRMEQRSVPTQNSRSLVLKEDDHINQILLPLARSLPCFVVVSSKVCKIGNPALFDIVFIEKFKI

SEQ ID NO: 340159 - protein, 302 aa, Zea mays
  Clone ID: MRT4577_73395C.1.pep
MSFMSPFPGMDLSKMDPGTLTLLGAAGCVMLTMHFTVQLVSQHLFYWKNPKEQKAILIIVLMAPLYAISSFVGLLDIQGSKTFFTFLDAVKECYEALVIAKFMALMYSYLNISISKNIVPDEIKGRVLHHSFPVSLFLPRNVRLEHKTLKLLKYWTWQFVIVRPVCSILIIALQLLGLYPSWVSWTFSIILNFSVSMALYALVLFYHLFAKELAPHKPLAKFLCIKGIVFFSFWQGFALDVLTQAGVIKSHHFWLDVEHIQEAIQNVLVILEMVVFSVIQQYAYHVAPYSGADRAKFEKKNE

SEQ ID NO: 340160 - protein, 90 aa, Zea mays
  Clone ID: MRT4577_73396C.1.pep
LRRDCHDIKEAVATLHSCVVHTPPSFSHGPHLDAASTGYALPTPDVRATIIAEVIYASPDAMSTMPVLPSGSCFYDIIDIAVTGNVMALA

SEQ ID NO: 340161 - protein, 69 aa, Zea mays
  Clone ID: MRT4577_73397C.1.pep
MGFWATTLIFVLAGVAASLFTLLCCNRGPSTNLFHLTLVTTAVICCWMMYAIVYLAQMKPLINPILSGE

SEQ ID NO: 340162 - protein, 86 aa, Zea mays
  Clone ID: MRT4577_73398C.1.pep
AKHELTLGLLGPQPWSRHQACPPSCLLLAQQVPDLDPVSCWSEGVWAMGVAEPLLTVALVTPLIGSGRGDAVGAAIVRRGDQGPLS

SEQ ID NO: 340163 - protein, 70 aa, Zea mays
  Clone ID: MRT4577_73399C.1.pep
GTLIQFNCPPFTTAVPGKPRPFPNLFALHKFPFSQAGLLPKRPDPFAFPNISPPLCGNWTPPLSGPLSPG

SEQ ID NO: 340164 - protein, 117 aa, Zea mays
  unsure (1)..(117): unsure at all Xaa locations
  Clone ID: MRT4577_7339C.1.pep
ALKLVRVGAGAASSLLKSSFAGSRLPAATRTTPASLVVATDPRGAGALSICAYIXLLWGDPPYHLTSFRLTPIKEYILYREMTRPYMTDMITYSDTYVVIMGTGYTGLSCAYELSKD

SEQ ID NO: 340165 - protein, 88 aa, Zea mays
  unsure (1)..(88): unsure at all Xaa locations
  Clone ID: MRT4577_733C.1.pep
SDDITHWXENCKNKHATCANDYAIESIHYSCNYAYKDVEQGITLGDDYFFTRYPIVEKRLAQAGIRLALILNRIFDGDKADDIPLRVQ

SEQ ID NO: 340166 - protein, 210 aa, Zea mays
  unsure (1)..(210): unsure at all Xaa locations
  Clone ID: MRT4577_73400C.1.pep
LNHSGAPSASAPPRSPAXSRPPPRQARPPPARQSWRPRWNLPPPWQARPPPXGVPMQSIAPRRPXSPPPSPXPAMPPPPVDSPFPXNQPRWHTPPRPRWHTPPPXPSLPPPPVARFSTPSPLSPSSKGARPVCDWDGRMGNFRSRLTGQHRTITFGLEGTTPPSSGALCMVGTRTRSTSPTTSGCGAAEPLHTGLGLRRGHLHHLRATSG

SEQ ID NO: 340167 - protein, 111 aa, Zea mays
  unsure (1)..(111): unsure at all Xaa locations
  Clone ID: MRT4577_73401C.1.pep
TSYKAEGGHEESCAPQVTAAGPHLTSILRRRAEVCGPSVPPAPVPVPVPDHALRRHRARPWRGRHGQGRHNGHHRLAHDKGAGLHQGGGAAEPRPRRGAPPLRRXAAGLGP

SEQ ID NO: 340168 - protein, 70 aa, Zea mays
  Clone ID: MRT4577_73402C.1.pep
CPCWCSPKFSSPAWCVLCLTRDPPLLSFPVGAPSNALCAWFFSLCRPSRPAWGCNLSFNFPAIRVPAPSS

SEQ ID NO: 340169 - protein, 510 aa, Zea mays
  Clone ID: MRT4577_73403C.1.pep
LCVVQSPSLASARRAPAPARAPPPATPPLCWPGGAVAPRGKAAAGAGASAAASARRIAATLWRAHPPPREPGKAHRRLEPSPRHLHTPDRCNYYKAVLEGRTGTKPLGNGIIREVGAYSPSPRIEMEVATKWDRRSLNKSGGADYDFCDRHAAAADEEISQLKEELRQARNRIHELEAESRSAKKKLDHLVKNLAEEKASWRSREHDKVRSILDAVKGDLSRERKNRQRAEAMNSELMDEFSELKSLAKRYLQDYEKEKKARELMEEVCDELAKEIADDKAEVEALKKESMKVRDEVEEERKMLQMAEVWREERVQMKLVDAKLTLDSKYSQLCELQTNLEAFLSFHRSSSVDKETTRDGERLREAISSMKLHGKEFSYKPPPPSEDIFAVFEELRQREEVSEKEIGQCNGDTPMSRATKIHTVSPETDIFLGKTAKRYPTRPCARDEDDGDSGWETVSHAEEQGSSNSPDGSEPSGNGFCGGNGASASGTDWEEDNCEKCRSSSGITGI

SEQ ID NO: 340170 - protein, 53 aa, Zea mays
  Clone ID: MRT4577_73404C.1.pep
EHSVEVFTINILPSNQQCSYQCIFLHFFQKNVYIYFDNPIHKLFALFNTIVII

SEQ ID NO: 340171 - protein, 75 aa, Zea mays
  Clone ID: MRT4577_73405C.1.pep
FLGKGPPPLISLGAWTIWKVQNKWVFDGWTPSLAFSLRLAGEEKFFLEVAGAKGLSYLGAPPPQKNHLLRGWGGV

SEQ ID NO: 340172 - protein, 69 aa, Zea mays
  Clone ID: MRT4577_73406C.1.pep
RELHTKHVKITPALADHIRLYICPGSDQQEGMILTPSPFNTVCLSKRQIIHVCESLPSLLARRLAFPLE

SEQ ID NO: 340173 - protein, 113 aa, Zea mays
  Clone ID: MRT4577_73407C.1.pep
MAAEEGAVIACHTKDEFDARMAKAKEQGKLVVIDFMAPWCSGCQMMAPVYADCASKYPSAVFLEVDVDELLERRDARELCYRRRGRAPGRRQEVRRRWHYDGSCLGVRLIQEM

SEQ ID NO: 340174 - protein, 128 aa, Zea mays
  Clone ID: MRT4577_73408C.1.pep
MAAEEGAVIACHTKDEFDARMAKAKEEGKLVVIDFMAPWCSGCQMMAPVYADCASKYPSAVFLEVDVDELLEVAKIYGVHVMPTFCFIRNGETLESFATVDEDELRNAVRKYAAAAAGTTTAPASASA

SEQ ID NO: 340175 - protein, 126 aa, Zea mays
  Clone ID: MRT4577_73409C.1.pep
MAAEEGAVIACHTKDEFDARMAKAKEEGKLVVIDFMAPWCSGCQMMAPVYADCASKYPSAVFLEVDVDELLEVAKIYGVHVMPTFCFIRNGETLESFATVDEDELRDAVRKYAAAGTTTAPASASA

SEQ ID NO: 340176 - protein, 54 aa, Zea mays
  Clone ID: MRT4577_7340C.1.pep
LHGDLTTNLLFKSDNLIRAAFFLKKLNTKQKHVFLNSTNKSWNNRRITTLIAYI

SEQ ID NO: 340177 - protein, 128 aa, Zea mays
  Clone ID: MRT4577_73410C.1.pep
MAAEEGAVIACHTKDEFDARMAKAKEQGKLVVIDFMAPWCSGCQMMAPVYADCASKYPSAVFLEVDVDELLEVAKIYGVNVMPTFCFIRNGETLESFATVDEGELRDAVRKYAAAAAGTTTAPASASA

SEQ ID NO: 340178 - protein, 92 aa, Zea mays
  Clone ID: MRT4577_73411C.1.pep
KKDSQMPPQGQGTTHELTELRATATHRENETATPSRRQADRTRAKPDAHGGTLSPQHKRITSSAPTPGGHEGIPGEEDRDQAGTFIHALNAS

SEQ ID NO: 340179 - protein, 82 aa, Zea mays
  Clone ID: MRT4577_73412C.1.pep
KSGASQPRYNLKPIQAQKPKGLYSQQAKLPSFVQGQGFLKMTKLCYTSWHTTTGPITRTNYHIIKILAINIEQGPSSTWLTN

SEQ ID NO: 340180 - protein, 89 aa, Zea mays
  Clone ID: MRT4577_73413C.1.pep
KKKGSYGQIPPPLGPASHLCPEPNGPYIQPCDPLKLLAWLSIRRLLLCVIARRDPPVRLPSHASPTPLLLGPTRQDLPLPEVDLDPNRT

SEQ ID NO: 340181 - protein, 126 aa, Zea mays
  Clone ID: MRT4577_73414C.1.pep
MAAEEGAVIACHTKDEFDARMAKAKEQGKLVVIDFMAPWCSGCQMMAPVYADCASKYPSAVFLEVDVDELLEVAKIYGVHVMPTFCFIRNGETLESFATVDEDELRDAVRKYAAAGTTTAPASASA

SEQ ID NO: 340182 - protein, 57 aa, Zea mays
  Clone ID: MRT4577_73415C.1.pep
IIAVFYIVGGAPEILIKGQLLTGYHIDILKSTPQKVSRGQTNERQCSLEQDKFLTNH

SEQ ID NO: 340183 - protein, 61 aa, Zea mays
  Clone ID: MRT4577_73416C.1.pep
GQEYISIHMTNMRRDSYVDSANIGQISVERMSIIHISKPSFDGPSQSLAPPKDCMQLSVLT

SEQ ID NO: 340184 - protein, 82 aa, Zea mays
  Clone ID: MRT4577_73417C.1.pep
YEWDTDNHHFAGDSSRQKRNTRCWCRSNKSLKRLSPLGGAHATVFEYPFINVQATQATYRDKSSQTTSMSRAGLDKALCSAP

SEQ ID NO: 340185 - protein, 205 aa, Zea mays
  unsure (1)..(205): unsure at all Xaa locations
  Clone ID: MRT4577_73418C.1.pep
ASGAGAAHPRPAGGGRRRPQSRASHGPXLLRHAVQSWVTAAGTAGNXCTGTHXRVAGRPPRXESASWGRGPGTPXRAXPPXXPRVRXSAKRSGRXDXXGAXXGRXAQXKRWDDAGDTGTATSPFLRAPRPRXGRXQAKTHAAAXVDGRRHGADGPWRRASXQRPSWLVVXXWQTVAGGPGXCALRSRAAEQXXGGGHTAGSGXPG

SEQ ID NO: 340186 - protein, 89 aa, Zea mays
  unsure (1)..(89): unsure at all Xaa locations
  Clone ID: MRT4577_73419C.1.pep
ADRPPADXRXNXRATXVPSRQPPPASTARKPQCRAGLPSLVEGRHRHLLNCDNVSDSPLPNGPIPPLSGKISVSCKHFFIVYHIHHFRT

SEQ ID NO: 340187 - protein, 142 aa, Zea mays
  Clone ID: MRT4577_7341C.1.pep
MGKTRGMGAGRKLKTHRRNQRWADKAYKKSHLGNEWKKPFAGSSHAKGIVLEKIGIEAKQPNSAIRKCARVQLVKNGKKIAAFVPNDGCLNFIEENDEVLIAGFGRKGHAVGDIPGVRFKVVKVSGVSLLALFKEKKEKPRS

SEQ ID NO: 340188 - protein, 72 aa, Zea mays
  unsure (1)..(72): unsure at all Xaa locations
  Clone ID: MRT4577_73420C.1.pep
KKKKKKKKKKKKKKKKKKKKKKIKNKKKTKXKRKNNKNFFSCVRTPLRGIFWFFLPLFLRLNFFFLGPHFPF

SEQ ID NO: 340189 - protein, 184 aa, Zea mays
  unsure (1)..(184): unsure at all Xaa locations
  Clone ID: MRT4577_73421C.1.pep
RPHFPRTAGERRGGGGRHXGXHHQQGHGHRAGADDGAEHAPDSNDTESDDSKQPATADDKNGGSRTGADEHTTPPHTSGTDDQQGPTDKDPPGPARHHDAPRPPAEDAPHKHEPPADASHDSQGTSGAPGEGAAAKHTPNPPATHTPTARQGEGPPRPRRXRAGPRPADDADGHDKDQEHGQNP

SEQ ID NO: 340190 - protein, 114 aa, Zea mays
  Clone ID: MRT4577_73422C.1.pep
SRVSVWRLPPVCLSRARVSRAQMWWAPARARCRSRPPSIAIHLGWPIEEENPAANGRKFGPAAQADRGSEAATPAWQGWSTPWRGRGQVVAWPPPGVFGLKRSGEKGIRSSRCP

SEQ ID NO: 340191 - protein, 93 aa, Zea mays
  Clone ID: MRT4577_73423C.1.pep
GGATHTGTKMEPNIDLLYDHHYTKGRVQKLFGPAKQPHTDTMYQGSQSKQQHRQDTAQTIPPTIGSPRHDAPPEIPQPHAVAATTALTHLNKD

SEQ ID NO: 340192 - protein, 44 aa, Zea mays
  Clone ID: MRT4577_73425C.1.pep
LELGQPMRALSRGIALFRFIYYLCLSRQSGIRFLISLLRLEEGL

SEQ ID NO: 340193 - protein, 30 aa, Zea mays
  Clone ID: MRT4577_73426C.1.pep
PFKTPSTYKDHIISYTFPHIQLTYFMTHIK

SEQ ID NO: 340194 - protein, 58 aa, Zea mays
  Clone ID: MRT4577_73427C.1.pep
GAPPSVFPPVRPSSPSCSPRSGPPPGNLSPRSSLGGPPCPCDLPVARVCVRTNLCFNF

SEQ ID NO: 340195 - protein, 183 aa, Zea mays
  Clone ID: MRT4577_73428C.1.pep
MPFLNNLPIMPKEARPTMSYSTASTTAPYPQPNTASQRNAAIWSTSDDEILLRARASGLNWQPIASRNFPNKTANACRKRHERLIERRHVDDWDNQKLELLAQEYLACRKEMWEILAARLGERWNVVEAKCMEKGVKLLQTTARTAQRKASADHHAQAYCVEDRGISDHNSDSGIGAVVRFRA

SEQ ID NO: 340196 - protein, 142 aa, Zea mays
  unsure (1)..(142): unsure at all Xaa locations
  Clone ID: MRT4577_73429C.1.pep
GNTLNANTHSCNNXSTRVKNNRPTSKTLPAAGTPAELTRPSLSGPYQHIKLGSPPTPGAKTTDPSLVXGPACQDPHLLXKHRELATPDDVAALVAHDAXEHXNSIASTYNLQSRPPENWLEQDGSTVKINHHENLAHYNEVL

SEQ ID NO: 340197 - protein, 67 aa, Zea mays
  Clone ID: MRT4577_7342C.1.pep
RYMFSVCCRSELSIELLVTMLFTVFCLEYLLGPECLNCGHPHAIGVSQVVARSRLRRPLFQQQGRNR

SEQ ID NO: 340198 - protein, 273 aa, Zea mays
  Clone ID: MRT4577_73430C.1.pep
MGRSCPYRRLRHLAVVNVSKVSKSFPTSFRVVKIEHCRVLIRSRTNNPASAGRFAGGVAAMAASKPILYSAWISSCSFRVRIALNLKGVDYEYRAVTRNDLDYEKINPIKYVPALVDGDFVVSDSLAIILYLEDKYPQHPLLPQDLKKKAINLQIANIVCSSIQPLQCYAVIGLLDGTLGSNQSLQIVRNYTDKGFKAIEKLLEGCDSKYATGDEVQLADVFLAPQMYAGVTRFGIDMSKYPLLERFYKAYMEIPAFQVAVPEKQPDAPASPY

SEQ ID NO: 340199 - protein, 82 aa, Zea mays
  unsure (1)..(82): unsure at all Xaa locations
  Clone ID: MRT4577_73431C.1.pep
EKRLWEKTSFGPXXTKKLKNSEMLPKRQVEHVKTQKYLPPEDDNPYINKLYCSLQNYXIFYLNIEYPPCGDMMTLLIHKDIL

SEQ ID NO: 340200 - protein, 70 aa, Zea mays
  unsure (1)..(70): unsure at all Xaa locations
  Clone ID: MRT4577_73432C.1.pep
MILKLNYIKHLDYIFYLMRICSEFELQHTTPSXIDDNELCSVCLERSCSGAAEGCRHEFCIKCALYLCSP

SEQ ID NO: 340201 - protein, 319 aa, Zea mays
  Clone ID: MRT4577_73433C.1.pep
WPTMQIIGALWSQKARRWHDFIILTCSQSPLTRDNTAVAQLIRSCFSSFLGPLVDGRSCSVANRGVANLLGQSSDEKAHRLAVAPGFLYMRSCRLFPNNTFVCEEILEVVIERAHALANDRSSDRPARLRSECLPLSAASSLVEQIASLAATMLCHAGGVNLIRLLYEQIMPTLLLSGGEAKLGSGGMVCSIIEGYTLAYVLLFSGATVWGVGETSPAYTLIYTSKRQRVLDRHLEFMARVMEGNIVLGCGDATWRSYVLCFVNLLVSFVPAWVPEVKLNTLQKLASGLRRWHEGDLALSLLELGGSKTVTSVVESLLR

SEQ ID NO: 340202 - protein, 147 aa, Zea mays
  unsure (1)..(147): unsure at all Xaa locations
  Clone ID: MRT4577_73434C.1.pep
KGPPKERKNCCTPPPDRIKNPQPPSXPPVSEKLVHPKKGAPHELKKKAGLKPQPPGKKGAQRVGSPLXKTPKPPGHGYFPPPPGKKISAKPHPYLCKFWPPKNFGPGGPMSPPKKKGLKNPHHPLFGNPPETFFFGGEKPNHRGGPP

SEQ ID NO: 340203 - protein, 75 aa, Zea mays
  Clone ID: MRT4577_73435C.1.pep
ECDNNSTLEIKYDIDALDVIRLGAVIGLDDGNTVRSVDELSAKYQNIKIYYVSHDVVKIKDDIKTYLMLWSLAIK

SEQ ID NO: 340204 - protein, 27 aa, Zea mays
  Clone ID: MRT4577_73436C.1.pep
PKRYTSHPFFVCLATLCKRRRDTHHIP

SEQ ID NO: 340205 - protein, 100 aa, Zea mays
  unsure (1)..(100): unsure at all Xaa locations
  Clone ID: MRT4577_73437C.1.pep
RHYWGGGGGALAFLGVTATAKAVVDHGYVACPPGIRAENAGAPGRGLPXTAAGSPPPPGLGATPAPGSGGPPGAGGLIQPGGQGVPHPGPGLGRPCSGPR

SEQ ID NO: 340206 - protein, 66 aa, Zea mays
  Clone ID: MRT4577_73438C.1.pep
QESTCTDWSNQTCLSQFCVMSSPIFLYGDPKHGGTISCDRRLYVACASCTSSIPVCLSKNWIVTES

SEQ ID NO: 340207 - protein, 138 aa, Zea mays
  Clone ID: MRT4577_73439C.1.pep
MSYLPIILFGIYMSWIYLRYFQRRLEVGLKGDPSDEFSFSSFFPGFLRPILDPIASVFHKLFCGRPARPEGTGQTLDGSQFPGSGSTEANRRRERGQKALEQRLAEKLAAVRKAEGTPPPKQQQEEEEDAENDASDKV

SEQ ID NO: 340208 - protein, 75 aa, Zea mays
  unsure (1)..(75): unsure at all Xaa locations
  Clone ID: MRT4577_7343C.1.pep
FFFFFFFFFFFFFFFXKYDDTGSRMSNQNREYVTSSICSRPLWLSRHKKKPNGSSDLHIFKVSRSCIVQYTPVEA

SEQ ID NO: 340209 - protein, 33 aa, Zea mays
  Clone ID: MRT4577_73440C.1.pep
ARMSVDREMESVAVNQPVFTNVTALSGRIQGAY

SEQ ID NO: 340210 - protein, 40 aa, Zea mays
  Clone ID: MRT4577_73441C.1.pep
IFFFFFFFLIGGFLIFLRFTNHKPLFKKHFLYNTSSSKLN

SEQ ID NO: 340211 - protein, 244 aa, Zea mays
  unsure (1)..(244): unsure at all Xaa locations
  Clone ID: MRT4577_73442C.1.pep
MKQEAATSIVVTQEDVLHHYKEPPPRREDDPPALAASLSLPSSLSEDDGDAMPQPSSYAVLPRREGELVSAEELLLVPPLNFAMVDHGVYRSGFPDASNLPFLETLRLRSVLCLCPEPYPEANLEFLRAHGIKLFQFGIDGSKFWTFDTEIXEPFVNIPEDRIREALEVILDASNHPVLIHCKRGKHRTGCVVGCFRKLQRWCLTSIFDEYQRFAAAKTRVSDLRFMELFDVSSIKHLAFESSV

SEQ ID NO: 340212 - protein, 52 aa, Zea mays
  Clone ID: MRT4577_73443C.1.pep
LFFSPSVQILCHPGSSLGVPVLLARALFPFLSLLASLCSCRSCLVRFTPHCL

SEQ ID NO: 340213 - protein, 569 aa, Zea mays
  Clone ID: MRT4577_73444C.1.pep
MAEAAPAAGGGIGDILATSDRDFLVRNSGEQVKISSVEASPVAIYFSASWCPPCRRFTPKLIEVYEKLASQGKSFEVVFASADRNEEAFNEYFAKMPWLAVPFSDSEGREALDGRFKVSGIPHLVILDAKTGEVYTEDGVEFVSEYGVEAYPFTPDRINELKEQEKAEKENQTIQSVLGTSTRDYLISNKGDKVPISELEGKYVGLCFVVDGFPPLAEFTEVLAKIYEKLKEVGEKFEVVAVSLDSEESSFNESFAKMPWLAIPQGDIKCQTLVRYFELSSLPTLVLIGPDGKTLNNNVADIIDDHGFEAWEGFPFSAEKLEILAEKAKIKAASQTLESILISGHLDFVIGKDGAKVPVSELVGKTVLVYFSAKWCPPCRAFLPTLVKEYNKIKEKNSDFEIVFISSDEDQSSFDDFFSEMPWLAVPWEDERKASLKKTFKIRGIPSLVAIGPTGQTVSRDAKSQLMIHGADAFPFTEERLEELQKKLDEMAKGWPQKLKHELHDEHELVLLRRGTYRCDGCDEMGSSWSYRCDECDFDLHPKCALGEEKMSEEAPAGYVCEGGVCRKA

SEQ ID NO: 340214 - protein, 102 aa, Zea mays
  unsure (1)..(102): unsure at all Xaa locations
  Clone ID: MRT4577_73445C.1.pep
KRQQKKQIRETPNCRAAAPHNDRIVARFGFGLGGKAKPASKKVDNTSTFYDRPMRFPVAVLPDYLYGSLVGDYKFDPFGLRKPVEYLKFELNSLXQNLSKND

SEQ ID NO: 340215 - protein, 101 aa, Zea mays
  unsure (1)..(101): unsure at all Xaa locations
  Clone ID: MRT4577_73446C.1.pep
MAGLTNMPMRPARSDPPMPHRCPPSMARLRPKPMDRKKTCTLLLRVLTGVAGHHQIXQFSVRGKEPKDEAQIYTWNDATLRELTDLAKKVALPTRKRNARL

SEQ ID NO: 340216 - protein, 72 aa, Zea mays
  Clone ID: MRT4577_73447C.1.pep
VSFYMSLMLISTACAFTWSDVRRVCAHRLLQAVLAYGLGQIDIWICLASSFRCLDTGKCVFWISLLVYIPPA

SEQ ID NO: 340217 - protein, 125 aa, Zea mays
  Clone ID: MRT4577_73448C.1.pep
IQRRPRGARYNGPDRTWALGLNEDAPKEDVAAGLRQSAESCEGCPCPLCLCRTSGCSEGLERRVASLPSPQHLPSEGPVRQSHLVPKTSLDGGDAALARSGSAGVFDVTVDGRRTVGLRVSRSVA

SEQ ID NO: 340218 - protein, 104 aa, Zea mays
  unsure (1)..(104): unsure at all Xaa locations
  Clone ID: MRT4577_73449C.1.pep
VVCRFVVFVLPCRVLPACVSGVRGLAGSVPLCVPPCGWCRVFPRPRLCLLCVRLVPWPWWGRPSASPSPVCLWSPPPGGWCXCLLPGLLGFGGPPPPPAXXXXK

SEQ ID NO: 340219 - protein, 68 aa, Zea mays
  Clone ID: MRT4577_7344C.1.pep
TYNACYFFQPTLNLKRLILSSLRRIYYKQTNSTSIFLCHIIFYLSTTRLLSPHTFLYYLAITLIIVIL

SEQ ID NO: 340220 - protein, 102 aa, Zea mays
  Clone ID: MRT4577_73450C.1.pep
DHEDGVVLHAKTPPAETSPLLSDLLDCPLLVLPEMQPRAKSLTKDQLLIKGGGTPIMLPIILPLHLMHTVRPLYLPPPPLQTRAHRPHAPPPGGHHHSHRIL

SEQ ID NO: 340221 - protein, 82 aa, Zea mays
  Clone ID: MRT4577_73451C.1.pep
HTHTLDHVSTVMLDPPGDCKRPCTLVQLPPVPKVHTWFLGLRPTGDEQELTRHQHDFLHHAYEEAPSTMKALIPVSRLTGAH

SEQ ID NO: 340222 - protein, 69 aa, Zea mays
  Clone ID: MRT4577_73452C.1.pep
SGPEMTGPKHEACVYTHTRTTRDNSLPGLFIHNLGILFTELKHASQVASAVGKRIRTPDSRIKLLPQSA

SEQ ID NO: 340223 - protein, 84 aa, Zea mays
  Clone ID: MRT4577_73453C.1.pep
MGFHLLAFVAARGLMQAFNLSAPLSLRLPLARHLPEALAVLYGVLAAQAAWLNGALARGAAWSHSGSRGGVDEYVRHAMLSVYD

SEQ ID NO: 340224 - protein, 110 aa, Zea mays
  Clone ID: MRT4577_73454C.1.pep
FFFFFFFFFFWVQNNSPYNYFFQTFLYNLVCCFNFITFFFLIILGLLGGEQKNAQKRVGLNTFNSSKERGPRHHPASLWQERISGLRGKTDGSLGGGDRPPLSKKQLRGV

SEQ ID NO: 340225 - protein, 356 aa, Zea mays
  unsure (1)..(356): unsure at all Xaa locations
  Clone ID: MRT4577_73455C.1.pep
MHQHEILAIMRLSSLLLVVAALSARAAAQQVPPVGGSALKPDYYSQSCPRAERIIAEVMQTKQMANPTTAAGMLRVFFHDCFVTGCDASVLIASTQFQKSEHDAEINHSLPGDAFDAVVRAKLALELECPGVVSCADILALASGVLVTMTGGPRYPIPLGRKDSLSSXAHGARXELPHANFTVDRLIQMFGAKGFTVQELVALSGAHTLGFSHCKEFADRLYNFRSQGGKPEQFDPSMNPSYARGLQDVCRDYLKDPTIAAFNDIMTPGKFDNMYFVNLERGLGLLSTDEELWTDPRTKPLVQLYASNPTAFFDDFGRAMEKLSLFGVKTGADGEVRRRCDAYNSGPAVAATMPKM

SEQ ID NO: 340226 - protein, 44 aa, Zea mays
  Clone ID: MRT4577_73456C.1.pep
GFPLNFPLPMAATTAFEADADYRASWKERRRSRTSPRLHVGCEI

SEQ ID NO: 340227 - protein, 263 aa, Zea mays
  unsure (1)..(263): unsure at all Xaa locations
  Clone ID: MRT4577_73457C.1.pep
MGDWDPRGRPGGGEPISQELRKRTAMHKHEIPATMRLSLLLVVVAALSARTAAQLPLAGGGGGALKPDFYSQSCPRAERIIAEVLQTKQMANPTTAAGLLRVFFHDCFVSGCDASVLIASTQFQKSEHDAEINHSLPGDAFDAVVRAKLALELECPGVVSCADILALASGVLITMTGGPRYPVPLGRRDSLSSXAHGARXELPHANFTVDRLIQMFGAKGFTVQELVALSGAHTLGFSHCKEFADRLYTSATRAESRSSSTPA

SEQ ID NO: 340228 - protein, 54 aa, Zea mays
  Clone ID: MRT4577_73458C.1.pep
PTRPSLSRSLSFIATIAVKSARVLPVDFLAVTVSAMAVEAESGKCHRSSVRCSG

SEQ ID NO: 340229 - protein, 100 aa, Zea mays
  Clone ID: MRT4577_73459C.1.pep
SPARSYPPSHETLIASAASCALMRAPEEPRIVVRWSHPLLLHRACGRADYNGQSREGKAGLNCLLCVPPTARYYSVGLPCGVAWTAPSCRISCRPGGVHM

SEQ ID NO: 340230 - protein, 59 aa, Zea mays
  Clone ID: MRT4577_7345C.1.pep
QTFYFFLFANIELYLPLEIKVYSLHIYAIVQVVLITFTVVWSGSRWIKRTLIPVFVCRC

SEQ ID NO: 340231 - protein, 128 aa, Zea mays
  unsure (1)..(128): unsure at all Xaa locations
  Clone ID: MRT4577_73460C.1.pep
MCMLLSVALDDSNIMPGAGRITNSFRRLTHDKFMGEGRLLGELVVSTCELVERRHIRSXKRXITVSIVCQVPMFVLIAVSDFLXDIAQLENDYSVANAEINRICKVVILQSIMVGYDVNYIMRTIENF

SEQ ID NO: 340232 - protein, 43 aa, Zea mays
  Clone ID: MRT4577_73461C.1.pep
AKLLEIIGIKFLPFWNNTANKSQSLFVLNICFCIASKQILCLF

SEQ ID NO: 340233 - protein, 98 aa, Zea mays
  Clone ID: MRT4577_73462C.1.pep
KKAPAPIVSGENTFLLAPAKVRPIQWVVKRRLIDPLMGGGGSPGQLIPACQKGIVDFGGLINHFSPCLFVTNWGAGKIPNQIASQIKKNFEKPEQFRG

SEQ ID NO: 340234 - protein, 73 aa, Zea mays
  Clone ID: MRT4577_73463C.1.pep
LFGTGIYTPSALGTSFLCGTREEKAKMRLPFGFCTRRIYWGPTLSPSNSHAVGSLGELVQSPYDGMGLELTRW

SEQ ID NO: 340235 - protein, 58 aa, Zea mays
  Clone ID: MRT4577_73464C.1.pep
KKNLLKGFKNTIKQLGPFKRYRITENTSLYVLCSSKGRYFNNSLCRKKKREFKVYNKL

SEQ ID NO: 340236 - protein, 49 aa, Zea mays
  Clone ID: MRT4577_73465C.1.pep
HAKRVVIVPRQCHGDINFSYLIVDIIQLVNGRGCNRSTFARDSTSGILQ

SEQ ID NO: 340237 - protein, 77 aa, Zea mays
  Clone ID: MRT4577_73466C.1.pep
SLNINRAPAEIWGGGGGGVLPPVYGADTRPLHSVAPRGVPRVRGRATTTRPQEGVISRHTDYAEHPAPVGPHALLSP

SEQ ID NO: 340238 - protein, 44 aa, Zea mays
  Clone ID: MRT4577_73467C.1.pep
TRLTSLQTVDLSDNLLNGSLPMELSKLDSLRFFNVSHNSLSGSL

SEQ ID NO: 340239 - protein, 56 aa, Zea mays
  Clone ID: MRT4577_73468C.1.pep
NNRLSQPSKPRNVPLKKASSHSRSSKHKNIWTWTYSRKDLKTRRGSEGGPTEKNAG

SEQ ID NO: 340240 - protein, 77 aa, Zea mays
  Clone ID: MRT4577_73469C.1.pep
ILMSWNESGFIPVEANGPLTSYVQVVNHFTENYYIYFTNYWVQVMNQDYTFFYITTLMVIKERINNQSTTGSGLLCT

SEQ ID NO: 340241 - protein, 72 aa, Zea mays
  Clone ID: MRT4577_7346C.1.pep
KKKKERHNEGQEEKKKQKIGRTQKRRGREKKKQKRQRPNQKKRKKKKKQNQKPKPQKKKQKKQSTRQKKKKI

SEQ ID NO: 340242 - protein, 78 aa, Zea mays
  unsure (1)..(78): unsure at all Xaa locations
  Clone ID: MRT4577_73470C.1.pep
YWLXSVHGSPGRRRTPEPWPEILNPVGPRIFGFLLDHRSFGFNFFFGPFGLEGTGQGQQQLFTRKRNSGRTTATRRCT

SEQ ID NO: 340243 - protein, 47 aa, Zea mays
  unsure (1)..(47): unsure at all Xaa locations
  Clone ID: MRT4577_73471C.1.pep
SFMLCRGIVQVCLSFLXEGHSIFLGYGYVCWVTGHSRFVSVGARSIF

SEQ ID NO: 340244 - protein, 71 aa, Zea mays
  Clone ID: MRT4577_73472C.1.pep
PTYFLTPQEYTPHNVFTTKAPTLGSPVYPTRLYLPSSPPNRLWYTHPPPRLIQQNNGAGELHYDLIRRHTN

SEQ ID NO: 340245 - protein, 205 aa, Zea mays
  unsure (1)..(205): unsure at all Xaa locations
  Clone ID: MRT4577_73473C.1.pep
MESRNVVVCDNGTGYVKCGFAGENFPTSVFPCVVGRPLLRYEESLQEQELTDIVVGAACADLRHQLDVSYPVTNGIVQNWDDMGHIWDHAFYSELKVDPSECKILLTDPPLNPVKNREKMIETMFEKYNFAGVFIQIQAVLSLYAQGLLTGLVIDSGDGVTHVVPVVDGYSYPHLTXRMNVAGRHITSYLXDLLSXRGYANKSAD

SEQ ID NO: 340246 - protein, 168 aa, Zea mays
  unsure (1)..(168): unsure at all Xaa locations
  Clone ID: MRT4577_73474C.1.pep
PGRVIRSMRAAFRSFPAMQAPTCRGMPSLHHLPGLQGSGVRSHFHGAMHATGTLYGHRRARITIALHESPGSPPCVLLDVGVPTAKFIQDVSAAGMVRVTLECEKQHHTVDVGARRLLDEPVWTAEVNGESVGHASRLEATERDDCVMRMLHSTXMGAXVLPSDRTRG

SEQ ID NO: 340247 - protein, 59 aa, Zea mays
  Clone ID: MRT4577_73475C.1.pep
AKFRSNEPVVIGRLTNFDSPPSCAIFIICVISLFYHNNCSVEFYCSCGVPRVGSQFSLC

SEQ ID NO: 340248 - protein, 96 aa, Zea mays
  Clone ID: MRT4577_73476C.1.pep
TINHPLQKTGGGDGERVPRGEWRLVAGFERRRAIGGAPTVDFPPTQPWEHPRRCNGCPRPPFEGLDAAYLGFDRGGEIRFSSATVVGRRWLGLPAG

SEQ ID NO: 340249 - protein, 41 aa, Zea mays
  Clone ID: MRT4577_73477C.1.pep
PLFRCFSFGASGRAVDLLTFQVMFNFSYLGLIWVCCEVVWF

SEQ ID NO: 340250 - protein, 44 aa, Zea mays
  Clone ID: MRT4577_73478C.1.pep
PFNQHMAPKDGTLLQLQQLLPFNQLVLQNPEAFYQQPIIGGALF

SEQ ID NO: 340251 - protein, 75 aa, Zea mays
  Clone ID: MRT4577_73479C.1.pep
VRLPDCNRSAGRVAAGAACHALQSEIVTTEHEIEHMLHQRAHVRPSTTHKSRSSSCCRFHSHCRDSTRRDPTRML

SEQ ID NO: 340252 - protein, 406 aa, Zea mays
  Clone ID: MRT4577_7347C.1.pep
MAEAEAHGIVIVGGGICGLATALALHRKGIPSLVLEKSRSLRADGAGIGVHANGWRALEQLGVAAELRETAQLITVYHDVWQQGDKTSREKVPVRMELRCLNRKDLIEALAKDIPAGAIRFGCRVAAVAADPGGGHGAVLTMADGTAMKAKVLIGCEGTYSAVARYLGLSPVRTIPRPVLRGFTWYPHGHSFDTEFLRLRVGGFFIGRLTITDNLVHFFVTMPKQPTADVIKDLKRVRDLALKDLQDVECPAEIIEIVRGSDPESLNLVTDFWYRPPWEVVLGSFQRGAVTVAGDAMHAMGPFIGQGGSAGLEDAVVLARSLARAAAVDDADDDDNAREKKVVGEAIAEYVRERRPRLALLSLESFVMGALLVRSPSPVTKLVCVAVLILLGSKSLRHANYDCGRL

SEQ ID NO: 340253 - protein, 60 aa, Zea mays
  unsure (1)..(60): unsure at all Xaa locations
  Clone ID: MRT4577_73480C.1.pep
AGXGAPRCSTQDSARLPSEKTPPPLPVQACLTPAQSTRIQVIPTVTDLPTPAQSEERINR

SEQ ID NO: 340254 - protein, 48 aa, Zea mays
  Clone ID: MRT4577_73481C.1.pep
SWSHLRASDLAVLSRSLCIPIVPVALLDLVGPIICVLLYAEIPPPHGI

SEQ ID NO: 340255 - protein, 96 aa, Zea mays
  Clone ID: MRT4577_73482C.1.pep
ASLRTCPIHVSITSLFQPFLPISLRNARISSSSMAISFMSSGSAATDSDSYASRLGIKLRLSPARASRFLFRTRRIFISAIPSYSIRLGIRSRLTL

SEQ ID NO: 340256 - protein, 165 aa, Zea mays
  Clone ID: MRT4577_73483C.1.pep
VFFFFFFFFFFFFFFFCFFCLFFYFLFLGKKKKGDFPRATQVWVFCAPQVLNGPREPLPKWPGEMGGQKGVRKPLFLGRREKAWAPLLRNPNGLDVWGLGVGSPLGGPVFETEFPPLVPGTFLKAKSKFNFRGGGKKNFFWGDPKINPTGGAFKKSGLGKPGGYP

SEQ ID NO: 340257 - protein, 121 aa, Zea mays
  Clone ID: MRT4577_73484C.1.pep
TPAYAWASWPACACVHKRGEVPRSRATPLIRIHTTEIIALWGESRRGREIGRRRGLDHPLLVKPSWPSGVHCERLGRVAISASWVIIDWSVRYLSLEYHLYRRPAVRRGATSRPPESSTGK

SEQ ID NO: 340258 - protein, 55 aa, Zea mays
  Clone ID: MRT4577_73485C.1.pep
DAWGAPCLTFKKKKKKEKKRKNKKKKKKKKKKKKKKKKKKKKKKKKKKKKKKKSL

SEQ ID NO: 340259 - protein, 467 aa, Zea mays
  Clone ID: MRT4577_73486C.1.pep
PRVRATIAAVGENKNSGPESVVMRPTKSQLGDENMNSEHNGFVGVRKDAVQTGIVSHNLDGSIRRDGNTDQAGNSHGPLVQGGKDHKASDASTDHEKGRLFQQASLQNAGAPGSYVPPGVVPHPSGPDKMLPQHMTNHGHMHGFSENIRPPLQQPYGLFHSGTITRPFGENQIQMPMPQPGGIRPGDGMIRPSLVGPLPGHHGAVLSPFDLEHLGQPHSLGMLNSNDFGGEGFNTSRGAAYPGRHDNIEDDRKHFPAPALLDGQGLQRDPRHFERALGRPDGFLDSVPGRPPFPNHRSVGLHEGFPRKQNTTASHPDVLSHGAEFDHHRAIGMPNFRNPGPFAQGTSGGPGGPPKHQLGSGDMHPGDPHLVAEYAQHGFPKTAAHFGLGGFLRNGNSGWCRICMFNCGSAENLDLHVQTREHQQCAMDIVLKMKQDVAKRQKLNYGGPKSFNNKKVSGKGHFRGNRR

SEQ ID NO: 340260 - protein, 83 aa, Zea mays
  Clone ID: MRT4577_73487C.1.pep
LVCFHFNSSVRLLHRCVRVHVFFSASHSRCLRRRRRRRRARRTRGPPAGGAVAQHPPPLVERVLRLGQAPGAAPRRRRVIRLT

SEQ ID NO: 340261 - protein, 124 aa, Zea mays
  Clone ID: MRT4577_73488C.1.pep
EDVEEPSTKKTYGELLKDLKSIKEFAAGVLVPKTYIWPLKKDQYLAPSPSLVKDAHALGLEVYASGFANDIILSYNYSYDPTAEYLQFIDNPDFSVDGVITDFPPTASGAVGKNYPMLEGTERS

SEQ ID NO: 340262 - protein, 161 aa, Zea mays
  Clone ID: MRT4577_73489C.1.pep
MEVLRDMHLPPGFGFHPSDTELVSHYLKRKILGQKIEYDLIPEVDINKHEPWDLPAKCNLPIEDNKWHFFASRDRKYPTGSRSNRATLAGYWKSTGKDRAIKLKKRTLGTKKTLVFHEGRPPSGRRTEWIMHEYYIDENECKVSPDMKDAFVLCRVTKRSD

SEQ ID NO: 340263 - protein, 109 aa, Zea mays
  Clone ID: MRT4577_7348C.1.pep
APPPPPPVTSGSGDRRGPLSLPATPLYLKHTHPRRLLWTRASRQLSRRSPQTRHLLERRQHTTPVDHADGQSSRRTTCRTTLGASSRSSASVMRCRPVHHRQPADRVPS

SEQ ID NO: 340264 - protein, 269 aa, Zea mays
  Clone ID: MRT4577_73490C.1.pep
MLNSNDFGGEGFNTSRGAAYPGRHDNIEDDRKHFPAPALLDGQGLQRDPRHFERALVRPDGFLDSVPERPPFPNHRSVGLHEGFPRKQNTTASHPDVLSHGAEFDHHRAIGMPNFRNPGPFAQGTSGGPGAPPKNQLGSGNLPGNIQHAFAGPDIPPAPFNLGDMHPGDPHLVADYSQHGFPKTAAHFGLGGFSRNGNSGWCRICMFNCGTAENLDLHVQTREHQQCAMDIILKMKQDVAKRKKLNYGGPKSVNNKKVSGKGHFRGNRR

SEQ ID NO: 340265 - protein, 69 aa, Zea mays
  Clone ID: MRT4577_73491C.1.pep
FKYFHHQNTITRGPLFTNCADYKTQLLVPLVASRNTCIITIMHATNTMRTCPGTKRRATQHGTQQQQPY

SEQ ID NO: 340266 - protein, 517 aa, Zea mays
  Clone ID: MRT4577_73492C.1.pep
MEVLRDMHLPPGFGFHPSDIELVSHYLKRKILGQKIEYDLIPEVDIYKHEPWDLPAKCNLPIKDNKWHFFASRDRKYPTGSRSNRATLAGYWKSTGKDRAIKLNKLTLGTKKTLVFHEGRPPSGRRTEWIMHEYYIDENGCKVSPDMKDAFVLCRVTKRNDWSLDNDNEVGNRSSHLEQPDAATSVVSTVKPEDVAASVICPEESNHATTPIGSAELSNDVAQAAITPAAITPDSTTPNGGNELETWLQELLDPSPPFNLVADTGSADVCPTEQYAESSNLQNPGSMAPNIRPGHASPIQDGTDATDYLFTDDLPEDLYSMLYPGTDQFNDSIFLEQTGQEGNNNQTNYMMGIGSYVLPNNFENETPNAELQLDHENNKMDMSNENIDTGITIRRRRATAPPANISLAAGKIKMQVGIKRMVTSNSESINQTMKFTDNSGRRLDLRTDVEHQKKNANNVISAKQSDAANHEAHSNQGYLEGFKRCSSAGFRAYIFVALFVVGVAALVLHYHRSNANL

SEQ ID NO: 340267 - protein, 129 aa, Zea mays
  Clone ID: MRT4577_73493C.1.pep
SPQQPRLSRGLQKMFISWIQGIHICCPSCGWSCCSSAALSPLQCQPMNLNHGTSACLIVALVVSGSIGFVLGVVRQLCLHWTGIEIEFLSLSHWDYWKYIFATTDSQLSPLVFFVVLYILSFFSLLLIV

SEQ ID NO: 340268 - protein, 46 aa, Zea mays
  Clone ID: MRT4577_73494C.1.pep
VAVTAKGFFPSPRTCVKPTGPSGIVILRWTTYKKELNERPHATRYR

SEQ ID NO: 340269 - protein, 128 aa, Zea mays
  Clone ID: MRT4577_73495C.1.pep
ARIELSHNLSLVILVPQNLKHRLEDMEQALSPSVFKAIMEKLEMSKFQPTLLTLPRIKVTTSQDMLSIMEKLEFFDFSYDLNLCGLTEDPDLQVSAMQHQTVLELTETGVEAAAASAISVARTLLVFE

SEQ ID NO: 340270 - protein, 65 aa, Zea mays
  unsure (1)..(65): unsure at all Xaa locations
  Clone ID: MRT4577_73496C.1.pep
MEVLRDMHLPPGFGFHPSDIXLVSHYLKRKILGQKIENDLIPXVDIYKHEPWDLPCRXNLPIKDN

SEQ ID NO: 340271 - protein, 152 aa, Zea mays
  unsure (1)..(152): unsure at all Xaa locations
  Clone ID: MRT4577_73497C.1.pep
WSARTHHTRNGRCGATPSSTVLREDPTWMIXPTIRSTPXMDMRRPFFQHXHLIIEHDLHLIKSMEEDEEXDIXLYNRKDVKRNLGPEDSCISLKDSGCRCVGYMGSENKYIYTIEEDCFAAKDASGKDINAREHHIKNLLRPSTTFFFNTLY

SEQ ID NO: 340272 - protein, 147 aa, Zea mays
  unsure (1)..(147): unsure at all Xaa locations
  Clone ID: MRT4577_73498C.1.pep
MSAENTINDVLAKENSLSPGDRMNAVGTNMESITRVELDLAFASEKLLNLEMLVMEIARRATEFEPLTLESGSVSSETAEDAFELDTLYGILDAEVQELDDMISSLQIDAKNVEDKVYDEESGGKVXAKLDAAMASLKQMQDLIADI

SEQ ID NO: 340273 - protein, 202 aa, Zea mays
  unsure (1)..(202): unsure at all Xaa locations
  Clone ID: MRT4577_73499C.1.pep
MSMVFTQHVVKVPPKLTSSCTXTPSPKTKASXLMRRFLCTSEPATALLLMDHMHLSYSHINHXLLRPNALPAKDDVLCLFEGMMDKPEQLSXHILSSKDTNEVLLXINAYMTLHDRAXPTPDSFMLTQVXGSYHFVLFHESPXSLVVASDPQSMAALFWGITDDGCVTFSDNIDMFKGSCAKXLAPLPKGCFYLHALKRLKC

SEQ ID NO: 340274 - protein, 106 aa, Zea mays
  unsure (1)..(106): unsure at all Xaa locations
  Clone ID: MRT4577_7349C.1.pep
MHAMGPFIGQGGSAGLEXAVVLARSLARAAVDDSDNAREKKVVGEAIGEYVRERRPRLALLSLESFVMGALLVRSPSPVTKLVCVAVLILLGSKSLRHANYDCGRL

SEQ ID NO: 340275 - protein, 219 aa, Zea mays
  Clone ID: MRT4577_734C.1.pep
MARIHLYVVAAACAVALALAVPALAGDPDMLQDVCVADYASPVKLNGFPCKANISADDFFFDGLRSPGNTNNPAGSAVTAANVDKFPGVNTLGVSMARIDYAPGGQNPPHTHPRATEIIFVLEGTLEVGFLTTANRLLSKTVATGDVFVFPRGLVHFQQNRGHGPAAVVAAFNSQLQGTQAIAMTLFGATPPVPTDILAKAFRVGGGEVEHIKANFAPK

SEQ ID NO: 340276 - protein, 123 aa, Zea mays
  Clone ID: MRT4577_73500C.1.pep
MPTLTSDAIIASPRWGVLPLCGGGRSGGPRTRRPSSSGGHGCGWPPLDRVAVWVGGGIAAVFFASLERCSCVNVRTHDDLLDDERRDSEAPLMMFDDGNGNSCVQRRGARWCGKGKGTGSGDC

SEQ ID NO: 340277 - protein, 198 aa, Zea mays
  Clone ID: MRT4577_73501C.1.pep
SSAAPSSSSCLLSRRRRPSSSSYLLSRRRQLSPAAPPRCHPHSVPARALRLPRAASCPRPRWAVLPCCCSRGGSLPPRIQKQRQEPRSGHRGSHRRGLSSVGVRRVELGSVRPRGEVEGSLLQPHRLRYSTAEGEDVRQVLPGSALQCLFIRRWKKKCCCRGSGLLLRLVEVVLLQRLEVLLIERREGSLVRLSVCRH

SEQ ID NO: 340278 - protein, 140 aa, Zea mays
  unsure (1)..(140): unsure at all Xaa locations
  Clone ID: MRT4577_73502C.1.pep
MVLFMAGAALLAGADAPGAQEVVWSIITGAMVQSMLRTGGDICHQRAFFIGERGISSTIMGGGGTTMPYIXMYVTVAGREAGKKVLQSIISEKLDGCENIVREIEYVYXKGGKGRGDAEELLFMRTREILMDALTEDGKG

SEQ ID NO: 340279 - protein, 229 aa, Zea mays
  Clone ID: MRT4577_73503C.1.pep
SVIPLWKEVEYYEEFQRRLRARVGRSRAAAIVRGALHVVSIGTNDFLENYFLLATGRFAQFTVPEFEDFLAAGARAFLARIHRLGARRVTFAGLAAIGCLPLERTTNAFRGGGCVEEYNDVARSYNAKLEAMVRGLRDEFPKLSLVYISVYDSFLDLITNPDKFGLENVEEGCCATGKFEMGLMCNEDSPLTCDDASKYLFWDAFHPTEKVNRLMANHTLQVCYQEGVL

SEQ ID NO: 340280 - protein, 64 aa, Zea mays
  Clone ID: MRT4577_73504C.1.pep
IRDLVLHNNPLSRLMQQICLFSIQYNRPAFPESASIIAAAHNVYTLLRVHNGMPERKPPPSIEN

SEQ ID NO: 340281 - protein, 137 aa, Zea mays
  Clone ID: MRT4577_73506C.1.pep
AAACSSSPTPPSGTVVFFVDRAGRRRLMLISLVGIVVWLAVLGGTFLGAAHHAPPVSDLETRLLANQNQTQTQTCPEFNPNVRWSCMDCLKAASTCGFCAHQGDKLLPGACLALNNASRHACRADHREFYTEGCPNN

SEQ ID NO: 340282 - protein, 81 aa, Zea mays
  Clone ID: MRT4577_73507C.1.pep
KNLFGLMRIFRHPPVSFCRPLKGPSGSYRVFCLARGPLAGAFKGAPLPNPGFFFLVGLLAFFPLAVFFRPKLSRVLGFFAS

SEQ ID NO: 340283 - protein, 58 aa, Zea mays
  Clone ID: MRT4577_73508C.1.pep
YKVLLNQPSKHPSRKLQRTNMNDTYVSTYETRQWNHITVQLNLFVYTYYPIRQLPLYL

SEQ ID NO: 340284 - protein, 47 aa, Zea mays
  Clone ID: MRT4577_73509C.1.pep
YPRGKGQRGHKALLKCLCHGCPMREFLFIRGSEFLIFRMGVFLHLRV

SEQ ID NO: 340285 - protein, 107 aa, Zea mays
  unsure (1)..(107): unsure at all Xaa locations
  Clone ID: MRT4577_7350C.1.pep
KKKKKKKRPVPLERSPQPGGRXAXSRXQIRXXTPLKKXLSFPPSLXXRKREKGTTSXVDLPPPFTSLRGEGSRXSIEGAAEKRIEEAWSEKNHVAGSGGHYHKYEGG

SEQ ID NO: 340286 - protein, 512 aa, Zea mays
  Clone ID: MRT4577_73510C.1.pep
MADSAPSIPGVIASLQAYSTALSAFTAAWRAVETHASTLDSALAARLAGFSELELICSAMDGAGLRAYLTEHRDELKDPTRALDAALQVAPDPGLLVLSAAASFCRTLPEVAKSDGSVKASCRLLIALLDRLRAIGVKPSPEAREEARAVATDWKRGKRIGTETMFKQETFAFLHLVGVFGLVEDVGGTSEVLDLVVSISGRERAVDAFVVLGLDLDQHMPILIQKMVNKNKQLEAVKFIQALNIAHKYALLPIMRSYIDHAAVAGKMIRIRGDDLATQNAADAKERTLIGTLQKFIKEQKLEELPIFEEANKRMAHLDQQSAERKRTAAAAAAAARKVSKNIEEQQKRIQELMQPAKRPRSENVVKGSSGQNVNFAGTSTQQFKPQQSIHKAGVSNQYQAALTQNVLPAIAQISQLVAGSHRPVGIPNQALAVPPQYGSGSANYYGVTSTRPYRPITLPPGPGALNGPSAQASSRSRLYSGDPLAAVSRSSDKKGSSYKYSLSSMSTYDRK

SEQ ID NO: 340287 - protein, 78 aa, Zea mays
  Clone ID: MRT4577_73511C.1.pep
TLPQYQRKVQVKQKGSTAAVANKSHTTSTEGSTPSSNISELCSTPLHMGINEILQELNIRPMCMHTRQRTRGRTRGST

SEQ ID NO: 340288 - protein, 54 aa, Zea mays
  unsure (1)..(54): unsure at all Xaa locations
  Clone ID: MRT4577_73512C.1.pep
ADRVEKMLAVLDTNMLXVNPDCGLKTRKYTDVKPCLTNMVSVTKLMRTQLDSSK

SEQ ID NO: 340289 - protein, 128 aa, Zea mays
  unsure (1)..(128): unsure at all Xaa locations
  Clone ID: MRT4577_73513C.1.pep
KQAKYGDAPPTAIDLFKECHCSSKTGFXEPVKEAIDTMESLVVGPGVEGKESNTPIEAVVQVFASSKFLQNIGLVPATKKSGNGGRSYTCGDRAELESEKQNSLEVRAQLDALKKKVEESEQARVKEL

SEQ ID NO: 340290 - protein, 36 aa, Zea mays
  Clone ID: MRT4577_73514C.1.pep
KKFLGLFFFLIFIHKSQIPIPLYGWGLNSGGTNYSL

SEQ ID NO: 340291 - protein, 113 aa, Zea mays
  Clone ID: MRT4577_73515C.1.pep
AEVQAFFFFFFFYFFFFFFFFFFFFFFCWFFLGGISGPWGAVPGGSGGGPKLGESGAMGVPGGKLFSPKNSKQHTTREKKGETRGGPKGEQTPLSGGPLTARLPGGNPCVPGA

SEQ ID NO: 340292 - protein, 139 aa, Zea mays
  Clone ID: MRT4577_73516C.1.pep
ATFLLLSDLHLHANPNLEMIANLPKLGRLWVIQCPKLNALVGLTELQSITLQDYAAELFPQYLEETSAAKLEVFCNEELFKLITLQEGSEWCKIKNIQNVKAYAPKGGDRKGWYALYTKEPFSLTTINKGCEIFEAPPS

SEQ ID NO: 340293 - protein, 91 aa, Zea mays
  Clone ID: MRT4577_73517C.1.pep
MKPNIIFVLSLLLILEKQAAVMGQKGGSKGRLPSEFSQFPHNLDAQPYSGLNPKPQTESKGSFSIQYTYHVDANDHDQSRKSQQYDLNALH

SEQ ID NO: 340294 - protein, 49 aa, Zea mays
  Clone ID: MRT4577_73518C.1.pep
LNQGTCFIPMDGVDLLNLKITPSINLQPNIFHFVNQIPTKAFSKIISTP

SEQ ID NO: 340295 - protein, 60 aa, Zea mays
  Clone ID: MRT4577_73519C.1.pep
VRPYPVGQISVVGLKLLLVHQILAADQRHIQPSQRPELSVFALLHGRVAERVSGRVRGRV

SEQ ID NO: 340296 - protein, 147 aa, Zea mays
  Clone ID: MRT4577_7351C.1.pep
MELRCLNRKDLIEALAKDIPAGAIRFGCRVAAVAADPGGGHGAVLTMADGTAMKAKVKLACNRWSYIQYHIYIYPLPEIELFQVLIGCEGTYSAVARYLGLSPVRTIPRPVLRGFTWYPHGHSFDTEFLRLRVGGFFIGRLTITDNL

SEQ ID NO: 340297 - protein, 157 aa, Zea mays
  Clone ID: MRT4577_73520C.1.pep
MESSSHITGGDDAAGGEGCNSCESGWTMYLASPMHMHGHDDDDDAGGSANQGSSVDDGYGYMISGGGNKKQDYDDDDGDGDSLASDASTGPAKAANKSPSPPPEHKHGKEDDDRGHRGGGGGKEETKLATSSRKKAAAAGNGKLMDKAAAAAAGGGE

SEQ ID NO: 340298 - protein, 57 aa, Zea mays
  Clone ID: MRT4577_73521C.1.pep
TINFHYDQYILLLQPLNTHAKSIGAGPWWAGLGCARAHLEHPVGPPLITTTVHQQGI

SEQ ID NO: 340299 - protein, 144 aa, Zea mays
  Clone ID: MRT4577_73522C.1.pep
YFFPSGYKPRWSVKKKKKKKKKKKKKKKKKKKKKKKKNPHPPGYPWLGVGFDHLQTLIMAEYGTPFSKKKKKKKKKKKKKKKKKKKKKKKKKKKKKKKKKKKKKGAPPPPFFFPFGGGFWALGENRGKNFSRGEIFFPPHFPQN

SEQ ID NO: 340300 - protein, 70 aa, Zea mays
  unsure (1)..(70): unsure at all Xaa locations
  Clone ID: MRT4577_73524C.1.pep
YIQRTXXXGGETKRRGCAVKATKKGREGQTRPGALCKRHQPSKQTRHLARPIAPRAQTGPTARTRRKKRE

SEQ ID NO: 340301 - protein, 204 aa, Zea mays
  Clone ID: MRT4577_73525C.1.pep
MAPAVSILSATASAKRKRPATSDADELPHDDSSAPHQQVQGQGQQPRQQQQLECPRCRSTNTKFCYYNNYSTAQPRHFCRACRRYWTHGGTLRDVPVGGASRRAATGGGGGKRRRVSAEPSSPPPSVADACLPSAFPFLSDGSFFPQLDLVGGVALAPPAFSSSWQSVLVPDLYDGLAPWDDGATAGTWGDIGGLDLSWTLPGN

SEQ ID NO: 340302 - protein, 55 aa, Zea mays
  Clone ID: MRT4577_73527C.1.pep
NPWPYLGTDGVTKVFNPALYPLAFDPGAFFLKTSGNCPQYFSLPEWAVVFEIFKP

SEQ ID NO: 340303 - protein, 213 aa, Zea mays
  unsure (1)..(213): unsure at all Xaa locations
  Clone ID: MRT4577_73528C.1.pep
MEQRRWLAVAVLMCLLVLCSGRELKTKHVPIYDPVLARTLAEYTSAVYTADLTQLFTWTCERCCDLTEGFEVIELIVDVKNCLQAYVGFARDMNAVIVVFRGTQENSIQNWIEDLFWKQLDLDYPGMPEAKVNVGFKDVSLMTFGQPRIGNAIFASNFKRYLPNAIRLINAHDIVPHLPPYYRYFPXKTYHHSPREVWIHYVGLGRLVYSIEE

SEQ ID NO: 340304 - protein, 61 aa, Zea mays
  Clone ID: MRT4577_73529C.1.pep
GIRGEGGREQALLEYMAGWTRVALNHIYSRRGNIADIILEPKRAEEADQRTITPQQPRIKQ

SEQ ID NO: 340305 - protein, 91 aa, Zea mays
  Clone ID: MRT4577_7352C.1.pep
SEYLTCQSYQSIYSSKISPQPGLNSSTSGEDVTLYASAQSQSLHTESGRDSSTSICGSVASDTLVEDYVSSELETTNNFDGSIKDSQRSSD

SEQ ID NO: 340306 - protein, 344 aa, Zea mays
  Clone ID: MRT4577_73531C.1.pep
MEQRRWLAVAVLMCLLVLCSGRELKTKHVPIYDPVLARTLAEYTSAVYTADLTQLFTWTCERCCDLTEGFEVIELIVDVKNCLQAYVGFARDMNAVIVVFRGTQENSIQNWIEDLFWKQLDLDYPGMPEAKVHSGFYSAYHNTTMRDRVMRGIKNTRKLYGDIPIMVTGHSMGGAMASFCALDLIVNVGFKDVSLMTFGQPRIGNAIFASNFKRYLPNAIRLINAHDIVPHLPPYYHYFPQKTYHHFPREVWIHNVGLGSLIYSIEEICDDSGEDPTCSRSVSGNSVHDHVHYLGISMHAESWGHCRIVTDNSTLPQQYKMDPDGNIILSKQPGLSVNELHSAQ

SEQ ID NO: 340307 - protein, 126 aa, Zea mays
  Clone ID: MRT4577_73532C.1.pep
RPPFLKKRDVVSFFQRGGFHLGGGGPPPPPPWGAPRCFCIRAPPKFFNTPRNGFSSPPPSNRGVFGFFPRRFIPTFILGGNTGEKLGPLTSGRVLFPGFPPGGNKFPVCPLVFVFFGKRVFFRGSP

SEQ ID NO: 340308 - protein, 246 aa, Zea mays
  unsure (1)..(246): unsure at all Xaa locations
  Clone ID: MRT4577_73533C.1.pep
MATGSDAGKSAEAVLEWPKQDKKRMLHAVYRVGDLDRTIKCYTECFGMKLLRKRDVPEEKYTNAFLGYGPEDTNFALELTYNYGVDKYDIGAGFGHFAIANEDVYKLSETIKSSDCCKITREPGPVKGGSTVIAFAQDPDGYMFELIQRGPTPEPLCQVMLRVGDLDRAIMFYEKALGMKLLRKKDVPQYKYTIAMMGYAEEDKTTVLELTYXYGVTEYNKGNAHAQVAIGTDDVYKSAEAVELVT

SEQ ID NO: 340309 - protein, 66 aa, Zea mays
  Clone ID: MRT4577_73534C.1.pep
TAPVLPFGNVMDKNSFSNPNKVAPVKNQLNTPPKQMQVKLAPHSFTAFDLALVKPKLVGEKKCVCC

SEQ ID NO: 340310 - protein, 81 aa, Zea mays
  Clone ID: MRT4577_73535C.1.pep
LGGINTRIWDLPHQPPTTMSEHTCPSMTRTTTPMVQPKHNLLIRLPSTCWFKPEHAVSLLHHFVRNLNYLREMQTDHDIPI

SEQ ID NO: 340311 - protein, 61 aa, Zea mays
  Clone ID: MRT4577_73536C.1.pep
FLRNEKQKLDQILTGLDPERTALDHHHFSPFKHLLTRTSFLKKGTGTGSNHKAHQLHQLYE

SEQ ID NO: 340312 - protein, 127 aa, Zea mays
  Clone ID: MRT4577_73537C.1.pep
HLPTVWSSSVGSAQQAGCDALLCGFCCCSRRLLRHVRALQNGDIRVRRGGARGLGGLLDAVYLPAQSRLSIIRCRSWSPAFEMLAVQCSRPYRRYPSLGFTCLLTGGWRGGGKMRLKSLLAGPDPAG

SEQ ID NO: 340313 - protein, 99 aa, Zea mays
  unsure (1)..(99): unsure at all Xaa locations
  Clone ID: MRT4577_73538C.1.pep
RXKMCEISLLSELAFNMTLETSXRWCRRSYSKDDTLLAITERAWPIYYLHIPPYLTGMLPGDRNQQLCHTCLTAVIIQYGVLCTXHPNCTFHDEGPCAI

SEQ ID NO: 340314 - protein, 49 aa, Zea mays
  Clone ID: MRT4577_73539C.1.pep
RIIKAGLDKNRKKQNHPERISLMMAICQEQVNGMKKRSIEHHSTSLSPL

SEQ ID NO: 340315 - protein, 130 aa, Zea mays
  Clone ID: MRT4577_7353C.1.pep
GVFTSPLGVRVPSLIVGEIKFRPGVGGPPPAAVEGRGQLSFMFVKRRSPVFFFPGAFFWSLSSPWMTCPPFFLKKRALLFRSFYSGVGTHNGPPFFLYHPAVRACAESIWNNGSPTNRSEKRAHKLCIGE

SEQ ID NO: 340316 - protein, 61 aa, Zea mays
  Clone ID: MRT4577_73540C.1.pep
IYQQVLVDSGHNEFLRHALLGAGALGRRISRTRILSRAQDCKNSTEAGKNMGARRTGCCPG

SEQ ID NO: 340317 - protein, 130 aa, Zea mays
  Clone ID: MRT4577_73541C.1.pep
ADADPSNRMTENHLSESERSQDPAILMGVLFGDLVDEVKHQALQVELLEIRSVRCPQSYVMLAHSDEAWTDFKRSLCGSYILEYEELDRHFFQAAHSTMSTSSVSSNESCMEHKLEMLGTRRGFFFLSPV

SEQ ID NO: 340318 - protein, 48 aa, Zea mays
  Clone ID: MRT4577_73542C.1.pep
VFQLDKINPQVAPRMVSAFSRCRRYNKTTQALAKGQQHMIVSSYMLSC

SEQ ID NO: 340319 - protein, 108 aa, Zea mays
  unsure (1)..(108): unsure at all Xaa locations
  Clone ID: MRT4577_73543C.1.pep
HLLALVALXXSATDASIIPQCSLATSAIIXQFLPPVXXXXLXXXSYQXXLQQQALAESVLHQPIAQLQQQSXXHXKLQAITTKQXRQFLPTLMHLAMVNPVSYLQEQL

SEQ ID NO: 340320 - protein, 201 aa, Zea mays
  Clone ID: MRT4577_73544C.1.pep
MHSSRYLAVRVQCRGGHGCPADHYRLALVLVLRVLAVEPQLPCLSARPWRSGQPRRPCACLNAVARPASCSPIFPARPAEAPPMARVPPRPRCFSAGRRSSQPRSSLVSTPSRSPFHLCSTLLCLSPVTAEPTVASSPSSPSSRRSPLCSLPIATFLICHAVLESRRLTLPSLFPLVMTESEIIAVLVAFKTVSGFVIPVD

SEQ ID NO: 340321 - protein, 58 aa, Zea mays
  Clone ID: MRT4577_73545C.1.pep
LTLISHRLPYLFIYLFTYHLSIVYIIYALPKSRLDNNKLIHFHKLCALLCEISNSVSV

SEQ ID NO: 340322 - protein, 230 aa, Zea mays
  unsure (1)..(230): unsure at all Xaa locations
  Clone ID: MRT4577_73546C.1.pep
MGGLRSTQHDCGGGVSHSLSFLLGALLPTVPLFFLASDRVDEQLSSISTFRFGNGSAAHQLTRHAASLPTMSGMVPXKEESFPGLAELLPRVAMDDGTVIITSVNEAFARPGSLLDLFRGSFRDGEGIAHLLNHTLIVAADPGALALCEAVHPHCYLLQVMAAGVSSANGFLTRXXLELVWSKLTFQHRVLQLGYNYLYPDLDVMWLRNPFRHISLYADMXISTDRNGDA

SEQ ID NO: 340323 - protein, 49 aa, Zea mays
  Clone ID: MRT4577_73547C.1.pep
MPCPLPGIFNFQLFYALVLHIPLPYPNKYLQIHPNIIGTSLFPFLFTLP

SEQ ID NO: 340324 - protein, 206 aa, Zea mays
  Clone ID: MRT4577_73548C.1.pep
PRGSRPGLTCLCLARQGTAPTERSVRACVHALQATWHRGVHPWESSRTHPHPPIDDLLSGFRTEHRRAGPCRAPIQRIATLPRADPTAPRPPASSPHLRSGVPIPNCAGRQSCNCNSPLVCLSRRRRRRHFLRFACSAAPATRRARELLKRVRCWIGCDTAATGIGVALLLLFIYTKGNLSAAQRGWSILYDQGKRTDDQTTNCCK

SEQ ID NO: 340325 - protein, 88 aa, Zea mays
  unsure (1)..(88): unsure at all Xaa locations
  Clone ID: MRT4577_73549C.1.pep
KKGEVGTVGESSGVVKVSKRFGRLLFGILRWNSTIVEKIRGIGLRGKRLVMHCKLHSMLLKWILPLPSMLMDQVLVIVQTLGWXXCKD

SEQ ID NO: 340326 - protein, 95 aa, Zea mays
  Clone ID: MRT4577_7354C.1.pep
RRAVRHHGNGEEDFQLRRLARAATGIGDGRTSRANRPGWLQQYQLIGKNGEGTYGLVFLARLKASQPAPCRRGPPIGIKKFKQSKEGDRVSPNAI

SEQ ID NO: 340327 - protein, 141 aa, Zea mays
  Clone ID: MRT4577_73550C.1.pep
GLLAGGLGAVGSARGSVAIRWIGALHGPARLCSVRKREPRQEVVDGWVWVGARALVDGCIGRSTLPFLPLEVAAWQGHHPWTWLESWTSHVRPRESRSRSPSLSHGCTPRCEVAWRACTHARTLRSVGAVPCRARHRQVSR

SEQ ID NO: 340328 - protein, 50 aa, Zea mays
  unsure (1)..(50): unsure at all Xaa locations
  Clone ID: MRT4577_73551C.1.pep
MAQAMASMTGLSQGVLPSKRAANRAKTGAVVKASAXGAXAQAGRRAVLGL

SEQ ID NO: 340329 - protein, 153 aa, Zea mays
  Clone ID: MRT4577_73552C.1.pep
WKHRKLYLCRVRISYCRREEEEKKTCAESIVENSEFTRAKKKNLRTPYQVLRAKPFMHLLNWPKKKKPCAATPNSKQTWHRGGQIMRVEVEMVSPFFFFALHFEATVLLIACARETSSPTYLSRAPDSPTEMHLSFMSFPENAPGNFSQDTPH

SEQ ID NO: 340330 - protein, 566 aa, Zea mays
  Clone ID: MRT4577_73553C.1.pep
MDTETGDTRSPLLPHHPPSQTQVSSANQHYNKPFSWKAPAIILAFEFLESIAYSGIALNLVVYLGTVLHGTTASNAANVDAWNGATFLTPVLGAFLADTYWGKYKTAAISIIFYVVGLLIITTSAVIPSLRPASCEGGSCPPATGFQYFVLFGSLYLISIGTGGVKSALLPLGADQYNDANAEESKSKQLFFSWFFMAVNLGVFISGTVLVWIQQNVAWSLGFGISSICLVIAAVAFLVGTPLYRVQLPTGSPLKSIVMVFVASYKKRGVAVPADSTLLFEGNESSSIVPNKIEHTDEFRCLDKAAVVVEDQEMKDSHRPWLLCTVTQVEEVKILIRMLPIWFTCVFYSAAMSQTATTFVQQGNAMNTKIGSFSVPAASMNSAEVIFMLVWVVFQDSVVIPIARRYTGNPMGLTLLQRMGVGRLLAIPSLAAAALVETWRLRSVKAGHNLSIGWQLPQFVILACSDVFCGIAQLEFFYAEAPASMRSLCSAFQFLAMSLAYYVNTLVVALVASVTTAWGGKGWLPADLNDGHLDYYFWLWTGISVVNYVVYTAFARRYTVKKVVGQ

SEQ ID NO: 340331 - protein, 124 aa, Zea mays
  unsure (1)..(124): unsure at all Xaa locations
  Clone ID: MRT4577_73554C.1.pep
YGLFPRSGAPSLGGFLSGPFFFCSIGASFLPSFPFFIWERAPNFFLVSISLESRATHFIFKYVSNFPNCLVFNFPCSSVFELQPPCCKNNKAHTLRGEKTAHSLKKPPXXXGRPPARYARRPRK

SEQ ID NO: 340332 - protein, 119 aa, Zea mays
  Clone ID: MRT4577_73555C.1.pep
MEVEAAKCECCGFTEECTPAYIAAVRAQYLGRWVCGLCAEAVGDEIRREGTITTAEALDRHVAFARAPRSRRAPAEDDLVAAVARLLRRCLDSPPASPAPPPQSRKVAAGPGCPDGADA

SEQ ID NO: 340333 - protein, 110 aa, Zea mays
  Clone ID: MRT4577_73556C.1.pep
ALQEAGQSTFSQSLVSSHVDVESGADGVLVMKLDLPCAVRSQSSLSVNPERSSGDVDLVLGHLVEGAAGLAAREDGVGAAGAARSLDRRIPCRPCTGRRRKMGLDGSPGR

SEQ ID NO: 340334 - protein, 92 aa, Zea mays
  Clone ID: MRT4577_73557C.1.pep
MSWHVSLASWRLRWNLISPTLEIKVQKLVLNMVPLESAYRLTCARTVLSQLSCHTPFLYKVMDTFRTFGIRHNQKMLWYVSVWCETDMQLLE

SEQ ID NO: 340335 - protein, 51 aa, Zea mays
  Clone ID: MRT4577_73558C.1.pep
LQRITTYCSSSCRTPRSGTAHSHSRHRWNEHRYISSCYVYYINKYILLATS

SEQ ID NO: 340336 - protein, 109 aa, Zea mays
  Clone ID: MRT4577_73559C.1.pep
MAEPKSRRVILKDYVEGYPTEAHMELLPAAPVDEAEEGSVLVKNLYLSCDPYMRPKMSRPLHQSYTAAFVPGAAITGYGVSQVVRSSRPGLAAGDLVWGMTGWEDYSVI

SEQ ID NO: 340337 - protein, 152 aa, Zea mays
  unsure (1)..(152): unsure at all Xaa locations
  Clone ID: MRT4577_7355C.1.pep
APRPSAVCVCPLFQVPALSRSRWELHRCPSPCPTPLSSDPALPEXSPLPARSPHSLPPXPHHPLKPXPYRPLRCPESRREQPXAVRPGAPPVPRFRPPPPFIKTAPPPAPXSAEPSPLXSPRDTPPPGGKNPTPGLEVAAPPPSDVHRYVKF

SEQ ID NO: 340338 - protein, 46 aa, Zea mays
  Clone ID: MRT4577_73560C.1.pep
ECKREGGGKSSTVRTINPNLAGSKAKIILIRHPPMLQLPARAQPPS

SEQ ID NO: 340339 - protein, 135 aa, Zea mays
  Clone ID: MRT4577_73561C.1.pep
DDDDEVFFVGRVKELIKFKGFQVPPAELKVLFFAHPSIAEAAVVPQKEETPGEVPLPFVVRAPDPDIAEDALKEFISKQVVFFKRVPKVFFPPSIPKLGSGKILRKELGAKLSATPTPLGALRSGSMPFYVQLVW

SEQ ID NO: 340340 - protein, 182 aa, Zea mays
  unsure (1)..(182): unsure at all Xaa locations
  Clone ID: MRT4577_73562C.1.pep
MSLPLYIMLQRLRPVPSPINSVLEITEMPTGRLSGNITQDWEPVVLRRTKPKAADLKSSKAVNQALRSGAAVETVRKSAAGMNKHSAAVAPARKLDETTEPAAVERVAVEVRAAIQKARVAKGWSQAELAKRINERAQVVQXQEYESGKAAPAQAVLAKMERALEVKLRGKGVGAPLAAVGK

SEQ ID NO: 340341 - protein, 160 aa, Zea mays
  Clone ID: MRT4577_73563C.1.pep
PRVRSMLAQILGARRRIEDGVATGNSSLAVALALDASGHLLACERCCRSLEVANKYYQQAVVAHKMDVKHAWAADSLRSLLDCVEASSYDFTFADADRRMPQEYYQLLLKLLRLGGLIALDNVLWYGRVADLLDDDQNTISIWYFDMKALHDKRAISVWS

SEQ ID NO: 340342 - protein, 676 aa, Zea mays
  Clone ID: MRT4577_73564C.1.pep
MEIPAQVRRYWLPILLFTAGFLFQVLVLPRHFPPTHYDVLGVERFASVERVVEAYESLSKEWLSETSHQPTVDIIKIRYAYELLTNPVLKRDYDLFGLDEHKDVLERVKEQYQMVHFLKIDLPLLKDSVVSLIDDAFNVLTHESFMSAISEEYPLIILVYSKGSPRCAQFIEYWKQIGTQLDGIVRTAMVEVGDSQVAGYFAEKRFSKRPFFRNGVPTLVAYPANCKSPSCYMRYPGGLFVDSVVDWVATSVVGLPRILYYSKETLGPQFIGKSGNHKVKTIFFSSTGERAAPFLRQAAQEYSSYSSFGFVLWREDESQIWWNSLGVESAPALVFLKGPGTTPFVHHGFFSKSEFIEMMEEHKHHELRQLRSDTSLELGCDARGHSRAGNDAAIWYCVIVAGRPGAELSKKRQILRKAQDKLLGDVDRSAGNVDNSVETSSAATAFKDDRLTFVWLDGEVQKQICAFYLATDYTGACGPRDFGDDNDKPEIFIVRFQRNATYEALKAEKKNNLVDVLQGQHADASQLVARYKGPVEIEEINRWISQIIKDGDTREIPYFTSKVPDLVPEETSKAWNSKSIRSAGKSLKENIGFHFQDYLTHPMIGSTLLMCGCISMGILWFRNNTPTQSTRQEKARKDKAKRPRPKLSTSLFGEPSVPDVDPKDARQWEMSSSDSD

SEQ ID NO: 340343 - protein, 88 aa, Zea mays
  Clone ID: MRT4577_73565C.1.pep
YHYNSPPTYQYPPPPYSYQPSPPPAGLYSPPLLPPNAPEHLHPNVPHAKSPQPPLHTPPPPNGAVPSPSPTTPPLRYYTSPPPTDQLS

SEQ ID NO: 340344 - protein, 40 aa, Zea mays
  Clone ID: MRT4577_73566C.1.pep
KPLIQHLLGSRDINTTITSSTYYTPLQFRKRVRWIPSHSQ

SEQ ID NO: 340345 - protein, 374 aa, Zea mays
  unsure (1)..(374): unsure at all Xaa locations
  Clone ID: MRT4577_73567C.1.pep
ELRQLRSDTSLELGCDARGHSRAGNDAAIWYCVIVAGRPGAELSKKRQILRKAQDKLLDDVDRSAGNVDNSVETSSAATAFKDDRLTFVWLDGEVQKVDCFIISNFTIYLLLSSHLRDWILSSLECYFLLVGRCRLXVRTSSIALIIFVNTNNIISIYFHSXCAFYLATDYTGACGPRDFGDDNDKPEIFIVRFQRNATYEALKAEKKNNLVDVLQGQHADASQLVARYKGPVEIEEINRWISQIIKDGDTREIPYFTSKVPDLVPEETSKAWSSKNIRSAGKSLKENIGFHFQDYLTHPMIGSTLLMCGCISMGIIWFRNNIPTQSTRQEKARKDKAKRPRPKLSTSLFGEPSVPDVDPKDARQWEMSSSDSD

SEQ ID NO: 340346 - protein, 119 aa, Zea mays
  Clone ID: MRT4577_73568C.1.pep
QLQAQVTTLAEECRHRSLKVRLYKRKLEETWLIVRDEATKCEAAEEIIKVLTNQRNALSNKLLDGLELDGSSIVLNQPDKVLATCKTQPLNSIRDQHNAEAEEVLDTRSTGFSKHVAGD

SEQ ID NO: 340347 - protein, 184 aa, Zea mays
  unsure (1)..(184): unsure at all Xaa locations
  Clone ID: MRT4577_73569C.1.pep
MQSNKAFNLEKQNHTPRKHHQHHHQQHHQQQQQQQQQQPPPPIPANGQQASSQNEGLTIDLKNFRKPGEKTFTQRSRLFVGNLPPDITEEEMRKLFEKYGKAGEVFIHKDKGFGFIRLETRTLAEIAKVELDNMPLRGKQLRVRFACHSASLTVRNLPQYVSNELLEXAFSVFGQVERAVVIVD

SEQ ID NO: 340348 - protein, 52 aa, Zea mays
  Clone ID: MRT4577_7356C.1.pep
QMRKPSNCKSTNPTPCIIMPLFCINLNYDYCEQINLFTCRISTTCICFASSC

SEQ ID NO: 340349 - protein, 70 aa, Zea mays
  Clone ID: MRT4577_73570C.1.pep
RYRPQLVFPKSFPARCTVLSCFKPRKKIPCAPGFPRKWVFVLLTVGALYYVVLLTSHVFKTNGFVFPRIV

SEQ ID NO: 340350 - protein, 90 aa, Zea mays
  Clone ID: MRT4577_73571C.1.pep
TSIFGRCWLSIYTKGPSAPLVHVTPLCSKTQQVAFHLAPWVVHCLRSARTAPSRMLAAIVKYHRSWAPGRASGTSSDKQGCNRPVVRVHS

SEQ ID NO: 340351 - protein, 115 aa, Zea mays
  Clone ID: MRT4577_73572C.1.pep
MSDLDVTLPSAFDPFAEANAEDAGAGPGAKDYVHVRIQQRNGRKSLTTVQGLKKEFSYNKILKDLKKEFCCNGTVVQDPELGQVIQLQGDQRKNVATFLVQAGIAKKELIKIHGF

SEQ ID NO: 340352 - protein, 77 aa, Zea mays
  Clone ID: MRT4577_73573C.1.pep
AVPNAEMRLILPQWRTFTRGGCQFLSGLPRLACTWSSSSPPLGTFHNVPCPVYATFLCACLFKPGPWPCMKSCSLPL

SEQ ID NO: 340353 - protein, 88 aa, Zea mays
  Clone ID: MRT4577_73574C.1.pep
AVAAGHARWALETRARRECPGPAPSSARGPCPTRLHQRARKVALTGKRNLAGSGPWRPQGVPRDHWLSVLLRISSRLLSAASLCSCSG

SEQ ID NO: 340354 - protein, 55 aa, Zea mays
  Clone ID: MRT4577_73575C.1.pep
KRSQIFDLVHFTIRSEKRSSLYVINYAATALVTAATKVSYITATAWVMATSMAGG

SEQ ID NO: 340355 - protein, 38 aa, Zea mays
  Clone ID: MRT4577_73576C.1.pep
GPEVHCIPLCLQLTHSNTPRTLQQLLRTQKRAILARSL

SEQ ID NO: 340356 - protein, 57 aa, Zea mays
  unsure (1)..(57): unsure at all Xaa locations
  Clone ID: MRT4577_73577C.1.pep
MGIDLIAAERNXKTKRTAPKSDDDYLKLLVKLYRFLVRRTIELFNAVILKRLFMSKT

SEQ ID NO: 340357 - protein, 156 aa, Zea mays
  unsure (1)..(156): unsure at all Xaa locations
  Clone ID: MRT4577_73578C.1.pep
MEAVKSLLKPKPTPQQQLREWQRRLRNEGRNIERQIRDVQKEEKKVEKAIRDAAKRGDMGSAKALAKELVQSRKAVNRLYENKAQLNSISMHLGEIVATTRTVGHLSKSTEVMKLVNNLMKAPEIAVTMQEFSKEMTKXGVMEEMVNDAMDSALDD

SEQ ID NO: 340358 - protein, 144 aa, Zea mays
  Clone ID: MRT4577_73579C.1.pep
MEAVKSLLKPKPTPQQQLREWQRRLRNEGRNIERQIRDVQKEEKKVEKAIKESARRGDMGSAKALAKELVQSRKAVNRLYENKAQLNSISMHLGEIVATTRTVGHLSKSTEVTKLVNNLMKAPEIAVTMQEFSKEMTKAGVMEE

SEQ ID NO: 340359 - protein, 71 aa, Zea mays
  unsure (1)..(71): unsure at all Xaa locations
  Clone ID: MRT4577_7357C.1.pep
LCWSASAHREYCCRYVSEVPLATVTYHPLSLFWSPPSGREPLCWPGIWWVSSLHSLAWHWXCWLPVLVVAL

SEQ ID NO: 340360 - protein, 80 aa, Zea mays
  Clone ID: MRT4577_73580C.1.pep
QIGRILPTDLSCISQTNIIDDISYMMTTGNGNKRGYHAHTRGGPDNFFFYCRCRHLSTLHYKRGENPILNLEYLRVHVHY

SEQ ID NO: 340361 - protein, 130 aa, Zea mays
  Clone ID: MRT4577_73581C.1.pep
LERSPVSEVLGSRKHPPFCFGSIFVGGFFFPSTGLYTSGCFFSYEANGHPSIHPSGFGIYRWLSSGMLKEWVLGMGSYQSEVFIIRGLFKFQLCVLFVTRRSSRFLSVLSGRYIDGYFHEAIVVCKSFPG

SEQ ID NO: 340362 - protein, 74 aa, Zea mays
  Clone ID: MRT4577_73582C.1.pep
MAQGYAVFIGLAVIAVLCVASWFFAPKGENQVLWRSSAILAIVSCYLMWAITFLAQLHPLIAPRKGGTREEYLD

SEQ ID NO: 340363 - protein, 149 aa, Zea mays
  Clone ID: MRT4577_73583C.1.pep
FFFFFFFFFSLSLFFFGLGFFLKNPKIPFKNKNFPPKKIFSLPLFLQYLKTTSNFYPPKILFEKYFKKSLGAQNTSQEQPFLAKISQKKQFFHQNKSCPLLYKLYGPRPPPPNFLGLVLLTLFFYQPFLKFAFGEKLACGKNLISYHNF

SEQ ID NO: 340364 - protein, 78 aa, Zea mays
  unsure (1)..(78): unsure at all Xaa locations
  Clone ID: MRT4577_73584C.1.pep
AHQLKAKAVFHMHIVLNVTGTAMTFLKPPSNWPLESPIVPTCVVSSVDLMERQEGSSRPEXLSGRLKVYCGGILGLAF

SEQ ID NO: 340365 - protein, 105 aa, Zea mays
  unsure (1)..(105): unsure at all Xaa locations
  Clone ID: MRT4577_73585C.1.pep
LPSTPPKTAPLPLQATGYPPTTIIFLPGAETFXGQRMLIPLPAIFANLVDPTSLCTQTDLSHLVGPEDPLTSDCHSXPPPKXQKHLIXXTXXXGPRPXPLPPPPT

SEQ ID NO: 340366 - protein, 175 aa, Zea mays
  Clone ID: MRT4577_73586C.1.pep
MGGGHEEQEGGGAKAGGYSSGLPPSEPPHLQGQPPQEYGYGTFQGPRHPPVGFPQPAPPPGFGGGGGYHNQQQPYAHAETYYAQGYQAVPGYGPVAEGRPVRMRRLPCCGLGLGWCLFIAGFFLAAIPWYIGAFVLICVRVHDHREKPGYVACTIAAVVAAVAIFLGVTKGTHVW

SEQ ID NO: 340367 - protein, 169 aa, Zea mays
  Clone ID: MRT4577_73587C.1.pep
MEGRREPEADGGKAGGLPPSEPPHLQGQPPQEYGYGTFQGPRHPPVGFPQPAPPPGLGGGGYHNQQQPYAPAETYYAQGYQAVPGYGPVAEGRPVRMRRLPCCGLGLGWCLFITGFFLAAIPWFIGAFVLICVRVHDQREKPGYVACTIAAVVAAVAILLGVTKGTHVW

SEQ ID NO: 340368 - protein, 78 aa, Zea mays
  Clone ID: MRT4577_73588C.1.pep
FSLGLFVGGSVGTGFPLGFMFGVPSYKDQDGVSVRNGPFSGKGTCAFSGFYGGEFFFCPQKRTVITKKDEERKKEVGR

SEQ ID NO: 340369 - protein, 65 aa, Zea mays
  Clone ID: MRT4577_73589C.1.pep
GGARSGYRLRHGPLLGARHFNISSPRGPHRPDVRGSAYMSFWSVDGLSCQKTPSACSCIAPRHQK

SEQ ID NO: 340370 - protein, 56 aa, Zea mays
  unsure (1)..(56): unsure at all Xaa locations
  Clone ID: MRT4577_7358C.1.pep
NGWGVIQFVPDNPGVWLMHCHLEGPIPWGLAMAFLIEDGYXKLQSLEPPPVYFPMC

SEQ ID NO: 340371 - protein, 168 aa, Zea mays
  Clone ID: MRT4577_73590C.1.pep
MGGGHEEQEGGGAKAGGYSSGLPPSEPPQEYGYGTFQGPRHPPVGFPQPAPPPGFGGGGGYHNQQQPYAHAETYYAQGYQAVPGYGPVAEGRPVRMRRLPCCGLGLGWCLFIAGFFLAAIPWYIGAFVLICVRVHDHREKPGYVACTIAAVVAAVAIFLGVTKGTHVW

SEQ ID NO: 340372 - protein, 154 aa, Zea mays
  Clone ID: MRT4577_73592C.1.pep
ILTYEPVLLQVGPCSYKWGHSLSPTSPIVPKLNRPCTLDNTAPQQHRSSTRHLHLRLSRLHFDVVLPAESSALTGRSPAHTTCSRRVDTAAPVRAYPNLSCSSGPCGMRPIGSRGAGECYAAALRRWRRISGVAFLFSGACGRQGRAELASDLR

SEQ ID NO: 340373 - protein, 58 aa, Zea mays
  Clone ID: MRT4577_73593C.1.pep
GMLERVSVSVPVSWEFPHGATLGRFLCPGRGRVVPHSPLVRGLGPGISLQSHAPVLGG

SEQ ID NO: 340374 - protein, 105 aa, Zea mays
  Clone ID: MRT4577_73594C.1.pep
SDGSDGVPVGTASGTVVRSVLGQRHHLSEQLGLGRRDDVLEPPRRQRRRHQSELRRVRVDAWRHGAAAQHQERHRVSVWCLPHKTGLAAAEACRCNASGRAPTRP

SEQ ID NO: 340375 - protein, 46 aa, Zea mays
  Clone ID: MRT4577_73595C.1.pep
HASSQDCQGQRTEDCTTPCMWGRSESYTAGIGPSCAVCAMLWAVYR

SEQ ID NO: 340376 - protein, 114 aa, Zea mays
  Clone ID: MRT4577_73596C.1.pep
NQGDKIQPQKKPKGQCWDRFFSKKNHPFQKKKIPFQTKAKNFKARKKKGPPPPRKKNKPLIRYPGKGRLDQKLNPCKKTKGIPCPNPFVGGATNKTLLNPNKKIFCKKGLNPRL

SEQ ID NO: 340377 - protein, 45 aa, Zea mays
  Clone ID: MRT4577_73597C.1.pep
WFFKYTNHVKISVCNIVSRRVDLMNIHCCFTYQVHRIEVGTNYKS

SEQ ID NO: 340378 - protein, 125 aa, Zea mays
  Clone ID: MRT4577_73598C.1.pep
GGDADDRPRDSVTLSGLLNFIDGLWSACTGERIVVFTTNHVERLDPALIRRGRMDMHIEMSYCRFEAFQTLAKNYLDIDDHDLFAAVGEVLREENLTPADVAECLMAARRAGSGEPSPCLEILID

SEQ ID NO: 340379 - protein, 73 aa, Zea mays
  Clone ID: MRT4577_73599C.1.pep
RKKKKKKKKKKKKKKKKKKKKKKKKKKKKKKKKKKKKKKKKKKKKKRGGPFLGVQIFLPRPCKFLVFFWGPLI

SEQ ID NO: 340380 - protein, 187 aa, Zea mays
  unsure (1)..(187): unsure at all Xaa locations
  Clone ID: MRT4577_7359C.1.pep
KKKRGVPNKQQQGGPFNPGPPGXTKGRAPKFLQTQKGKTGGPKPWGSXPQGDRAPPPYPELRGPPKQGGXPPKNRFVPFFPQPPAPXWKSWGGREKKTPTPPPCKGGPPFFSFKKDPPPGGGRGGVFSPPQKFPQNLGGGPPSPPLISKGGPRGVAGFPTNGGXAPQRAKQKGFYRGPPTQGKTWGG

SEQ ID NO: 340381 - protein, 218 aa, Zea mays
  Clone ID: MRT4577_735C.1.pep
MARIHLYVAAACAVVLALAAPALAGDPDMLQDVCPADYASPVKLNGFPCKANFSADDFFFDGLRNPGNTNNPAGSVVTAANVEKFPGVNTLGVSMARIDYAPGGQNPPHTHPRATEIIFVLEGTLEVGFITTANALFTKTVTKGDVFVFPRGLVHFQQNRGHGPAAVVAAFNSQLQGTQAIAMTLFGAVPPVPSDILAKAFRISSGEVDHIKANFAPK

SEQ ID NO: 340382 - protein, 113 aa, Zea mays
  Clone ID: MRT4577_73600C.1.pep
GRAHSASNSRVLLLSDPELRRREDSRALPLERDRAGESEDRARPQPHARTSRGRTDCTKIHHVKRRLNENLERGGGRPIPGPVHQWDCTPNCQLICAYCSHTAGREKGERLTD

SEQ ID NO: 340383 - protein, 99 aa, Zea mays
  Clone ID: MRT4577_73601C.1.pep
SRIIAGSRSGARKSSKREQFLYHLRCSWLYPSPSPRGPIISPISMGTHPTGMLKTTRVMAPSPHCWAPSLSHIGIYMQKYMHSDCETVVTAITMNRSPL

SEQ ID NO: 340384 - protein, 228 aa, Zea mays
  unsure (1)..(228): unsure at all Xaa locations
  Clone ID: MRT4577_73602C.1.pep
MMPVAPLPRCHGALASAPEHCPVPSPGPRPRSSPSAHPSFPYPRPRSRIYARCGRGAASEIADLRPMCPRPRSPLAGPAAASRRRSSCSRSGWCSASCVTHRFCRAFASGRRLYSSSGSPGTISRSGSVYLGGHDKEEKAARAYDLAALKYWGTTTTTNFPISNYEKDLEEMNNMSRQEYVVSLRRXRGQNQDFMKSSGFSRGASIYQGVTRLAASLPYGGMNSGSLS

SEQ ID NO: 340385 - protein, 82 aa, Zea mays
  Clone ID: MRT4577_73603C.1.pep
MWAWGCVRDRGSTPDVPSPEISPRRSCSRISAALIVFALGLVLCFVRDPSILQGLRFGPAPLRLVGITWDDFKIGFCVSRWT

SEQ ID NO: 340386 - protein, 119 aa, Zea mays
  Clone ID: MRT4577_73604C.1.pep
GEPSSFLSCTRTHKTFRFHINFSMIRCIHGCYIRQSSSDQFRRNKGRSSHCNRRWEILWTHSSRRHVTKGGYIRKHFCLVHELHLCPQRVVRRTAPYLDGCVLHAAVTEGGVYLVLLAG

SEQ ID NO: 340387 - protein, 89 aa, Zea mays
  Clone ID: MRT4577_73605C.1.pep
GNDSGPIPLVGEVPYLGRLFQCVLQYTDTNEKTWVCNALNYCSAMAEIFLCAVRCDVYTDQWGGFYRPFWFITRVVNTLCSFYWDIKRD

SEQ ID NO: 340388 - protein, 62 aa, Zea mays
  Clone ID: MRT4577_73606C.1.pep
PRHESHESPECKHASFWYSDHAITSHGRGAVTDSATSRLREVQFDRSSTPSRGHTDVYFWVA

SEQ ID NO: 340389 - protein, 91 aa, Zea mays
  unsure (1)..(91): unsure at all Xaa locations
  Clone ID: MRT4577_73607C.1.pep
KKKKESKNYRHXKKKKRKKISKKESKERXKKTKINKRKKKHKEKWNKKVKQNDKKEKERKRKSKVNHGNKAGKVRESELHNGGEENVCELQ

SEQ ID NO: 340390 - protein, 69 aa, Zea mays
  Clone ID: MRT4577_73608C.1.pep
ESHHHWNVHIYLKIISYKEIILNMIHHIVIQYLTICRVILSYSIKPITYNVSTLTHIFTALKTFTFCYL

SEQ ID NO: 340391 - protein, 146 aa, Zea mays
  unsure (1)..(146): unsure at all Xaa locations
  Clone ID: MRT4577_73609C.1.pep
LDPVISIAGXXNGNGWPASQELDEGKSYFSYEPQIEHRFSMGRSTRKEEKEDQNQDDLHRSSTLYEDKVFTTFVCGKAKVPDSPEQAATLFDFGPVRIDFDTPAMEIQPAEEKVYKCLRKQFVTWRNNFKPYQDFCSTHKIPKLRQ

SEQ ID NO: 340392 - protein, 124 aa, Zea mays
  unsure (1)..(124): unsure at all Xaa locations
  Clone ID: MRT4577_7360C.1.pep
ALVWADTCAEENIRVHXTDEEDQMXLYSQKLMRASRKTRDRALFTEFIEKNLHLYEIQNTIPLPIAAVDNCTLXDSAQRLQKNPYILDMILDEYENEDDAALYXIYYFGTLHRRDNAAYGYASC

SEQ ID NO: 340393 - protein, 123 aa, Zea mays
  unsure (1)..(123): unsure at all Xaa locations
  Clone ID: MRT4577_73610C.1.pep
RTRGLQYFHEYASFATVVGANATTVMDLCGTIGSQGVAFQTEAVYIHCYXKFTKNTTAFVITNPDYHSTLITSDKCDTIKVSKCYHHDDKQSALSVADLTLTLSTNENTLTIGRLYTVDLKTA

SEQ ID NO: 340394 - protein, 507 aa, Zea mays
  Clone ID: MRT4577_73611C.1.pep
MQQNSVAFEETTPENHEATSEPCSEIQHAHHVEPEEINGPEDGKDDEITNMSSREYLVRDNALQSGPIIDIQPVQELEQIKTDEASNQTHAVIFNDLAQEDATETSEPQVTETELKDIEATEAEEITKLDHVTHSKELAVENDSTADEPHKGEIHQTLEQDLARVRDTGTYHEKTISTSEDTVQDNLTEDEPSFGSQEVDDAESTEETKQNIAENIAEVSDVAIVDDAIEQNVLQTEDIVEMHKQELEREETERIEPVESEEASDQRNDAPFDYSAREDNTKESEIQQTESATETNEIEPTEIEAVPRESNTCVSEEPSQEDHIKESETSFDNQEVNITESSEVNDSHKDIISGGISDPSNTASAGDSSEGSNVPEGEPPEQAVQELGSEEIKNTQIDEVNETSLEMNATVFQIPSQEENPDTTKLHESTEVSNIEATEMHGNPHQSDLAAQSEEQTTEGISSGLKPESIEGNDTEANKSQSTSQEKTISASESVPEDATSTRPRIR

SEQ ID NO: 340395 - protein, 70 aa, Zea mays
  unsure (1)..(70): unsure at all Xaa locations
  Clone ID: MRT4577_73612C.1.pep
YRXXITXIIWGHLXPTEAFLLXKLYXALLRLLNAXAGSGPLAASLLLLGIVGPIIVLSXSNYYLSDGLAS

SEQ ID NO: 340396 - protein, 167 aa, Zea mays
  Clone ID: MRT4577_73613C.1.pep
MNVEKLKKMAGAVRTGGKGSMRRKKKAVHKTTTTDDKRLQSTLKRIGGNTIPGIEEVNIFKDDVVIQFQNPKVQASIPANTWVVSGVPQTKSLQDLLPSIINQLGPDNLDNLKKLAEIFQRQVPGAEASASAAAQDEDDVPELVQGETFEEAAEKEPQLEQDEKKES

SEQ ID NO: 340397 - protein, 133 aa, Zea mays
  unsure (1)..(133): unsure at all Xaa locations
  Clone ID: MRT4577_73614C.1.pep
SKEEIQKMVQAPXKSSSFRXEPKKKVGAKNSLEKFSFNMGHPIKGEKIGSKLPAHYKKKIEGALYPALNWVGPHHLPQGGEFXDKIKELESLFNPLFSKMFQGAGXNMGGPGGMDKEAPSGKGGPGPKIEEVG

SEQ ID NO: 340398 - protein, 41 aa, Zea mays
  Clone ID: MRT4577_73615C.1.pep
GQGICIAELLSTDRARLSGEKCHLHLLCSTTSLACPVTDLD

SEQ ID NO: 340399 - protein, 82 aa, Zea mays
  unsure (1)..(82): unsure at all Xaa locations
  Clone ID: MRT4577_73616C.1.pep
QELKSILGARKLTGRRHLDHLESLSVRRLLFDHMFFSFNELLLSSLYQLNLRILCDLLVILFDIILHIXSTSPCAAARDSNE

SEQ ID NO: 340400 - protein, 35 aa, Zea mays
  Clone ID: MRT4577_73617C.1.pep
YSGSERKLSSRYVSARLVRMKVPMNSSLRPRRDDY

SEQ ID NO: 340401 - protein, 111 aa, Zea mays
  Clone ID: MRT4577_73618C.1.pep
LRGLADNVHVSHVRFQDSIPARVRVPDEQHVTDADVVILRREQNQQLPNNLCRHVHKDRIPSPSSAPTRAPYPEHQLASATKSPSQMISMDSVYTPPAMKTTNAFSGTAYT

SEQ ID NO: 340402 - protein, 359 aa, Zea mays
  Clone ID: MRT4577_73619C.1.pep
DHEIHDRMKDMFWSPDKFVRAPGGSSSNVALALAAIGGRVAFMGKLGDDDYGQSLLYHLNINGVQTRAVYMDPSAPTAVSLMKVRTEGSLKTNCVKPCAEDRFLPSDINPAVLKEAKMFYYNSSALLEPTTESSLLKAIDVSKKFGGTIFFDLNLPLPLWSSSKETKSLIKEAWEAANIIEVTKQELEFLCGIKPSEKFDTNDNDKSKFTHYSSEVIMKLWHSNLKVLFVTNGTSKIHYYTETHNGWVRGTEDAPITPFTGDMSQSGDAIVAALMRMLVINPHLITDKVYLHKAVKHAIKCGVIDQWVLARERGFLPKERADPTGEQYEVRSITEREYRTLPDAMQSENSSTSELAYVE

SEQ ID NO: 340403 - protein, 71 aa, Zea mays
  Clone ID: MRT4577_7361C.1.pep
MGRDEMLRRSLVALAAAVALTGLATASLRKAAVTYGFGILAIAGVLLPDWEFFDRDYSQWLTPMLASRRTA

SEQ ID NO: 340404 - protein, 69 aa, Zea mays
  Clone ID: MRT4577_73620C.1.pep
IDINCHQKKKKKKKKKKKKKKKKKKKKKKKKKKKKKKKKKKKKKGGAPQKVQSLLTLECKFKALQKVPQ

SEQ ID NO: 340405 - protein, 100 aa, Zea mays
  Clone ID: MRT4577_73621C.1.pep
IVCVSSPLLYDHMIDAHVHAAYAALHAAVYHHSDASLPQIACASRVNHNDASPSSENAQAQTIINLQRLLFLTTLTPLILTDTYKSILFALLNRHPQSCS

SEQ ID NO: 340406 - protein, 164 aa, Zea mays
  Clone ID: MRT4577_73622C.1.pep
HSVVSLDGIDFVRCEVVGQSFMLHQIRKMVGLAVAVMRNCAPESIYDVAFRKDIRLNVPTAPEVGLHLDECMFTSYNSKWMDTHEAVSIEPYAEEAEEFKIKYIFPHIAAMEHKEGAVALWLHSLNSRNYPDFRYVETAGSEAKVGAEVENMEEAQMPSNNISE

SEQ ID NO: 340407 - protein, 81 aa, Zea mays
  Clone ID: MRT4577_73623C.1.pep
YETVKTLLRDGPPPVLRERNLSGAPDKDAPPAPIQQGGIPLRAQEVYASHPPKTMFIFLPSTCCVNMPVFVLADIFVPLDL

SEQ ID NO: 340408 - protein, 72 aa, Zea mays
  unsure (1)..(72): unsure at all Xaa locations
  Clone ID: MRT4577_73624C.1.pep
LAAAGAGACGGFSSAGAATAAGMRGLDSSWLLAPAPMARTGGRCGGREAGYLTRGEGRGRRKGTVTMGSRXG

SEQ ID NO: 340409 - protein, 67 aa, Zea mays
  Clone ID: MRT4577_73625C.1.pep
TFHICHILDSQASPLLVCEPKQDSRVSLISLGPSASFLSHLLTPGIFPHQLFRPSSEISPFYTCAYR

SEQ ID NO: 340410 - protein, 53 aa, Zea mays
  Clone ID: MRT4577_73626C.1.pep
MPGNNYGAALLFKIILDRETEEIPGFGLVTFYTEEAMRNPIWGLNCKGYYGRN

SEQ ID NO: 340411 - protein, 70 aa, Zea mays
  Clone ID: MRT4577_73627C.1.pep
MLILIIIFSIFFLCQIPFLSMHTNAKPTYNHTQQQLQLARCHVSVKLAYGAPRGKEVAINMTPIQNENWA

SEQ ID NO: 340412 - protein, 65 aa, Zea mays
  Clone ID: MRT4577_73628C.1.pep
SRSRTSAAEAAGWARGRVYYFHRHHHGRAARGARPAGLQTLCLSRSLHARDRSPAPVRGERSDPS

SEQ ID NO: 340413 - protein, 117 aa, Zea mays
  Clone ID: MRT4577_73629C.1.pep
DRETTRRQGNDQAALNVSGLLRATIAQRIQIYSLSIHCENELKRNTSDQHCTIIIYLFTIFSLIKKAPRAALAPQPLYTPGCPHSTSILSIPYTSRRPPGPNPPYIHPNYTRTMRAH

SEQ ID NO: 340414 - protein, 61 aa, Zea mays
  Clone ID: MRT4577_7362C.1.pep
SDSTFRCARRHVAQRKRWPCYCMKSENVMLVPLTASPSRLASGWFRLHFHISTSRFILGRL

SEQ ID NO: 340415 - protein, 332 aa, Zea mays
  Clone ID: MRT4577_73630C.1.pep
CIKTLSMNSKYLVSGGTDEALRFYNLETKKEEGMLLHHEGSITCSALHENKYIFSGGDDGEVAIWRTYDMELVGTLGGHSLAINSLSVHPSGKLALTCSRDRSLMLWDLSSGRAAFNQKLSYEAEIIQWSPSANVYAVCAYHTIRIFSSQGGKLHEFEEPGLKHILAFTFLTDTVFASAGESKVITIWDLESESKVLTTLGGFENRVKGLAAVQRGASHKYPYLISISSDESLSVWDLDVSTTQPLVRTTLAGRLVCVSGAMVGGSSKDTPKKKPKRKRLASERQEQDSDAIVELSSEPEQPRKKRKANNNSNNNKNNNNNNNTNNNNQLPA

SEQ ID NO: 340416 - protein, 132 aa, Zea mays
  Clone ID: MRT4577_73631C.1.pep
MHRMQPEAAETAIDCGNLLPRNANGQMRHNSGRGGDMDEEERMMDKLLMHYSKKGSDLTNNETHTDAAQKVSLHPTGRAISLPPESVGPSKGAKVPARCTSLQPEGPRSAHVHPKMPDFDELAARVKALRKA

SEQ ID NO: 340417 - protein, 46 aa, Zea mays
  Clone ID: MRT4577_73632C.1.pep
SIHQRLPINIGVRHGSSLSPYLFHILTNYLTRNIQRNIPWMIAFSR

SEQ ID NO: 340418 - protein, 143 aa, Zea mays
  Clone ID: MRT4577_73633C.1.pep
ASKHQGDHIIFFLSMRGEESFFKASKIKSLFQRRKGVAFGASIWGQKIKIRLPIGLRSTTTIWDPQRSRGLAFNGGATGGSSISIDISSSIIVTIAIGAWATGNPKTRASLTFRTWAPLTSKTWGSLTFRTSGSFIGRKGWVT

SEQ ID NO: 340419 - protein, 68 aa, Zea mays
  Clone ID: MRT4577_73634C.1.pep
VVAFQQRADWAWRLYLLLNQQAFVAVNFTKCVSLGSSWLSFLRSTSLLCLGAWRCWPIQIKHTLSQLA

SEQ ID NO: 340420 - protein, 66 aa, Zea mays
  Clone ID: MRT4577_73635C.1.pep
PLLKPLGEGNNLSPRLPRAPSPENYPPPPTLVVPPPILVVQKSHGDSLVCYPVCPRKSKCGVPLAP

SEQ ID NO: 340421 - protein, 81 aa, Zea mays
  unsure (1)..(81): unsure at all Xaa locations
  Clone ID: MRT4577_73636C.1.pep
NARTPVRRSAAARSPWAADLPQPPPASHPAPXPPTAPAPAPAPAPAPAPAPAPXPAPPPLQSPRLHNRPKIWFGIWGGEHP

SEQ ID NO: 340422 - protein, 102 aa, Zea mays
  Clone ID: MRT4577_73637C.1.pep
KTPKTTQALDMVQPTAVPTAPSSVKTTAPDHVSLPPPPLPANQQSVAQLSAPFSSGLSNVGSTMDPPTISANPPQSAQAKGYLIHQMPSSAPQPSQHPNMAL

SEQ ID NO: 340423 - protein, 138 aa, Zea mays
  Clone ID: MRT4577_73638C.1.pep
EGFTFVVADPYNEALEVDVIDWDQVGNHEKMGMTMITLIELAPGDTKVTTLNVRSTMDPNEVENETSHGELTLQLIYIPFNVDDIDKYDTASADVLASAPDGTPAGDAVLHVTVHDAHDHEGKDHPNPYAASTFNGED

SEQ ID NO: 340424 - protein, 84 aa, Zea mays
  Clone ID: MRT4577_73639C.1.pep
MPINRIVLGSLHESVPPVALKAGVAKVICTLIFIFASQGCVMAFSKVTGRGPTTPAGLIVVAVAHAFALIAARSICTNIFGVHV

SEQ ID NO: 340425 - protein, 112 aa, Zea mays
  Clone ID: MRT4577_7363C.1.pep
MGRDEMLRRSLVALAAAVALTGLATASLRKAAVTYGFGILAIAGVLLPDWEFFDRDYSQWLTPMPASRRTAAAAAADREHDVWKFKPYPLRVAMLTTIYGFGLYKWWMYVSS

SEQ ID NO: 340426 - protein, 137 aa, Zea mays
  Clone ID: MRT4577_73640C.1.pep
LNHVRGAYSFEDLRTLGDITCSTFREACEKRGLIEVDMSLDDCLSEAATFQMPTALRRLFATILVFCEATNVRGLWDKHNDSMSEDYNRDNPKSTCVQQMVLKDIRELVRSMGKDIKSYDLPEINDTGEFCNDIMRE

SEQ ID NO: 340427 - protein, 49 aa, Zea mays
  Clone ID: MRT4577_73641C.1.pep
CVFRNRGVAQLTVSPVFSMLTRTPSYPFVITAVSAPCQDMVSLMRAPNQ

SEQ ID NO: 340428 - protein, 202 aa, Zea mays
  Clone ID: MRT4577_73642C.1.pep
MRRVAPAMIAASSAAGGEETAVVEKTLLNGDVYRGAFSGGSPHGKGRYVWADGCMYEGNWRRGKASGKGRFSWPSGATFEGQFRRGRIDGQGVFVGPDGATYRGAWVADRRHGLGNKTYADGDCYEGQWRRNLQDGHGRYVWANGNQYIGEWRAGVLSGRGALICANGSRYDGVWENGVPKGSGVFTWPTGGSWPGSCVDLP

SEQ ID NO: 340429 - protein, 63 aa, Zea mays
  Clone ID: MRT4577_73643C.1.pep
SIHYSCDYACIYVEQDITLEDSYFFSRYPLVYNRYAQADIRLTSVVSPIFGACKSDDIPLRVQ

SEQ ID NO: 340430 - protein, 100 aa, Zea mays
  Clone ID: MRT4577_73644C.1.pep
MASWLVPFRSCCVWRLATALAPLPHNLSRTHASSSSVISPAPPGSFFPPPPAAPSWLPWCLFRHAAGPSPVAGASEERQEPMMANEREATRWGTWWRWRW

SEQ ID NO: 340431 - protein, 515 aa, Zea mays
  Clone ID: MRT4577_73645C.1.pep
MGSCLSSEAPAAGDGPAAWRKRRHGSREGAAAGAGAAGGGGKKLPGGAGEMTEDELARVPGRLCGKGASAVACLHTQQGRKGTNQDAMVVWESFNSSDSIFCGVFDGHGPYGHFVAKKVRDSLPVKLRTQWQTSANGGSSPHQNGSINSEETGSIVDDEWGDGDDTEKLPEMFLPLKQSYLKAFKLMDKELKLHPTVDCFCSGSTAVTLVKQGLDLVIGNLGDSRAIMGTRDASNNLTALQLTVDLKPNLPREAARIQQCKGRVFALQDEPEVARVWLPNNDSPGLAMARAFGDFCLKDYGLISVPEISYRRLTEKDEFIILATDGVWDVLSNKEAVDIVASAPSRATAARALVDCAVRSWRLKFPTSKSDDCAVVCLFLGHEKSADSVQGSEPNVETAEPTVEVSSSTQDSSAGVDEDIADAGMHVSSAVHISEATLQHSTTLREVDEIVPVDEPTASKEPGRCGSARSLADCISTNEEEEWSALEGVTRVNSLLNLPRLLSGDKRSTSWRKRR

SEQ ID NO: 340432 - protein, 65 aa, Zea mays
  unsure (1)..(65): unsure at all Xaa locations
  Clone ID: MRT4577_73646C.1.pep
PPIVGLYYIFFIFFFFFFFKIFFLFFFFFFYAELSITHRASKLLPCPTRTRVELPXAHVHIITYN

SEQ ID NO: 340433 - protein, 579 aa, Zea mays
  unsure (1)..(579): unsure at all Xaa locations
  Clone ID: MRT4577_73647C.1.pep
LLTYSPFDVHIFHVMIXASAHASAGELSPASNPVLKLSTLRELSIMSPKSPPVSMRFIPEQNDKGALTEDTHGFSDLLSQQPSRCLILRTNGELSVLDMDDGHEHTLTNSIELFWVTCSQFEEKGSLIKEVSWLDYGHQGMQVWYPSHGAGPFKQEDFLQLDPELEFDREVYPLGLLPNVGVVVGVSQRMSFSTAEFPCFEPSPQAQTILHCLLRHLLQRDKIDEALRLANLSAEKPHFSHCLEWLLFTVFDADISRPSASKNQASQKVDSPKKSLLEKTCDLLRNFPEYMDVVVSVARKTDGRHWADLFSTAGRSTEMFEECFQQRWYRTAACYILVIAKLEGPAVSQYCALRLLQATLDESLYELAGELVRFLLRSGRDFENATSDSEKLSPRFLGYFLFRSPYKRQSSDLKSNSMKELSPHIASVMNILERHASYLMSGKELSKLVAFVKGTQFDLVEYLQRERQGSARLENFASALELIGQKLQMDTLQSRLDAEFLLAHMCSVKFKEWIVVLATLLRRAEVLVDLFRHDLRLWKAYSITLQSHDVFTEYLDLLNILEEQLSSVSDLTLQNGPLS

SEQ ID NO: 340434 - protein, 57 aa, Zea mays
  Clone ID: MRT4577_73648C.1.pep
FDASRLYHWRGEVERSPNLICACVFLFKKGDDLLMTDYLLRRTDVCMIEDTWPDYHY

SEQ ID NO: 340435 - protein, 163 aa, Zea mays
  unsure (1)..(163): unsure at all Xaa locations
  Clone ID: MRT4577_73649C.1.pep
GLVNNHTASLHTRNAHWSPSKPSDLLPSPNEQSRIKRSGNAGIVPGGANGWRSRGHGGRGRRGRETRTGSRVRRRPLPPRRCGTPETAEAPPRPAHQGRLAPAGHLPRRGLCCPLRQRNEILGSFLVSPEELEKFGRRRERDGGVRGFVVVLSTGXRPGPXRV

SEQ ID NO: 340436 - protein, 111 aa, Zea mays
  unsure (1)..(111): unsure at all Xaa locations
  Clone ID: MRT4577_7364C.1.pep
SDLLFSPSFLLSRSFLLSPRPARPHETTPYGDRGGGEGXIVLAYGFETDQIVWKYLVSNLVVDYRVVFFDTMGVGPTKPDXFDFSRYPPLEGYAFDLLAILQELGVRSCIY

SEQ ID NO: 340437 - protein, 112 aa, Zea mays
  Clone ID: MRT4577_73650C.1.pep
PRVRPRRGRVGGRVGCDLLRNFPEYMDVVVSVARKTDGRHWADLFSTAGRSTEMFEECFQQRWYRTAACYILVIAKLEGPAVSQYCALRLLQATLDESLYELAGEMVRFLLR

SEQ ID NO: 340438 - protein, 146 aa, Zea mays
  Clone ID: MRT4577_73651C.1.pep
RHASYLMSGKELSKLVAFVKGTQFDLVEYLQRERQGSARLENFASALELIGQKLQMDTLQSRLDAEFLLAHMCSVKFKEWIVVLATLLRRTEVLVDLFQHDLRLWKAYSITLQSHDVFREYLDLLNILEEQLSSVSDLTLQNGPLS

SEQ ID NO: 340439 - protein, 53 aa, Zea mays
  Clone ID: MRT4577_73652C.1.pep
FTDTRAADVLYLFSVITHERDSHSSSHGRYKNGRTRLITWHGFTHAWKLHFTP

SEQ ID NO: 340440 - protein, 107 aa, Zea mays
  Clone ID: MRT4577_73653C.1.pep
MAAGGQGESRGTGMLPGSSAMAAAPGKMEATPWLLKGLEQRASAMGGLRRPWSSAPAQGKSGERGRACGGPAPTLACGCIPGSRVEDARRCFGTLEKKGALQGQHAD

SEQ ID NO: 340441 - protein, 191 aa, Zea mays
  Clone ID: MRT4577_73655C.1.pep
HMFDKVLTPSDVGKLNRLVVPKQHAERFFPAAGAGSTQLCFQDRGGALWQFRYSYWGSSQSYVMTKGWSRFVRAARLAAGDTVTFSRSGGGRYFIEYRHCQRRRRDVDISFGDAATVPAWPRPIVIGTAAMNNGGATVASATIAGHDIEVAVAPSGARSFRLFGFNVECSGDDAPAPAPAPAEVEYVDGDT

SEQ ID NO: 340442 - protein, 101 aa, Zea mays
  Clone ID: MRT4577_73656C.1.pep
RAHALAVPVLVKKMFRVSDMATDFAVSALWRLCRAGDAAAAACRAEALRVGAFQKLLLLLQVGCGGVTKERASELLKMLNGSKGSVECVETVDFKGLKRPF

SEQ ID NO: 340443 - protein, 65 aa, Zea mays
  unsure (1)..(65): unsure at all Xaa locations
  Clone ID: MRT4577_73657C.1.pep
SGXRXASXAAPPXARRSGAGLSSMGXXALGXRERXXNVXXGAXAASXRLXXLLACYSVLXXAFSS

SEQ ID NO: 340444 - protein, 132 aa, Zea mays
  unsure (1)..(132): unsure at all Xaa locations
  Clone ID: MRT4577_73658C.1.pep
MSRQAYVDDHLLCDXIKGQHLIAADIVGHYGGVWVQSENFPQIQPEEVAGMIKDFDEPGTLAPTGLFVGGTKRMVIPGEPGVVIQRKKGSGGITIKKTGLCLIIGVYDEPMTAVQCYLVVERLVDYLIEQGL

SEQ ID NO: 340445 - protein, 44 aa, Zea mays
  Clone ID: MRT4577_73659C.1.pep
SRILYFMQHCIYNLCINLYSYSHQHLAVDFSLITLIYLCILTVY

SEQ ID NO: 340446 - protein, 185 aa, Zea mays
  unsure (1)..(185): unsure at all Xaa locations
  Clone ID: MRT4577_7365C.1.pep
GTLGRPGNRPKRSRSAHGRKLCCTIQYTTIIDTNSDNWAADSXTSPSAIQRLLPTMHYNTLMDTMKGELHAHWGTVDDVSDAMRAVPARAWTPLGAMKDDYSLACDTARLSKVNXVVIHTXLWHHGAAGXLWQINTNLSHAQRXADRRVRIVHYNIKHXAAPGSWTPNMCKAHPFKWDAPETFAR

SEQ ID NO: 340447 - protein, 108 aa, Zea mays
  Clone ID: MRT4577_73660C.1.pep
NILFLCNGFIIWFLHTCLHKYLIPQDIGSHRLEMEKSTPPDKMGLPLEKPPKKKNTGDRLYAPQKKTCEEPTRKPSEGVIIEMQGNLKGANKPPLWAHQTGDTGNPHP

SEQ ID NO: 340448 - protein, 48 aa, Zea mays
  Clone ID: MRT4577_73661C.1.pep
LYTTVDHIHCICILFDGYFINEIVSICKLKLGEFGKYHHKGHLSCKLP

SEQ ID NO: 340449 - protein, 47 aa, Zea mays
  unsure (1)..(47): unsure at all Xaa locations
  Clone ID: MRT4577_73662C.1.pep
FGEWFGLSKIYFXAKPKKVLGCPCVVAKDYGQKFEGLNIVQEYVKSP

SEQ ID NO: 340450 - protein, 166 aa, Zea mays
  unsure (1)..(166): unsure at all Xaa locations
  Clone ID: MRT4577_73663C.1.pep
MVRLLGLRSLSFGPEDSPREIPSTADVAPPVGSSGWLVRFFDSAFFCEWIAVSYLYKHDHAGVRDYLCNRMYTLPLPGLEAYLFQVCYMLVHKPSPSLDRFVIDTCAKSLRIALKVHWFLAAELELEDDDDLDGIDMVXEQCQDAATVQGEWPPLVRPSLPSPVAS

SEQ ID NO: 340451 - protein, 128 aa, Zea mays
  Clone ID: MRT4577_73664C.1.pep
LDLNYQGTEFPHFSLYQRVLETGEPTNNLGFSDPCIRTGRTSFQTTRSTSGGKRERGNPPLVHGRDASRGIRGGRGWSIGFGGGSGRGGISVPVESLEDEAEAESEARSVVDGGTDFVQQAAMLVRMR

SEQ ID NO: 340452 - protein, 379 aa, Zea mays
  Clone ID: MRT4577_73665C.1.pep
MDGHHSLRDFLSQAGSSSAPRNLPIPIHEVPEDNEFDLFSPTHLIHSSSMNNSAHRIRMDQLDLNHQGTEFPHFSSYQQVLETGEPTNNLGFSDSCIRIGRTPFQTTRSTTGGMRGRGNMPLVRGRDASRGIRGGRGRSRGFRGRSGRGGISVPVEHLEDEAETESEARSAVVSQSGLGRRTDGTIVASESFWKIHTEKRTECRKFQYGVPTYMDHLAEMFHGIVVDGSNSCIPGDAHGRQQEICDEEQGEVESGERFLNSSTPSSGRKRCSSTTDTASSPPKKLKPTMSKMFEGLITEMQTARNEDTEVFNQIKNYQLEKDSSDMDDFSICLSLAEESGADKDSNEYYMGTKLFKDKFNRATFHRFDTPQQRMKWLQR

SEQ ID NO: 340453 - protein, 96 aa, Zea mays
  unsure (1)..(96): unsure at all Xaa locations
  Clone ID: MRT4577_73666C.1.pep
GRSVVHGDDCVFERLTTEYKREVYEVXAYGADTMADXDNXLVAHTHIYAISLLXPRILLLMKGTHCCGALADHYEPLIANVHQHETPNKASVIPRE

SEQ ID NO: 340454 - protein, 117 aa, Zea mays
  Clone ID: MRT4577_73667C.1.pep
FLVKKQVMIQDIGNFWNRTSVFESLVQHCKVRFFIGLDNEKDQRISRRIIRSQFRSGFFSSLPSPARLPPPPRARTRPRAWASRRPSGTSAEPPGTQRFSSAGCRTARTRGRTRGER

SEQ ID NO: 340455 - protein, 75 aa, Zea mays
  Clone ID: MRT4577_73668C.1.pep
WRCTQLTTIMFAMQPRTRRGATQSVVSDKGAACSIHHHDSQSREEGNWRPTEHWPHRRLGALWRQPRPCRSARHT

SEQ ID NO: 340456 - protein, 134 aa, Zea mays
  Clone ID: MRT4577_73669C.1.pep
SCWDPWPPSRPSTGEKKKKIQTEQQQKKRTPPSARTQPRARAAYVCLQEKIADATSNNTGITTSTIGIQTTYGNRDEEHEDEEAVLEAAGVGGGAAERERSSSLTPTRQHPVGSPCFLPSFLPPSPAAAARSKY

SEQ ID NO: 340457 - protein, 98 aa, Zea mays
  Clone ID: MRT4577_7366C.1.pep
PAVNSSQSRIGHVKTTVQIERGCSVSISKTLRSISCSYVQYEPPGCYGGGRCSTWRSPAQRIRCLRSRSPEGKLMMGSPKGLMTYDLHWDGLRAWAYA

SEQ ID NO: 340458 - protein, 94 aa, Zea mays
  Clone ID: MRT4577_73670C.1.pep
MDASGARSKGKKGAVARKALGRSKKSMTLSGMAGLQFHGRRIRRYLKKGRYSQRVGTARPVYICCFLNYLSSDGLELSRNTSRDNMNTRVMPRH

SEQ ID NO: 340459 - protein, 70 aa, Zea mays
  Clone ID: MRT4577_73671C.1.pep
MHEGSCCTVMIKCLIDYFKCSFSNKSNLYKHVMAVHYQCRPFLFQFSVCFKMFSYYHVNYNHYISISHFH

SEQ ID NO: 340460 - protein, 131 aa, Zea mays
  Clone ID: MRT4577_73672C.1.pep
NPDVVLVLGCCFAYQELAGLGARGSRHLENGGAMKHKLLKDVSKKVSGSDGVSAERSTRSRFSQDHAAKSKAKLKGAFSLLGLNNDTFKGPRTSKRFQLKDLSWRSKDTTVNGKETMIKRQCMRRIPSPVT

SEQ ID NO: 340461 - protein, 71 aa, Zea mays
  Clone ID: MRT4577_73673C.1.pep
TGSPTISVVLCLWDLTCLDRCLSEWFFLAMSALFCQFLCPVPRMCLSLFVFAWFYIFGFHMFTALVFTVSL

SEQ ID NO: 340462 - protein, 74 aa, Zea mays
  Clone ID: MRT4577_73674C.1.pep
LLLKADREGRINRVKVCPSAPSVYHLLFTHGSLILVGANGQNALQLKRILSLYEQCSSQMINKSQVSFSVNTQK

SEQ ID NO: 340463 - protein, 136 aa, Zea mays
  unsure (1)..(136): unsure at all Xaa locations
  Clone ID: MRT4577_73675C.1.pep
MSLLDGKSSAQVKMPACSEVKKLHSTSKPLQVTSGKSHSRNYPASEKIALVPKSEETKAKSKPATSVEHKVATTLSTERTXKRDHLKEEXSSSVDKAAYSEPNPDSAKSIKHLIAAAQARRNLMASALAKFDGVFD

SEQ ID NO: 340464 - protein, 228 aa, Zea mays
  unsure (1)..(228): unsure at all Xaa locations
  Clone ID: MRT4577_73676C.1.pep
MANAGDPASLPPSASPFSSTRALESVPFSSGNPRIEETRGVVLLHPDPPTAAAAASSSSSHLPAERKPQVFVPAVPNHMTYADFCRFCGSFVPHMLEMRIVRIDGAEDQYSVLIKFGTLSSTDSFYKHFNGKQFSSLEGDVSRIRFVEDVHYTQLIEHAHSSITSSAEQPTCPVCLERLDQDPGGILTTICNHSFHCSCISKWTDSSWPVCRYXQQQPEKSMGSVWGT

SEQ ID NO: 340465 - protein, 85 aa, Zea mays
  Clone ID: MRT4577_73677C.1.pep
SSLVGGRPFFFFLLTPFVAGDTVSLERVPLLAACATRYTNTVISCLKTDIITHGKADSPARCKIMKFQECTKTQCMPLWPDGEPS

SEQ ID NO: 340466 - protein, 108 aa, Zea mays
  unsure (1)..(108): unsure at all Xaa locations
  Clone ID: MRT4577_73678C.1.pep
GTPSPRVRPEDRPKMIXRPIACSPPCRSPLPLPDPRLRAAAAASSFVPPRRAAVGLGRARGVRIFQVPCHGGGGGGEEEGDRDYPAEVRVVGAASNRGRPRYFPDRGP

SEQ ID NO: 340467 - protein, 80 aa, Zea mays
  Clone ID: MRT4577_73679C.1.pep
LWLDILLSSWCSGVTLLCHVFFTATLLWNGVETTTLLCNGVTTAVPLFDAVAALRCHNLLTVPLVSVVFGPTTVVRGCFP

SEQ ID NO: 340468 - protein, 28 aa, Zea mays
  Clone ID: MRT4577_7367C.1.pep
MKKPLESRKIIFARAKQYAEEYHAQENE

SEQ ID NO: 340469 - protein, 155 aa, Zea mays
  unsure (1)..(155): unsure at all Xaa locations
  Clone ID: MRT4577_73680C.1.pep
RWQTQRTRPRSRADVDRTTAADELEHHRVADVGEQSRQDAERHGELENDLAWELDAPWRAENFTHTIEGFDTSSTGKPGAREIREEGAEDGRAAMGEDWGVTAQRVGRHGRGQSSASSKLDLKEIMEETRRWCGVRAQGGGAAGAWTSHAXGREA

SEQ ID NO: 340470 - protein, 95 aa, Zea mays
  Clone ID: MRT4577_73681C.1.pep
HDGHQRYQLSFWTTYLRRASVSSTMTTMLVRSSTNITKQPTSTTMSRSSARGKKIYCASPWISGIADTPGDRYDEGNTLHMDMRIQTNEATLREM

SEQ ID NO: 340471 - protein, 118 aa, Zea mays
  unsure (1)..(118): unsure at all Xaa locations
  Clone ID: MRT4577_73682C.1.pep
MGECMWIHIGEGVIQVGNACWELDCXLEHGIQDNGQMPGGKTIGGGDDALNTFLSETGAGKYVTRAVCVDHGPTVIDEVRTGTYRQLXFHPAQLXIIGHEDAGHNXGRGHYTVGKAIV

SEQ ID NO: 340472 - protein, 369 aa, Zea mays
  Clone ID: MRT4577_73683C.1.pep
DDMKLVMEMKAEALKTIIQAGGPNDEGVLLTMSTLTDDGVMAVKNAACERLLEQRVDVKMKSKKMMDCLNRFHVALPKPRDNKERPVCIPLAVLEARANAAAKEKKLEKDIENENGGAGVYSASLKKHYILANDEWKEDILPEILDGHNVADFLDPDILVRCEELEREEGLRLEEQAAEDAFQIDGHELTQEQKEILAQIRKKKALLIQEHRMKKRTAESRPIVPRKFDKDRKFTTDRMGRQLSSMGMDPSAAMNRIRSQSRGRKRERSVSRAAADGDGMEIDGQQSNKKLRRTSRSRSRSRSRAPEEVLPGEGFKDSEQKKKAIKKAKAATRNRNKEARRGEADRVIPTLKPKHLFSGKRTLGKTSRR

SEQ ID NO: 340473 - protein, 38 aa, Zea mays
  Clone ID: MRT4577_73684C.1.pep
NGKSRLMHNKGRQLTPDLQTQAVCFLRTQWSGYNFFFF

SEQ ID NO: 340474 - protein, 109 aa, Zea mays
  unsure (1)..(109): unsure at all Xaa locations
  Clone ID: MRT4577_73685C.1.pep
LLLCVLLVKSQCVNDNEEGFFSARGHRPLYNXSEESLSLMPAPPPISGGGYRARPAKAAATQKKVXERRAPDAGGCLHAVPDLCVLCPTGCQLQEALLQQERPIRYSVD

SEQ ID NO: 340475 - protein, 106 aa, Zea mays
  Clone ID: MRT4577_73686C.1.pep
DAWADAWAPPAAPAATSSHSSTVESWSGGSGGGAPVGILRAPAAEEDCRSYCGSSSSALCEDGASGPGCGDETAAPPRCSPLPFDLNVPDPAADEMDWRCDTLLHL

SEQ ID NO: 340476 - protein, 100 aa, Zea mays
  Clone ID: MRT4577_73687C.1.pep
RDVCGGNRASIPYRRLGVEGGVAWAILRRRSRFVVKPLTSAVGVRCCLNFGIFGFMVKADTMRSLIVTRVVVAPKLCERELRLNRRKGNRLKREKAVQSS

SEQ ID NO: 340477 - protein, 89 aa, Zea mays
  unsure (1)..(89): unsure at all Xaa locations
  Clone ID: MRT4577_73688C.1.pep
FAPLWPLVETPPLMGLGLMALPKGRPRDXKKWGGLFPQTGVRENKILKEFGGRVALQVYPGDCPWALPIYFPPNMFGGGGPAGLGGIIS

SEQ ID NO: 340478 - protein, 77 aa, Zea mays
  unsure (1)..(77): unsure at all Xaa locations
  Clone ID: MRT4577_73689C.1.pep
GHKPKKPAAMGKPCMPEMVAFLNCLALNTHNNYLCLKPKDLSDCMLSTSDWGGGEPXLHHHLPCSSTCPTQVPLCAV

SEQ ID NO: 340479 - protein, 105 aa, Zea mays
  Clone ID: MRT4577_7368C.1.pep
PMGGRVGHSSHRRTDPIGGSYDFIALLLLRSPSPFLDALDRRVTPYCTFEPSPIRLRHYEGTLPLLLHIQEGQGKTQYGLHLPPEADHIHRQQLWDWRQTCTEWK

SEQ ID NO: 340480 - protein, 105 aa, Zea mays
  Clone ID: MRT4577_73690C.1.pep
MGNFPGGGFFSPPGGCKKREKRGEKDFALQKGFNLRGGGGKPPKGGGGKSPFGKTGGKEKTPLKKFFPKKKKKKKKKKKKKKKKKKKKKKKKKKKKKKTRGRAPV

SEQ ID NO: 340481 - protein, 51 aa, Zea mays
  Clone ID: MRT4577_73691C.1.pep
LLNVGPIFVNTRLNQLVQSTNPLAITSRCSCTAWCSFNGKLPWCRISPLFL

SEQ ID NO: 340482 - protein, 40 aa, Zea mays
  Clone ID: MRT4577_73692C.1.pep
TSNFQQIHNVQTHAHKMTRFYFKKFKEVSELKAKALVYIP

SEQ ID NO: 340483 - protein, 52 aa, Zea mays
  Clone ID: MRT4577_73693C.1.pep
KHELAHNHHCAVRVNKLVRLWTAMKLSGWTPPFRLGFVSRVARYVVKNYGTR

SEQ ID NO: 340484 - protein, 107 aa, Zea mays
  unsure (1)..(107): unsure at all Xaa locations
  Clone ID: MRT4577_73694C.1.pep
REIXXXVXHEGXLXGXKXDNLAKXPKLDAPNLEVINPMLSFKPEEYDRHTFSSAXYYWYPXCDGLVHLHXLLTPPPEARAXXPNTXPNPPPRPLGPAPPPDPPTRPH

SEQ ID NO: 340485 - protein, 63 aa, Zea mays
  Clone ID: MRT4577_73695C.1.pep
MATARADAAPAAALAVVMLMALLTPALRGVDRSEFPTALLFCASSAAYQIERAYVEDKPVLSN

SEQ ID NO: 340486 - protein, 64 aa, Zea mays
  Clone ID: MRT4577_73696C.1.pep
SIYWLRFISIKKKKKKKKKKKKKKKKKKKKKKKKKKKKKKKPKKKKKKKKKRFPLARNPLRGNF

SEQ ID NO: 340487 - protein, 110 aa, Zea mays
  Clone ID: MRT4577_73697C.1.pep
RREAANGALRNSATFGGIATRAQNFGRNRGSVPSKKQNSTKPDGILRAGRGLAHPFKEDKQRVFETGHRGTGAMEPGGPHKITGFPYQSHQEREIRFFPTPKGRKKGLPL

SEQ ID NO: 340488 - protein, 139 aa, Zea mays
  unsure (1)..(139): unsure at all Xaa locations
  Clone ID: MRT4577_73698C.1.pep
XGXQXDXQKPXDKTXGGXXXXXNTXXXETXXGKHXPXAGXXDXEPTGXXEXRXGTXRQXXHXEQXXRGKEXAANNXAXXHXTXGKEKXDXXXXRXRKXADNGXXXQGXPXXNXXXGGTGXGXXXPXXERRAGDXGKKXK

SEQ ID NO: 340489 - protein, 104 aa, Zea mays
  Clone ID: MRT4577_73699C.1.pep
FFFFFFFFFFFFFFFFFFFFFFFPKGEHSFLNKQKNRAPGVENRGLGLFKTKAGPWVIKRVTKKGPPKKTGGPPPPGEKKRGGKKKKRGGENFQTGAKIKTSGP

SEQ ID NO: 340490 - protein, 106 aa, Zea mays
  Clone ID: MRT4577_7369C.1.pep
MSDDRCQAITSRFIRIHTHGTTVPSSSPCRCSGPQVVMALLATGAAAAASMAELGRNGNARARWNPVCDRFGSFCRRGGPALASSFVGVALMLALNLLSAASGAGC

SEQ ID NO: 340491 - protein, 218 aa, Zea mays
  Clone ID: MRT4577_736C.1.pep
MAKVHLYVAAACAVVLALAAPALAGDPDMLQDVCPADYASPVKLNGFACKANFSADDFFFDGLRNPGNTNNPAGSVVTAANVEKFPGVNTLGVSMARIDYAPGGQNPPHTHPRATEIIFVLEGTLEVGFITTANALFTKTVTKGDVFVFPRGLVHFQQNRGHGPAAVVAAFNSQLQGTQAIAMTLFGAVPPVPSDILAKAFRISSGEVDHIKANFAPK

SEQ ID NO: 340492 - protein, 62 aa, Zea mays
  Clone ID: MRT4577_73700C.1.pep
IKEAGSWNLNCTVHNNWIYILSSGKFFSQSRTVLLARRPSLVSSFGLDSPSWGRKNSHALIK

SEQ ID NO: 340493 - protein, 80 aa, Zea mays
  Clone ID: MRT4577_73701C.1.pep
LKDSNSSDPLEKYLSSPEPEFAKEGVFRRGGNLVVKFFEKEAKPGFGKFSKGKFKKVSLLRPKGTRPSSRGISMFCKGFR

SEQ ID NO: 340494 - protein, 79 aa, Zea mays
  unsure (1)..(79): unsure at all Xaa locations
  Clone ID: MRT4577_73702C.1.pep
PAARGAITESDPMNRGPKKGEMDGSHLHKEKGMVVQAKQXPRRRIEGSTXLHIHQVGVDVFAKDASGVSCXLWEEATPR

SEQ ID NO: 340495 - protein, 170 aa, Zea mays
  unsure (1)..(170): unsure at all Xaa locations
  Clone ID: MRT4577_73703C.1.pep
MKGVNRFGVKGKLAPRYIGPFGIIQQCGPVAYRLQLPEHMSAVHNVCHVSQLKKCLRVPEQAMDVSEANLEPDLTYSEYPIRVLDXKDRITRRRTIKFYKVQWNKHSKDEATWESEDFLVENSPPPSCFGLKNLQYCNVIASQQVQLGTSSGWCVKNFEVVVNTSSSSPP

SEQ ID NO: 340496 - protein, 125 aa, Zea mays
  unsure (1)..(125): unsure at all Xaa locations
  Clone ID: MRT4577_73704C.1.pep
GCCSFDMLTDPNRAXLDGARXALSSLLGGGSCIYLRDSXLPMASLGAMQMGVLPAXSGRNGRPDPIRLTKLLPRITTXAASSMDRXFPATATLGNGANLTGVYLYKGRXRLSCIEQHPLGYMDEN

SEQ ID NO: 340497 - protein, 117 aa, Zea mays
  Clone ID: MRT4577_73705C.1.pep
MEVATATEASAPAASGGASRRGHPFPWLDVAISEPYYFLHLIAFFSYFAARTTAPSAEDDPELHSRLIRREIQAVLVFLVLFTVKIVKEEHWETFIADSLLYAKGLLLAGTFGIDYW

SEQ ID NO: 340498 - protein, 115 aa, Zea mays
  Clone ID: MRT4577_73706C.1.pep
TSHWVKNLASTPPVPCSHRRQCAPVTLSSHSSPVTKLAAVAALPSSAVGGAGRRSRRGIRQQEEEHPHLVSRRRCEEGDRGWRSRGPPPPWDEEHQRIYFPLGTKSKYTTPPAAA

SEQ ID NO: 340499 - protein, 62 aa, Zea mays
  Clone ID: MRT4577_73707C.1.pep
KRDPPAHARAKKRKTPKAPPKKKKKKKKKKKKKKKKKKKKKKKKKKGGARDPRTSPHAAHAA

SEQ ID NO: 340500 - protein, 96 aa, Zea mays
  Clone ID: MRT4577_73708C.1.pep
LQVRERGFGARGITSATARVFRFKAFKTTAGRVNSVATMEEEGHCLEVEFRFQTCWEAALRVYVNLEPIVLPPFSFFFFFFFFFFFFFSDVVGRPG

SEQ ID NO: 340501 - protein, 33 aa, Zea mays
  Clone ID: MRT4577_73709C.1.pep
DILDLAKYASVPVINGLTDYNHPCQIMADALTM

SEQ ID NO: 340502 - protein, 92 aa, Zea mays
  Clone ID: MRT4577_7370C.1.pep
GERLWLGLLLTSRDSLAHRPPGNSGSVWPTDYLRPPLHKGPSRDLFVLRTHGVVPNPGPVAGEAGMNTTAQEPHLRCHFVRMVGPWCVTGEW

SEQ ID NO: 340503 - protein, 39 aa, Zea mays
  Clone ID: MRT4577_73710C.1.pep
KEIDALESRVESIQRVLAYLKVQLYAKFGSNINLEADES

SEQ ID NO: 340504 - protein, 65 aa, Zea mays
  Clone ID: MRT4577_73711C.1.pep
GCRQLLCRVNHSGNESDGLNICAELCQVALHVARFGKAVQLDLGSILSLRPGRARCLDTIFSCSP

SEQ ID NO: 340505 - protein, 61 aa, Zea mays
  Clone ID: MRT4577_73712C.1.pep
IRNSPAPETKPRARSTFVLLSILSIWRGRRMSHMASWLSRPKGHEEMVEYMEKVAKTVAVE

SEQ ID NO: 340506 - protein, 315 aa, Zea mays
  Clone ID: MRT4577_73713C.1.pep
MACYNTASLAATLLAFALTFQACLAGRRLTALVQEPAITMRYHKGALLSGPIAVNFIWYGDFSAPQRAAITDFVSSLTAAAAPAAAQPEPSVATWFKTARKYYASSKVPFPALRLGSHAVDRNCSLGKRLTERDLLRLAARGAPSRAINLVLTAADVAVDGFCESRCGTHGASPRSRSGRFAYAWVGNPASQCPGQCAWPFHQPVYGPQAAPLTPPNGDVGVDGMVISLASMLVGTVTNPFGNGFYYQEGSADAPLEAATACAGVYGKGAYPGYAGSLLVDQASGASFNANGAHGRKYLVPALVDLDTSSCATLV

SEQ ID NO: 340507 - protein, 188 aa, Zea mays
  Clone ID: MRT4577_73714C.1.pep
MVGRKPMRRRRSDRQPPPQSFGATARPSSPRSFDSTTAAAAAVATDLDELLLTAPPPSASEPRSFSYAVKQQCWEKAERVPGRDPERWRRDALGNIVFRKLVGCPGCLCHDYDHIVPYSKGGKSTLENCQVLQATVNRSKGNKTEISKSELIQKSAYCRVSGRDLDLVELSAYGNVRRGPDSGGCKIQ

SEQ ID NO: 340508 - protein, 319 aa, Zea mays
  Clone ID: MRT4577_73715C.1.pep
RVTRSAARDVCDAAVEVAALLRGGGIRRRRRAAAVVAGAEEGPEQEGPGPGAAPAAAAAVVLVGGVAGVAVEPGGFVGDADARGPVPDAVGLQPARLHLRRAEGDATHVTTRVMGTNGYAAPEYIMTGHLTAKSDVYSFGVVLLELLTGRRSVDRSRRPREQSLVDWARPYLKKPDKLYRVMDPAMECQYSCQGAGRAAMVAYKCLSQNPKSRPTMREVVQALEPVLDMNDYLQIGSFVFTVVVEDSNDDDSQGKMVDVTIETTVEEKRQSHQDRHRQKFPNSLVNADVVLHRDGDLGKHIAALRRHRRTSSYVKERGA

SEQ ID NO: 340509 - protein, 177 aa, Zea mays
  Clone ID: MRT4577_73716C.1.pep
MDAAIAGQQARRRIQPPEPLVMAGTPPTPAAFRCPISLEVMRSPVSLPTGATYDRASIQRWLDSGHRTCPATRLPLASTDLVPNLLLRRLIHLHAATLPPSPSPEEVLSQLAAADGEPAAAEKAVRSLAAKIAPEKGKRASVASAVSADLDSAVPALLSFAKGGAGADARVDAVRVL

SEQ ID NO: 340510 - protein, 475 aa, Zea mays
  Clone ID: MRT4577_73717C.1.pep
MSATQPWRSLFCCAAAGYDDADEPPPSSRGQRKGRSRRDRDRERLQLLLLPSSSSAASRVSLSSLGGSSGTLTPEDLSLTLSGSSLHAFTCAELRAATAGFSRANYLGCGGFGPVYRGRVAAGLRPGLDAQPVAVKYLDLDCGAQGHKEWLAEVFFLGQLRHKNLVKLIGYCYEAEHRMLVYEFMSFGSLENHLFKSTNGALPWMTRMKIAVGAAKGLAFLHDADPPVIYRDFKASNILLDSDYNTKLSDFGLAKDGPQGDATHVTTRVMGTNGYAAPEYIMTGHLTAKSDVYSFGVVLLELLTGRRSVDRSRRPREQSLVDWARPYLKKPDKLYRVMDPAMECQYSCQGAGRAAMVAYKCLSQNPKSRPTMREVVQALEPVLDMNDYLQIGSFVFTVVVEDSNDDDSQGKMVDVTIETTVEEKRQSHQDRHRQKFPNSLVNADVVLHRDGDLGKHIAALRRHRRTSSYVKERGA

SEQ ID NO: 340511 - protein, 71 aa, Zea mays
  unsure (1)..(71): unsure at all Xaa locations
  Clone ID: MRT4577_73718C.1.pep
LSRCSDGPTKQTXMESTGGKAPRKXLATKVARKSPPATGGEKKPHRFRPGPAALREIRQHHNSTELIFRKA

SEQ ID NO: 340512 - protein, 64 aa, Zea mays
  Clone ID: MRT4577_73719C.1.pep
FVSQNTVCRCCILRIIYQIRWARLCMPPSMSITVSIVSPVFLHFVCSVLRRIGGFPVRKNAHFA

SEQ ID NO: 340513 - protein, 122 aa, Zea mays
  unsure (1)..(122): unsure at all Xaa locations
  Clone ID: MRT4577_7371C.1.pep
SHSDVDVCLEMETGXLERXEVLVRLADVLRADGFENVEAITGARVPIVRMSDPGSGFSCDICINNLVVGVHIRLLDDYAHIDNLYFNCASLQYGRAKQRGLYEEFRGTLFSYMYVFNCINFF

SEQ ID NO: 340514 - protein, 40 aa, Zea mays
  Clone ID: MRT4577_73720C.1.pep
AGQSHAWEPKKKKKKNKKKKKKKKKKKKKKKKKKKKKKKK

SEQ ID NO: 340515 - protein, 153 aa, Zea mays
  unsure (1)..(153): unsure at all Xaa locations
  Clone ID: MRT4577_73721C.1.pep
ILYGAPGTGKTLLAKAVANQTSATFLRIVGSELIXKYLGDGPRLVRQLFQTAAENAPSIVFIDEIDAIGTKRYESTSGGEREIQRTMLELLNQLDGFDDRGDVKVIMATNKIETLDPALIRPGRIDRKILFENPDQTTKKKIFTLHTXKMSLN

SEQ ID NO: 340516 - protein, 57 aa, Zea mays
  Clone ID: MRT4577_73722C.1.pep
STICSSLLTADPTAGADVYVSTELRLGLPGGSPHAAKAAKTGFDDTIDLSLNLPHAG

SEQ ID NO: 340517 - protein, 303 aa, Zea mays
  Clone ID: MRT4577_73723C.1.pep
MTIIIEQPQFDAAAERKVAGDPAELVLDGGFTVPDSNAFGHTFRDYDAESERKKTVEEFYSVNHINQTYEFVQRMRDAYGRLDKTEMSIWECIELLNEFIDDSDPDLDMPQIEHLLQTVEAIRKDYPDEDWLHLTGLIHDLGKVLLHPSFGELPQWAVVGDTFPVGCAFDECNVHSKYFKENPDYHNPEFNTKFGAYSEGCGLDKVLMSWGHDDYMYLVAKENKCTLPSAGLFIIRYHSFYPLHKHGAYTHLMDDEDKENLKWLHVFNKYDLYSKSNSRIDVEEVKPYYMSLIDKYFPAKLRW

SEQ ID NO: 340518 - protein, 58 aa, Zea mays
  Clone ID: MRT4577_73724C.1.pep
TMLPLSRVVNRFDFRKGGNLNVIGLTRSDERSFLVTCGVVCDSEGRRGDFVLSRYYGV

SEQ ID NO: 340519 - protein, 348 aa, Zea mays
  unsure (1)..(348): unsure at all Xaa locations
  Clone ID: MRT4577_73725C.1.pep
MTITIEQPQLDAVAERKVPGGGDPAELVLDAGFVVPDANAFGNTFRDYDAESERKQTVEEFYRVNHVRQTHEFVARMRAEYGRLDKTEMGIWECIELLNEFIDDSDPDLDMPQIEHLLQTAEAIRKDYPDEDWLHLTGLIHDLGKVLLHPSFGELPQWAVVGDTFPVGCAYDECNVHFKYFKENPDYHNPKLNTKLGVYSEGCGLNKVLMSWGHDDYMYLVAKENKCTLPSAGLFIIRYHSFYPLHKHGAYTHLMDDEDKENLKWLHVFXRQDSTRSIGCAYLIYMDETWTLYRXIYNXTGVRWLSLFPSCCSKYDLYSKSNSRIDVEEVKPYYMSLIDKYFPAKLRW

SEQ ID NO: 340520 - protein, 56 aa, Zea mays
  Clone ID: MRT4577_73726C.1.pep
MATAGNAPRSRKRVEATVLKRARDGSAFTRCEACNKDVAIVLIDLHSCSLDSKIRL

SEQ ID NO: 340521 - protein, 116 aa, Zea mays
  unsure (1)..(116): unsure at all Xaa locations
  Clone ID: MRT4577_73727C.1.pep
QYYTQVDMKGEVPVVVSDDEGNGLSVSCADAEEASTASVSAEQIDMEAYAVQYSGRTRMVRILFVANRXGVDAMQLEALRVAHYXIKRVEDVQLQRDVFTKIGGRSKGSKLTYTCM

SEQ ID NO: 340522 - protein, 133 aa, Zea mays
  Clone ID: MRT4577_73728C.1.pep
PLRSLSQLTSKGLSPAHGLGSLAPRLVPFTDSLAKLQLPQSHLLGLEATSSQADKASARADTASDLNSSQSSRRSATSALIGLGKHSSLGPHRIPDIALMAEKQQLGGAHVRKFLRKENRILQRMPWSRKVYI

SEQ ID NO: 340523 - protein, 75 aa, Zea mays
  Clone ID: MRT4577_73729C.1.pep
WCWTWQRCFHIQVKAPLFGPWLGENLPGTREHFHFLGVEAFDTVKTLTRGVMLLNNQTLVLNHPLRHQLRRIREE

SEQ ID NO: 340524 - protein, 79 aa, Zea mays
  Clone ID: MRT4577_7372C.1.pep
MGRATPVAVAADDDGQKTSWPEVVGWVTLNAALQISSDRPDVSTDFYSETTPLPTDYDPNRVIIVADDRNVVVRTPVIG

SEQ ID NO: 340525 - protein, 77 aa, Zea mays
  unsure (1)..(77): unsure at all Xaa locations
  Clone ID: MRT4577_73730C.1.pep
YSQTFFNCLTLHLVCLGVSTXXPTXFSQIYIKTXKKTLFLXXNTQXIQKHXNSSYQTLXTTNTKLTPPHNSIXXPIX

SEQ ID NO: 340526 - protein, 113 aa, Zea mays
  unsure (1)..(113): unsure at all Xaa locations
  Clone ID: MRT4577_73731C.1.pep
KLRGQGMAFLVGXGPVMQKILAPKKVITVDAACIVAMSAPLNFQLKSPTQLKKAVFGGDNQLTASLPGPGVVFIQSLPFHRLSQRIPSRSGAGPSLRATPKFFTQIVRFFFRA

SEQ ID NO: 340527 - protein, 99 aa, Zea mays
  Clone ID: MRT4577_73732C.1.pep
LWSLSVVCLELHELVFRVGVFHRVMHMSEFLLRSTCVVSISLEQYRHISKASSAIILSLLGCSRSRFISVLLFPIPVLHRRAARPHYHLRRGRGLAGQP

SEQ ID NO: 340528 - protein, 109 aa, Zea mays
  Clone ID: MRT4577_73733C.1.pep
MDSAGETGLPTGNRPFRAAPLMGAGGLTRHPRVYNLGGRGVGCAEWGREKHCPWGPPHPPPRKGGKKKSKGETGRNNRERTKNTKKKKKKKKKKKKKKKKKKKKKKTPP

SEQ ID NO: 340529 - protein, 95 aa, Zea mays
  Clone ID: MRT4577_73734C.1.pep
MTGRDAAKLLLSSGKDGVREPQPLLHGEAGAGPHQPAPRPRRRGEAAAAGPGRAALRRRSQEVPGLHQRPCRADAGHVARPQQGPRAGGGIVGKQ

SEQ ID NO: 340530 - protein, 137 aa, Zea mays
  unsure (1)..(137): unsure at all Xaa locations
  Clone ID: MRT4577_73735C.1.pep
FGSSALAPLSTDGTSIGASTGVKYLGEEGENTPVAGAASISSPWDLLATSKLISRKLVQRCYDIPLAFGLXGYSELHQSVLARLANCEAITLRHSIQEFYTHATSVRAHYXTPDTVYRKCSSAYYTRNVTVTLLCLT

SEQ ID NO: 340531 - protein, 136 aa, Zea mays
  unsure (1)..(136): unsure at all Xaa locations
  Clone ID: MRT4577_73736C.1.pep
MISSPTSSSAAAAAAMPTPSRLLFPVLVLLAASAGAATAATVSDDVLALVVLKSGLFDPAGRLAPWSEDADRACAWPGVSCDSRTGRVAALDLPAVSIAGRLPRAALVRLDALVSVALPGNRXFGTLPDALAPRLR

SEQ ID NO: 340532 - protein, 87 aa, Zea mays
  unsure (1)..(87): unsure at all Xaa locations
  Clone ID: MRT4577_73737C.1.pep
YAICEVMILINTVTDIRLPLDGHYYLVHRGQGXWRRSEQMXPKLKFDSCADTIXDXVTKLSEPILDLYIQTYEAFHIYLNKLKLHFH

SEQ ID NO: 340533 - protein, 121 aa, Zea mays
  unsure (1)..(121): unsure at all Xaa locations
  Clone ID: MRT4577_73738C.1.pep
MADSMISSSALVVEPQGLPXLGRRASYFAVGCSKKKIETYKPYWIGGGLTGYVDANGRKGKANGVYQFPNXYGANVYRYRPIYNXDDWSPSGDVYAGGTTVLLIWDVTLSAILRGGTLLIY

SEQ ID NO: 340534 - protein, 70 aa, Zea mays
  Clone ID: MRT4577_73739C.1.pep
FLLLKSRPSSVGCIHCVRRHMFARYNLSLSFFFLAGLCPKCHLVRSFKKTPDLSNNFAVVLLQKMNCVSV

SEQ ID NO: 340535 - protein, 94 aa, Zea mays
  Clone ID: MRT4577_7373C.1.pep
SIDIERPNYSNLNRLVPQVISSLTASIEVTMSELNVDENEFQTNLVPYPRIHIMLTSYAPGISSKKAFNEQLYVAEITSSAFEPASMRDQYEPQ

SEQ ID NO: 340536 - protein, 80 aa, Zea mays
  Clone ID: MRT4577_73740C.1.pep
KGRYIYVGNSHHLWSKSQVSTQVWHRYLRISYGSRSRDCVQARRGVWEGYFSPLMKAAVSDTPRAHNYHRRLYSHKLIEK

SEQ ID NO: 340537 - protein, 283 aa, Zea mays
  Clone ID: MRT4577_73741C.1.pep
MESLLLSLSLLGNFRVVACLAASGQNASIPAPLPATPAARPRPTRPSSRAGSVVKRFCLKKDHTFQISGTKLQLYMAWIFFFGVIFFTAFLNFLGGDSVETTSAAHSTGGTSSFTGGTGTISSEEDGMLTSCYEEESTLSSGCSANASGSFGNHFLVMHLDVPKCLYSPYLSVHDDRHLSEFWKAPVFCNAVPCADAPTIHIAMTMETTYLWGSFTSVFFVLCHTTYLEFVAFHFIAFSPPRRVAGLVPASGDNLREKKGARSGKLGHEELAASIKQQSVEAQ

SEQ ID NO: 340538 - protein, 87 aa, Zea mays
  Clone ID: MRT4577_73742C.1.pep
LALPLLLSLVGVSWSMRSVLPGFVMFVMVGVGSSFHSAVLVRSFILGLSFCWPWRGPGWGSLLWVKRSPLWWCAPRPKHRRRRWSNR

SEQ ID NO: 340539 - protein, 90 aa, Zea mays
  unsure (1)..(90): unsure at all Xaa locations
  Clone ID: MRT4577_73743C.1.pep
SHFILRKHTXLNWERRIPSRDGITILGSRAXTVGHKXRHKNGDLIRAMMMLPPKKIPPSLHTHILTVLNDTMVRQTAIDVKCVLLMYYKN

SEQ ID NO: 340540 - protein, 76 aa, Zea mays
  Clone ID: MRT4577_73744C.1.pep
LFFFFFLDSKRPIDSLKPKLYYVHAYILGHTTHPPVRRHGCIMAYIHRDRCIEEISQISCISSRTERHRRSYSVCS

SEQ ID NO: 340541 - protein, 96 aa, Zea mays
  Clone ID: MRT4577_73745C.1.pep
RSTPMWSRQLPAVLQSHKILTVMHIYMVDRHGFSSWHQQALNESDRVIEIPYDLFLSVYVALQLDFINHSHNTVILEWYLVILRHSHKHSPNIMFE

SEQ ID NO: 340542 - protein, 90 aa, Zea mays
  Clone ID: MRT4577_73746C.1.pep
CTFHFDKKHFKQIWQLHCTSTTTFMGIPALATSKRSPLEGLPRHYIPLVAPAAARRLGRLEEPGIALPGRRRHGLPGASDDGGVCSPPWT

SEQ ID NO: 340543 - protein, 180 aa, Zea mays
  unsure (1)..(180): unsure at all Xaa locations
  Clone ID: MRT4577_73747C.1.pep
GSGYEFKSEIKGGAVPKEYVPGVMKGLEESLPNGVLAGYPVVDFRXAVLVDGSYHDVDSSVLAFQIAARGAFREGMRKAGPRLLEPIMRVEVITPEEHLGDVIGDLNSRRGQVNSFGDKPGGLKVVDAFVPLAEMFQYVSTLRGMTKGRASYTMQLAKFDVVPQHIQNQLSTAKAEEAAA

SEQ ID NO: 340544 - protein, 52 aa, Zea mays
  Clone ID: MRT4577_73748C.1.pep
LTLVPTELYHLSAPITNVIDDDLCKPYHGILLTVWNISLLCALHCYSILHRC

SEQ ID NO: 340545 - protein, 162 aa, Zea mays
  unsure (1)..(162): unsure at all Xaa locations
  Clone ID: MRT4577_73749C.1.pep
MQSQIVCHGCRSVLLYPRGAPSVCCAVCHAVTSAPPPGMEMAQLICVGCRTLLMYTRNATTVRCSCCDTVNLARPAPPVNSIAHVNCGQCQTVLMYPYGASSVKCAICNFITNIGMNTVRPLPPTMHAPNGIFIXSVPSTSAPSAQSQNVTVVVENPMTVDD

SEQ ID NO: 340546 - protein, 65 aa, Zea mays
  Clone ID: MRT4577_7374C.1.pep
PALGPRWALRGPGRPLLVSVVYYRRSSEILPRPRWLPLGPCALGLGLARPGLALDHFKKKKRGGP

SEQ ID NO: 340547 - protein, 92 aa, Zea mays
  unsure (1)..(92): unsure at all Xaa locations
  Clone ID: MRT4577_73750C.1.pep
RLVVSYNGLSIGTVRDAFYFNDDLXVTKXTRGDFRQTSDGQLITEIDGKQIGTVHSKYLCRTFFDMYIGDPPVSVETKHGIAQNVAGLMRRC

SEQ ID NO: 340548 - protein, 137 aa, Zea mays
  Clone ID: MRT4577_73751C.1.pep
AGRVGMLSQRWIGFSSPSGSCSWSVSWARGKRWLDPTLSTVASLACLCCSSDDHSLNNVFCTYGRSPRDKYHPCIGGQRSPTCSVSSPIIHVKTADVAGAHTSGTDTCKGYSYISVEHSSCLTESDMSPVVRLVVML

SEQ ID NO: 340549 - protein, 102 aa, Zea mays
  Clone ID: MRT4577_73752C.1.pep
DPSVKIQHAPFIAPSPSARARMTFTSAIDHRSCAPHLHTTSRPTWLHKHNLTLVSPLTTLECYPLTITHHQLEPQGTSQPCVRIKHFANLCSNRKNRESKDC

SEQ ID NO: 340550 - protein, 58 aa, Zea mays
  Clone ID: MRT4577_73753C.1.pep
VNKQPCEIHSNHPLEQFPLCGHLGLCISSPVLRNQIRFPQGKTINRTFNFYQRNFFVW

SEQ ID NO: 340551 - protein, 52 aa, Zea mays
  Clone ID: MRT4577_73754C.1.pep
MGSVTTAEAPCIIRSGTETPWKFGSRNDPTQMISLPVLTRLVPVNTNWTRYF

SEQ ID NO: 340552 - protein, 177 aa, Zea mays
  unsure (1)..(177): unsure at all Xaa locations
  Clone ID: MRT4577_73755C.1.pep
MEFKAGVFTVAMLAIVVLSTPAPAPAAPHHVDLADLLSVAGPFHTFLDYLXNLTQDQLRSLLLCHALPKYYSLAEFDRLSALGPVAALAGSQYTLNLTYDMGTVRVKSMWSDPKISSSVYSTRPVAVYEVGKVLLPMQIFKSDPPLAPAPAPAPDAKASDVPPSPASGKSSASAKAK

SEQ ID NO: 340553 - protein, 50 aa, Zea mays
  Clone ID: MRT4577_73756C.1.pep
QSENWYGKIIVFLFFFVFWVRKRSLLFTYANQGLTYAVKRGLYSFTTQCT

SEQ ID NO: 340554 - protein, 85 aa, Zea mays
  unsure (1)..(85): unsure at all Xaa locations
  Clone ID: MRT4577_73757C.1.pep
HTLQTLSGLHTSSIAISPRLSSADPEHREEEEAPAXDDEDTGAHAAPIVKLEECAVTTGEEDEDAILDLKSKLYQFDKDWNQWKE

SEQ ID NO: 340555 - protein, 190 aa, Zea mays
  unsure (1)..(190): unsure at all Xaa locations
  Clone ID: MRT4577_73758C.1.pep
MEFKAGVFTVAMLAIVVPKDSAFAALKQTTFANLTQDQLRSLLLCHALPKYYSLAEFDRLSALGPVATLAGSQYTLNLTYDMGTVRVKSMWSDPKISSSVYSTRPVAVYEVGKVLLPMQIFKSDPPLAPAPAPAPDAKASDVAPSPASGKSSASAKAKEKAGEKXLVVPSRRVVAHYLAIAVSGGLVLLW

SEQ ID NO: 340556 - protein, 269 aa, Zea mays
  Clone ID: MRT4577_73759C.1.pep
MEFKAGVFTVAMLAIVVLSTPAAPQKPKSPPAPRSPVVLAPAPAPAPAAPHHVDLADLLSVAGPFHTFLDYLQKTGVIETFQSQANDTKRGGITVFVPKDSAFAALKQTTFANLTQDQLRSLLLCHALPKYYSLAEFDRLSALGPVATLAGSQYTLNLTYDMGTVRVKSMWSDPKISSSVYSTRPVAVYEVGKVLLPMQIFKSDPPLAPAPAPAPDAKASDVAPSPASGKSSASAKAKEKAGEKSSSCRAGVVAHYLAIAVSGGLVLLW

SEQ ID NO: 340557 - protein, 61 aa, Zea mays
  Clone ID: MRT4577_7375C.1.pep
SDLISFGLWIGVIGKQILAIHIWTFLRHNFWSMWHRNPLRNPDLISFGFRIVVFCEWKISI

SEQ ID NO: 340558 - protein, 76 aa, Zea mays
  unsure (1)..(76): unsure at all Xaa locations
  Clone ID: MRT4577_73760C.1.pep
NTHLKRKLQAGSGDGDGDGAAKPPAHRPPPSNSKGQWERRLQTDINLARRALXEALTPLVARCSSTRRSRRPRRSS

SEQ ID NO: 340559 - protein, 87 aa, Zea mays
  Clone ID: MRT4577_73761C.1.pep
PAGPGPYAVRWLLPHAHATYRPDGRRAPSSARHPAAHPWFAEVVHIATTAQEKMKPQWRSSRSPKITMTSRRGLAVNPQLAACEGHI

SEQ ID NO: 340560 - protein, 89 aa, Zea mays
  unsure (1)..(89): unsure at all Xaa locations
  Clone ID: MRT4577_73762C.1.pep
KTCSIDVTAEGGEPPAVHLYXPWSKTDSXPGPSVQSWRAYGSTLLATGPRVRDRLTSHSFQAGEAGTLLAQSENPLRRILAGVELIYLG

SEQ ID NO: 340561 - protein, 90 aa, Zea mays
  unsure (1)..(90): unsure at all Xaa locations
  Clone ID: MRT4577_73763C.1.pep
YRTRRLPAATTAPLXRLTTPAFTPTPVSIXRPRQPTGTAPPPSTRLRCSTTRTPTPAPSCDLSFARSLRRFANGAPTSVPVSDQESWLGF

SEQ ID NO: 340562 - protein, 308 aa, Zea mays
  unsure (1)..(308): unsure at all Xaa locations
  Clone ID: MRT4577_73764C.1.pep
WTPEEDLVLVSYIQDHGPGNWRAVPTRTGLMRCSKSCRLRWTNYLRPGIRRGNFTEQEEKLIVHLQALLGNRWAAIASYLPERTDNDVKNYWNTHLKRKLXPAAATATATGRPSRXHRPPPSNSKGQWERRLQTDINLARRALREALTPLGDLKPQPQPQRDGAGVGIVGGDSPAASSLSSQCSPPPAPAALGTYVLTADNVSRMLDGWAGLNGKRRGGAPGTPGGAETASTGSSSEVSYGGGTAVVAPAAGGPVFXVRDEAAGRAVPAXMMPLSAIESWLFDDDTHFHRPVQSASLLDAAPMDYYLL

SEQ ID NO: 340563 - protein, 330 aa, Zea mays
  Clone ID: MRT4577_73765C.1.pep
MVRPPCCDKEGVKKGPWTPEEDLVLVSYIQDHGPGNWRAVPTRTGLMRCSKSCRLRWTNYLRPGIRRGNFTEQEEKLIVHLQALLGNRWAAIASYLPERTDNDVKNYWNTHLKRKLQAGGGDGDGDGAAKPPAHRPPSSNSKGQWERRLQTDINLARRALREALTPLGDLKPQPQPQRAGAGVGTGGGDSPAPSSSSSQSSPAPAAFAAAAAGPYVLTAENISRMLDGWAGRKVRGGGTPGTPGGAESASTGSSDASEVSYGGAAVASAAPAPACGGPVFEYEAKPGVPTSHQQMPLSAIESWLFDDDSHLHHAVQSASLLDAAPMDYPF

SEQ ID NO: 340564 - protein, 203 aa, Zea mays
  Clone ID: MRT4577_73766C.1.pep
HSSLFMTNEFNSNDWSHRQNHVSRIHPQHGNALKSSTKNFMQRPSIGCRETQYGFPAKESKLGASLNHSTGPREKTCGKLTGGFDKTAQQLYLDRDLSNALNSSESIRCETRSISSSEPTTPKSLKGNYTSESGESTDITIGALPMQKRRLQDLVRTDDASETISGRSSPLSESSTTELIAGHSTDSSIEGTMAVKGSVTLEH

SEQ ID NO: 340565 - protein, 87 aa, Zea mays
  Clone ID: MRT4577_73767C.1.pep
QVILHERTPNNDIGNLKGNPWWRVLVGIKRKIYPAVPVIFYLPRWRFGIKILRVDKHTCGWTNKLVTWRTTLTLPDGRFWTDSLRDT

SEQ ID NO: 340566 - protein, 41 aa, Zea mays
  Clone ID: MRT4577_73768C.1.pep
TLLLELAFDPVSSSSDSPIASTCDDGPATATHDTLLPTSSI

SEQ ID NO: 340567 - protein, 110 aa, Zea mays
  Clone ID: MRT4577_73769C.1.pep
ALSNYWKTRPANHYVRGPHRTDHVRRLFGSLYHLLNYNYVLCSIVVYTLFWYAHVVHKFTLILSYCLKALPVLSYKIDRDYCFARKDYGFSGSGCRAPFPDLKHLKPRLC

SEQ ID NO: 340568 - protein, 66 aa, Zea mays
  Clone ID: MRT4577_7376C.1.pep
STCVHACMRARIPKVLRDKARLLRMQLATSRKPTSARAETTHPFHDHESMTITALHGWLHILLASK

SEQ ID NO: 340569 - protein, 97 aa, Zea mays
  Clone ID: MRT4577_73770C.1.pep
IPASASFPVAGTPPPSLVFPLALMAAPSLSPLACRFILPPSGLTLKISSLMLLLSAWAGAGPSGSGFPGLGPWPHIYIHPPGRPLCIPPNMLGSVPG

SEQ ID NO: 340570 - protein, 116 aa, Zea mays
  Clone ID: MRT4577_73771C.1.pep
MYEAAHVRVNGEEILDNILIHTKRQLQCIVDDLEPTLQEEVRYALETPLFRRLNRVQARQFISTYEKSTTRNNMLLEFSKLDFNILLTLYCEELKDLTMWWKEFQAQANTAIYARD

SEQ ID NO: 340571 - protein, 310 aa, Zea mays
  unsure (1)..(310): unsure at all Xaa locations
  Clone ID: MRT4577_73772C.1.pep
KKKQVNNVPCRSPHPPQPQGCDAAVLIASKNNDAEKDAPDNESLAGDGFDTINRVKAAVEKRCPGVVSCADIIALAARDVVYLXRRHHPLHVSSQSVSPVVVPRPAGDVSVFGGDELAMQADGPYWRVELGRLDGLDSRASDVKGKLPDPDMHVKDLTPVFQRNGFTEVDMVALSGAHTVGFAHCSRFTDRLYSYGGARTDPSFNPAYAYQLKQACPIDVGPTIAVNMDPVSPIRFDNAYYANLQDGLGLFTSDQVLYADEATRPIVDMFAASQKDFFDAFVAAMLKLGRLGVKTGKDGEIRRVCTAFNH

SEQ ID NO: 340572 - protein, 295 aa, Zea mays
  Clone ID: MRT4577_73773C.1.pep
FLLRLGTRIRKETVNNVPCRSPHLHPPQPQGCDAAVLIASKNNDAEKDAPDNESLAGDGFDTINRVKAAVEKRCPGVVSCADIIALAARDVVYLADGPYWRVELGRLDGLDSRASDVKGKLPDPDMHVKDLTPVFQRNGFTEVDMVALSGAHTVGFAHCSRFTDRLYSYGGARTDPSFNPAYAYQLKQACPIDVGPTIAVNMDPVSPIRFDNAYYANLQDGLGLFTSDQVLYADEATRPIVDMFAASQKDFFDAFVAAMLKLGRLGVKTGKDGEIRRVCTAFNISRGLSCVQQRL

SEQ ID NO: 340573 - protein, 56 aa, Zea mays
  Clone ID: MRT4577_73774C.1.pep
GHIFPLPFWRGNPPKNKGFRVLQGWYGKHTHAFHHNFSLHTIGKRKNMNPSGARGP

SEQ ID NO: 340574 - protein, 602 aa, Zea mays
  unsure (1)..(602): unsure at all Xaa locations
  Clone ID: MRT4577_73775C.1.pep
MEAQNVEVAALVKKIADLHADITKLPSLSPSPDVNALFTSLVMACVPPSTVDVTKLSPDSQRMREELIRLCSDAEGHLEAHYADMLAAFDNPLDHLGRFPYFSNYINLSKLEYDLLVRYIPGLAPSRVAFVGSGPLPFSSLVLAARHLPNTTFDNYDRCAAANDRARKLVRADKDLNARMSFHTVDVANLTDDLGKYDVVFLAALVGMAAEDKAKVVAHLGRHMADGAALVVRSAHGARGFLYPIVDPEDIRRGGFDVLTVYHPDDEVINSVIIARKIDAHANTEVSALVQKITGLHAAINKLPSLSPSPDVDALFTXELVMACVPPSPVDVTKLGTDAQRMREELIRLCSDAEGHLEAHYADMLAAFDNPLDHLGRFPYFNNYVNLSKLEYDLLVRYVPGIAPSRIAFVGSDPLPFSSLVLASRHLPNVMFDNYDRCAAANDRARKLVRADEGLRKQMFFHTADVANLTDELRKYDVVFLAALVGMAAEDKAKVVAHLGRHMADGAALVVRSAHGARGFLYPIVDPEDIRRGGFDVLAVYHPDDEVINSVIVARKINAHVKGLQDGHAHARGAVPIVSPPCKCCKMEANTLHQKREEMATA

SEQ ID NO: 340575 - protein, 115 aa, Zea mays
  unsure (1)..(115): unsure at all Xaa locations
  Clone ID: MRT4577_73776C.1.pep
GIPXXALSLPSALXXPSXPGLRGLPSSSSXXLPPLFGGGGCVASPVXXPGCPXPPRRPXASSGPPXRGPPPPPAAGAAPPPSPRXPARXXPPPPFLPPGGRLLGXPPPPPSPLLR

SEQ ID NO: 340576 - protein, 46 aa, Zea mays
  unsure (1)..(46): unsure at all Xaa locations
  Clone ID: MRT4577_73777C.1.pep
KWNPDIKFLGAFDVNEGXPSPPPLSHLRIIKECLWAPLLPRALQPN

SEQ ID NO: 340577 - protein, 103 aa, Zea mays
  unsure (1)..(103): unsure at all Xaa locations
  Clone ID: MRT4577_73778C.1.pep
SFLHPLPAAFSIPSPKKFGVIFYQRRGAKPXLNSHTHHRNVPSLFLSFYFFKLIFYLNYFFTDLIHNPFLFTPFFNFTFLHPFSYNHHILFFFSSFLIYTFHF

SEQ ID NO: 340578 - protein, 175 aa, Zea mays
  Clone ID: MRT4577_73779C.1.pep
KERIQFIVYLCIHSDVSSGVRCGCTSTPAIAFGASVACWYEHLSRTVSIVLCKHHRLWELAFRVFTLYRVRTYLMDGFFCHTHIASWHTLHNIICGSAGKIDGWLEVVRDQLACDVTVYHGSDDELLPVQCSHAVKAKVPRAQVRVIDGKDHVTIVVGRQKDLARELEEIWDRRR

SEQ ID NO: 340579 - protein, 185 aa, Zea mays
  unsure (1)..(185): unsure at all Xaa locations
  Clone ID: MRT4577_7377C.1.pep
DIYCSLDLTGARPRVRAAEEDGDKDKKXRRRPQQARREEGHQXSKVTLSGLLNFIDGLWSACGGERIIVFTTNHVKKLDPALIRRGRMDKHIEMSYCGFEAFKFLAKTYLDVDSHPLFDAVGELLREVDMTPADVAENLTPKSLDDGPDSCLADLVKALEEAKKXLAEPERMKRTSNMSHEEEKL

SEQ ID NO: 340580 - protein, 85 aa, Zea mays
  unsure (1)..(85): unsure at all Xaa locations
  Clone ID: MRT4577_73780C.1.pep
LITQQQINMDFHFDQXIPHNTTKKANPSNVATSGKVHHQSQMLLTELIKSTNAYEHEICNKLFIQNTXNFYSXYLQSIHIFHQTH

SEQ ID NO: 340581 - protein, 70 aa, Zea mays
  unsure (1)..(70): unsure at all Xaa locations
  Clone ID: MRT4577_73781C.1.pep
FQHLIKDMSVNNDVRYQEWYLAFRLVNRVTGEAIRHSQGEGHLVKMVAYNPGYQLXSVLWTVSHDFGYVF

SEQ ID NO: 340582 - protein, 125 aa, Zea mays
  Clone ID: MRT4577_73782C.1.pep
MRRRSCSMPLPLAAAALLLLLVCFFHYSAAARLLPPSPVPAQLVHRETGVTAAAAAAYGGLALQEGGVGNGDELSISGDEMMAAEVEEGAVACEADDDEDDGCMQRRLLQNAHLDYIYTQHKGKP

SEQ ID NO: 340583 - protein, 53 aa, Zea mays
  Clone ID: MRT4577_73783C.1.pep
TMKGADLSIYIYSFFFIYFFFFLFRLFFSYYFSFFFFYFFFFLYIFFFFGRVG

SEQ ID NO: 340584 - protein, 117 aa, Zea mays
  Clone ID: MRT4577_73784C.1.pep
MRRRSGSMPLPLAAAALLLLLVCFFHCSAAARLLPPSPVPAQLVHRETGVGGLALQEGGVGNGDELSISGDEMMAAEVEEGAVACEADDDEDDGCMQRRLLQNAHLDYIYTQHKGKP

SEQ ID NO: 340585 - protein, 79 aa, Zea mays
  Clone ID: MRT4577_73785C.1.pep
KTSGLLGYRQRRKTSMRPFLLLGCIWASTSRGRLPGLTQTSSLATIIRAEASSVGVGNSIRRHFEQFRQTGQTQVSSSS

SEQ ID NO: 340586 - protein, 186 aa, Zea mays
  Clone ID: MRT4577_73786C.1.pep
YPRSRPGFSLFDEEGKSILPGNFERHWGIFSFDGQAKYPLNLGLGNSVLKNAKEVPYLPSRWCVANPARDLDSVSDHMKLACSMADCTTLYYGGSCYGIGEKGNVSYAFNSYYQQQKQDPKSCDFGGLGMITYLDPSMGECRFLVGVDDSKSSAVASCGGGCCGVCCGLWVLALWVLTYLRMMGSA

SEQ ID NO: 340587 - protein, 366 aa, Zea mays
  Clone ID: MRT4577_73787C.1.pep
MKQHQGRLIVLSLEAVESPRESSSFIPTFSFNPSSHSGSPFHEIVGYTTEEFSSNSMCSSPDEFSCNQIQAEQMTGQLRSLTQYILNGAVLALCPYLDRYVLAAAGNMIYVFGFTNENPHRIKKCAVGRTRFTITCLKTFASRIAVGDCRDGVLFYSYNESHRKLELVYSDPAHRLVGDIALLNCETAVVSDRRGSISVLSCTRLEVSESPQKNLAVNCSFYMGETAMSIQKAAFRYRLPIDDDTDPVLETVYNCIVASTMLGSLFVMIPLSSEEHQLLQDVQEKLSVHPLTAPVLGNDHAEFRQRGTPSVVPPILDGDMLVQFLELTGEQQQAILTHALPGKGQHRPLSVFQVLQTLERVHYALN

SEQ ID NO: 340588 - protein, 64 aa, Zea mays
  Clone ID: MRT4577_73788C.1.pep
SSGLLHMLLLENSSVVYPTISWKGEPECEEGLKLKVGINELLSRGLSTASKLKTIRRPLMLLHQ

SEQ ID NO: 340589 - protein, 42 aa, Zea mays
  Clone ID: MRT4577_73789C.1.pep
MKHTLEIIHLLTDAGAIQVVVDAIINSLPREYATRIGTPGIA

SEQ ID NO: 340590 - protein, 572 aa, Zea mays
  Clone ID: MRT4577_7378C.1.pep
MKTGTSTSSSSIIAESTVTAPLNIECLMDEKDVRGFIKREEFEQISASVLERVKGPLEKALAEAGLTTENVHFVEVVGSGSRVPAIIKIITDFFGKEPRRTMNASECVARGCALQCAILSPTFKVREFQVNDGFPFSIALSWNGDSQNAPQQTLVFQKGNAIPSTKALTIFKSSTFEVDVLYVDPDNSQIPQKISTYTIGPFQTSNGEKAKLKVKVRLNIHGTVTVDSVIMLEEDVEVPVSSANEAPNDTMKMDTDDVPSDPAAGSDVTMQEQPPAAGNGAQDNEEKSVSMETDAKVEPSKKKVKKTTVPVHELVYGALAAADLQKAVEKEYEMALQDRVMEETKEKKNAVEAYVYDMRNKLYDKYSDFVTPEDKEGLIGKLQEVEDWLYEDGEDETKGVYIAKLEELKKVGDPIELRFKEWEIRSSAVSQLVYCIKSFREAAQSTDQKFEHIDMSEKQKVISECSEAETWLMEKRQQQDALPKHANPVLLAADLKKKAETLDRFCKPIMTKPKPVPKPQTPPPAETQAPEPQTPEQQRSNGESTTSEGAAEEPPAEQMETDKPEGATDPSA

SEQ ID NO: 340591 - protein, 82 aa, Zea mays
  Clone ID: MRT4577_73790C.1.pep
ETLHYLLKQTERIFVSMQNAPYNSLPKAADCIYTGGSTNLVPPRDTRHHETSQYQAPVASSIKRSDKYHGRLGIGRLDCEGH

SEQ ID NO: 340592 - protein, 200 aa, Zea mays
  Clone ID: MRT4577_73791C.1.pep
MLVSTEEFSSNSMCSSPDEFSCNQIQAEQMTGQLRSLTQYILNGAVLALCPYLDRYVLAAAGNMIYVFGFTNENPHRIKKCAVGRTRFTITCLKTFASRIAVGDCRDGVLFYSYNESHRKLELVYSDPAHRLVGDIALLNCETAVVSDRRGSISVLSCTRLEVSESPQKNLAVNCSFYMGETAMSIQKASILLFHRLLIY

SEQ ID NO: 340593 - protein, 60 aa, Zea mays
  unsure (1)..(60): unsure at all Xaa locations
  Clone ID: MRT4577_73792C.1.pep
MATAVASSLLKSSFVSSRVPAATRTKPADLVEGTGPRGARXGPICAGGCMVFYNRPYDLT

SEQ ID NO: 340594 - protein, 56 aa, Zea mays
  Clone ID: MRT4577_73793C.1.pep
VQSCRIPFQLNLTLNPKATLDEGGDDKNQRRHQNYLEGSGGNLLRWADGLINLKPF

SEQ ID NO: 340595 - protein, 48 aa, Zea mays
  Clone ID: MRT4577_73794C.1.pep
RELGSYSAVDLCVCRSAFLIYLRILLGRLFSYLRARVQYAGRGLNFKQ

SEQ ID NO: 340596 - protein, 60 aa, Zea mays
  Clone ID: MRT4577_73795C.1.pep
ANIIPCNLFLIFYIIMHTVHYPLHPKHSSPYFRRQETLITPQNLGTDHLHHHDLGIIPRA

SEQ ID NO: 340597 - protein, 245 aa, Zea mays
  unsure (1)..(245): unsure at all Xaa locations
  Clone ID: MRT4577_73796C.1.pep
VLEDQGYDGAMADLWSCGVILFVLLARYLPXEDSNLMTLYKKISNAEFTFPPWTSFPAKRXITIPEILEDEWFKKGYKRPEFDEQYDTTLDDVDAVFNDSEEHHVTEKKEEEPVALNAFELISMSAGLNLGNLFDSEQEFKRETRFTSKCPPKEIVRKIEEAAKPLGFDVQKKNYKLRLEKVKAGRKGNLNVATEILQVAPSLHMVEVRKAKGDTLEFHKFYKNLSKTLKDVVWKSDDLQTQHAS

SEQ ID NO: 340598 - protein, 128 aa, Zea mays
  Clone ID: MRT4577_73797C.1.pep
AGKWKGIIYREKGCLEKKKKKKKKKKKKKKKKKKNKKKKKKKKKKKKKKKKKKKKKIFFKTLPGRPPGKAPGFSQTPPHKSHKGPSTPLLANPLGKKKPWGEAFKKTRCPNSNNNPGPFYPYNPSKQN

SEQ ID NO: 340599 - protein, 77 aa, Zea mays
  Clone ID: MRT4577_73798C.1.pep
GIGRSTWARIRLHAPPTDDLLLYAIAACLRQGRKLIIEKYSSMDEILRECNSMAGQLDVWKLLDDAHHLVVDLHHRI

SEQ ID NO: 340600 - protein, 147 aa, Zea mays
  unsure (1)..(147): unsure at all Xaa locations
  Clone ID: MRT4577_73799C.1.pep
MSTTKVKRRVGKYELGXDTVTGEAVAIKILDKEKVLKHKMVEQIKREISTMKLIKHPNVVRIYEVMGSKTKIYIVLEFATGGELFDTIVNHGRMREDEARRYFQQLINAVDYCHSRGVYHRDLKPXNLLLXSYXNLXVSDFXLSALS

SEQ ID NO: 340601 - protein, 592 aa, Zea mays
  unsure (1)..(592): unsure at all Xaa locations
  Clone ID: MRT4577_7379C.1.pep
KIDVYQNARACIRLRVACEKLKKVLSANPEAPLNIECLMDEKDVRGFIPRVRFEQISASVLERVKGPLXEKALAEAGLTTENVHFVEVVGSGSRVPAIIKIITDFFGKEPRRTMNASECVARGCALQCAILSPTFKVREFQVNDGFPFSIALSWNGDSQNTPQQTLVFPKGNAIPSTKVLTFFKSSTFEVDVLYVDPNGLQIPQKISTYTIGPFQTSKGEKAKLKVKVRLNIHGTVTVDSAIMLEDDVEVPVSSANEAPNDTMKMDTDDAPSDPAVASDVNMQEPKSADTAEAAHAAENGPQDTEEKSVPMETDAKVEPSKKKVKKITVPVHELVYGALAAADLQKAVEKEYEMALQDRVMEETKEKKNAVEAYVYDMRNKLYDKYSDFVTSEDKEGLIAKLQEVEDWLYEDGEDETKGVYIAKLEELKKVGDPIELRFKEWEIRSSAVSQLVYCINSFREAAQSTDQKFEHIDMSEKRKVINECSEAETWLIEKKQQQDALPKHANPVLLAADLKKKAETLDRFCKPIMTKPKPAPKPQTPPVAENQAPEPQTPEQQQSGGESTASEGAAEEPRAEQMETDKPEGATDPSA

SEQ ID NO: 340602 - protein, 44 aa, Zea mays
  Clone ID: MRT4577_737C.1.pep
GGARSMGRFPTPIYIVSLFPALDNMHFCKNPMICNNLNPNVWFS

SEQ ID NO: 340603 - protein, 276 aa, Zea mays
  unsure (1)..(276): unsure at all Xaa locations
  Clone ID: MRT4577_73800C.1.pep
ARNSARATMKLIKHPNGVRIYEVMGSKTKIYIVLEFATAGELFDTIVNHGRMREDEARRYFQQLINAVDYCHSRGVYHRDLKPENLLLDSYGNLKVSDFGLSALSQQIKDDGLLHTTCGTPNYVAPEVLEDQGYDGAMADLWSCGVILFVLLAGYXNAEFTFPPWTSFPAKRLLTRILDPNPMTRITIPEILEDEWFKKGYKRPEFDEQYDTTLDDVDAVFNDSEEHHVTEKKEEEPVALNAFELIXSMSAGLNLGNLFDSEQEFKRETXFTSKVP

SEQ ID NO: 340604 - protein, 63 aa, Zea mays
  Clone ID: MRT4577_73801C.1.pep
KSRAKSNTILEWREYILCINNRHYIVTTLKRDMTFFLCHISLFSRRQGFSKHFIYIRKFSFKL

SEQ ID NO: 340605 - protein, 167 aa, Zea mays
  Clone ID: MRT4577_73802C.1.pep
AKESSPPSTSVSPTQQQSRSTIEGGEMTVASSVRLAGGNLTVCGRTVLSGVPDAVVATSAATEGAVHGIFLGADFAEPAARHVVSLGDLRDVRFMACFRFKLWWMAQRMGEKGSDVPRETQFLLVESRGVGDEDAAYVVFLPLVEGAFRASIQGGAGDALELCVESG

SEQ ID NO: 340606 - protein, 77 aa, Zea mays
  unsure (1)..(77): unsure at all Xaa locations
  Clone ID: MRT4577_73803C.1.pep
ASTKNPQNSQIVGEVDPDQRLVHQGESSGSLPLPQVLTAPIRLDVVQQVHXSEANHERQPYAFGENPGHQTSAGSWG

SEQ ID NO: 340607 - protein, 115 aa, Zea mays
  Clone ID: MRT4577_73804C.1.pep
CREAALAPCGGRATTGAEAGGRALADGGPACARWPRSNARAAPCRRGPWPLRRRRGARPRRAAGGLRPRAAGRSQGPSACASGVPRSAAPRPGPAPRPSPAGCERLGLENPNCQL

SEQ ID NO: 340608 - protein, 440 aa, Zea mays
  Clone ID: MRT4577_73805C.1.pep
MSTTKVKRRVGKYELGRTIGEGTFAKVRFARDTVTGEAVAIKILDKEKVLKHKMVEQIKREISTMKLIKHPNVVRIYEVMGSKTKIYIVLEFATGGELFDTIVNHGRMREDEARRYFQQLINAVDYCHSRGVYHRDLKPENLLLDSYGNLKVSDFGLSALSQQIKDDGLLHTTCGTPNYVAPEVLEDQGYDGAMADLWSCGVILFVLLAGYLPFEDSNLMTLYKKISNAEFTFPPWTSFPAKRLLTRILDPNPMTRITIPEILEDEWFKKGYKRPEFDEQYDTTLDDVDAVFNDSEEHHVTEKKEEEPVALNAFELISMSAGLNLGNLFDSEQEFKRETRFTSKCPPKEIVRKIEEAAKPLGFDVQKKNYKLRLEKVKAGRKGNLNVATEILQVAPSLHMVEVRKAKGDTLEFHKFYKNLSKTLKDVVWKSDDLQTQHAS

SEQ ID NO: 340609 - protein, 114 aa, Zea mays
  unsure (1)..(114): unsure at all Xaa locations
  Clone ID: MRT4577_73806C.1.pep
MASIAGSSALSFAMPVKAINSNSLAFSPVRKGXKKDTVDKVCEIVKKQLALPDHTEVCGESKFSELGADSLDTVEIVMGLEEHFDISVEESSAQTIATVEDAADLIDKLVAVKA

SEQ ID NO: 340610 - protein, 53 aa, Zea mays
  Clone ID: MRT4577_73807C.1.pep
KTRSQLKLFYGCTKCNYSLQKPNCSFLPNPLKQKTQFWPPLTFLSFNPPGFFG

SEQ ID NO: 340611 - protein, 126 aa, Zea mays
  Clone ID: MRT4577_73808C.1.pep
MASIAGSSALSFAMPVKAINSNSLAFSPVRKGNTFLRLQPVPMRSVSCAAKKDTVDKVCEIVKKQLALPDHTEVCGESKFSELGADSLDTVEIVMGLEEHFDISVEESSAQTIATVEDAAVAIPVS

SEQ ID NO: 340612 - protein, 388 aa, Zea mays
  Clone ID: MRT4577_73809C.1.pep
MSTTKVKRRVGKYELGRTIGEGTFAKVRFARDTVTGEAVAIKILDKEKVLKHKMVEQIKREISTMKLIKHPNVVRIYEVMGSKTKVYIVLEFATGGELFDTIVNHGRMREDEARRYFQQLINAVDYCHCRGVYHRDLKPENLLLDSYGNLKVSDFGLSALSQQIKDDGLLHTTCGTPNYVAPEVLEDQGYDGAMADLWSCGVILFVLLAGYLPFEDSNLMTLYKKISNAEFTFPPWTSFPAKRLLTRILDPNPMTRITIPEILEDEWFKKGYKRPEFDEQYDTTLDDVDAVFNDSEEHHVTEKKEEEPVALNAFELISMSAGLNLGNLFDSEQEFKRETRFTSKCPPKEIVRKIEEAAKPLGFDVQKKNYKVPTCSASNLIFEYFLEA

SEQ ID NO: 340613 - protein, 299 aa, Zea mays
  unsure (1)..(299): unsure at all Xaa locations
  Clone ID: MRT4577_7380C.1.pep
LGTSRPAGEVTQEDVQERAXTSLATFVVMDDESANVDPARSEAVMQNGGIRMLLDLARCSRESAQSEAAKAIANLSVNTKVAKAVADEGGITILINLAKSMNRLVAEEAAGGLWNLSVGEDHKAAIAVSGGIKALVDLIFRWPAGTDGVLERAAGALANLAADDKCSLEVAKAGGVHALVTLARSCKLDGVLEQAARGLANLAAHGDNNDNNAAVGQEAGALEALVQLTSSQNEGVRQEAAGALWNLSFDDRNREAIAAVGGVEALVALVQQCLNASEGLXERAAGALWGLSVSEANSI

SEQ ID NO: 340614 - protein, 239 aa, Zea mays
  Clone ID: MRT4577_73810C.1.pep
MRKRDLGILLLAAFAIFFSLHHEGDFSFRESWYHLTDEDFPIKYEADRLPPPLVADLNGDGKPEVLLPTHDAKIQVLQPPHARHLNDDSAFQEARVMADISLLPDNVRLASGRRPIAMAVGNVDRSYRPGEVRKQVLVVVTSGWSVMCFDHNLKKLWEHNLQDDFPHAAHHREVAISITNYTLKHGDAGLVIVGGRMEMQHHSADLFDEFMIPEHNMDDRRRSASEKQGSEAGNADLRH

SEQ ID NO: 340615 - protein, 49 aa, Zea mays
  Clone ID: MRT4577_73811C.1.pep
NQTVSCFGERGRFPVVYFRARPLGTHFLVWPTIFLKQTFSSKKRFRFLK

SEQ ID NO: 340616 - protein, 100 aa, Zea mays
  unsure (1)..(100): unsure at all Xaa locations
  Clone ID: MRT4577_73812C.1.pep
ANKGGSKTRPRMRLPKGAGKEMHFPPRMLGRNGAEELVSHHNRPGRHTXASEPQEHWERPSLALKXERTSCSARDTTRSPAGRELVELTPAVXAPPPPHR

SEQ ID NO: 340617 - protein, 42 aa, Zea mays
  Clone ID: MRT4577_73813C.1.pep
NKTGCRQWLWVMMVYDIRLGSDRSNGQREKFMWDRIIGFSVF

SEQ ID NO: 340618 - protein, 131 aa, Zea mays
  Clone ID: MRT4577_73814C.1.pep
SARILLFYICTQTPLYVGFFTNTHNTPLWVRRAHAERDRSSGHAVHTQMRARTACTRALCLYLAAGSRGRNGRWTMTVPGGWYLRRGKRRGCWGKPRARSRCGWTWATPGAWGGRTPMTGLEVVLLTWSGC

SEQ ID NO: 340619 - protein, 45 aa, Zea mays
  Clone ID: MRT4577_73815C.1.pep
CWNLKDSQLSFKYLYKIFLIIVLTRTYDRIFLCGINQILFYFLFF

SEQ ID NO: 340620 - protein, 45 aa, Zea mays
  Clone ID: MRT4577_73816C.1.pep
TDRSGTDEARPRGGGACCIQSPLRVAYAVESTRTAERYGTDCRHI

SEQ ID NO: 340621 - protein, 109 aa, Zea mays
  Clone ID: MRT4577_73817C.1.pep
PVCKKRACFWAGGELDPFTPSSLTLSQTKFTPPFFPRALRAPALFFPPKAHISGGNTLCFFVLGQPQSPPVFTLTSLAGGVYFVFFFMSFFGPGPKKKKTHPKKKKRRK

SEQ ID NO: 340622 - protein, 154 aa, Zea mays
  unsure (1)..(154): unsure at all Xaa locations
  Clone ID: MRT4577_73818C.1.pep
MNALAATTRNFRRASKLLGLDSKLEQSLLIPFREIKVECTIPKDDGSLATFVGFRVQHDNARGPMKGGIRYHNEVDPDEVNALAQLMTWKTAVAAVPYGGAKGGIGCSPGELSRSELERLTRVFTQKIHDLIGTHTDVPAPDTXTNAQTMAWML

SEQ ID NO: 340623 - protein, 193 aa, Zea mays
  unsure (1)..(193): unsure at all Xaa locations
  Clone ID: MRT4577_73819C.1.pep
MNALAATTRNFRRASKLLGLDSKLEQSLLIPFREIKVECTIPKDDGSLATFVGFRVQHDNARGPMKGGIRYHNEVDPDEVNALAQLMTWKTAVAAVPYGGAKGGIGCSPGELSRSELERLTRVFTQKIHDLIGTHTDVPAPDMGTNAQVGLTMLLIFFSMLSYLVFHWYLLCNCXTMAWMLDEYSKFHGHSPA

SEQ ID NO: 340624 - protein, 98 aa, Zea mays
  Clone ID: MRT4577_7381C.1.pep
MSWFGHHHREQPAPPASGRKQVFKMFCCANENYCLAVRDGAVVLAPVNTKDDQEHWYKDMRFSNRVQDDEGIPAFALVCSATGLALKHSLSQSHAVKL

SEQ ID NO: 340625 - protein, 83 aa, Zea mays
  Clone ID: MRT4577_73820C.1.pep
KLSTPPKLPKDRKIPFYFYKRKELGGFFFDPGGIEPFPGKKNFLKLPPFLKPPTGVGGGEQKKLCHRKTLKVDGPKKKRPGNF

SEQ ID NO: 340626 - protein, 298 aa, Zea mays
  Clone ID: MRT4577_73821C.1.pep
MNALAATTRNFRRASKLLGLDSKLEQSLLIPFREIKVECTIPKDDGSLATFVGFRVQHDNARGPMKGGIRYHNEVDPDEVNALAQLMTWKTAVAAVPYGGAKGGIGCSPGELSRSELERLTRVFTQKIHDLIGTHTDVPAPDMGTNAQTMAWMLDEYSKFHGHSPAVVTGKPIDLGGSLGRDAATGRGVMYATEAEAANHPNEPDADEILAKKGVVVLPDIYANSGGVVVSYFEWVQNIQGFMWDEEKVNDELEKYMSSAFQHLKAMCKSLDCDLRMGAFTLGVNRVARATLLRGWEA

SEQ ID NO: 340627 - protein, 156 aa, Zea mays
  Clone ID: MRT4577_73822C.1.pep
GFRFSGGPLGEVVSPLFPGGRFGPLGLGGGPGAFAGLQVKGVQAGPLPLFSLFGFFVPALVPGKGPLGTLPGPLGGPVYHQGWGFAPHFVPGHLASRVCFATSLFFGLERVVVRGFFFSARCLCVFFFPLPWVGRSRFFVGPLPPGGPCLCGYRII

SEQ ID NO: 340628 - protein, 412 aa, Zea mays
  unsure (1)..(412): unsure at all Xaa locations
  Clone ID: MRT4577_73823C.1.pep
MNALAATTRNFRRASKLLGLDSKLEQSLLIPFREIKVECTIPKDDGSLATFVGFRVQHDNARGPMKGGIRYHNEVDPDEVNALAQLMTWKTAVAAVPYGGAKXGGIGCSPGELSRSELERWTRVFTQKIHDLIGTHTDVPAPDMGTNAQTMAWMLDEYSKFHGHSPAVVTGKPIDLGGSLGRDAATGRGVMYATEALLAEYGKXFSGSTFVIQGFGNVGSWAARLIHEKGGKIIAIGDVTGSIRKXGVTDTFCGKAGKDIPALEKHRSGGHAMLDFVGTAVLCSTGLLVLNCSXLTPXSFGRVVNMDNARYVKAKLVIGAANSPTDPEAGEILAIYGVIVLXVVSFLIWVQKILGFMYAEEKVNDELEKYMSSAFQHMKAMCKSLDCDLRMGAFTLGVNRVARATLLRGWEA

SEQ ID NO: 340629 - protein, 47 aa, Zea mays
  Clone ID: MRT4577_73824C.1.pep
FLPLGDKPPPPKKKKKKKKKKKKKKKKKKKKKKKKKKKKKKKKPPPP

SEQ ID NO: 340630 - protein, 39 aa, Zea mays
  Clone ID: MRT4577_73825C.1.pep
ACAFLGHGKVNLPSGALTLMPFNTASGIFYELGKWACTA

SEQ ID NO: 340631 - protein, 37 aa, Zea mays
  Clone ID: MRT4577_73826C.1.pep
LAWIETGGTHIHFFITKKTTSISGTVTNHSKSPCKVF

SEQ ID NO: 340632 - protein, 77 aa, Zea mays
  Clone ID: MRT4577_73827C.1.pep
SVKTFTSSELSILMSVEDLKLVDHYGHPHLDLLGKAVQDAEHAIVSWLGPAASDPAPGPQRRSEPIKGEGQDLAVGK

SEQ ID NO: 340633 - protein, 40 aa, Zea mays
  Clone ID: MRT4577_73828C.1.pep
LPNERAYLIVISQHLISHKSLHLSSRSIFLIKILHEIQLT

SEQ ID NO: 340634 - protein, 187 aa, Zea mays
  unsure (1)..(187): unsure at all Xaa locations
  Clone ID: MRT4577_73829C.1.pep
MAYSFIHRPLSDEARRVSTPLVVTCNDQRREVSVAQNIANKEIDRTVPNTQVLGPKSQQQDVFNHAVVPLVSEVLDGYNCTIFAYGQTGTGKTYTMEGGGGKXSAVFIIYIHMLHMFLNSDAVSLLLQLTPXLLHSXNDDLPTDVGVIPSAVKRIFDILEAQSAEYNMKVSFLELYNAELTDLLALQ

SEQ ID NO: 340635 - protein, 45 aa, Zea mays
  Clone ID: MRT4577_7382C.1.pep
FPQFVSLCNCALTRSPSVWVHLSAQPRDSAQQQNYLFFVTPSFIH

SEQ ID NO: 340636 - protein, 106 aa, Zea mays
  Clone ID: MRT4577_73830C.1.pep
IPGRPASAHASLTLAALGKTDFRSMLARYLIGLHSTFPKNLTLCVSLSVWQSIDLHDDFPAAHTPARHGTSAGIHLHAARQVLGHHHTLLLRLQVQPCHGQDVQTL

SEQ ID NO: 340637 - protein, 77 aa, Zea mays
  Clone ID: MRT4577_73831C.1.pep
HTRAVSGDPWANRARIGHVRHESNGLITVPSLLNTVRLRLDCRRDMHGAVTPMVEREGLVLLHQEHRIDCIHGFWAR

SEQ ID NO: 340638 - protein, 295 aa, Zea mays
  Clone ID: MRT4577_73832C.1.pep
MDVSRKKKWVAWAVAAAIFVVLMLVTPAIPQDEAYHDFADQRTLFLGIPNTLNVISNIPFFFVGVTGLILCHFNNYFRLSSQGELWSWTLFFAGVTAVGFGSSYYHLNPNDATLVWDRLPMTIAFTSVMAIFIIERVDDRAGAKSLAPLVIAGALSIMYWRHFDDLRPYAVVQFVPCIALPVMAIVIPPMYTHSSYWLWAAGFYLLAKVEEAADKTIYNWTHQIVSGHTLKHLCAAMVPVFLALMLAKRTTEPERISLLQKWKTSWVAVRERRFKDSSTVDVDCGYAVVSSISEQ

SEQ ID NO: 340639 - protein, 93 aa, Zea mays
  Clone ID: MRT4577_73833C.1.pep
SWVFLGFFWALGRLGAFAGPLVFPASCFLSLPPSFFGGSLVFVLRPPCAPRRWSFPARRVSSSSSAWRGLVARLVGFWSLGVSRRLVLLAVVG

SEQ ID NO: 340640 - protein, 68 aa, Zea mays
  Clone ID: MRT4577_73834C.1.pep
VGDWLGFARLPPCHTLAPGFALPYTIPPLGHARAPAGNRAAFPGAAPAAVLCARTYIFTEKIYVLAHK

SEQ ID NO: 340641 - protein, 127 aa, Zea mays
  unsure (1)..(127): unsure at all Xaa locations
  Clone ID: MRT4577_73835C.1.pep
HASXKHAPDLSLLYTTSSHTATGGETRCLEGTPTRRPRLSTSLQLRTPPRVATGLATSLKTSTDWWTVREAARPVLAPAQLQERGRRRLRSYHTSNTVSRGTSERGAIRISCLRASWTACRKHCAPK

SEQ ID NO: 340642 - protein, 232 aa, Zea mays
  unsure (1)..(232): unsure at all Xaa locations
  Clone ID: MRT4577_73836C.1.pep
MLSSHRESLLPYAPGRRAAVLLDHRRYRPNVEVAPSCPRCDSPNTKFCYYNNYSLSQPRYFCKGCRRYWTKGGSLRNVPVGGGCRKNRSRGKPVRAVAVDSVAPSSGGAAAFTHRAXRRRRRRRPATLRPDMLLEGMLGSPGGLCQLTVTDDDAAENPAVAPDGPRIDLALLYAKFLNQQPPAPERRAVLPESLVVDTLSGSSSSDVGPVVPSRDHQPFTTQDDGLGELSAA

SEQ ID NO: 340643 - protein, 34 aa, Zea mays
  Clone ID: MRT4577_73838C.1.pep
MASLTMKESFAPVTVAATLHPGAFAVVRSAKVDL

SEQ ID NO: 340644 - protein, 83 aa, Zea mays
  Clone ID: MRT4577_73839C.1.pep
KETAENTYQDEHWTSSRLTVTATKELLLTLQRSKDSHLHVEINEPSHFEAMPNPIVPKSRYERAHANGNGIHKGPVNFEKNVQ

SEQ ID NO: 340645 - protein, 625 aa, Zea mays
  unsure (1)..(625): unsure at all Xaa locations
  Clone ID: MRT4577_7383C.1.pep
VFHQCNWSHKDKIAGDITTWLEWILSQSLLRIAESNPQGMDGFWVQKGTSLLLRLLKSLXKDVQQRAATALVTFVVMDDEIAKVDPARSEAVMQNGGIRMLLDLARCSRESSHFEAAKAIANLSVNTKVAKAVADEGGITILTDLAKSMNRLVAEETAGGLWNLSVGEDHKASIAVSGGCAAFADLQFTIPGGRHAVHHAGLLQEAGAGRVLRATAASDNSXSLKLKSLPGLYSXLGAPSXGCQHEXSRGSSSNKQRPLHRWAAXANAESNSLAFGAXTSQQFWSVQTVTXKSSTEGITHNCEVTEXNISGDPSRIGRLRLSVQFSRVHFACTSKNFFRVDENYKLAYSLXMDIYSLFVSXGVWRRHVEVRLFLLGXCNFINVLLCIFFLMVESAPLLTLARSEVEDVHETAAGALWNLAFYSGNALRIVEEGGVPVLVKICSSSGSKMARFMSALALAYMFDGRMDEVALVGASSASSSKSVNIEGARRIAFKHIETFVLTFSDPQMFSTAAASSAPAALSHVAEAVFIQEAGHLRCSRSEIGRFVVMLRNPSPILRACAAFALLQFTIPGGRHAVHHAGLLQEAGAGRVLRAAAAATTASIEAKIFARIVLRNLEHHQLGTST

SEQ ID NO: 340646 - protein, 204 aa, Zea mays
  unsure (1)..(204): unsure at all Xaa locations
  Clone ID: MRT4577_73840C.1.pep
SDVSGSDGEDTSWISWYCNLRGNEFFCEVDDDYIQDDFNLCGLSSQVPYYDYALDLILDIESSHXCNCVGDMFTEEQNELVESAAEMLYGLIHARYILTSKGLAAMLEKYKNYDFGRCPRVYCCGQPCLPVGQSDIHRSSTVKIYCPKCEDIYYPRSKYQGNIDGAYFGTTFPHLFLMTYEHLKLQKLSQRYVPRVFGFKLHKP

SEQ ID NO: 340647 - protein, 332 aa, Zea mays
  unsure (1)..(332): unsure at all Xaa locations
  Clone ID: MRT4577_73841C.1.pep
MYKQGGAGVGAGLDRKRISDALDKHLEKAVASPSTSRGSAGGGGVRDHHRLIVPSSVSSIPKGRCSEGESDSDSEASDVSGSDGEDTSWISWYCNLRGNEFFCEVDDDYIQDDFNLCGLSSQVPYYDYALDLILDIESSHGDMFTEEQNELVESAAEMLYGLIHARYILTSKGLAAMXCSALTGVFTLRCSFIYXVAFLXLEKYRNYDFGRCPRVYCCGQPCLPVGQSDIHRSSTVKIYCPKCEDIYYPRSKYQGSILTILLLYYLYACVSNFDLFVRTQTYGIFVPSLTQLPMFSCLSTHLPTALCWLIQKTIKHENSPLRPPITMFFQLP

SEQ ID NO: 340648 - protein, 94 aa, Zea mays
  Clone ID: MRT4577_73842C.1.pep
MGFTAPSPQVPMPGVRALRAGFAGVPLDLAAIGDLFAASRFMVAHANNLSTAAAPATGQPLLVPLQCGCPSGSPNSYAAMQYQIVSGDTYWIIS

SEQ ID NO: 340649 - protein, 113 aa, Zea mays
  Clone ID: MRT4577_73843C.1.pep
GPHHQGFQQVFGVYPALFEVAFVFVLGVPEPGPVFFGFKKNPPLPRFPGGSFFSGKRRAFPPLWIAPRRLVLFFFFFPGPPASSFFLNPFSWALGIKNLIFWDFFGVGPFGPF

SEQ ID NO: 340650 - protein, 56 aa, Zea mays
  unsure (1)..(56): unsure at all Xaa locations
  Clone ID: MRT4577_73844C.1.pep
GDXATLXKHXXRXXATXEAIDSHILIDTLXMERDSXAAXXYRLRIDSESAVAEEWH

SEQ ID NO: 340651 - protein, 51 aa, Zea mays
  Clone ID: MRT4577_73845C.1.pep
FPLYPNLNRIITYLPYIKFTKFLKNFTPYSKYFHKPVHISHTPKNFFDTFT

SEQ ID NO: 340652 - protein, 100 aa, Zea mays
  Clone ID: MRT4577_73846C.1.pep
TPEKKGLNNRGGFLKIRKKKKKKKKKKKKKKKKKKKKKKKKKKKKKKKKKKKKKKKKKKKKKKKRAAALFFFFFFFFYTAFSQAFTTFSSTFSSHIFFSC

SEQ ID NO: 340653 - protein, 88 aa, Zea mays
  Clone ID: MRT4577_73847C.1.pep
MPCISAGPQRPPPTERSLPTALRSAADVVMSTQPSPIQPPSAGRDAAAHVAVWTPDGTRRPARQGAVVVVVERGCVANDDDEEEVEVE

SEQ ID NO: 340654 - protein, 155 aa, Zea mays
  unsure (1)..(155): unsure at all Xaa locations
  Clone ID: MRT4577_73848C.1.pep
AGPQEGGGGAERPGHPXRXGRKXGETXNGQXGXXDTGENXHXRGGXXTXKXXDRGGEEPXGDXRGNTXKXXRXPEEGXDKGQEEXXKSRAERKPPXXGRGRGRGDXGAKPGGRGXGRGXXXGRRGXGGRGRXGXXAKGGXKGGGXGRGETRGAHG

SEQ ID NO: 340655 - protein, 240 aa, Zea mays
  Clone ID: MRT4577_73849C.1.pep
MGRGKIVIRRIDNSTSRQVTFSKRRNGIFKKAKELAILCDAEVGLVIFSSTGRLYEYSSTSMKSVIDRYGKAKEEQQVVANPNSELKFWQREAASLRQQLHNLQENYRQLTGDDLSGLNVKELQSLENQLETSLRGVRAKKDHLLIDEIHDLNRKASLFHQENTDLYNKINLIRQENDELHKKIYETEGPSGVNRESPTPFNFAVVETRDVPVQLELSTLPQQNNIEPSTAPKLGLQLIP

SEQ ID NO: 340656 - protein, 125 aa, Zea mays
  Clone ID: MRT4577_7384C.1.pep
DRCSSLGSDLNGGRRQSAWTTTTIPLRKRTTRVPFRRRPALICSAAYTDGLRTVYYELAFGAIVTAIPSIPRNAVAVCQGDLRLPLCCPRPALIVSHLLAGISFFYHRVYILLEHTADRERASDH

SEQ ID NO: 340657 - protein, 115 aa, Zea mays
  unsure (1)..(115): unsure at all Xaa locations
  Clone ID: MRT4577_73850C.1.pep
RGGGHRRRRNRDAGGGTAAHRAPPPPRARDAPXAGXAPEXXQXXAKRXGAEMXELLSTGETEEFFTSYDEVFESFDDMGLQENLLRGIYAYGFEKPCCIQQRGIXIAFCKGPDGL

SEQ ID NO: 340658 - protein, 65 aa, Zea mays
  Clone ID: MRT4577_73851C.1.pep
TAGSISTPSCATSGYRGSWFAWSYRAGADYRDDELNTLRSIAISMGCSIYRRYETWSFGHIAMGF

SEQ ID NO: 340659 - protein, 93 aa, Zea mays
  unsure (1)..(93): unsure at all Xaa locations
  Clone ID: MRT4577_73852C.1.pep
GNGGAIAPHGRGGGAALDAAPGAFLRHHDPVDLSAIGGENRRRRPRRRKQRAATISGRVXDRIXWRTKPILCRPARXGLFSPKRKPTRRPRGP

SEQ ID NO: 340660 - protein, 112 aa, Zea mays
  Clone ID: MRT4577_73853C.1.pep
TAASKVDIYWFGRNAGHSVRLYKESIPLFMKDFNKMKPIPKAVKFGYTLYPNEAFSKLPRFFVEDQAENVVYYSIAEKGSHFSSFEEPEVAAKQILAFLDAVYSAPNEQQSN

SEQ ID NO: 340661 - protein, 70 aa, Zea mays
  Clone ID: MRT4577_73854C.1.pep
TNLQVMPTMEGCQARVMPSKGQASRHGLMIPLPLGCTIYICTHSHSSSLATEGKRNYHPTTSIQYSLQYT

SEQ ID NO: 340662 - protein, 69 aa, Zea mays
  Clone ID: MRT4577_73855C.1.pep
MTSLLTAYLRTERTCYDLTSTCLPILMCHVRTMNDRAMSNCIVIASCGHTLRPRVKLGAQDYKELMQLF

SEQ ID NO: 340663 - protein, 101 aa, Zea mays
  Clone ID: MRT4577_73856C.1.pep
SSGNNAEYFFFFFFFFFFYFFFFKKKKPLFLRSKITPGRPPQKQKNCGRPNGKYNAQGGHTKNCRLLEGTPQIHKHSPTPTPKLGGPGPHAKHQGRVAHLR

SEQ ID NO: 340664 - protein, 99 aa, Zea mays
  unsure (1)..(99): unsure at all Xaa locations
  Clone ID: MRT4577_73857C.1.pep
FACLCACLCACGCAGSLYSLWARESDXPEHRHRRIPVGDGADSMYNAMAFKPMAETVGGVRSELEVKSAATLEAAFGAVRSVPRKSLWGGFGTPGNAST

SEQ ID NO: 340665 - protein, 59 aa, Zea mays
  Clone ID: MRT4577_73858C.1.pep
YFLLLVKTDGRCLKFRKALLNMYVLIYTHGRSNKHTNIQVYLWTGCCKTIFLDRLCKYN

SEQ ID NO: 340666 - protein, 79 aa, Zea mays
  Clone ID: MRT4577_73859C.1.pep
IFFFFFFFFFGVTFGQFVRFICLHHFFICWFRKQQCSEKPWAPPPRGLEPSRHQISNPHTQSMLNRARVKTGNGKKAAY

SEQ ID NO: 340667 - protein, 479 aa, Zea mays
  Clone ID: MRT4577_7385C.1.pep
MHLSANEGIEGLRFAVTGGQGFVGAALSLELLRRGAREVRSLDLRASSSWSQQLLDAGVRIIQGDIRKKDDVRRAFRGVDCVFHLASYGMSGKEMVQTGRSDEVNINGTCNVLDACHEQGVRRLVYVSTYNVVFGGKPIVNGNEALPYFPIEDHVDAYGRSKSVAEQLVLKSNGRPAKSDKSTRLYTCAIRPAAIYGPGEERHFPRILSLAKLGLAFFKIGDPGVKTDWVYIDNLVLALILASMGLLDDIPDRKGTPVAAGQAYFICDGSPCNTFEFIIKPLFQSLGYSVPQVVLDTSVALAVSRIFLFISTLFYPWLDSKWMPQPLILPAEVYKVGVTHYFSFLKAREELGYVPIVRPHEGLAATISYWQERKRRELDGPTIFTWLAVTIGMLAVFSAACLPPVGPLKWVLDVHLFVFRSMLVIRLVLAVAIALHAGEAVYAWFLARRVDPRNAAGWFWQTFALGYFSLRYLLKRGRA

SEQ ID NO: 340668 - protein, 128 aa, Zea mays
  unsure (1)..(128): unsure at all Xaa locations
  Clone ID: MRT4577_73860C.1.pep
LRQGMKQICLSXPTGEQVAQDAKKVAKESLLSQIANGSQRVKLEKDPDAAFALVMDGKALAFALEDDMKQMFLNLAIECASVKGCRGSPKQKALVTRPVKEGIGQTTLAVVDEFAGRLWPLWTLSMKA

SEQ ID NO: 340669 - protein, 84 aa, Zea mays
  Clone ID: MRT4577_73861C.1.pep
HCKQELCALGLFRILYAVRRVLEILRVIWSALNRRTASARYDQSCRVSCRHGCVPPLSSVPCSPTRERLCTSWVVGGGLFVLSM

SEQ ID NO: 340670 - protein, 72 aa, Zea mays
  Clone ID: MRT4577_73862C.1.pep
GRVGEKPPAAVGGFTDTSTAPETGLADVCSGGVKELVPDPGHFEWPSGCDLGSYWGTSVFADTDPALFLNLP

SEQ ID NO: 340671 - protein, 127 aa, Zea mays
  Clone ID: MRT4577_73863C.1.pep
PGSCPPGGGSPACGPSRRASCPKKHPIGSFDKLQAFPLPPFDPPPNDQKGALINQMVLVFSPPSFFSSSIFLLCPNATNASCDHVPCQTACTDGITCPPCPKLIYSAPGISRVKFLPLLNRIRPGVS

SEQ ID NO: 340672 - protein, 40 aa, Zea mays
  Clone ID: MRT4577_73864C.1.pep
QGNNTLGFSFQWAIEAMANTDTATHGDGRHIITQSSPLND

SEQ ID NO: 340673 - protein, 80 aa, Zea mays
  Clone ID: MRT4577_73865C.1.pep
SFPLPSGFSSRPLRKCWNSCVHASTHLSPVTKLRPSQKLARHLPASGDHAHPFLTSPWPGFVEIVSAVLCSFLVPHSFIT

SEQ ID NO: 340674 - protein, 88 aa, Zea mays
  Clone ID: MRT4577_73866C.1.pep
TERSPDPNCVTVTGLPENVEEAIDHILNLEEEYLADVVDSEALQVYMKPPAHEEAKAPSRGFVVRDAPGTASTSKKAPDMSSSEEFPS

SEQ ID NO: 340675 - protein, 43 aa, Zea mays
  Clone ID: MRT4577_73867C.1.pep
SRSGKRSLIIAHCEKEYSYSSSRYMDKKIHKIVNQPERNCSLS

SEQ ID NO: 340676 - protein, 239 aa, Zea mays
  unsure (1)..(239): unsure at all Xaa locations
  Clone ID: MRT4577_73868C.1.pep
EDEIAGLREMFKMIDADNSGQITFEELKVGLEKVGANLQESEIYALMQAVSAPHLVPVLVTGTMTASAEGKLAVAACVVXADVDNNGTIDYGEFIAATLHLNKVEREDHLFAAFQYFDKDGSGYITADELQVACEEFGLGDVQLEDLIGEVDQDNXSAPPPPRSFFSSLLFSASELFWTCCXDGRIDYNEFVAMMQKPTMGXSRRRPTCRTASVSGSGRRSGWPRPLCLXLPCCMCHSP

SEQ ID NO: 340677 - protein, 116 aa, Zea mays
  unsure (1)..(116): unsure at all Xaa locations
  Clone ID: MRT4577_73869C.1.pep
PSPPGGRGGHGXQAGGQKSGGRCFVTKGPWVVTPGSLGFEPKGVAVGEAPHRLGHGPIRGQNEGEFQAGKIWKTGARGGSPPPRGGQGRGGRIARNPNQRRCQKRGGLAWGRAREE

SEQ ID NO: 340678 - protein, 168 aa, Zea mays
  Clone ID: MRT4577_7386C.1.pep
MASPNPAPVPLPSRSRTMPSRVDIRVPKSPVSLPSCSRTALPRVDVRVPNPASVRRFPTSRRHTIVAGPDSVDSAWPHRSRTNLAKGALLLTDKDLESEESLWSLYERWRSVHTVSRDLTEKQSRFDAFKEEFVSKYTGAKVDPDSEAGRLSDVCVSSSDEFVVATGP

SEQ ID NO: 340679 - protein, 640 aa, Zea mays
  unsure (1)..(640): unsure at all Xaa locations
  Clone ID: MRT4577_73870C.1.pep
MGNTCVGPSITMNGFFQSVSTALWKTPQEGDALPAAANGPGGXPARAGSQSALPKPASDVHHVAVQSEAPEPVKIAAYHSEPAPAVRSEAPEPVKIAASHSEPAPMAAKPGGAAANASPSPSPRPRPQVKRVSSAGLLLGSVLRRKTENLKDKYSLGRRLGQGQFGTTHLCVERATGKELACKSILKRKLGSDDDVEDVRREIQIMHHLAGHPSVVGIRGAYEDAVAVHLVMELCGGGELFDRIVRRGHYTERKAAELARVIVGVVEACHSMGVMHRDLKPENFLFADHSEEAALKTIDFGLSIFFRPGQIFTDVVGSPYYVAPEVLKKRYGPEADVWSAGVIIYILLCGVPPFWAENEQGIFEEVLHGRLDFESEPWPSISDGAKDLVRRMLVRDPRKRLTAHEVLRHPWVQVGGVAPDRPLDSAVLSRMKQFSAMNKLKKMALRVIAENLSEDEIAGLREMFKMIDADNSGQITFEELKVGLEKVGANLQESEIYALMQAADVDNNGTIDYGEFIAATLHLNKVEREDHLFAAFQYFDKDGSGYITADELQVACEEFGLGDVQLEDLIGEVDQDNDGRIDYNEFVAMMQKPTVGGSRRRPICRTASASGSASGSGRRSGWPRPLCLWLPCCLRVGVDD

SEQ ID NO: 340680 - protein, 57 aa, Zea mays
  Clone ID: MRT4577_73871C.1.pep
AQARVRQLSVSLEGVPAPPDLEDPIRRGLDSLATRFYGQPTLRYGPYLGRKLDPEPG

SEQ ID NO: 340681 - protein, 53 aa, Zea mays
  Clone ID: MRT4577_73872C.1.pep
IRKKQGYARDENVEPRKRPPNLGDFILHLFCCLPVFVFLFFFYLFVLFFFFFF

SEQ ID NO: 340682 - protein, 260 aa, Zea mays
  unsure (1)..(260): unsure at all Xaa locations
  Clone ID: MRT4577_73873C.1.pep
DFESEPWPSVSEGAKDLVRRMLIRDPRKRLTAHEVLRHPWVQVGGLAPDKPLDSAVLSRMKQFSAMNKLKKMALRVIAENLSEDEIAGLKEMFKMIDADNSGQITFEELKVGLKKVGANLQESEIYALMQAADVDNNGTIDYGEFIAATLHLNKVEREDHLFAAFQYFDKDGSGYITADELQVACEEFGLGDVQLEDVIGEVDQDNDGRIDYNEFVAMMQKPPAGXPTRRPACRTASASGSGRHSGWPDPEQLXWLPACL

SEQ ID NO: 340683 - protein, 356 aa, Zea mays
  unsure (1)..(356): unsure at all Xaa locations
  Clone ID: MRT4577_73874C.1.pep
MGNTCVGPSITMNGFFQSVSTALWKTPQDGDALPAAGASPGRSQSALPKPASDVHHVDVQSEAPEPVKIAAYHSEPAPAVRSEARVGGRVGGRVGGRVGRHPWVQVGGVAPDRPLDSAVLSRMKQFSAMNKLKKMALRVIAENLSEDEIAGLREMFKMIDADNSGQITFEELKVGLEKVGANLQESEIYALMQAADVDNNGTIDYGEFIAATLHLNKVEREDHLFAAFQYFDKDGSGYITADELQVACEEFGLGDVQLEDLIGEVDQGXVRQAPPPPRSLLLFSSLLRLNXLDLLLQDGRIDYNEFVAMMQKPTVGXSRRRPTCRTASVSGSGRRSGWPRPLCLXLPCCLRVGVDD

SEQ ID NO: 340684 - protein, 271 aa, Zea mays
  unsure (1)..(271): unsure at all Xaa locations
  Clone ID: MRT4577_73875C.1.pep
MASSDWCGLFVSQSHSVHSSSPPAFPFSPVRESEAQGRRINLNKKRLDKEALTAAKLAKKESNLRRSVGADQYLSASTDDIVPLDNYLDTQYFGQISIGTPPQNFTVIFDTGSSNLWVPSSKCYFSIACYLHHRYKSTKSKTYTKNGESCTITYGSGQIAGFFSEDNVLVGNLVVQNQKFIETTRETSPTFIIGKFDGILGLGFPEISVGGAPPIWQSMKQQKLVAKDVFSFWLNRDPDASSGGXSLSFGGVDPXHYKXDHTYVPVTRKGY

SEQ ID NO: 340685 - protein, 47 aa, Zea mays
  Clone ID: MRT4577_73876C.1.pep
AAETRTTSSRIQLILPPPKEWARPSPVDPSPLPLPVGAAGRLCTKSL

SEQ ID NO: 340686 - protein, 353 aa, Zea mays
  unsure (1)..(353): unsure at all Xaa locations
  Clone ID: MRT4577_73877C.1.pep
TGYIQSLPXSGTTSWKLSGVHEPLSINVATFEKPLKKLTFAHLLEATNGFSAETLIGSGGFGEVYKAKLKDGTVVAIKKLIHFTGQGDREFTAEMETIGKIKHRNLVPLLGYCKIGDERLLVYEYMKHGSLDVLLHDKAKTAGVKLDWAARKKIAIGAARGLAFLHHSCIPHIIHRDMKSSNVLLDSNLEARVSDFGMARLMNALDTHLSVSTLAGTPGYVPPEYYQSFRCTTKGDVYSYGVVLLELLSGKKPIDPTEFGDNNLVGWAKQMVKENRSGDIFDPTLTNTKSGEAELYQYLKIARDCLDDRPNQRPTMIQVMAMFKDLHLDPDSDFLDGFSINSSTIDESAEKPT

SEQ ID NO: 340687 - protein, 503 aa, Zea mays
  Clone ID: MRT4577_73878C.1.pep
MGQTHLLLLACFWVLSTCSLLLDASSDGLLRINLNKKRLDKEALTAAKLAKKESHLRRSVGADQYLSASTDDIVPLDNYLDTQYFGQISIGTPPQNFTVIFDTGSSNLWVPSSKCYFSIACYLHHKYKSTKSKTYTKNGESCTITYGSGQIAGFFSEDNVLVGNLVVQNQKFIETTRETSPTFIIGEFDGILGLGFPEISVGGAPPIWQSMKQQKLVAKDVFSFWLNRDPDASAGGELVFGGVDPKHYKGDHTYVPVTRKGYWQFDMGDLIIGGHSTGFCAGGCAAIVDSGTSLLAGPTTIVAQVNHAIGAEGIISTECKEVVSEYGEMILELLISQTSPQKVCTQIGLCVFDGAHSVSNPIESVVEKQKRGSDLFCTACEMAVVWIQNQLRENKTKELILNYANQLCERLPSPNGESTVDCHQISKMPNLAFTIANKTFTLTPEQYIVKLEQAGQTICISGFMAFDVPPPRGPLWILGDVFMGAYHTVFDFGENRIGFAKSA

SEQ ID NO: 340688 - protein, 81 aa, Zea mays
  Clone ID: MRT4577_73879C.1.pep
KKGKRLRESTPPPKEMTPNTIKPESVPLKHYILVFDKDICPGVVKDLCMNQKYQPESQYKMKAYNNMNGVKYMAPYQNFCC

SEQ ID NO: 340689 - protein, 78 aa, Zea mays
  Clone ID: MRT4577_7387C.1.pep
MAFVIFRPPAGFHPNGHREKMAKLKNHRGHNQLFKGHKKGIKKPKGPRQTSPKGRAPKFLRNLGYFRKGTKKSGGAEL

SEQ ID NO: 340690 - protein, 59 aa, Zea mays
  Clone ID: MRT4577_73880C.1.pep
SPQGAPKSLKSLGKGLKVGGLVGCSKKKKFLRRGLYLGGLKDLKKPPPARGLKPPRRVF

SEQ ID NO: 340691 - protein, 91 aa, Zea mays
  Clone ID: MRT4577_73881C.1.pep
QRGRGGHGSHGGGAGGGRQKKRALPRAGQKRRECRGWSSEQSMHKGSSSSPFSPSRELVAMESGFGTPPPPSLPPLFLLLIYSDNIQIEKR

SEQ ID NO: 340692 - protein, 77 aa, Zea mays
  Clone ID: MRT4577_73882C.1.pep
SVHAFRRLGHISSDIVYSPTSSVQAAPSRLPMLPKFHTSLRHHNFFAAHTYIHTHLEYASTMDNGFLKTFKLVHLGF

SEQ ID NO: 340693 - protein, 98 aa, Zea mays
  Clone ID: MRT4577_73883C.1.pep
RTRTQIRTSHFLVNHRDLTSCRPCTCHRHHLTLNLKHDPIPPNAPIFHNLDLLALHYAHTVPVFSILRRTTGPHTHFVLHSVDHTLRVLARLHSFIRS

SEQ ID NO: 340694 - protein, 51 aa, Zea mays
  Clone ID: MRT4577_73884C.1.pep
PTRPDCLRPLLAWFWLPSSHHGTAKQMVVDYGLTPASARHSGPSSISSNSW

SEQ ID NO: 340695 - protein, 62 aa, Zea mays
  Clone ID: MRT4577_73885C.1.pep
HTWFFCCQSTWRQWFILNMYHSISNGFKYCSLTRMPSLKCCPDWTNTRHRLTWQRCILGWSQ

SEQ ID NO: 340696 - protein, 380 aa, Zea mays
  Clone ID: MRT4577_73886C.1.pep
MSLVLSATHNTRRPQKQSFTPLRAAATMELATVAAAVASAAARPHGPFSSPRAVSASVSWTSLSLASTSHCLSTSSRRRLRWLPVTSAAVELREATAGGGDSLRVTKTPQPGSSVKFSVEVPTSIIHECYQSTLQEYAKRVKVPGFRPGKTIPENVLINYVGPQHVQDATIEAILKHTLPQALSSVEERALEDSVRILTQFDDMRNSFSLDNVFRYDVAVDVAPEVRWLSEDKYQNLKVVVEIDEAVDAEKAAEKELQRRHKALGLLRIVADRGLQIGDLVVLDIFAESINNDGSRGEKISSAESTGFHLDTEENSNLVPGFLGSLIGIRAGETRSFPIQFPESFERESLRGVRAQFTVVCKELFYRELPVMDDSLAVKL

SEQ ID NO: 340697 - protein, 313 aa, Zea mays
  Clone ID: MRT4577_73887C.1.pep
MATNPSNGAGADVPAAPVAVRLSVAAQAAAIQPSSPRFFFSSLAGTNPASPHRRIAIAVDLSDAVSPRPRDGGCWFPVNSTAVELREATAGAETRSVSPRRRSLDPVKFSVEVPTSIIHECYQSTLQEYTKRVKVSLSAQTGCKHVDEHTHMKFRNALLVPLYDNEVGQSVVLAIPDFAYSRRSQYQFIVAVPGFRPGKTIPENVLINYVGPQHVEERALEDSVRILTQFDDMRNSFSLDNVFRYDVAVDVALEVRWLSEDKYKNLKVVVEIDEVVGSLVQDAEVQKPLLSVFPVTNGFRMNEELPWLCLKTF

SEQ ID NO: 340698 - protein, 252 aa, Zea mays
  Clone ID: MRT4577_73888C.1.pep
MPIDMPRGLPFAVDTWGSSSRSRRHRFLTHAHRDHLVGAGADIDGGGIVYATRLTLHLALRHFPQLGSWEFVEMDVGRTLVVDDPVGTFSVTAYDANHCPGAVMFLFEGQFGTILHTGDCRLTPDCVQNLPMKYVTKKGNENICRLDFVFLDCTFSKCFLKLPSKDSAIRQVISCIWKHMHAPFVFLACDLLGHEDILVEVSRTFGTKIYVDPKLDCFKALSLTAPEIITDDSSSRFQMVGFHQLHDRASKE

SEQ ID NO: 340699 - protein, 573 aa, Zea mays
  Clone ID: MRT4577_73889C.1.pep
MEVGRTLVVDDPVGAFSVTTYDANHCPGMRGGLSLASFVISGAVMFLFEGQFGTILHTGDCRLTPDCVQNLPMKYITKKGNENICRLDFVFLDCTFSKCFLKLPSKDSAIRQVVLRAVVISCIWKHLHAPFVFLACDLLGHEDILVEVSRTFGTKIYVDRKLDCFKALSLTAPEIITDDSSSRFQMVGFHQLHDRASKELAEARANLQPEPLFIRPSTQWYATCARSPKPSLTEAEQDELGIWHVCFSIHSSRDELEQALQLLQPHWVISTTPPCFAIELSYVKKHCFKTRLTADDPLWKIFRDPLGKSVSSPCSVLATQTDENNSNFVVDDDHSSSSSDGCTYLNVISTLELKFVPPQPPEEPDITLFGRARFASQAIDFMKEDYIALEEARACAPTDSVHGSSEEVETYSGMDFGVKQPPASQQDLMEVGDDVSFKKVGDDVDSCKHEVTSTQLEGFRVKSLPTVQSNMLVVSDQLERSEVVGESKLLKSTEDLNLTIVRSAERTDCQKEPLCYIGSSKCLNASLKRFYRSRNIPVPRPLPSLVKLMESTKRVKIQPNTNYTLLNSRHSLP

SEQ ID NO: 340700 - protein, 59 aa, Zea mays
  Clone ID: MRT4577_7388C.1.pep
SLPLNVMPQQLEDELKRFGAIKHECIQVRSNKVLAFLLNLFSKKLRAFNTNSQICMYFC

SEQ ID NO: 340701 - protein, 29 aa, Zea mays
  Clone ID: MRT4577_73890C.1.pep
WCVLTLVAAHYGGMPPVFIDLAVPALVRV

SEQ ID NO: 340702 - protein, 93 aa, Zea mays
  unsure (1)..(93): unsure at all Xaa locations
  Clone ID: MRT4577_73891C.1.pep
LTPASSSIALXCNNGXXLXLPAAGRXGGXGSXAVXAXXXXXXXSXXVSCGEVXXRXXXXSGTRWAXRRXLRGVLQXGXLAQQXRVXRRRPXXL

SEQ ID NO: 340703 - protein, 388 aa, Zea mays
  Clone ID: MRT4577_73892C.1.pep
TDIPRVCACRHWQPGGIGDEILQRASIASSPPRSDPFASSAPPSPSPSLPPNPRRKSRFRDAPTPDSPLGRATYTSTSPISATHSRHRRHASASSAPAFAADGSGDGVARLNSFLRRQRAMVADLAAGDRPASRSTKLVLSDPSKSLSSIVAAICYAWMLPSKGDGQATVPVVNMSRSRMARCRQAAWLLYHVGVDASALLFADEVDTDGLIMDQRVNLLVVGQDILKSKAEVGSVCTTLTHTYCEDAYSLLQNLDIKKLLLAGILLDTNNLSKKCSNRDSDAVQLLLFGTSEHMRHELFQQLMLDHNDHSFVEYLKNTYRYSTINGNEDSPPEQKHSTSASGSSQDVKKSNSTNQRTSRGSGGKASDEASRGKNKFFLAKWFGFGSK

SEQ ID NO: 340704 - protein, 124 aa, Zea mays
  unsure (1)..(124): unsure at all Xaa locations
  Clone ID: MRT4577_73893C.1.pep
QKFFPFDXLFTLIRLAYFQHPLFPFSQILMRXCHQSLLLPFSQLAALTPAGYFQQQIYVPFSHLFLANRASFLTHXMLLLLYQQFAVCAAALFQLEQVLPFALHALTNQAXASYQELIIGGALY

SEQ ID NO: 340705 - protein, 57 aa, Zea mays
  Clone ID: MRT4577_73894C.1.pep
MTKATSKGWLSKLRVYKAFGSQNTCGNKPLVVVFFECKWMSPKAKKHMVKGVFKGLF

SEQ ID NO: 340706 - protein, 173 aa, Zea mays
  Clone ID: MRT4577_73895C.1.pep
SSNIKLYKVLSHTAEKEPRVPNRGHNRSSKPTKPQALLMTHKPGGGGGRQRPYTGGTLGGELHIIPGCSCCLNEPRFSDHPPCRGPPCEGSPPAWGGGAWARPFCNSLANRIRRWCSGGKPCLSWIFGSRGPRCQGCQPPGLWACPLRSFQRSASRGACAGSRGRCFSFSMLG

SEQ ID NO: 340707 - protein, 68 aa, Zea mays
  Clone ID: MRT4577_73896C.1.pep
GLAPGACRRLRPRRRGSCWRPSRGPSWRSPVSRCWRCPSSRSRRLSSEFLSVAPAFAVARRVPRGGGL

SEQ ID NO: 340708 - protein, 106 aa, Zea mays
  Clone ID: MRT4577_73897C.1.pep
TSHEHIAASSKRLILRYLFLTWHLRFQVPTCSSDSRDLTVAIWCRDDRCRLHRWRHGREQRRRGVKCRGEKGRPMVSALSFFSFLHTRCSRRWRSCCWWSSRCPGR

SEQ ID NO: 340709 - protein, 101 aa, Zea mays
  Clone ID: MRT4577_73898C.1.pep
MAPTMAGLIMRLGMLASAAASATTANILQECMDAPIAPLLSPDLSPAWYNACVNPIMLQYTIQHAIAAGIPPLSQLLLQLLQQLSQQHPLAHCLGPHKLAQ

SEQ ID NO: 340710 - protein, 62 aa, Zea mays
  Clone ID: MRT4577_73899C.1.pep
HDHWSSGEQTKSRSAQRVSEVSYTYLTALRSFVISDQVQYTSELFLIPLNNSRWAGYVSSCG

SEQ ID NO: 340711 - protein, 57 aa, Zea mays
  Clone ID: MRT4577_7389C.1.pep
MEDETWAQPICKNSTRTTQWQVSREANLLCVRETTLLQRGDYQAYTGRGLSEPRAAR

SEQ ID NO: 340712 - protein, 444 aa, Zea mays
  unsure (1)..(444): unsure at all Xaa locations
  Clone ID: MRT4577_738C.1.pep
MPRTTVLESPGCPPLRALTTDILGLVKVVEAHARPAGAAKVVETWGAPDASCAIVAASLADRATDPVLAVARMNGVVELLNPLNGDTLAAVKAVGPAPNDGGAEGDPLTALHLFTRQASDSILGTFLACTEQGKASIRSITKENAASGSHIEPSATWDVCGGANVQFCSVDHGENYVMFGGKGIEVSLWDITSCSKTWSAKSKXSHQVRLYDTALQRRPAISVEFKESPIKAVAADPNGHDVYIGTGTGDLASFDMRTGKLLGCYFGKCSGSIRSIVRHPDLPLIASCGLDSYLRIWDTNTRQLLSAVFLKQHLTTVVLDSHFSVEEPGEMKSKQLESSVETETEVRKEKKKKSKAITEDETEAQIRKEKKSRTIEEEEQAGLVDHSDINDEVYARKEKKKKKSRGIEGGKERDSDGEICSPKRRKSGERSKCLKKRSKKQLVA

SEQ ID NO: 340713 - protein, 99 aa, Zea mays
  Clone ID: MRT4577_73900C.1.pep
GLRGSLFLGPAASVFFSFAPRPAGVSLARLAAGPCPHPWIPRVWAVCIAPICILCAVCGARLWACCGAWGPSGGFVVCFSPVPCFGIFLSLCTGGGFFL

SEQ ID NO: 340714 - protein, 127 aa, Zea mays
  Clone ID: MRT4577_73901C.1.pep
LPHHQLPCLGYRALHLTWSSSTRETRSPTATSTAAGSSSSRSNPGGRSGTCDMTSRPSSLLMWLRHLYVRNAILKAAYQGMKADYSLHVHDQCEERQIVVGLSCAHHDHSERSHIAQVVHILQAGDA

SEQ ID NO: 340715 - protein, 70 aa, Zea mays
  Clone ID: MRT4577_73902C.1.pep
LFFCEGRRTPTGLPLLRPPPSPSTARCGASATIPRRESLDTQVMHAADENVIGPTCCSGQATQDRVNLLA

SEQ ID NO: 340716 - protein, 222 aa, Zea mays
  Clone ID: MRT4577_73903C.1.pep
MASWPAASRRRSSGGMKSAELSGSGASYGYGRTSSSPDACGYGRQLSAYSARSSQVSRSGSFSAAAQRVAGAFTGCFVPRRQVKAGEEEEEEEKKSKRSMDSGSYHGWNEANLSAAAGSWQEGRALTIADVSKATSNFSEKNVIRQGRSSTMYRGKLRDGSQIAVKCVTKLNDQSPTAELWRELEKIQHRNLARLFGFFERAADTLVVVEYVGNGSLEEHLD

SEQ ID NO: 340717 - protein, 205 aa, Zea mays
  Clone ID: MRT4577_73904C.1.pep
IAQSCCLPFEFNAVNAASHEVTLEHLDIRKGEAIAVNFAYQLHHTPDESVCIENHRDRILRMVKSLSPRVVTLVEQEANTNTAPFFSRYMETLDYYTAMFEAIDVACPRDDKVRMSTEQHCVARDIVNLIACEGAERVERHGPFGKWRSRFAMAGFRPYPLSALVNNTIRTLLNDYNSYYKLEEKDGVIYLGWKNRKLVVSSAWQ

SEQ ID NO: 340718 - protein, 78 aa, Zea mays
  unsure (1)..(78): unsure at all Xaa locations
  Clone ID: MRT4577_73905C.1.pep
TLGLSLTVTKIXSRIXAHPIIDTIADELPGWPADLMTSAGRTVQALDVHTDMRIHLVMSMDLPSWVPKHVDIHRRGFL

SEQ ID NO: 340719 - protein, 145 aa, Zea mays
  unsure (1)..(145): unsure at all Xaa locations
  Clone ID: MRT4577_73906C.1.pep
MFGHHHGHGGHHQAPPPHEQTLFRIFCRADEAYCLTVRHDAVVLAPTNPRDEYQHWYKDMRHSTKVKDAEGQPAFALINRATGLAIKHSLGQSHPVKLVPYNAEYLNMDAFHGDKDHGGVHDGXTVVLXWEWAKGDNQRWKILPW

SEQ ID NO: 340720 - protein, 120 aa, Zea mays
  Clone ID: MRT4577_73907C.1.pep
RGVPDSRRLHLRVQPGHGQVAQARGRGGVQAAGPYAPPGAPPQNHSANGQVPNWTPGNSGYSPAPGTYPGQMYSSPAQYVASGSFLNTSAATPPQYATSGGFPNTPSTAPSQYAASRGFP

SEQ ID NO: 340721 - protein, 450 aa, Zea mays
  unsure (1)..(450): unsure at all Xaa locations
  Clone ID: MRT4577_73908C.1.pep
MFGHHHHHGHGGHHQAPPPHEQTLFRIFCRADEAYCLTVRHDAVVLAPTNPRDEYQHWYKDMRHSTKVKDAEGQPAFALINRATGLAIKHSLGQSHPVKLVPYNAEYLDESVLWTESHDVGKGFRCIRMVNNIHLNFDAFHGDKDHGGVHDGTTVVLWEWCKGPNQSWKVLPWGDEAYAPRPYAPPPPAQVEPGYGGYRPPAAGGYAPPPPPPTQVEPGYGGYPPPPAAGGYAPPPPPAQVEPGYGGYPPPPAAGGYAPPPPPVPVQEPGYGGYRPPSAGGYPAGYGYSNLPRALASEQTVRVYCKAGEGYSLTVRNGXVCLAPTNPXRDEFQHWVKDMRHSTSIKDEEGYPAFALVNKVTGEAIKHSLGQSHPVRLVPYNPEYVDESVLWTESRDVGHGFRCVRMVNNIYLNMDAFHGDKDHGGVHDGTTVVLWEWAKGDNQRWKILPW

SEQ ID NO: 340722 - protein, 50 aa, Zea mays
  Clone ID: MRT4577_73909C.1.pep
VKDIDKSTSSIFLLQNVFIAGGNILKAPMFYLRKLMEVHGYYKEDVGVKL

SEQ ID NO: 340723 - protein, 130 aa, Zea mays
  Clone ID: MRT4577_7390C.1.pep
ALRPWAQGLTTERGGHWSRMHDRRHHTHKHKAEKHYNDAVPEEDDTTQKERREAQPRLSGPHPRDTTAPARNTAPAQPRNRCGLTMQRDEVTKAQPVSASREAEPAERAEGRGDNQPAGAVEPGPEGHTK

SEQ ID NO: 340724 - protein, 85 aa, Zea mays
  Clone ID: MRT4577_73910C.1.pep
QHYCSLAFQQWRAVIFSLLRLLGNCASADTVTILLQCSYASIASLLPLYLLPFVFSCRDILILITFYISNTLFILPYNFYYPCFS

SEQ ID NO: 340725 - protein, 192 aa, Zea mays
  unsure (1)..(192): unsure at all Xaa locations
  Clone ID: MRT4577_73911C.1.pep
KINARSRTRTKLARKASPPAXRGVAVVVVYLTSLRGVRQTYEDCWSTSALLRGYGVRADERDLSMHAGFKDELRAALALGDGGRLPPLPQVFVDGRRLGGAEEVRRLHEAGELGAALGVCDAAPCTAAAKGGAGAQDACAACGGVRFVPCDGCSGSCKVFVEDADDACASRGGAFRRCPKCNENGLVKCVVC

SEQ ID NO: 340726 - protein, 299 aa, Zea mays
  unsure (1)..(299): unsure at all Xaa locations
  Clone ID: MRT4577_73912C.1.pep
MASASLLPAMALLLLAMAVASSDAQPSPGYYPSSRFRPVVFNRAYSNKWGPQHQTLSGDHSAITIWLDKTCGSGFKSKHAYRNGYFATRIKLPAGYTAGTNTAFYLSNNEAHPGFHDEIDMEFLGTIPGEPYTLQTNVYVRGSGDGRIIGREMRFHLWFDPTAGFHTYAILWNPDAITFFVDDVPVRRYERKTELTFPDRPMWAYGSIXDASDWATDDGRHRADYSYQPFVARFAGFGVGGCAADASADCQPVPASPAASGTAAISAQQEAAMRWAQRNSMVYYYCLDSTRDRALYPEC

SEQ ID NO: 340727 - protein, 353 aa, Zea mays
  unsure (1)..(353): unsure at all Xaa locations
  Clone ID: MRT4577_73913C.1.pep
MAAAAPPARPTSSISSCCCCISRRAAAVVPALLLLAAMAASSGDAQPSPGYYPSSRFRPVPFNRAYTNKWGPQHQTLSGDHSALTIWLDKTCGSGFKSKHAYRNGYFSTRIKLPAGYTAGTNTAFYLSNNEAHPGFHDEIDMEFLGTIPGEPYTLQTNVYVRGSGDGRIVGREMRFHLWFDPTAAYHTYAIMWNPDQILXPVSSLPPAPCAPLAGCLPARHSHHMPXLRLRXFLVDDVPVRRYERKAEATFPDREMWAYGSIWDASDWATDGGRYRADYRYQPFVSRFAGLRVGGCAADASADCQPVPASPAAPGTAAISAQQEAAMRWAQRNSMVYYYCLDSTRDRALYPEC

SEQ ID NO: 340728 - protein, 101 aa, Zea mays
  unsure (1)..(101): unsure at all Xaa locations
  Clone ID: MRT4577_73914C.1.pep
MAAAAPPARPSSSCCCRCISRRAAVVVSVLLLLAAMAASSGDAQPSPGYYPSSRFXFRPVPFNRAYTNKWGPQHQTLSSDHSALTIWLDKTCGMLLFCYFY

SEQ ID NO: 340729 - protein, 67 aa, Zea mays
  unsure (1)..(67): unsure at all Xaa locations
  Clone ID: MRT4577_73915C.1.pep
KEPLNYISMLIEAFLSKYYSRSFFMSLFRQPCLSKRFRHQCFKFGLFMFCIEIFFWTISSARNXLAF

SEQ ID NO: 340730 - protein, 82 aa, Zea mays
  Clone ID: MRT4577_73916C.1.pep
SPTSHGGVRPNQLISRPRGEMRTCFSVFLSTLIHLGGGGGISSCEFLTFFTHVPCCFHVPQLNPGLLPPERLVLVAGAALQP

SEQ ID NO: 340731 - protein, 58 aa, Zea mays
  Clone ID: MRT4577_73917C.1.pep
CWSIARSDKGQLATVAPDAEVATAATLPKAKGRGSWLRKRCGGPRRLSWTRADPSISR

SEQ ID NO: 340732 - protein, 124 aa, Zea mays
  Clone ID: MRT4577_73918C.1.pep
PRVHWNGKDGEFKLQVHRSVALVNKSSAFLTDDNLVPESWWVERNKGMVIGETGLWQLEPPGEEPVPPFVTGKVIDDDDHVAATTTTTTTTASKETKTPVKDKNRFGTQLFSACFRGVNQSVDN

SEQ ID NO: 340733 - protein, 62 aa, Zea mays
  Clone ID: MRT4577_73919C.1.pep
TLVGETVQIPHRYPSRPCWTSSRSVRWSLPGWSTNATLTRHLRYTVRQRSQQRVGKLGRRTA

SEQ ID NO: 340734 - protein, 89 aa, Zea mays
  Clone ID: MRT4577_7391C.1.pep
KKISEKETDPEQGGFKRRERPTPHGNQGTAAAVTEGAQRAGEGHSTKPPPYWHMPAATGNGPLKPAESKDAMQKSTQRGATKTKPEHCR

SEQ ID NO: 340735 - protein, 56 aa, Zea mays
  Clone ID: MRT4577_73920C.1.pep
KRKKIFLRPGRSRFMFKKNEIRPFARKGEVFPIPRLVQVLFFSLLALNWKHTTGFF

SEQ ID NO: 340736 - protein, 98 aa, Zea mays
  unsure (1)..(98): unsure at all Xaa locations
  Clone ID: MRT4577_73921C.1.pep
MAPPYTPQPPXPXSTLPQRGAAHRPGLRVYRGASSFWIGAVWLTTMYLGGKMNLRALLWATATSCLRALMLWARRKRYLLAPLGLGIEWVHAFFLALD

SEQ ID NO: 340737 - protein, 241 aa, Zea mays
  unsure (1)..(241): unsure at all Xaa locations
  Clone ID: MRT4577_73922C.1.pep
MTHSTPGASPSRSPPPVDFVPSISECPLDQSDTVNPIRRQGERKDTRVTITKLVSRLIANNEKRILMATLDXSPKTTILYELNLGDIVTTIPTIEFNXELXEDHNITFTDCNDIGQHDIKPLSRHYFQNTQLLIFDEDNNDMYRDVETRYELHRMLNDNELRDXVXLELANNLHLPNAMNVAGITDNYVLDSLHQRCWXILSTCATTGDVLHEGLDCLSSNIATKSYIVKQGLDHLGTFAR

SEQ ID NO: 340738 - protein, 85 aa, Zea mays
  Clone ID: MRT4577_73923C.1.pep
GYHHPLLAVVLLYPTPPRSTVARVVTPLTLESRSRGRSRPSKKTLGSGIRFYCAVLEEDHRDADALSPQIDAFVTAAALAKASVY

SEQ ID NO: 340739 - protein, 142 aa, Zea mays
  Clone ID: MRT4577_73924C.1.pep
VSKVVSASGRGATTNALAGAASEESSASKSSIALISASLGFRGTSKWTCRSSSGISPSEATKALTSSAEGRTLRPKLSSVTGGFDTKRVKALGGGRFQAEYATGAPTFDTLPLRIISSRFTKSAEGILLLVTRVESARPRYR

SEQ ID NO: 340740 - protein, 497 aa, Zea mays
  Clone ID: MRT4577_73925C.1.pep
MAPKRKASSSSAAVIPPIDPNSQLPFAVLVSLSPWMAGGQHQLVGGASLEMRRGRKTEYLEIPLKDSIKGWRLEWFIVENYGNSLPPRSGRQPDVRTPSWTESPTDQEVAEAGALLAEVGLLKERGLTAEAVVADFVFKNIQPLKDRAYSTYLYRGLADSTRVTDRRIPSLDLVNRLEMILRGKVSNVGAPVAYSAWNLPPPKAFTLFVSNPPVTDGSLGLRVRPSAEEVSALVALLGEIPDDERQVHFEVPLNPSDAEISAMLDLLAEDSSDAAPAGTLVVAPLPEAGTTLDIQKPASTRPRCPCRANQPDPSADEQKKKKRRLRRVSSLDRDVGTSVPAAEEAPVTEFVDANPNGCTQSAADPNVGAPSVADPNGGAACVANEDDGEEEDEVPLTRKNSRQFIASGESSGVPSPAMSALIGLQELSLANFDQTLEDMVPEDLLSEPADDGAMEVCADVLDAGLRSSRASSTLERDLEGQETDLDRPGPHYTMTQN

SEQ ID NO: 340741 - protein, 921 aa, Zea mays
  Clone ID: MRT4577_73926C.1.pep
MAPKRKTSSSSAVVIPPIDPNSQLPFAGNHMSAISEPELFHLVSIGVLPPRELCSWRICHGFTVPTEDTHESVVYAPFLLRGLGLPISPFFRGLLDFYRLNFTHLNPNSILQISIFVHLCEAFLGVLPHFGLWKYLYHCRPGMAGGQHQLVGGASLEMRRGRKTEYLEIPLKDSIKGWRLEWFIVENYGNSLPSRSGRQPDVRTPSWTESPTDQEVAEADLVSRLEMILRGKVSNVGAPVAYLAWNLPPPKAFTLFVSNPPVTDGSLGLRVRPSAEEVSALVASLGEIPDDERQVHFEVPLNPSDAEISAMLDLLAEDSSDAAPAGALKKKRRRLRRVSSLDRDAGTSVPATEEVSATGFTDADPNGCSQSAVDPNVGAPSVADPNGCAACVANVDDEEEENEIPLTRKNSRQFIASGESSGVPSPALSALIGLQELSLANFDQTLEDMVSEDLLSEPVDDGAMEVCANVPDAGLRSSRASSTLERDLEGRETDLDRPGPMEVAEGPSTLEVATAENLDPKDGADTCPAPEDVAGDDLARVGSVSHCPDPEGAAGDDPAQVGSANYDPAPEGARAGSPSCTSMDVHAGSPPHSGCMVVAQALDQRVALEGSVPTDRVFGSVEGTELIPTGSLQAASGGGLTPDYQLISPDLGIPSFFSNLQALVDGMASQLRLQGASVLEVASSLACWNPVSLQHRVSELEATNAGMTRQISTLEEKHSRDQAELVQRCADFEEKYSQSQTELGQVSAALDDANALSSSLHAQLNSEKEEKRILVASRDSLDRLYRDSSNSLTILERSHRFTMEELDNQRCKVQESADEVTRLKQLLSAKDATIKELRASKKSIVLELETARLAAKVAEETSVTLRAQRDRAMDKAIRAGRILMRRPGVVVPEDIRVDVNAAPDSSSRPSSSIAPEKDITK

SEQ ID NO: 340742 - protein, 66 aa, Zea mays
  Clone ID: MRT4577_73927C.1.pep
TQPSPPIRGTPPRSQLTPKPIAATGTLSPGLSSRHGRRRQPKPDIHTQAEGSPRLAQQPDLVRPCP

SEQ ID NO: 340743 - protein, 903 aa, Zea mays
  Clone ID: MRT4577_73928C.1.pep
MTGHFLKRYLAREYPIRVALLAAFAFRALVLAFPLPNPLCHSPPTLLAGRIEMAPKRKTASSSAVVIPPIDPNSQLPFAGNHMSIISETELLHLVSIGVLPPRELCSWRICHGFTVPTEDTHESVVYAPFLLRGLGLPISPFFRGLLDFYHINLTHLNPNSILQISIFVHLCEAFLGVLPHFGLWKYLYHCRPGMAGGQHQLVGGASLEMRRGRKTEYLEIPLKDSIKGWRLEWFIVENYGNSLPSRSGRQPDVRTPSWTESPTDQEVAEAGVLLAEVGLLKERGLTVEAVVTDFVFKNIQPLKDRAYPAYLYRGLADSTRVTNRRIPSTDLVSRLEMILRGKVSNVGAPVAYSAWNLPPPKAFTLFVSNPPITDGSLGLRVRPSAEEVSALVASLGEIPDDERQKPVSARPRRPCRTNQPNPSVDKQKKKRRRLRRVSSFDQDAGTSVPAIEEVPATGFTDADPNGCTQSAVDPIVGAPSVADPNGGATCVANVDDEEEENEIPLTRKNSRRFIASGESSGVPSPALSALIGLQELSLANFDQTLEDMVLEDLLSEPVDDGAMEACADVPDVGLRSSRASSTLERDLEGRETDLDRPGPMEVAEGPSTLEVVTAESLDLKNGADTCPAPEGVAGDDLTRVKSGVALEGSVPADQVFGSVEGTELIPTGSLQAALGGGLTPGYQLISPDLGIPSFFSNLQALVDGMASQLRLQGASVPEVASSLACWNPVSLQHRVSELEATNAGMTRQISILEEKHSRDQAELVQRCADFEEKYSQSQTELGQVSAALDDANALSSSLHAQLDSEKLISAKDATIKELRASKKSIVQELETARLAAKVAEETSVTLKAQRDRAMDKAIRAGRILMRRPDVVVPEDIRADVNAAPDSSSRPSSSVAPEKDIAK

SEQ ID NO: 340744 - protein, 166 aa, Zea mays
  unsure (1)..(166): unsure at all Xaa locations
  Clone ID: MRT4577_73929C.1.pep
VADVEVIQTLICYNVTGMVMASSASDDAPRAITXSIIGDTCSAHCIRSHGXLMDAYYYDEAQSMRGILTLKYHXSSCDWGASWDDMXKMRLDTLVQXFRVAPQENPVLLTEPPLKPKCIWEKMTQMMLETYNDRAMYDAMQAVLSIYASERTSGIGLDSGDGXSHT

SEQ ID NO: 340745 - protein, 66 aa, Zea mays
  unsure (1)..(66): unsure at all Xaa locations
  Clone ID: MRT4577_7392C.1.pep
KGGPPSLSKNEGWFWPLAGXGPSLFFPKKKKKKKKKKPKKKKKKKKKKKKKNPHNTKKKKGQPLTI

SEQ ID NO: 340746 - protein, 90 aa, Zea mays
  Clone ID: MRT4577_73930C.1.pep
PVLRVDLPHNVLETLQVPRKPPGIHACTPPKSSDCAQKSASCCPLGSDLHQTLGFLFQLALNNFLHGYSSLVCINLSLTCYEVLHHVFMF

SEQ ID NO: 340747 - protein, 91 aa, Zea mays
  unsure (1)..(91): unsure at all Xaa locations
  Clone ID: MRT4577_73931C.1.pep
VGGPSGLVPWWAVGTSESKIYADGSICLNMLQNQVNPIYDDAAFLTYIKSLLCDPNPNYLANSEAARLLFFFXRENDLEVRDNVDDSYTAD

SEQ ID NO: 340748 - protein, 823 aa, Zea mays
  Clone ID: MRT4577_73932C.1.pep
MRRGRKTEYLEIPLKDSIKGWRLEWFIIENYGNSLPPRSGRQPDVRTPSWTESPTDQEVAEAGALLAEVGLQKERGLTAEAVVADFVFKNIQPLKDRAYPAYLYRGLADSTRVTNRRIPYVDLVNRLEMILRGKVSNVGAPVAYSAWNLPPPKAFTLFVSNPPVTYGSLGLRVRPSAEEVSALVASLGEIPDDERQVHFEVPLNPSDAEISAMLDLLAEDSSDAAPAGTLVVAPLPEAGTTLDIQKPTSTRPRRPCQANQPDPSADEQKKKKRRLRRVSSLDRDIGTSVPVAEEMPMTEFIDADPNGCAQSAVDPDVGAPSVADPNGCAAYVANEDDGEEEDEVPLTRKNSRQFIASGESSGVPSPALSALIGLQELSLANFDQTLEDMVPEDLLSELADDGVMEVCADVLDAGLRSSCASSTLERDLEGQETNLDRPGPMEVTEGPSALEVATAENLDPKDAPEGAAGDDPAQVGSANYDPAPEGVRAGSLSCTSMDVHAGSPPHSGCMVVAQALDQGVALEGSVPADQVLGSVDGTELVPAGSLQAASGGDLTPGHRLISHDLGVPSFFSNLQALVDRMASQLRLQGAPVPEVASSLARWNPVLLQHRVSDLEATNVGMTQQISTLEEKHSRDQAELAQRCSDFEEKYSQNDANALSSSLHAQLNSEKEEKRILAASRDSLDRLYRDSSNSLTILERSHRFTMEELDNQRCKLQESMDEVTRLKQLISAKDATIKELCASKKSIAQELEAARLAVKVAKETSVTLRAQRDRAMDKAIRAGRILMRRPSVVVPEDIRADVNVASDSSSRPSSSIAPEKDITK

SEQ ID NO: 340749 - protein, 42 aa, Zea mays
  Clone ID: MRT4577_73933C.1.pep
VSLAGVPLRGKRMYGCGLVILCKPRDTWFSDRWLEVNLFVKA

SEQ ID NO: 340750 - protein, 993 aa, Zea mays
  Clone ID: MRT4577_73934C.1.pep
MAPKRKASSSSAVVIPPIDPNSQLPFAGNHMSVISEPELLHLVSIGVLPPRELCSWRICHGVTVPTEDTHESVIYAPFLLRGLGLPISPFFRGLLDFYHLNLTHMNPNSILQISIFVHLCEAFLGVLPHFGLWKYLYHCRPGMAGGQHQLVGGASLEMRRGRKTEYLEIPLKDSIKGWRLEWFIVENYGNSLPPPVGKTAGCSHPKLDRVSHKSGERGLTAEAVVADFVFKNIQPLKDRAYPTYLYRGLTDSTRVTNRRIPSTDLVSRLEMILRGKVSNVGAPVAFSAWNLPPPKAFTLFVSNPPVTDGSLGLRVRPSAEEVSALVASLGGIPDDERQVHFEVPLNPNDAEISAMLDLLADDSSDAAPAGALVVVPLPEADITLDAQKSASTRPRHPCRANQPDPSTDEQKKKRRRLRRVPSLDRDVGTSVPDAEEVPVTEFTDADPNGCTQSVADPNGCAAYVANVDDEEGEDEVPLTQKNSRQFIASGESSGVPSPALSALMGLQELSLANFDQTLEDMVPEDLLSEPADDGVMEVCADVLDAGLRSSRASSTLERDLEGRETDLDCPGPMEVTEGPSALEVATAENLDPKDGVDTCPAPESVVGVDLIRVGSASHCPAPEGAAGDDPAQVGSANYDPAPEDVRAGSLSCTSMDVHAGSPQHSGCMVVAQALDQGVALEGSVPADRVLGSVDGTELIPAGSLQAASGGGLTPGYQLISPDLGIPSFFSNLQALVDGMAGQLRLQGASVPEVASSLACWNPVSLQHRVSELEATNAGMIRQISTLEEKHSRDQAELAQRCTDFEEKYSQSQIELGQVSAALDDANALSSSLHAQLNSEKEEKCILAASRDSLERLYRDSSNSLTILERSHRFTMEELDNQRCKLQESMDEVTQLKQLISAKDATIKELRASKKSIAQELETARLAAKVAEETSVTLRAQRDRAMDKAIRAGRILMRRPGVVVPEDIRADVNAAPDSSSRPSSSIAPEKNITK

SEQ ID NO: 340751 - protein, 245 aa, Zea mays
  Clone ID: MRT4577_73935C.1.pep
MGLFGKSTSKQTAKLKALVKLAAARLAVVRRPRLGRRSIARSDVGQLLSIGHLDRALVRAEQVIEEDNMLEALDVIELYCKILIEQTAQLEKPKECSEEIKEAAAGMMFASARCGELPELLDARAILADKFGWDFARAAKEGAHGVVDPTLVRKLSGERASLEQTRRLAKEIAAENDILLEFPESPVGIHKDGRTTSQVNSQRAGEETKNAPARTFVEESAVKTDRREGERNSVNGKGDPSLAQL

SEQ ID NO: 340752 - protein, 1028 aa, Zea mays
  Clone ID: MRT4577_73936C.1.pep
MAPKRKASSSSAAVIPPIDPNSQLPFAGNHMSIVSEPDLLHLVSIGVLPPRELCSWRICHGVTVPTEDTHESVIYVPFLLRGLGLPISPFFHGLLDFYRLNLTHLNPNSILQISIYIHLCEAFLGVLPHFGLWKYLYHCRPGMAGGQHQLVGGASLEMRHGRKTEYLEIPLKDIIKGWRLEWFIVENHGNSLPPRSGRQPDVRTPSWTESPTDQEVAEAGALLAEVGLLKERGLTAEAVVADFVFKNIQPLKDRAYPAYLYRGLADSTRITNRRIPSVDLVNRLEMILRGKVSNVGSPVAYSAWNLPPPKAFTLFVLNPPVTNGSLGLRVRPSAEEVSVLVASLGEIPDDGRQVHFEVPLDPSDTEISAMLDLLAEDSSDAAPAGTLVVAPLPETGTTLDIQKPASTRSRRPCRANQLDPSADEQKKKKRRLRRVSSLDRDVGTSVPAAEEVPVPEFTDTDPDGCAPSVADPNGGAPSAADPNGCAPSVADSNVGVACVAGENDGEEEDEVPLTRKNSRQYVASGESSGVPSPALSALIGLQELSLANFDQTLEDMVPEDLLSEPTDDGVMEVCADVLDAGLRSSRASSTLERGLKGQEADLDHLGPMEVTEGPSALEAATAENLVPKDGVDTCPAPEDVAGDDSARVGSASHCPAPEGTAGDDPAQVGSANRDPAPEGVRAGSSSCTSMDVHAGSPPHSGCMVVAQALDQGVALEGSVPADQVLGSVDGTELVPAGSLQAASGGDLTPGHQLISHDLGVPSFFSNLQALVDGMASQLRLQGASVPEGALSLARWNPVLLQHRVSDLEATNADMTRQISTLEEKHSRDQAELVQWCSDFEEKYSQSQTELAQVSAALDDANALSSSLRTQLDSEKEEKRILAASRDNLDRLYRDSSNSLTILERSHRFTMEELDNHRCKLQESTDEVIRLKQLISAKDATIKELCASKKSIAQELETAQLAAKVAEETSITLRAQRDRAMDKAIRAGRILMRRPSVVVPEDIRADVNAAPDSSSHPSSSVAPEKDIVK

SEQ ID NO: 340753 - protein, 149 aa, Zea mays
  Clone ID: MRT4577_73937C.1.pep
VSKIVSASRRGATTNAPAGAASEESSASKSSIALISASLGFKGTSKWTCRSSSGISPSEATKALTSSAEGRTLRPKLPSVIGGFDTKRVKALGGGRFQAEYATGAPTFDTLPLRIISSRLTKSAKGNWLLGSIGGITTADELEVFLLGA

SEQ ID NO: 340754 - protein, 421 aa, Zea mays
  Clone ID: MRT4577_73938C.1.pep
MEVTEGPSALEVATADNLDPKNGVNTYPAPEDVAGDDLVRVGNASHCPAPDGAAGDDPAQVGSANYDPAPEGVRARSPSCTSMDVHAGSPPHSDCMVVAQALDQGVALEGSVPADRVLGSVDGTELVPAGSLQAASGGGFTPGHQLISHDLGIPSFFSNLQALVDGMASQLRLQGASVPEVASSLARWNPVLLQHRVSDLEATNAGMTRQISTLEEKHSRDQAELVQRCSDFEEKYSQSQTELAQDSAALDDANALSSSLHAQLNSEKEEKRILAASCDSLDRLYRDSSNSLTILERSHRFTMEEVDNQRCKLQESTDEVTRLKQLLSAKDATIKELRASKKSIAQELEAARLAVKVAEETSVTLRAQRDRAMDKAIRVGRILMRRPGVVVPEDIRADVNAAPDSSSRPSSSIAPEKDITK

SEQ ID NO: 340755 - protein, 37 aa, Zea mays
  Clone ID: MRT4577_73939C.1.pep
YPTADAASAHRSADIELRSPQPRRVTYNPAMRFARVS

SEQ ID NO: 340756 - protein, 131 aa, Zea mays
  unsure (1)..(131): unsure at all Xaa locations
  Clone ID: MRT4577_7393C.1.pep
LSGSSCGSLFSLVLPLGSGPVACSRFALGGGAAGPGGWCGFRLGLIFGGPCPSFGGGCLCQRFVGPFVLXEPLILNLFIAILCCYLGAQFQGSVLPGRVFLGWGVRFSWRCWLPSRWLRGLGSPRKFRPGP

SEQ ID NO: 340757 - protein, 64 aa, Zea mays
  Clone ID: MRT4577_73940C.1.pep
MVDYHFVYNDLEGASTSWDDIQRRVRNLPPKPEPSKPAFLPPKVDANYQPKSNGWPDVPQPEQL

SEQ ID NO: 340758 - protein, 118 aa, Zea mays
  unsure (1)..(118): unsure at all Xaa locations
  Clone ID: MRT4577_73941C.1.pep
MNTPREKVYVRPISSIVSRTLLALQEAAIDYDIISMTRRDGNHRRPKNLGRDPFANTTAVQDGDLTLFKSRAIARYVLRKHKTNLFGDXRLQQTPMEDVRLQLLTHQXSPPDIAIAGA

SEQ ID NO: 340759 - protein, 150 aa, Zea mays
  Clone ID: MRT4577_73942C.1.pep
MPSVRDIAADAFIREYAGHLKRSGKIEVPTWVDIVKTGPSKELAPYDPDWYYVRAAGIARHIYLRKHVGVGALAKLHGTAKNRGNRPSHHVDASRSIERKILQGLEKIGVLEKDARGGRRVSQDGQRDLDRIASNIAEQMRSGGDEDDEE

SEQ ID NO: 340760 - protein, 73 aa, Zea mays
  Clone ID: MRT4577_73943C.1.pep
AIIFTRGDALQTIDMNQDNYLEEAYKMRNVLQEFVRHPRDKAPTILGLREHIFTGSVSSLAGFMSYQETSFVT

SEQ ID NO: 340761 - protein, 80 aa, Zea mays
  Clone ID: MRT4577_73944C.1.pep
KKREFRGNGPTKGPGERKKGLLKPFEDRYQGKKKLLANPLKLKEEGLNLRGNLNHRLKNALHPQGNLGKGTRPGEGTGPI

SEQ ID NO: 340762 - protein, 60 aa, Zea mays
  Clone ID: MRT4577_73945C.1.pep
FLSWSRQRRFLHHFTVEYLHWVCMYRILLCVITVPYLFIGLLVHQVEVFVKKKKKKKKKK

SEQ ID NO: 340763 - protein, 50 aa, Zea mays
  Clone ID: MRT4577_73946C.1.pep
WDCLCTKNTMTIILWGGYANPLTGGQLFRALPKVRSSCDDYYTDSLNSLT

SEQ ID NO: 340764 - protein, 289 aa, Zea mays
  unsure (1)..(289): unsure at all Xaa locations
  Clone ID: MRT4577_73947C.1.pep
WVPRGRPGQAPHSHSTTDPSRPTACQRLPRSLSSRDLALRRSGAAGGGSRSALPTPDALPEAHQLRGPDARLRRHPAPPPGLPLPSASASASANGTAEDPAAASVSGGAAWRGAARCEDLAARHVGVLVKGWTWIPDTLDGVYTCRCGVSCVWSKSAAAVDRPDALLFGGATPPPQRMKGLPLRVYLDLEASRKPTGFEDIFVGYHASDDVQVTYAGKSFHTSRSYHISTEKRNDALIYWSSSRCLPHRDKLAKDFLSLVPHHSFXRCLNNVGGPDMALSMYPVCSTTI

SEQ ID NO: 340765 - protein, 231 aa, Zea mays
  Clone ID: MRT4577_73948C.1.pep
MLFPKRINYVAPMLASAAILLLLLSGYFELPSISTPAPLLAGAARFPTALDSVGSRDRDPFTSLLEAFASVSGGAAWRGAARCEDLAARHVGVLVKGWTWIPDALDGVYTCRCGVSCVWSKSAAAVDRPDALLFEGATPPPQRMKGLPLRVYLDLEASRKPTGFEDIFVGYHASDDVQVTYAGKSFHTSRSYHISTEKRNDALIYWSSSRCLPHRDKLAKDFLSLGPHHSF

SEQ ID NO: 340766 - protein, 149 aa, Zea mays
  unsure (1)..(149): unsure at all Xaa locations
  Clone ID: MRT4577_73949C.1.pep
ASFPVSRKQSLDITSIASNGGRVSCMQVWPPINMKKYETLSYLPDLSDEQLLSEIEYLLKNGWVPCLEXFETEHGFVYRENHKSPGYYDGRYWTMWKLPMFGCTDATQVLAEGQEAKKAYPQAWVRIIGFDNVRQVQRIRFIGYKPEGY

SEQ ID NO: 340767 - protein, 142 aa, Zea mays
  unsure (1)..(142): unsure at all Xaa locations
  Clone ID: MRT4577_7394C.1.pep
REYIAPVASGTRCVCLRCLTFSSLPALSNILNRRNRXIFIEKCCFSNFQSKFNQYXSSSDYTKRNSDFPLQTSSKLNCMYICSPKLQDYASKASEVGILEGSICIISDGAGAAVLRSGTQQVGMATTLVGDDRGTICHEYFP

SEQ ID NO: 340768 - protein, 48 aa, Zea mays
  unsure (1)..(48): unsure at all Xaa locations
  Clone ID: MRT4577_73950C.1.pep
SSLLSSTXFSGRTSLTCSGTXLXQXKHPLXLTFPTSXHVPXSTXFSSL

SEQ ID NO: 340769 - protein, 90 aa, Zea mays
  Clone ID: MRT4577_73951C.1.pep
AVLVLHFSTSRNLGTNNSPIIHSLPLFQQQQPAAISIGYNPVYMPLTKNLGLGTSFALHISHTIQAGSIILDRMINPTHMLGCLQAKPLE

SEQ ID NO: 340770 - protein, 436 aa, Zea mays
  Clone ID: MRT4577_73952C.1.pep
MLFPKRINYVAPMLASAAILLLLLSGYFELPSISTPAPLLAGAARFPTALDSVGSRDRDPFTSLLEAFASWDAAVGCPRVRAKLAAAGLGLGPGLPLPSASASASANGTAEDPAAASVSGGAAWRGAARCEDLAARHVGVLVKGWTWIPDALDGVYTCRCGVSCVWSKSAAAVDRPDALLFEGATPPPQRMKGLPLRVYLDLEASRKPTGFEDIFVGYHASDDVQVTYAGKSFHTSRSYHISTEKRNDALIYWSSSRCLPHRDKLAKDFLSLVPHHSFGRCLNNVGGPDMALSMYPVCSTNDNGTPHWWDHLHCAMSHYKFVLAIENTKTESYVTEKLFYALEAGSVPIYFGAPNVWDFVPPNSIIDASKFSSLRKLASYVKTLANDPVAYAEYHAWRRCGALGNFGRAREMSLDTLPCRLCEVVSKRGGKGADAL

SEQ ID NO: 340771 - protein, 176 aa, Zea mays
  Clone ID: MRT4577_73953C.1.pep
PPLFFFFFCFFVRVHSRSPGFFFVCGHGGTGKTFLWTTLIARLRSEKKIVLAVASSGVASLLLPKGRTAHSRFKIPFDINDASTCNVKRGTMLAELIQIATLIIWDEAPMTHRRCFEALDRTMRDILSEQTPSNAILPFGGKIVVLGGDFRQILPVVRKGSRSSIVNASITNSPGR

SEQ ID NO: 340772 - protein, 47 aa, Zea mays
  Clone ID: MRT4577_73954C.1.pep
ASPLVMGKEKSHFNIVVIGHVDSGKSTTTGHLIYKLGGIDKCVIESK

SEQ ID NO: 340773 - protein, 169 aa, Zea mays
  unsure (1)..(169): unsure at all Xaa locations
  Clone ID: MRT4577_73955C.1.pep
MVLILTELVAKKLVYFFLAQDLRSELKLLGQAIEPMYGSPVSKDLNLPTQPPPMASSGLLRYRSAPSAVLGGLCEDQLQLPAAAPSAADNVFSRFLPDHHIRDDKPSPAHFPSAADMASHHQQEXMMFHSQSQSQHQQETGRSGGGLYRTVSSGMEAGGTGVGARRSLI

SEQ ID NO: 340774 - protein, 79 aa, Zea mays
  Clone ID: MRT4577_73956C.1.pep
FDLQIVYTINRSYKRTGTLGNHVRAPGEKLWLNCTISCPIVHTHQERRVGTTKLLLIPGDDIRLNWTAGNQGLYMTGTD

SEQ ID NO: 340775 - protein, 53 aa, Zea mays
  Clone ID: MRT4577_73957C.1.pep
ILIFKKKKKKKKKKKKKKCRGSSVSYPIFPSLSRDYRVYIIAITKSNFHTVYN

SEQ ID NO: 340776 - protein, 29 aa, Zea mays
  Clone ID: MRT4577_73958C.1.pep
FWCEFTASFLLFLNAISGLHINSITHPWE

SEQ ID NO: 340777 - protein, 177 aa, Zea mays
  Clone ID: MRT4577_73959C.1.pep
MAMKKNQDSQLVMGRYRLGQLLGSGNFAKVYKAHKVATGEAVAVKVLDKDAVHRSGMAEKVKTEVDVMRRVRHPNVVRLHEMMATRSKIYFVMEYASGGELFARLAQSTRFPEPVARRYFQQLMTAVEFCHSRGVYHRDLKPENLLLDARGDLKVSDFGLSALQDGRGGRTRGSGFT

SEQ ID NO: 340778 - protein, 63 aa, Zea mays
  unsure (1)..(63): unsure at all Xaa locations
  Clone ID: MRT4577_7395C.1.pep
ISWLHGRKGLPRTRCLSCTCNGMNEMVKKQSYGGGGGIPSLRAXXNTLXAGGGGGDPPPKXGG

SEQ ID NO: 340779 - protein, 142 aa, Zea mays
  Clone ID: MRT4577_73960C.1.pep
RPGRDNNSCVTLLPFLFSKKKKKKKKKKKKKKKKKKKKKKKKKKKKKKKKKKKQEKKKKTQKKNPSLEALQGGPPASSPHRGWGAAHKAPPPGGGHNRGAAWPGGFQDEPPPRLGPPRGEFFRSWALSRGGNPPPLAVGPGS

SEQ ID NO: 340780 - protein, 313 aa, Zea mays
  unsure (1)..(313): unsure at all Xaa locations
  Clone ID: MRT4577_73961C.1.pep
MKPPASSTATSYLLLAPLAILLLVFVLPSLRPWSRVGSDSDGLGILCARRTGGFVDVAADAPAPPPGQTTRAAEFSLLVGVLTVPGRRERRDIVRTAYALQPAAEGARVDVRFVFCRVTDPVDAALLAVEARRHGDVLVLDGCAENMNDGKTYAYLSSVPRLFAAEPYDYVMKADDDTYLRVAALAGELRGKPRHDVYLGYGYAMGGQPMPFMHGMGYVVSWDVAAWVAGAREILERNDTLGPEDLLVGKWLXIGGRGRNRYDLKPRMYDLNWFMDNFRPDTIAVHMLKDNRRWAATFTYFNVTAGIDANSLP

SEQ ID NO: 340781 - protein, 80 aa, Zea mays
  unsure (1)..(80): unsure at all Xaa locations
  Clone ID: MRT4577_73962C.1.pep
LRSTLKNTNTRIGPNKPSQITIXLNTQNLANYAIICQEXNKLMPIVXPDILVDGPHDIESFAYVTDTVHAVCYNALNEHH

SEQ ID NO: 340782 - protein, 694 aa, Zea mays
  Clone ID: MRT4577_73963C.1.pep
GQPNPSWQQVFAFSATHLQSHLLEVALKAKDLAGDDLVGRVAFDIAEVPVRVPPDSPLAPQWYRLETKRGEKLPHGEIMLSVWLGTQADEAFPDAWHSDAHAAAGPAAVASTRAKVYFSPKLVYLRVAAIAAQDLIPHDTSRPMSACVKLQLAGQLRRTRPGAPPGTPNPIWNEEFMFVASEPFDEPLVVTVEDRVAPGRDEMLGRIFLPLAAAMPRHDHFGKPVEPRWYSLMRPSDDPDKKEVKFASKIQIRMSLDFGYHVLDESTYYSSDLQPSSKPARKPSIGMLELGVLGARNLVPMKPKDGRTTDAYCVAKYGPKWVRTRTILDTLNPQWNEQYTWEVFDPCTVITVVVFDNGQIGSKNGGGPDQRIGKVRIRLSTLETDRVYTHFYPLLVLHPSGLKKTGELHLAVRFTCTAWVNMMALYGRPLLPKMHYTHPIAVMQLDYLRHQAMQIVAARLSRAEPPLRREVVEYMLDVDSHMFSLRRSKANFHRITSLFFGFVAMLKWYDGIRSWWNPITTVLVHMLFLILICYPELILPTIFLYMFMIGLWNYRYRPRHPSHMDTKLSHAELTHPDELDEEFDTFPSSRPAEIVRMRYDRLRSVGGRVQAVVGDLATQGERAHALLSWRDPRATAIFIFLSLVVAVVLYVTPFQVLMVIAMLYLLRHPRFRSRMPSVPFNFYRRLPAKSDMLL

SEQ ID NO: 340783 - protein, 83 aa, Zea mays
  Clone ID: MRT4577_73964C.1.pep
PRLKAPLFNTLVSPRCFTPLGGPPWFPGVFPPLAFLWGVPPVGLPFPVWGPPPPWGFASGGRWVLFSPPHNLNTPSPHCNNQQ

SEQ ID NO: 340784 - protein, 106 aa, Zea mays
  Clone ID: MRT4577_73965C.1.pep
GAGTRGGEHHPRNILNTTNSSCSSSTSGSSTPSTSRSSCLSLRAVLYVFPILLTVIQLLASYLCLSLLLSDLNPFSCVNKASELGFGSVARRAHAAEERRCALLGR

SEQ ID NO: 340785 - protein, 158 aa, Zea mays
  unsure (1)..(158): unsure at all Xaa locations
  Clone ID: MRT4577_73966C.1.pep
SKRPFRTVRLYTECLNPETYLLFDXRRHHYLIHIEYMFPDAIEEQYLMRTKGLFXSFYEDCHHQCCQXTKEPTLRTTLKGLLWXITSQTKDQSPGTXRTSIPPXQADPSFEGXWMATLSSXEQVKPPARXVSGNDIWTFLRTMDVPVNXLHAHDYMSI

SEQ ID NO: 340786 - protein, 87 aa, Zea mays
  Clone ID: MRT4577_73967C.1.pep
FFITQKIITLTCTNANTYLEFNRHSKMLKVAIFTLELKPEIPLKLTTNTFLKKKKTLNMKLPSGTPIQQKSPKANTLILPIKSTVKT

SEQ ID NO: 340787 - protein, 45 aa, Zea mays
  Clone ID: MRT4577_73968C.1.pep
EASWKSESEGAMVVVLIFVGFSLAIFMFWRFQMQHLAGNMNNKIR

SEQ ID NO: 340788 - protein, 88 aa, Zea mays
  Clone ID: MRT4577_73969C.1.pep
LHIKTKAGLVKFCNNTSTKHIETIGWPIKTGMLHILGGANSIIQPRLVHRGVQGPNGQYHDHRSATLLFYNVSQCSSSSSWDGRKQTF

SEQ ID NO: 340789 - protein, 61 aa, Zea mays
  Clone ID: MRT4577_7396C.1.pep
MGGLSTKLFVVLLLLVCYTGTQGGPVTMVSARKCESQSFRFKGPCSRDANCANVCFCTRDC

SEQ ID NO: 340790 - protein, 106 aa, Zea mays
  unsure (1)..(106): unsure at all Xaa locations
  Clone ID: MRT4577_73970C.1.pep
AHTYTGSKKIGGVWYKAGECADKNPNSDEVVEGALGMRGWLXESEGHEDIGTRDKECPNCELEKDIEYMHXLVTTALHRCDVTAERIKKEKNLELVVTGGIGSDHM

SEQ ID NO: 340791 - protein, 95 aa, Zea mays
  Clone ID: MRT4577_73971C.1.pep
YLIIATGVYSMLTWNGSTSHRLEGWPPTWHTGMIRPLLRLRETRLMRHWRCLMTRIPYRIISSGADSRGGLDLPLEVSLETEPAALDRGLQPDLA

SEQ ID NO: 340792 - protein, 53 aa, Zea mays
  Clone ID: MRT4577_73972C.1.pep
NVVCLPIPGFCHCDATVLIVCDQETALSPLVYLKNRNAQAHYTGRLCEWHQLV

SEQ ID NO: 340793 - protein, 147 aa, Zea mays
  Clone ID: MRT4577_73973C.1.pep
MAATRRLSCFLLAVLLAGVAAATAFDEAAAAGFGLGHGARFARKHGRAAAEMPQPEPQPKTKPEPHMQPLPQPEPKPKPMPHPEPKPEPQPKPNPEPQPMPKPQPKSKPEPLPTPKPEPKPEPKPEPKPEPKIKPKPKPEPMSRGRR

SEQ ID NO: 340794 - protein, 65 aa, Zea mays
  Clone ID: MRT4577_73974C.1.pep
KEAPSEFVLRPYIYAAKKPKTLGALSTLQFKTEFFFGVHRLCWSCVIPRVIRAIPVHLIEAPMTP

SEQ ID NO: 340795 - protein, 65 aa, Zea mays
  Clone ID: MRT4577_73975C.1.pep
QLYSSMQWLIAINLQHSSCRLPQCYSKVATWKRRLRQDQVCAQSRTRTTSPTSVTTADSSPNAWA

SEQ ID NO: 340796 - protein, 80 aa, Zea mays
  Clone ID: MRT4577_73976C.1.pep
IMERVLLLILSCGTFKACVACWRLCRQTWHTFMLYCYLLVPVCLSWWESIWLTMGSCPRIASRPCRLHCCRSCGKTAVRH

SEQ ID NO: 340797 - protein, 138 aa, Zea mays
  Clone ID: MRT4577_73977C.1.pep
GYTSVSSFGEFAETDNQGSSLESFWVDLLESSMKNDTPVDASACGGSLVSNQQTNNGMGDSGNNILYINATSNAIFSPPTNVVSEAYANPGLSQVSESYFGSLKDQANHAPSLLTSDLDSQSKQHTNSLMKTPVSDNM

SEQ ID NO: 340798 - protein, 114 aa, Zea mays
  unsure (1)..(114): unsure at all Xaa locations
  Clone ID: MRT4577_73978C.1.pep
AEAVPSGXGRGVGPGSRGRGGGXSGVDYDDEIGEPEEAPRGYRGRGRGRGGRGSFAVGRGYGGDNYAMEEAGRYDDDGYNAPPMQRYEGGRGRGRGRGRGRGRGRQGHGPPPQQ

SEQ ID NO: 340799 - protein, 152 aa, Zea mays
  Clone ID: MRT4577_73979C.1.pep
LGTSTPAGGKSIPTRQSQPPRQHGRARRGEMGQGRHGHHHHRQLDTAIDMDNVDGHLHNNLPLPLATPILGCRPSVPQGECQGGGAGPVGAAVVCATGASGGAPATRVHELLEDPICTESTFPAHPSSWCLAPGAPILDWVSCGFRVLDWKG

SEQ ID NO: 340800 - protein, 78 aa, Zea mays
  Clone ID: MRT4577_7397C.1.pep
MGGLSTKLFVVLLLLVCYTGTQGGPVTMVSARKCESQSFRFKGPCSRDANCANVCLTEGFTGGVCKGLRHRCFCTRDC

SEQ ID NO: 340801 - protein, 115 aa, Zea mays
  Clone ID: MRT4577_73980C.1.pep
ADLKNCFAAMHTPLHNTNTKSMSTKLFYDCTTSNSVDVERMSVETETLCILQKLGDVGSMVTSDIQFVQYYYYRLLSISSLHRQVLKFVRQYRQQAGGTCGYAYFTSALPSGCTQ

SEQ ID NO: 340802 - protein, 75 aa, Zea mays
  unsure (1)..(75): unsure at all Xaa locations
  Clone ID: MRT4577_73981C.1.pep
MCFRDPFDRFLMAPNAEKKPAEKKLPEEKAEKKPRAEXKRVPSKEGGEKKGKKKAKKXSVQTYKXIYIFKVLKQV

SEQ ID NO: 340803 - protein, 125 aa, Zea mays
  Clone ID: MRT4577_73982C.1.pep
PFVQQTIAMARAVHRQRYRMGCGYKLTDDGTITEEYWEPVEDSNTDEENEVPARKPYRIELVGVVCDAYLAVVRGIRRAVVTGRAVRVKSQLQSHKRFATAFNSYCSLVDNAMLYSSNTLGVPKL

SEQ ID NO: 340804 - protein, 208 aa, Zea mays
  Clone ID: MRT4577_73983C.1.pep
MWSAATAAAARAVSVSPVPAPSLLSGRRGGSRGGRGSVSVRSTVWDFVGGDLVRPDLGKWLDDVEKHKALAIYPPHEGGYEGRYLNRLRYQGYYFLDLSARGLGDPETTLTKVHPVCPPSLGRQPVARWYFPPEVDYRLSLLHPDAKGLVVWIIEAKVLSKAELQFLAMLPDIRPKVRVIAECGNWRSFVWKPLKQIAGLEPDPDAEE

SEQ ID NO: 340805 - protein, 243 aa, Zea mays
  Clone ID: MRT4577_73984C.1.pep
MWSAATAAAARAVSVSPVPAPSLLSGRRGGSRGGRGSVSVRSTVWDFVGGDLVRPDLGKWLDDVEKHKALAIYPPHEGGYEGRYLNRLRYQGYYFLDLSARGLGDPETTLTKVHPVCPPSLGRQPVARWYFPPEVDYRLSLLHPDAKGLVVWIIEAKVLSKAELQFLAMLPDIRPKVRVIAECGNWYMRFLLPPSMSKFPTRDHLWLRPDYVRVALLHACRRSFVWKPLKQIAGLEPDPDAEE

SEQ ID NO: 340806 - protein, 49 aa, Zea mays
  Clone ID: MRT4577_73985C.1.pep
QTKKIFCREIFQLSLSLEGAHRDFVQDTKDPDCLKLMIKERGLKVSIVS

SEQ ID NO: 340807 - protein, 104 aa, Zea mays
  unsure (1)..(104): unsure at all Xaa locations
  Clone ID: MRT4577_73986C.1.pep
AAXPPXFLPFXXLXALXSPAXFPPPXXLPFXXXAGVCPASFLXXPPLLPFFLPAAPXAGSLFLLXXLLPSLXLALSXXAAFFXXPXLGGALFSFWFVFCLFVAS

SEQ ID NO: 340808 - protein, 112 aa, Zea mays
  Clone ID: MRT4577_73987C.1.pep
MTLLGSIVRQFVSIPSLPATLSFKGQTVLITGANTGLGLATARECVGRGAEKVILAVRDQAKGDAAKASIQKSYPSAPGSIDVWHLDLLSFDSVLAIGKRAAQLPRLDVALL

SEQ ID NO: 340809 - protein, 153 aa, Zea mays
  Clone ID: MRT4577_73988C.1.pep
ELIPHNLAPRRPAPWPAPNRVGLTLSTATVRLKEFRVVERQGHLEPSDGKSFALWIAVPRLRPRDMVSQWDTLGQPRSYLPGEPQPALTPGHWQNGPETAEGPTLHAKPRSWWTSAETNWLGDEQDWSEERPGKLQGRTATSPCISSPINFLS

SEQ ID NO: 340810 - protein, 60 aa, Zea mays
  Clone ID: MRT4577_73989C.1.pep
ILKAPPGACAPAASWPHTGTRKGLEEIVHSALHRIKVSRGHPPRSTATIWDTVRDRSTRR

SEQ ID NO: 340811 - protein, 48 aa, Zea mays
  Clone ID: MRT4577_7398C.1.pep
IQDKEGFPPDQQRLIFAGKQLENGRSKAECNIQKESTIRLVVRLGGGQ

SEQ ID NO: 340812 - protein, 48 aa, Zea mays
  Clone ID: MRT4577_73991C.1.pep
RTAYKTLYYVLFYSISVDFNLYYKSYRTIQPSYIYKFINLIIPCLKHD

SEQ ID NO: 340813 - protein, 102 aa, Zea mays
  unsure (1)..(102): unsure at all Xaa locations
  Clone ID: MRT4577_73992C.1.pep
DAGLVFTATSFFKILQEPMRNFPQAMIQASQAMISLQRLDSYMTSAXLDEGSVERDPAAASGGMAVQVKDGVFAWDDEVDAGQEVLRGIDLDIRTGALAAVV

SEQ ID NO: 340814 - protein, 144 aa, Zea mays
  Clone ID: MRT4577_73993C.1.pep
MGSCTSKSALDHRRPARYYTRGRRVHSRRSIMPEAPQSQQLGDASRGRMTGFSMSEIVHVETANRGKSEHSKTFHLTQMEWHHSQRDSKGCSNEDAWFDSVSILRDDSDDEFKERRWRQRRRRRAGGEAAIRERVSFADALSRI

SEQ ID NO: 340815 - protein, 110 aa, Zea mays
  unsure (1)..(110): unsure at all Xaa locations
  Clone ID: MRT4577_73994C.1.pep
GAGLGAVRVVARPPLLVXGAAPLGARVVPVLRPVLVRRRRLGXAPRLLSLPXXXGAAXGXXVXAPAAPXXXLXXRXWPVSSPPLAPLLCACXRXGPLFFGGEGPXWXCXL

SEQ ID NO: 340816 - protein, 54 aa, Zea mays
  Clone ID: MRT4577_73995C.1.pep
LRIRHCYRWLFLSKVLIRWVSRADILRKSSFLYCISNRSSSRRGHKICGVGGVL

SEQ ID NO: 340817 - protein, 78 aa, Zea mays
  Clone ID: MRT4577_73996C.1.pep
PLFNTPEKNHQGGPFKRTSGTTHKPAAKKPPTPTKPDHKGELATAQTHTLSQMNRGKPYPPQETTANPKQGSPAGTYH

SEQ ID NO: 340818 - protein, 123 aa, Zea mays
  unsure (1)..(123): unsure at all Xaa locations
  Clone ID: MRT4577_73997C.1.pep
FPSNPVRSLPSXPYLPDPGPPNFTPLAPXPSPPPFLIAAMEGKTLTPEXTRPPRPKPXPPGSSSGRSPPSPASTAGGPRACSPRAPPPPSATPKSPTSATPPPPARRPPLLRKSGASPMPTLT

SEQ ID NO: 340819 - protein, 35 aa, Zea mays
  Clone ID: MRT4577_73998C.1.pep
SACNDTSIMVFLLSGVQRPGEREPYSDEGIASMTT

SEQ ID NO: 340820 - protein, 210 aa, Zea mays
  Clone ID: MRT4577_73999C.1.pep
MSKISVAGVRTNVKELLEYSNETKKRNFLETVELQIGLKNYDPQRDKRFSGTVKLPTVPRPRMALCVLGDQHDIDRAKHHGVDAMSTDDLKKLNKNKKLIKKLARKYDAFIASDALIKQIPRLLGPGLSKAGKFPTPVSHNEDLANKMTEVKSTIKFQLKKVLCMGVAIGNVGMTEDELIGNIMLAINYLVSLLKKGWQNVGSLTIKATM

SEQ ID NO: 340821 - protein, 521 aa, Zea mays
  unsure (1)..(521): unsure at all Xaa locations
  Clone ID: MRT4577_7399C.1.pep
AAALDRLRDDASAGLDAGLLAAALDMLQAEFRRLLKDHSAPLAMKDPDGSGSDPPPVVPSRIPAAVVHKLSLILDRLAANGRLDHCSSAYGDARGDTVCASLRALGLDYLKETSGDAQALSPSVERWARHLEFAVHHLLEAERKLCVAVFERRPEAAPLCFAEIAARAGILDFLDFGRALADARKDPIKLLRLLDVFHCLNKLRLDFNRLFGGKACVGGQSRTRELVKRVVDGAVEIFEELLVQVELQRTIPPPVDGGVPRLVSFVAKYCNQLLGEQYRSVLTQVITIHRSWRKEVFNDKMLVDAVLNIVKTLELNFDTWVKAYGDTTLSSLFMMNIHWHFFKHXKGTKLGELLGDPWLREHEQYKDYYSAMFLRESWGTLAPLLSREGLIMFSKGRATARDLVKQRLKSFNASFDEMFQKQSKWVISDRDLQQKTCHLVVQAVVPVYRSFMQNYGPLVEQDVSASRYVKYSAEDLDKMLNTLFLSKPGRPMRAGSFQIKNSNDKITSAMTGLYRSASTLK

SEQ ID NO: 340822 - protein, 188 aa, Zea mays
  unsure (1)..(188): unsure at all Xaa locations
  Clone ID: MRT4577_739C.1.pep
QDVCXDDYAYQQKQSAEPGKANVSAXYFFFDGMRSPVNTNNPXNSTGTSLYEDNVPAVXTLSVSMGRINYAMGGQNPSHTHPRDSEIILVREGTLEVGFLTTANRLLSKTVATGDGVVFPRGLVHFQQNRGHGPAAVVAAFNSQLQGTQAIAMTLFGATPPVPTDILAKAFRVGSGEVEHIKANFAPK

SEQ ID NO: 340823 - protein, 96 aa, Zea mays
  Clone ID: MRT4577_73C.1.pep
CGSFSISFSLRAIYFVFLDRISQFSSIASTSWSLSYLELGQVRSSLNRRPSLFSPSPSCSSSLSPCFEAAHRPFSNRLQVTKTCHNTDRIPSLRRA

SEQ ID NO: 340824 - protein, 112 aa, Zea mays
  Clone ID: MRT4577_74000C.1.pep
MVATKKTKKSTDNINNKLQLVMKSGKYTLGYKTVLRTLRNSKSKLVIIANNCPPLRKSEIEYYAMLAKVTVHHFHGNNVDLGTACGKYFRVCCLSIIDPGDSDIIKTTPGEQ

SEQ ID NO: 340825 - protein, 84 aa, Zea mays
  unsure (1)..(84): unsure at all Xaa locations
  Clone ID: MRT4577_74001C.1.pep
XKFKRNXXTLISLVGSCXXNSXIHKKVXXECQSASXLLLGASXQSNXTENXPRSPCWXIKLIXAGNFFYSIASWHIFEIKWILR

SEQ ID NO: 340826 - protein, 60 aa, Zea mays
  Clone ID: MRT4577_74002C.1.pep
ATLDMKCFFPGSLQMLEAQKRQRLATKLNLGYKLGPPDTDVANKNPKQLKTGPMRKQTDP

SEQ ID NO: 340827 - protein, 112 aa, Zea mays; identical to SEQ ID NO: 340824
  Clone ID: MRT4577_74003C.1.pep

SEQ ID NO: 340828 - protein, 112 aa, Zea mays; identical to SEQ ID NO: 340824
  Clone ID: MRT4577_74004C.1.pep

SEQ ID NO: 340829 - protein, 59 aa, Zea mays
  Clone ID: MRT4577_74005C.1.pep
VIHLARFGDKLKCTCNRSVVYLIDTSAREEIYQGHGDWGVVPTTSNKPPASGNLHRNTA

SEQ ID NO: 340830 - protein, 200 aa, Zea mays
  Clone ID: MRT4577_74006C.1.pep
RDAGEKKTVPVPVPGPTEEEDATATHADEGDGVKKQRQPTTTTTAAAASSSSLAERSVAVAVDSGDPYGDFRASMEEMVSAHGLRDWAQLEELLAWYLRINGKQHHHLIVGAFVDLLLGLSTSSPSSSSSSSSSSAPCSTAAETSTTTTTTTSSTSTGCSCSCACACCTAAAATTISGSVAGDAVTASAATAAGRRQSGR

SEQ ID NO: 340831 - protein, 209 aa, Zea mays
  unsure (1)..(209): unsure at all Xaa locations
  Clone ID: MRT4577_74007C.1.pep
MGCATSKQFSRSAPAHADPAVLATQTSFTVNEVEALYELYKKLSFSIVKDGLIHKEEFQLALFRNSRRANLFADRVFDLFDLKRNGVIDFEEFVRSLSVFHPKADTSEKTAFAFKLYDLRGTGYIEKEELREMVLALLDESDLCLSDSTVETIVDNTFSQADSNGDGRIDPEEWEEFVKKNRQXVRNMTLPYLQDITMSFPSFIMRSEA

SEQ ID NO: 340832 - protein, 98 aa, Zea mays
  unsure (1)..(98): unsure at all Xaa locations
  Clone ID: MRT4577_74008C.1.pep
EEADKDKNIKYVENASKAIDFRPMVSIKEQLKNDKDHESLLLWKEQILGVVDLNXSGDRXKPDIKIMSLSILSTRRIDILLSLAVDLNEIGVWFTLKE

SEQ ID NO: 340833 - protein, 65 aa, Zea mays
  Clone ID: MRT4577_74009C.1.pep
HNSKMYNCQFCLSPNSNPEGKDVVIWHVTFSVYRLNSLQCLVVRCNCKVGELSEVRVGHAFPCPT

SEQ ID NO: 340834 - protein, 161 aa, Zea mays
  unsure (1)..(161): unsure at all Xaa locations
  Clone ID: MRT4577_7400C.1.pep
ASPTTSTPFGVGQVXAWHPPLQAGGFASALPAFPNQPFMAHSMPPFPAIGSSSGAPPVAFPASPPIAPYSLPPGGPPLAPPAGQSIFFPKLAVLVPYFQRAIRLCFLRPFWSPNALFPILQVRCSPCYFRAPFARMHQGLLCLLNCQKNVFSYFACLVFWW

SEQ ID NO: 340835 - protein, 219 aa, Zea mays
  unsure (1)..(219): unsure at all Xaa locations
  Clone ID: MRT4577_74010C.1.pep
FYLTLRDSPFWTLHLYDCKDVTVSGTTILAPIAGAPNTDGIDPDSCENVMIENCYISVGDDGVAIKSGWDQYGIAYGRPSTNITVRNVIIRSMVSAGVSIGSEMSGGVSNVLVENVHIWSSRRGVRIKTAPGRGAYVNNIVYRNITLENVRVGIVIKTDYNEHPDERFDPKAVPVVGNISYMSIHGQRVRVPVRIQGSAEIPVRNVTFHDMSXGILDKK

SEQ ID NO: 340836 - protein, 76 aa, Zea mays
  unsure (1)..(76): unsure at all Xaa locations
  Clone ID: MRT4577_74011C.1.pep
MSCNCGSSCGCGSSCXCGKKYPDLXEMMTVVQASVVLFVDPEKNAAPEFVEDAAESGEAVHXCSWGGNCXCDPCDW

SEQ ID NO: 340837 - protein, 114 aa, Zea mays
  unsure (1)..(114): unsure at all Xaa locations
  Clone ID: MRT4577_74012C.1.pep
MDNPLNQRKDHLKLARHYALKGLYDTSIIFFDGAISQINKHLTGRKHAXITNGGMNCNKALSEEKEIVKQLDAQLKFLKEAPGTRLASSPTIRSNKSIVYQPLDEYPTYIPAQF

SEQ ID NO: 340838 - protein, 55 aa, Zea mays
  Clone ID: MRT4577_74013C.1.pep
GPVNPHYGPLSLVPLFYVLYLSMWPSIISLSLLSAVMEEKPGCPAHADDHWAHES

SEQ ID NO: 340839 - protein, 87 aa, Zea mays
  Clone ID: MRT4577_74014C.1.pep
PKWLNRGGLTGGHTNINWVGPTGPFPTGKPCGPFVFWSPPPPGGRRTQFWAPFRTSMGGALLARAYGWGGRVQAPQRGEVGYPQNQG

SEQ ID NO: 340840 - protein, 48 aa, Zea mays
  Clone ID: MRT4577_74015C.1.pep
DRVFSSLATLFRCLLPVRDSDFPGARRQYLDVIMSVRRSRLDHDDRLI

SEQ ID NO: 340841 - protein, 105 aa, Zea mays
  Clone ID: MRT4577_74016C.1.pep
CSGVRLWSMQARLKVHVVALDQAEHFVVEVEAGVPDQAAVSEDPQLHRAACRVSDPPVGEEGVDQARLARTTRRRARSGGQQGSQIPRSCPVPVREHRKARSSVF

SEQ ID NO: 340842 - protein, 52 aa, Zea mays
  Clone ID: MRT4577_74017C.1.pep
AWLPPPPIGRRRKPGLKANPPVVLFLIVIGRPPPPKKKKKKKKKSTLRCYHC

SEQ ID NO: 340843 - protein, 81 aa, Zea mays
  Clone ID: MRT4577_74018C.1.pep
LMSGQHQATKSCSPNTWMHDTHFRSAFNWSPACMGKKTNCSLPGRLIRLPASRPGFQRLFWERVRDGAYTHKKSMPGCRVQ

SEQ ID NO: 340844 - protein, 103 aa, Zea mays
  Clone ID: MRT4577_74019C.1.pep
LNAAPPTYDATPQDKSCAHPRDDHEGEEHPAEALVPEIRREADAKQSCGGQPHSGEQSSTSSPPDLWATTLASRAQEGATHSCWPACLACHISSTCSQHVSLT

SEQ ID NO: 340845 - protein, 92 aa, Zea mays
  Clone ID: MRT4577_7401C.1.pep
NNGRSLHQAFRGPPPARLLHRDARRAGDYGVGEEVRVAELPLQGPTPPLLLHQGLLVLPRLVSCVCIYSRSGSVKHACMRYQIFGSTSKLMN

SEQ ID NO: 340846 - protein, 42 aa, Zea mays
  Clone ID: MRT4577_74020C.1.pep
RHDHRDPEGAHPARAVAIVPPVGGRQRSLCDQESATLPKQRP

SEQ ID NO: 340847 - protein, 181 aa, Zea mays
  unsure (1)..(181): unsure at all Xaa locations
  Clone ID: MRT4577_74021C.1.pep
MGSRIELIRKHLKQEEEDDDELFFVLVPAIYASLYSEKRPVHTSCRSGAQKIREMLDGHESWCKSEFRMEPEIFRAVASYLRREGLLQDTSNMSIEEHLGIFMYMISQNASNGDXLQKEFQHSGETIHRKISEFFGIIPALTQRFVKLPSVTQPHVKITSIPRFWPYFQIALVQLMGHTSP

SEQ ID NO: 340848 - protein, 52 aa, Zea mays
  Clone ID: MRT4577_74022C.1.pep
VVCVAAVGLANVVGVDGAVGADHLGAVVEAASGALGAVVAETAAGLGAYTDS

SEQ ID NO: 340849 - protein, 60 aa, Zea mays
  unsure (1)..(60): unsure at all Xaa locations
  Clone ID: MRT4577_74023C.1.pep
MGKIKIGIYGFRRIRRLLPSVGLQSDYMKLQAVNDXSMSTDYMTYMFKSDTVHRQRKHHE

SEQ ID NO: 340850 - protein, 67 aa, Zea mays
  Clone ID: MRT4577_74024C.1.pep
FYHKHMEQLGQLGAIAAGAYALHEKHKAKKDPENEHGHRVMEEVAGPTAVVSRRVRFLRALGETSSA

SEQ ID NO: 340851 - protein, 61 aa, Zea mays
  Clone ID: MRT4577_74025C.1.pep
ASLVRFIKQVSRNSNRIPRNGNASTVYSHNSYHLMQHISDKSFITTRGWQMHWGLPEITLG

SEQ ID NO: 340852 - protein, 162 aa, Zea mays
  unsure (1)..(162): unsure at all Xaa locations
  Clone ID: MRT4577_74026C.1.pep
ADHDFAFDSLDEKSLKEKXKEAXREQNGGPXLAPEIDDXDEDELKDVSSMVVEEIQYLRVGMGHESDSVEDLQKAHDACQDDLMGSPTKKSYGLNGVAGYAGNIHCLANDFESVKKRLDDEGVKALSLDQNINLLTQGYQIRGWXLGSHRQDTLNEMDTVET

SEQ ID NO: 340853 - protein, 229 aa, Zea mays
  unsure (1)..(229): unsure at all Xaa locations
  Clone ID: MRT4577_74027C.1.pep
MARVSNSKKRMLHTNSSSSNKKEEXRPPPTPTPAPRGDDGRPVRVYADGIFDLFHFGHARALEQAKLLFPNTYLLVGCCNDDLTRRYKGKTVMNQEERYESLRHCKWVDEVIPDAPWVLTPEFIEKHQIDYVAHDALPYADTSGAANDVYEFVKKIGKFKETKRTDGVSTSDLIMRIVKDYNQYVMRNLARGYSRKDMGVSYVKEKQLQVNMKINKLRETVKAQQEKLQ

SEQ ID NO: 340854 - protein, 135 aa, Zea mays
  Clone ID: MRT4577_74028C.1.pep
GRDEDNILEASAGQGKAEEKLGDDIYKSEISDQEITARTGATLEGSFEEDISSDQEANDDDEDECHVKSDGESEDTEEQDLEDQQSMPDDVSKIEISEDTVSGDGCKEDFSEEVTSAAVLADDVFEQYDNTVDDV

SEQ ID NO: 340855 - protein, 67 aa, Zea mays
  Clone ID: MRT4577_74029C.1.pep
SAHLRARGELVIRCMFVSLWDVAPMINIGQEIPNYHLSACLPVIFYGAMRYGGQEPSADSRQVRPGQ

SEQ ID NO: 340856 - protein, 65 aa, Zea mays
  unsure (1)..(65): unsure at all Xaa locations
  Clone ID: MRT4577_7402C.1.pep
MRVAAASQLDAQRALMEEQTEKAFLNQPXVFLSSKRSGXGKKPAKGGNRFWKSIGRGFKTPMVAI

SEQ ID NO: 340857 - protein, 56 aa, Zea mays
  Clone ID: MRT4577_74030C.1.pep
LAYSLTIVVLHSHSCSNGFSIMLEHSRVLQCDLHKSYTPPLYRFTVYFDISRISIL

SEQ ID NO: 340858 - protein, 77 aa, Zea mays
  Clone ID: MRT4577_74031C.1.pep
SSWFHHQVAHGHASIWHPPCAGFPGTSRHHVWPSFESTKHRPDICQPRLPSALDSSRFDPTPGSLTPMLRPYAKLHA

SEQ ID NO: 340859 - protein, 196 aa, Zea mays
  unsure (1)..(196): unsure at all Xaa locations
  Clone ID: MRT4577_74032C.1.pep
LGCLKILAIVKVLIWRPSHTIFRKSSIKQSQIYAMKGRYFRDISIVRAGGDSTVPASEVDEVVVYMRFMKAGLRFPLSRFLVEVLKTIEIFLHXITPEAIITMEIFIWAMRSKRLEPSAKCFCNMHELSYETKATGKEHYHNNFGCYGFVPCSDMSYPVQTFRKRWPGAWMKEWFYVKNNLIEREDIKGIIQHPIW

SEQ ID NO: 340860 - protein, 76 aa, Zea mays
  Clone ID: MRT4577_74033C.1.pep
FPLRFLEVVFVLGMGAPFFGMFLFAFFNVAVDVSLCVAGLGHLVLLACWITYCWVVCSSCWGLFYSLAPKPRFLYD

SEQ ID NO: 340861 - protein, 397 aa, Zea mays
  unsure (1)..(397): unsure at all Xaa locations
  Clone ID: MRT4577_74034C.1.pep
MYNLRARVLTTDFLDSYRRDRDAIGMFGKVCDEHEGYFVHEALSIAIDCLQLDIQMRPEMEHVLFRLRIIVARSKLAAGSNNKPSQHIGRALVNNIDKLHPTLISTISMEELNEATGNFSNDVLIGQGPYAECFLGVLKDGQNLAVKRLRTSEEIQVEVPTILRMCYHDNVVQFLGCFLEGGTRVLAYEYAPRGSLHDILHGKMGIKGARPGPPLSWLQRVKIAVSAAKGIEFLHEKVDPRIIHNNIKSSNILLFDNDVAKIGDIGVSIHDAHRRVHNXRVLFCQGTXAPEFAFRRRYSTKSDVYSFGLVLLELLTGRSVFHVATQCGPRSAVRWAKPMLSQDKVEQCIDPRLGGGYLLNDVRKMASVAALCLQDEPEFRPEMSIVVEALSLLLNSK

SEQ ID NO: 340862 - protein, 328 aa, Zea mays
  unsure (1)..(328): unsure at all Xaa locations
  Clone ID: MRT4577_74035C.1.pep
GSNNKPSQHIGRALVNNIDKVHPTLISTISMEELNEATGNFSNDVLIGQGPYAECFLGVLKDGQNLAVKRLRTSEEXSRGHACVLAFLTFAVALFLHLLLCTAKDYLLNYTSVAGSAHFRVCYHDNVVQFLGCFLEGGTRVLAYEYAPXGSLHDILHGKMGIKGARPGPPLSWLQRVKIAVSAAKGIEFLHEKVTLVFXHDAHRRVHNWAEYYSVREHLAPEFAFRRRYSTKSDVYSFGLVLLELLTGRSVFHVATQCGPRSAVRWAKPMLSQDKVEQCIDPRLGGGYLLNDVRKIASVAALCLQDEPEFRPEMSIVVEALILLLNSK

SEQ ID NO: 340863 - protein, 69 aa, Zea mays
  Clone ID: MRT4577_74036C.1.pep
ATQRGKKTIFPPFNYCLGCCKGLYSEQCLGAIIRNGYKVSQTLIKLCVPRNVFSKILKKTPPPSAGWCF

SEQ ID NO: 340864 - protein, 132 aa, Zea mays
  unsure (1)..(132): unsure at all Xaa locations
  Clone ID: MRT4577_74037C.1.pep
KLHLQQRLSIXGQGAKGLXVHIHSLAAESPESCGTSLLGNFRSANIFLYENFVPKIFNVNLSTFLGLSGAQKHTVFSIHYNGPEKYYSDPRDVSGQLLNKKSDVYSFGVVLLELITWKTVRYMYNLXARVLT

SEQ ID NO: 340865 - protein, 100 aa, Zea mays
  Clone ID: MRT4577_74038C.1.pep
MDANRRQGGIQQLLAAEQEAQQIVNAARAEEAEREIAEYRAQMEAEFQRKVAESSGDSGANVKRLEEETTAKIEQLNQQAASISPDVIQMLLRHVTTVKN

SEQ ID NO: 340866 - protein, 83 aa, Zea mays
  Clone ID: MRT4577_74039C.1.pep
LEEARRRGGTKAPLRHRLGTQARPKQTTETRDHGLSSRSTLLSPPVSPAARREAVLFHAHRLDPARHGAATRSASLIHLARQA

SEQ ID NO: 340867 - protein, 86 aa, Zea mays
  Clone ID: MRT4577_7403C.1.pep
MIYLSKSAWLLLWWATIVVLLLLVCYTGTQGGPVTMVSARKCESQSFRFKGPCSRDANCANVCLTEGFTGGVCKGLRHRCFCTRDC

SEQ ID NO: 340868 - protein, 50 aa, Zea mays
  Clone ID: MRT4577_74040C.1.pep
SSDALWFYKHRSCIILILMVDSCFDHRRVLRAAIFTVFGKGGLDALSVPG

SEQ ID NO: 340869 - protein, 108 aa, Zea mays
  unsure (1)..(108): unsure at all Xaa locations
  Clone ID: MRT4577_74041C.1.pep
PFHHEEYHARSPLGRTHKQEHEFLHEKVDPRIIHNNIKSSNILLFDNDVAKIGDIGVSIHDAHRRVHNXRVLFCQGTXAPEFAFRRRYSTKSDVYSFGLVLLELLTGR

SEQ ID NO: 340870 - protein, 52 aa, Zea mays
  Clone ID: MRT4577_74042C.1.pep
MRLELSSGDSGANVKRLEEETTAKIEQLNQQAASISPDVIQMLLRHVTTVKN

SEQ ID NO: 340871 - protein, 110 aa, Zea mays
  Clone ID: MRT4577_74043C.1.pep
MDANRRQGGIQQLLAAEQEAQQIVNAARAAKSARLRQAKEEAEREIAEYRAQMEAEFQRKVAESSGDSGANVKRLEEETTAKIEQLNQQAASISPDVIQMLLRHVTTVKN

SEQ ID NO: 340872 - protein, 76 aa, Zea mays
  Clone ID: MRT4577_74044C.1.pep
AADRHAACQAPFLFLFLIPSLPPRYATYHFPPLFPTTIKLSKIPEQSSPPLLINPIPVSDPHLNPSPSLSHLSFHF

SEQ ID NO: 340873 - protein, 106 aa, Zea mays
  Clone ID: MRT4577_74045C.1.pep
FARQGIITRANISPATRNFILYLALQERAEKKKGNRIQRVPRWVGLKLCAQNFHRKQLLGSRHGGFSVCSSAAKSLHHKFLTVQNLRAAPLIDSRIHGQRALFYRV

SEQ ID NO: 340874 - protein, 209 aa, Zea mays
  Clone ID: MRT4577_74046C.1.pep
KLVLVFFFFEPISFLSKKYLKETSQQEKKSQKKNTAAPSSRATALKLWRSGAALPLRRRASIATACSALKTKLESLVCTATVRRRASSRHHAVPAHERGFPWPRRPEGARAQPHNPSPKARRRRPTVFLLLRGRLGTATRREGALALDPAAASRLARASRQCRRRHRPGVRKKARHGRHRRFGAREQALPPPPLARRAQGSAAIAASLA

SEQ ID NO: 340875 - protein, 142 aa, Zea mays
  Clone ID: MRT4577_74047C.1.pep
PTRPRTRGEKSKNQTEILLELSASQAEQESLRQEIEELKLSLKVATERQIVGGISKSGDAIDVQFELKDEVQFLRESNENLTMQLKKSQDANIELVSILQELEETIEAQRTTISNFTQMSNMIDQDIPTNALSAQEDAEWER

SEQ ID NO: 340876 - protein, 55 aa, Zea mays
  Clone ID: MRT4577_74048C.1.pep
LTQRTAAVREHYTVPWASRTEAFFFANTRLVVMYSQRYQPSMRQGKTPRVRGRVG

SEQ ID NO: 340877 - protein, 35 aa, Zea mays
  Clone ID: MRT4577_74049C.1.pep
DYFTCHRFYYRKLGFLHQALVSISKAVYVWKPNFL

SEQ ID NO: 340878 - protein, 235 aa, Zea mays
  unsure (1)..(235): unsure at all Xaa locations
  Clone ID: MRT4577_7404C.1.pep
MSTDHSKGMEEGKAPNDVHQVDSPADSFSPRTEDVLPAEKEPFGKRFMRTLKTPGSALQIVIAAAIAIAIGMAVTATTSNIPEAAPVILEIPGQLWLRALRATVLPLIITAIILAVQNLKEMAKGGAKLAKFTVLWYVSTTIIAVIHSMILVDLVWKNQMQVVSQGELQEGIEEAQSIQEENPNNAPXRHRGVCRRVLYPLERLRRSRRRPAPRRIGCHRRGSTYQGPGFLAPPC

SEQ ID NO: 340879 - protein, 65 aa, Zea mays
  Clone ID: MRT4577_74050C.1.pep
AGYRLGFAAAFNVFYPTPGVHRWPGFSGPGWLWTGFPSNQERSYKGQGSSWEIPDYLKATSMLLK

SEQ ID NO: 340880 - protein, 93 aa, Zea mays
  unsure (1)..(93): unsure at all Xaa locations
  Clone ID: MRT4577_74052C.1.pep
NTTPLSIVRYAVIRSTMKAYGTLQQMRXMATQNVIHXTYYQGMTVMFGXXEFDPIALAEPSCPVHLWHGDXDGLTPAVLDMYLAXKIGWTXYH

SEQ ID NO: 340881 - protein, 160 aa, Zea mays
  Clone ID: MRT4577_74053C.1.pep
MGISPSKRVDAALRRAPLFAAACDAAFDRCLADAQRRFPGVRRYQLADAAAHLHSELSASVPLVRRWVPSPPPRVRVDAALRAAGLEDEAELSRLQFREFAVELFREAVLAGAADLLRAPAAAAGIVGIGMVARAAPPVVGRIVAVCAASVATAVYLSLG

SEQ ID NO: 340882 - protein, 72 aa, Zea mays
  Clone ID: MRT4577_74054C.1.pep
IRLEATITALVGAVPTTHQGGRLGFLRSILGHPIRRLSLDVGLVATERNDQANCSHVFYYWVYNIVVAVAVP

SEQ ID NO: 340883 - protein, 66 aa, Zea mays
  Clone ID: MRT4577_74055C.1.pep
YLSSRTERSSASLVPSLRPCEWLSSRLILYCCLPHFSLGYPLFESSLLVLLSLPPRCGRLGKPTRP

SEQ ID NO: 340884 - protein, 106 aa, Zea mays
  Clone ID: MRT4577_74056C.1.pep
LEAGRETEPVRNSTGRRRHLAGGRDPVPPLPPRRLDQAAVDLAEAVRLSPENARAHALLGECYEKKGLAAEAREAFKTAASIDPKLGVALDGLRRLDGGNEGDEND

SEQ ID NO: 340885 - protein, 232 aa, Zea mays
  Clone ID: MRT4577_74057C.1.pep
MSAIALGAAGTWPEAVIQCLLFLLAAGMLLALHSLPRRAALRLRRSGAAGGSYAAQSRRHFAQGAQLLARARATAPKPPGPLARAAVAEADRAIALDPRDAAPLILKALALDLQGHRLPALRALDGALAPPLARSLEPRERGDALAKRAEIALALHRRRRLDQAAVDLAEAVRLSPENARAHALLGECYEKKGLAAEAREAFKTAASIDPKLGVALDGLRRLDGGNEGDEND

SEQ ID NO: 340886 - protein, 92 aa, Zea mays
  Clone ID: MRT4577_74058C.1.pep
TERESGESASSRPAPPRVNFTVLTTGAEQWRTRASRVLLGGDRCRAARNCSSAPREFLTVAIVPPRTASSLWLEQYTANAPTSQPLRIQRFS

SEQ ID NO: 340887 - protein, 254 aa, Zea mays
  Clone ID: MRT4577_74059C.1.pep
VAAAPLATKAKTATKEVANPLFEKRPRNFAIGNDVQPKRDLTRYVKWPFYVRLQRQRAILKKRLKVPPAVHQFTRTLDKNTATQALRLLSKYQPESKVEKKARLAAMAAAKAEGKQVETSKPFNVKYGLNHITALIEAKKAQLVLIAHDVDPIELVVWLPALCRKMGVPYAIIKSKARLGALVHKKTATAVALTEVKPEHKQEFASLCQAIKANFNDKFDETRKHWGGGIMGAKSQAKMARRAAIANKDAELRQ

SEQ ID NO: 340888 - protein, 66 aa, Zea mays
  unsure (1)..(66): unsure at all Xaa locations
  Clone ID: MRT4577_7405C.1.pep
XVTLKPSKWCDPPIIVCWSTVVAFVKASWFNGCNRFSCKTVVALRPACFYNANSVSCATQAWGLPL

SEQ ID NO: 340889 - protein, 201 aa, Zea mays
  Clone ID: MRT4577_74060C.1.pep
GIRHELIPTMPRVRFLPLPQPGPGGTDDADPDHRDLVDLVDVKLGHEYELVVTTYSGLYRYRVGDVLRVAGFKNQAPMFKFLRRKNVVLSIDSDKTDEAELHAAVSGAVQHLAPFGASLVEYTSYADAGTIPGHYVLFWELRLRAGDVPVPVPASVFEDCCLAVEEALNSVYRQGRAADRSIGPLEIRVVSDGTFDRLMDY

SEQ ID NO: 340890 - protein, 105 aa, Zea mays
  Clone ID: MRT4577_74061C.1.pep
QDLTGGCLSYQVEWDVELGTALMSMLISVMFVCLFGTLTDSPIFFGSFSTRVRSLFIPHCPLISVTASLPWRLRKSNIVSWWWRSIMREGVIRYSKSTRCLVLTA

SEQ ID NO: 340891 - protein, 100 aa, Zea mays
  Clone ID: MRT4577_74062C.1.pep
TMLILFEQHEDREGSLLCRLEALGTSVAVDCSIWAYAMGVEQRLFSLLPRHEQDIFQLAAAYVTLSCCVCACYTNTCVDGFFRGTLNSRMISLRNLAFPS

SEQ ID NO: 340892 - protein, 49 aa, Zea mays
  Clone ID: MRT4577_74063C.1.pep
RELTVWSRQGKAGKTHKFSAGTYPRLEEYRRGILGDWSNAISALYCRCS

SEQ ID NO: 340893 - protein, 211 aa, Zea mays
  unsure (1)..(211): unsure at all Xaa locations
  Clone ID: MRT4577_74064C.1.pep
MELVLTTPDLPTPLLLSTLTIVSVVVCYVLFWKQQAAARRAPLPPGPRGWPVLGNLPQLGGKTHQTLHEMTKVYGPLLRLRFGSSTVVVAGSAAVAQQFLRAHDANFSSRPPNSGGELMAYNYQDVVFAPYGPRWRAMRKVCAVNLFSARALDDVRGVREREAALMVRSLAEQAHGGLDAPPAAVPVGKAINVCTTNALSRAAXVGRRVFA

SEQ ID NO: 340894 - protein, 100 aa, Zea mays
  unsure (1)..(100): unsure at all Xaa locations
  Clone ID: MRT4577_74065C.1.pep
CFLSLDILGSTKWRVNRKVHDVVETIWSQGGGIARLVDMTPLPERPESEDPDEMQKWKYXIKKAKKTNRELHTERCDTELKLLAARKMREEDGFYYPHNL

SEQ ID NO: 340895 - protein, 107 aa, Zea mays
  unsure (1)..(107): unsure at all Xaa locations
  Clone ID: MRT4577_74066C.1.pep
SLRPDYARVSFVEEANTGDAVRKAPLRHRPDCLLLSAEHVFPPIPSSNLLYYRSAFTLHGVTVRSRKCITRTCPARLDTADIVLGDEAVVPIYVHNMKYMVIXRKVQ

SEQ ID NO: 340896 - protein, 75 aa, Zea mays
  Clone ID: MRT4577_74067C.1.pep
PRVRYHTTVLSVYILRTKLTVMVNLTRDILINNNFNYIFNAHMIHTNMLMNKPLLHLIITILIFINLHAYISYID

SEQ ID NO: 340897 - protein, 344 aa, Zea mays
  Clone ID: MRT4577_74068C.1.pep
MSSSPLITAAASAAVVALAVANRVLYKLALVPLKAYPFFLAQLTTFGYVAVYFSMLYTRYRTGLVTRDMLALPKHRFVAIGLLEALGVAAGMSAGAMLPGPAIPILSQSFLVWQLIFSALLLGRTYSARQVIGCFLVVPGVILAVASGADDGQLLSDVKLIWPALMIASSAFHAGASILKEAVFIDGAKRLKGKRPDIFVVNSFGSGFQAVFVFLLLPFLSNLRGIKFAELPAYLNGGAECFLNVAESPIDCGGAPFLPLLFIVVNMAFNVSLLNLVKMSSAIVASLTATSAVPISIYILSLPLPYIPHGTELSTSFIIGAVILLMGLILYNLPQLSLKQSKAD

SEQ ID NO: 340898 - protein, 142 aa, Zea mays
  unsure (1)..(142): unsure at all Xaa locations
  Clone ID: MRT4577_74069C.1.pep
MEAESRKLLLLAPILLCCFMARSEAQSQHIGVNYGEVADNLPPPDATARLLKSTAITKLRLYGVDAGVIRALAGTGVSLVLGVANGDIPAIAADPNAAAGWLAANVLPFLPXSAISVVPVXNEVLXSGDDALAAALLPDMKN

SEQ ID NO: 340899 - protein, 59 aa, Zea mays
  unsure (1)..(59): unsure at all Xaa locations
  Clone ID: MRT4577_7406C.1.pep
MGVYSFVCRNNGVXGTSKQHSGEIEASAATPYELQRRLVAAASAADSAYCVQSSYLMVT

SEQ ID NO: 340900 - protein, 164 aa, Zea mays
  Clone ID: MRT4577_74070C.1.pep
MALSSNGRGNGPNATVAQRLQKELMDIMTKPTPGITAFPDDENMTKWTATIDGPADTPYANLVFKLSMEFANNYPYSPPTVLYKTPIYHPNVDFSGRICLDILKDKWSAIYNITTVLLSLQSLLGKPNNSSPLNGQAAELWDKDPAEYKRLVLARHKAPEELDA

SEQ ID NO: 340901 - protein, 59 aa, Zea mays
  Clone ID: MRT4577_74071C.1.pep
YSNLVPRYDSPAALAKLYPLSSELQQSHRHCELIRSPCVMLYATYRARTSEFCNGLVTP

SEQ ID NO: 340902 - protein, 535 aa, Zea mays
  Clone ID: MRT4577_74072C.1.pep
MTTPSTAPAPLASLLLRVSAAAVPVARRRPKSPAAAAAARWEGGGGRRRCRAAVVEEAGVLLPKEGEGEEAPDAAAGRYDWREEWYPLYLAKEVPDDAALPLTVFDRQLVLWRDAHGVLRCHEDRCPHRLAKLSEGQIVDGKLECLYHGWQFDGDGKCVKIPQLPEGAKIPRSACARNYEVRDSQGVVWVWMSDANPPDEGKLPWFEPYARAGFTDLSTVHELPYDHSILLENLMDPAHVPISHDRTDWTAKREDAQPLFFDVTERTPRGFAGYWGRTGTPHLRNLLRFEAPCVLTNTLEFADKDGREQCFSAHFLCRPAGQGKSMLLVRFGSTLRSPLAKVLPSWYFHQNACKVFEQDMGFLSSQNEVLLREKLPTRELYLNLRSSDTWVAEYRKWMDRAGHGMPYYFGHSTLSPPPVPAVVEQAPAGAVAGISASFPAKGGVGMVHAPNPTNRYFRHVVHCKSCRATVKKYTSLKTVFAALAAAALSAAILAATRQWKAVLVAASAVLAAASYACDAVLSLITTNFIRTHRRL

SEQ ID NO: 340903 - protein, 71 aa, Zea mays
  unsure (1)..(71): unsure at all Xaa locations
  Clone ID: MRT4577_74073C.1.pep
PHIESXSVSRLPRKKDPCAADLTTISISHSASYKDNCSMSLCLLLGNTDLFAIIIDQRDVNHCLHCSRTNK

SEQ ID NO: 340904 - protein, 60 aa, Zea mays
  Clone ID: MRT4577_74074C.1.pep
GGAHFRNKNRNLYLLRPYRGMCVPKKLFCVFIFTYLNYFRFIYLVCNKHYSPLKKKKKER

SEQ ID NO: 340905 - protein, 84 aa, Zea mays
  Clone ID: MRT4577_74075C.1.pep
RFQARSRSSGNRAGVRLPGNVGISGGMARANPMGAFKEVPLPECSVLLKQLDSYAGDGQCFIPRRCHGLCCTKLQRYIADAWHE

SEQ ID NO: 340906 - protein, 56 aa, Zea mays
  Clone ID: MRT4577_74076C.1.pep
IGGFFTFKGGFNTDLYTTCIYTFNPLNIPRYYGKPKLCGFTTDLTKESHHHTWGAL

SEQ ID NO: 340907 - protein, 78 aa, Zea mays
  Clone ID: MRT4577_74077C.1.pep
SRYSMLIDQAQAIVWQSGMANLTGPCPVSRSLSCCCPTGTAYLPPQPAFTSTMQNTFYAAKITKWTCVQTAGLLALPL

SEQ ID NO: 340908 - protein, 67 aa, Zea mays
  Clone ID: MRT4577_74078C.1.pep
AVTKVETFMGAWWGSMGTIASHGACTGPGRSGTFGGITSPVSEFVFKHVPNFIYELGGSLRPFKIPK

SEQ ID NO: 340909 - protein, 224 aa, Zea mays
  Clone ID: MRT4577_74079C.1.pep
MCLGWSARSLPLPIRAQQTHGFRGSLGLAAVIQGVWLLDGLYKSVVTYSPHPIQVPPLLIIRAFCRARRNRVGNRGPVHADKAGVAAAIHPRLHRSAFKDSVEMGLRDHNEASVDIRGCGSNQNHGKFRIAGAHSRGASLTVASIQLYLKCGKKASTEFAAISSTHSARESRIECCGHWIGNALAIPRRGVLYAAGGSADGEKKLGGPLDRQWMGEGSRTGDPS

SEQ ID NO: 340910 - protein, 90 aa, Zea mays
  Clone ID: MRT4577_7407C.1.pep
YINIHAEREHCVDSYYYCYDRTITHVCLRFAGTQGGPVTMVSARKCESQSFRFKGPCSRDANCANVCLTEGFTGGVCKGLRHRCFCTRDC

SEQ ID NO: 340911 - protein, 57 aa, Zea mays
  Clone ID: MRT4577_74080C.1.pep
VCPLFVFHITPFRYTYRRRLVCVYGIRGNTYGIITALYVCFWRCERVVSVGILLGIG

SEQ ID NO: 340912 - protein, 251 aa, Zea mays
  Clone ID: MRT4577_74081C.1.pep
MAGVGATVHALSPRQSGTKTEKKRKKENRLGAKTLAVAQLTISFPRRAAQGVWLLDGLYKSVVTSSPHPIQVPSLLIIRAFCRARRNRVGHRGPVCADKAGVAAAIHLRLHRSAFRDSVEMGLRDHNEASVDIRGRGSNQNHGKFRIAGAHRRGASLAVTSVQACLKCGKKASAEFAAISSTHSARESRIECCGHWIGNDPAMPRRGVLCAAGGSADGEKKLGWLSNRRWTAKNRSRIPLRVIESKPFVCN

SEQ ID NO: 340913 - protein, 57 aa, Zea mays
  unsure (1)..(57): unsure at all Xaa locations
  Clone ID: MRT4577_74082C.1.pep
TLSQHKRPLRRKKHPLPKNGGIGVHVXLRFXGLVKFGSHVEWKSDGAKDHLSCFMNK

SEQ ID NO: 340914 - protein, 41 aa, Zea mays
  Clone ID: MRT4577_74083C.1.pep
TQQRGSIKVHAVRSYMRVATLGEWLLIWLLHPHLEICKLLI

SEQ ID NO: 340915 - protein, 54 aa, Zea mays
  Clone ID: MRT4577_74084C.1.pep
FCNARPRLSIILHMWATLVQRNAVESSTICTSSNLKSELGVDLERDVDRLQRMR

SEQ ID NO: 340916 - protein, 93 aa, Zea mays
  Clone ID: MRT4577_74085C.1.pep
MQIEASRLWPPADDALIEILPGRAAIWEFTLQEPVVPMDKVFEGATVQLKGMWNAVWTKEKKNVDYTSFAEGTPANETLTGPFKSNIIDIEVV

SEQ ID NO: 340917 - protein, 199 aa, Zea mays
  unsure (1)..(199): unsure at all Xaa locations
  Clone ID: MRT4577_74086C.1.pep
QQXHXPXXAARXEXPXXQXXRXQEAXTASXXRXXAXTXQQPXFLLQQXCLVNLFLQRITAQQLQQRXLLTINQVVAANLAAYLEEQQWLACNQLAGVNPAAGWEGQQVLPLNQLGGSAAGMWRGEQGLPRAGQEGGDMGGGGGQQQGLGWGPKGGGNRNAXGDKQEGGAGTAGGGEGGGWGQGGGGGAAGGGRGVRVGG

SEQ ID NO: 340918 - protein, 84 aa, Zea mays
  Clone ID: MRT4577_74087C.1.pep
PIVLRYCSPTSSTSCIHALRSTISFQTTIAPPPRRVVCAGVPKWSHLPCYSSSITISLVIRTAHTGVCTWFNHYHLDALQPFKT

SEQ ID NO: 340919 - protein, 35 aa, Zea mays
  Clone ID: MRT4577_74088C.1.pep
IIAVLLGMESRVQAQWTIIIKHRLCLRKCCCKNVQ

SEQ ID NO: 340920 - protein, 57 aa, Zea mays
  Clone ID: MRT4577_74089C.1.pep
KYFWLKDICEIGFEKQYVPRFRVFSVAKKFCILVPPTFLFQPFPDLPKKNMPKKVYN

SEQ ID NO: 340921 - protein, 78 aa, Zea mays
  Clone ID: MRT4577_7408C.1.pep
MGGLSTKLFVVLFLLVCYTGTQGGPVTMASARKCESQSFRFKGPCSRDANCANVCLTEGFTGGVCKGLRHRCFCTRDC

SEQ ID NO: 340922 - protein, 54 aa, Zea mays
  unsure (1)..(54): unsure at all Xaa locations
  Clone ID: MRT4577_74090C.1.pep
THTSTXXYQLLNPSSGPTLSLRNANLRHSDICCSHDVTSRDTVDEDFRDFEAAW

SEQ ID NO: 340923 - protein, 67 aa, Zea mays
  Clone ID: MRT4577_74091C.1.pep
KVPRPKIIEFIENAMKIINMLIHPEEDEDKPDANSDAVKVSFMLTIFVFIVVDIARTNYERWDNKVW

SEQ ID NO: 340924 - protein, 283 aa, Zea mays
  Clone ID: MRT4577_74092C.1.pep
GHHHQHSQGQCNAASEKVALATAKIFIDLGLKDAGYQYINIDDCWSTRQRDSKGNLVPDPSKWPRGIKPVVDEIHKMGLKFGLYGDRGVKTCAGFPGSQGHEKQDADLLASWGVDYWKYDNCYTPCYNGNQADIQTCPIGKGPSSRPGYELMRDMLRNTGKDILYSLCNWGWDEVWTWGASVGHMWRMSVDNWGKWDDVVRIANQAAPILKYTQPGRYNDLDMMILANGALKPAEERTHFAIWAITKSPIILGTDMTKINSAEIKLITNKGLLADNQDSLSKP

SEQ ID NO: 340925 - protein, 166 aa, Zea mays
  Clone ID: MRT4577_74093C.1.pep
MRRDAVAAAPTAAGASPPIPATVLPTDAVVIDVEGEPLPAEAPGLGCRICHLGPEDDESAVPGSEVMLLGCGCKDELGAAHQQCAEAWFRIKGDRRCEICGSDAKNITGLEVKKFMEQWHGRRVAHAQTTEERESHCWRQQPFCNFLLASLLIVFMLPWFLRVNLF

SEQ ID NO: 340926 - protein, 205 aa, Zea mays
  unsure (1)..(205): unsure at all Xaa locations
  Clone ID: MRT4577_74094C.1.pep
PTPTGRXHKGXXRRGLXXXIXAEQSPECSXXPIFIRASNFKLPSNPSTPVVMXGPGTGLXPFRXXLQERMALKXEDGVEXGPSLLFXXGCRNRRMDFIYXEDELNNFVDQGXNIXSSSVAFSRRRSXRXEYVQHKIHXKAAQFWNLIXKEEGYLYVCGDXAKGMAKDVXRTLHTIVQEQXXVSSSXXEAIVKKLQTEGXXLRDVW

SEQ ID NO: 340927 - protein, 67 aa, Zea mays
  Clone ID: MRT4577_74095C.1.pep
ATTKPCKMNRKNLLIDHRTKLRFYLHKAHLLASEAHDSQMHLEGETLFTSLKSDKLPRTYIFFNSHR

SEQ ID NO: 340928 - protein, 60 aa, Zea mays
  Clone ID: MRT4577_74096C.1.pep
AFFKMRKSRTKLTLMMLRYIMPSAMLTTATFKVHDALRASRYTTGTLISELYNITPGANA

SEQ ID NO: 340929 - protein, 131 aa, Zea mays
  Clone ID: MRT4577_74097C.1.pep
YLICELCVHFDIKFIFYGKGPTTVACYWGPRVSLGRCTAALAWRTPKKKKKKKKKKKKKKKKKKKKKKKKKKKRPQKKKKKTKKKKKKGPKGPAPSKIRGPPGRQDSNSRFFKTGTPGGGPGTNFPQKGEI

SEQ ID NO: 340930 - protein, 60 aa, Zea mays
  Clone ID: MRT4577_74098C.1.pep
MLHRMNNQSENAQVVKYKPGLNFWGETQMSNWIFNRKAQKFYWPIILFVHHPEHFFSNIL

SEQ ID NO: 340931 - protein, 58 aa, Zea mays
  Clone ID: MRT4577_74099C.1.pep
QLATTTCTCTARTHRAILLHVALTATNLMRPEHSVLRDRTRTPILQHQLALVAKGLHT

SEQ ID NO: 340932 - protein, 69 aa, Zea mays
  Clone ID: MRT4577_7409C.1.pep
EPGSPSSYFGGVGCPLKYKDTLLCSAARKKTLSQPRGGSAPSRMRSKIPLSRPKKEAGKGEGVFFDEDR

SEQ ID NO: 340933 - protein, 45 aa, Zea mays
  Clone ID: MRT4577_740C.1.pep
GKKKRTMSHTYGVLLLHDIKKMQITHHISSTLLSQHNMVVSGRVG

SEQ ID NO: 340934 - protein, 100 aa, Zea mays
  unsure (1)..(100): unsure at all Xaa locations
  Clone ID: MRT4577_74100C.1.pep
GAAGTPLTPTERTXIAIHSVKMRSXDEQIKNRVERLXIEEEVRLELALERPRLHGGFXPXLFFGTDGFVVLVQSKFLPLGRLYRDDGLLMTLVMFWDDSS

SEQ ID NO: 340935 - protein, 123 aa, Zea mays
  unsure (1)..(123): unsure at all Xaa locations
  Clone ID: MRT4577_74101C.1.pep
SSNPTSFSGSLSERRIHAQMTLKHQWPLDAERIWASRSFRIFRADPYTASDPELNLVRPSPGHGLDAILXQGAAGSEPGFTLGVDPHRMVSWSLGDASLFYCCSVHVLRSSASIPTSFVCPRA

SEQ ID NO: 340936 - protein, 887 aa, Zea mays
  Clone ID: MRT4577_74102C.1.pep
MHVTVTCKAASIGNIEREMRVAMVGSGLSGLVAAHELARSGGVRVTVYEKEDHLGGAKTVAVDGGAEEGRVLVDLGPVVFNPVTSPNLMEWFERLGVEMCTSDMSFSASMRLNKSSESFEWGSRSGMSGVLAQKSNLLSPRFWLVVHEIFKFKNHALKYLEDHRSGPNRNETLGQFILSHRYSQLFQDAYLIPMCACIWPSPSHEILGFPALFVLSFFRDNQLLEILSGSKWLTVKGGSGSYVNKIREELESNGCQIKIGCEVNSISKSNDGYQILEVDGSVETYDRIIIGINAHDALKVLGAEATNEELKNLGAFHFIRSIAYLHSDESLMPRNSSAWSARNFLGTTSSGVCVTSWLNILENIESAGPLLVTLNPPRVPNHVLLKCHISHPIPSIAAAKANLQLNSIQGKRGIWFCGSYQGYGYHEDSVKAGKAAALGLLGRKCDLLSNPKPMVSSWTEAGARLLVARSLDQYITIGNFCILEEGGTTFSFGKACEKCHVKSAIRVHDPQFYWKAATEGDLGFASAYINGQISFVDHRKGLVNLVRIILANRGEFKRLSSTASGNTRKAWWSPLLGITGVSFAKYFLRHALRKNSVSKARKNISEHYDLSNDFFALYLDPSMTYSSGIFKVAEESLETAQLRKLDSLINKAKVEPGHHVLDIGCGWGTLAIRLVKQTGCKYTGITLSEEQLKYAKRKVKESGLEDRITLLLCDYRQLPAGDKFDRIISCEMIEHVGHEYMDDFFGCCEYHLAEHGLLVLQSIALPEELYDKMRMRPEFLKTYIFPGGCLPSLGRIVSAMSNASRLNIQHLENIGDHYYTTLMNWRDNFVANREKASALGFDDKFIRTWEYYLSYAAALFKSRTAIDYQIVFARPGDSKLPSYVAIA

SEQ ID NO: 340937 - protein, 68 aa, Zea mays
  Clone ID: MRT4577_74103C.1.pep
ALTTRINMSACSAGYCFGCSFLLGKIDQHEGSKPPEDIPADRRNTESPPSKKEVQRYSYLNLSIKQFL

SEQ ID NO: 340938 - protein, 61 aa, Zea mays
  Clone ID: MRT4577_74104C.1.pep
TKTGTKAPIATFGVQKNKSFLSPHFVSFYLKIQKSGFFCKANSHETPVPMGPKFKLNKVSN

SEQ ID NO: 340939 - protein, 51 aa, Zea mays
  Clone ID: MRT4577_74105C.1.pep
GDFQCFFYLQECPQEAWSLHAGQSSQEERCIETSNASSLSSAESATETVAS

SEQ ID NO: 340940 - protein, 60 aa, Zea mays
  unsure (1)..(60): unsure at all Xaa locations
  Clone ID: MRT4577_74106C.1.pep
GTSPLYVFYNIFPHGIDEDEDVIGALLLIIXYTLIPLMKYVFVVLQANDNGPNDYSWRFF

SEQ ID NO: 340941 - protein, 96 aa, Zea mays
  Clone ID: MRT4577_74107C.1.pep
LHRIKGATHERRPRQVTEKPRTPPRSHLGPLVNPLRGKFCSGSKLPYPVPCNDPVKEIFWECNSTWDPLPLPVTYKYPYLVHRWDTHNKTLQFPAP

SEQ ID NO: 340942 - protein, 66 aa, Zea mays
  Clone ID: MRT4577_74108C.1.pep
SGQSSQEERCIETSNASSLSSAECNRQFILTVFYKHMSVVVRKKVATTEICNRIMSVLRNMLFLIC

SEQ ID NO: 340943 - protein, 302 aa, Zea mays
  unsure (1)..(302): unsure at all Xaa locations
  Clone ID: MRT4577_74109C.1.pep
MDSLWHLGDELRGQPKVVEDRQWSLMTSKLAEITRSKGERMNTVPDAKQWDKTSYQLHDDSRMGHIGLMNLXDLKMNEAAAMKLPFRGMPYNMNQMYLKGSNANSNVNAFKMNVGVNKYSNSPNGKDANGKNNGGNNNNGSANGTSVADKRFKTLPTSEMLPRNEVLGGYIFVCNNDTMQEDLKRQLFGLPARYRDSVRAITPGLPLFLYNYTTHQLHGVFEAASFGGSNIDPTAWEDKKCKGESRFPAQVRICIRKLCKPLEEDSFRPVLHHYDGPKFRLELSIAETLSLLDLVPETSCGE

SEQ ID NO: 340944 - protein, 78 aa, Zea mays; identical to SEQ ID NO: 340800
  Clone ID: MRT4577_7410C.1.pep

SEQ ID NO: 340945 - protein, 66 aa, Zea mays
  unsure (1)..(66): unsure at all Xaa locations
  Clone ID: MRT4577_74110C.1.pep
MGGILSRGLLLAFGYGYPAYXCYKTGGLNKPNIAQVIFSSQXWTLGPLLTAFERFGNMPTSWIPSY

SEQ ID NO: 340946 - protein, 187 aa, Zea mays
  Clone ID: MRT4577_74111C.1.pep
MPEKEPGADVPAEQILGFSSFIKSLADMTGDLSSMTAPPFILSPVSLTEFPAYWCEHPDLFAAISAGATPQDRVERVLKWFIATLKGQYTTRNEKMGSEKKPLNPDLGELFYGTWPDANGRGETVLVVEQVSHHPPVTAYFIENKTAGVSLQGHSGQKTSFSGTSINVKQSGHAPLTVKPRSRGQET

SEQ ID NO: 340947 - protein, 125 aa, Zea mays
  Clone ID: MRT4577_74112C.1.pep
ALTTRNNMSACSAGYCFGCRLIKFSSKAGSKWCCLKLMEKNFKANCSCACAYVFTVFIFPIISDPTIHQGFNVHGQTTRTSRTGIDETSCCTCNCRNGSFIYTPNLSLGSMLTTVVILPRLRLGV

SEQ ID NO: 340948 - protein, 226 aa, Zea mays
  unsure (1)..(226): unsure at all Xaa locations
  Clone ID: MRT4577_74113C.1.pep
MDNLWHLGDEFRGQSKVVEDRQWSLMTSKLAEITKSKAERMNDFEYARMNTVPDVKQWDKLSYHQEDNKMDHLNLGLMNLDLKMNDLKMNEAAMKYPFRNMAYNMNPMYPKGNNGNVNSFKMNVGVNKYPNNQNGKETNGKHNGGNNNNGGNSNNNSVDKRFKTLPTSEMLPRNEVLGGYIFVCNNDTMQEDLKRQLFGLPARYRDSVRAITPGLPLFLYXYTTIQ

SEQ ID NO: 340949 - protein, 103 aa, Zea mays
  unsure (1)..(103): unsure at all Xaa locations
  Clone ID: MRT4577_74114C.1.pep
MLMASMSDIETTKRGSMWGLDQNLDQPKDKDVSQLKDMYXDKGTSPLYVFYNIFPHGIDEDEDVIGALLLIIXTLTLIPLMKYVLVVLQANDNGQDDYSWRFF

SEQ ID NO: 340950 - protein, 366 aa, Zea mays
  unsure (1)..(366): unsure at all Xaa locations
  Clone ID: MRT4577_74115C.1.pep
MDTWTTCLLSFLPSIPPCLRPLLTPVGRGAAADCWDCPTPSAQVIFGPFAGDEHHQVCQVDRAMDSLWHLGDELRGQPKVVEDRQWSLMTSKLAEITRSKGERMNTVPDAKQWDKTSYQLHDDSRMGHIGLMNLXDLKMNEAAAMKLPFRGMPYNMNQMYLRGSNANSNVNAFKMNVGVNKYSHSPNGKDANGKNNGGSGGNNNNGSANGTSVADKRFKTLPTSEMLPRNEVLGGYIFVCNNDTMQEDLKRQLFGLPARYRDSVRAITPGLPLFLYNYTTHQLHGVFEAASFGGSNIDPTAWEDKKCKGESRFPAQVRICIRKLCKPLEEDSFRPVLHHYDGPKFRLELSIAETLSLLDLCGKEGI

SEQ ID NO: 340951 - protein, 303 aa, Zea mays
  Clone ID: MRT4577_74116C.1.pep
MDSRGFDSAGRIFSSATEMWTEELGSSITASTAGEAEFTPAPAAAAEASEEGGGDGKRKEWYSKAIAYWQGVEASTEGVLGGYGCVNDADVKGSDAFLRPLLADRFGTAKRHLVALDCGSGIGRVTKNFLLGHFNEVDLVEPVSHFLEAARENLTGCMDQGEDSHKAANFYCVPLQDFTPEEGRYDVIWIQWCIGQLPDDDFISFFNRAKVGLKPDGFFVLKENIARNGFVLDKVDNSVTRSDAYFRDLFKRCGLYILSVKDQKELPKELFAVKMYALVTSQPKIQNSGKRRRPRNSPRMIRS

SEQ ID NO: 340952 - protein, 91 aa, Zea mays
  Clone ID: MRT4577_74117C.1.pep
FSIAGQEPLIHTVRRCISVSSQWREVIVSLTISECLELNIRGSTRNCCTTSEQIWVRELSSQRHVRLCSPAPHNGYGGLNRNCVHEGSHAQ

SEQ ID NO: 340953 - protein, 303 aa, Zea mays
  unsure (1)..(303): unsure at all Xaa locations
  Clone ID: MRT4577_74118C.1.pep
SRPAPAAAAEASEEGGGDGKRKEWYSKAIAYWQVKRPLFLLPEALNPKPPIQMFIHAFGFSLEFGRFGVXGVEASTEGVLGGYGCVNDADVKGSDAFLRPLLADRFGTAKRHLVALDCGSGIGRVTKNFLLGHFNEVDLVEPVSHFLEAAQENLTGCMDQGEDSHKAANFYCVPLQDFTPEEGRYDVIWIQWCIGQLPDDDFISFFNRAKVGLKPDGFFVLKENIARNGFVLDKVDNSVTRSDAYFRDLFKRCGLYILSVKDQKELPKGLFAVKMYALVTSQPKIQNSGKRRRPRNSPRMIRS

SEQ ID NO: 340954 - protein, 160 aa, Zea mays
  Clone ID: MRT4577_74119C.1.pep
LILARRRPPPRLRRGADRTDEVSVRRFSCLGLGKRTCTPNHAWRDLCGQMWVRVFCGQKGGREGGGAAAFSAVQPPAGLYVRRWLIRDVCLPFRPPRCGRAGAIPVFMRCYERQSTIRVWFFFLRPWPPRSSTHEHERRKRYVLLYRCSTEFSSILYIFL

SEQ ID NO: 340955 - protein, 206 aa, Zea mays
  Clone ID: MRT4577_7411C.1.pep
MAKLPRLPCPFAVLALMCIIPLTAPRPALSSRTAPRDGVSFAGAGNTIHQLLKDHGLPGGLLPRGVESYTLDESTGLLEARLSAPCYATYDNGELAYFDNVVRGNLSKGALRGVEGLSQEELFVWLPVKGILVQDQEPGVILFDIGLAHKSLSRSLFEDPPDCKPSASGGMSAAAAARREGTQGVTGLRLRREMAAAGSDQSQEQR

SEQ ID NO: 340956 - protein, 71 aa, Zea mays
  Clone ID: MRT4577_74120C.1.pep
NYVQKNTTAVDAPIILWPGSCFLGPYPYTPIAKCSMSLYRHLDLNPFRGDLQIPPWRPGTSRARQEHLGRA

SEQ ID NO: 340957 - protein, 116 aa, Zea mays
  Clone ID: MRT4577_74121C.1.pep
MWEEDGEPDASSSPRKETDPRDAAPERKKARFMIPKSAQVDSEVRRELQELMDAREAGMSFILGRSYMKAKSGSGFVKRVVINLLYEFLRKNSRGPAYAASIPHASTLEVGMVYQV

SEQ ID NO: 340958 - protein, 189 aa, Zea mays
  Clone ID: MRT4577_74122C.1.pep
DPRGPQGLHRPKFGGEVLDDVAAIGSSDDGVQLRGPGCRRRGRRPRPAPRQRARRLHQPRPLRLCRPQKDMDSIVETMMRQLLSKEILHEPMKDIVEKYPKWLEDNKNKISKEEYERYNNQLELMVKLIEVYENDPENMTKIFDIMQNMQECGQPPSDLVQDTVPDLDLSKLGQLSPEMLESAPNCCVM

SEQ ID NO: 340959 - protein, 253 aa, Zea mays
  Clone ID: MRT4577_74123C.1.pep
MASSNSAAPAPADGGDDLDQLLDSALDDFTSLDLSASAAPKSAGEASGSGSGGKGPVKGLGLGLPDPKAPKRRAGKQPPPRGACAKEALEELTRETREAVRELETATGGVPSLDDDAMMEEFVKQFEEFAGAQDMDSIVETMMQQLLSKEILHEPMKDIVEKYPKWLEDNKNKISKEEYERYNNQLELMVKLIEVYENDPENMTKIFDIMQNMQECGQPPSDLVQDTVPDLDLSKLGQLSPEMLESAPNCCVM

SEQ ID NO: 340960 - protein, 253 aa, Zea mays
  Clone ID: MRT4577_74124C.1.pep
MASSNSAAPAPADGGDDLDQLLDSALDDFTNLDLSASAAPKSSGEASGSGSGGKGPVKGLGLGLPDPKAPKRRAGKQPPPRGACAKEALEELTRETREAVRGLETATGGVPSLDDDAMMEEFVKQFQEFAGAQDMDSIVETMMQQLLSKEILHEPMKDIVEKYPKWLEDNKDKISKEEYGRYNNQLELMVKLIEVYENDPENMTRIFDIMQNMQECGQPPSDLVQDIVPDLDLSKLGQLSPEMLESAPNCCVM

SEQ ID NO: 340961 - protein, 103 aa, Zea mays
  Clone ID: MRT4577_74125C.1.pep
VESELMDMYSKCGLMEDALRVFRSGQDPDEVSLTVILAGFAQNGLEEEAFRLFAEMVGKGISVDANMVSAVLGAFGASAPFALGKQIHALAVKRCFGGNTYVC

SEQ ID NO: 340962 - protein, 147 aa, Zea mays
  Clone ID: MRT4577_74126C.1.pep
QRVCCFFSLNLDGETELRIQFRHGRGMMNQLVFFLVLLLGFLRLRWWHAQSSSFPHSAQPRSISVPLNSLSVSSVGALGVGFMTWMDEFSEFPLPLWMFLPLEESQALFPLLLPPFFMWFYLCCVAITYYCTPSAFSTKEILKKKKK

SEQ ID NO: 340963 - protein, 79 aa, Zea mays
  Clone ID: MRT4577_74127C.1.pep
NVRYEAGADCARLCIGDVDNEEDLAALVPQQDHGDPPLHPQPPLCHAAIRDIPQVVLYTRTPPSEVTANETMPIHHVYY

SEQ ID NO: 340964 - protein, 148 aa, Zea mays
  Clone ID: MRT4577_74128C.1.pep
MFGLQASGAAASWVVGRMGTDAHLYDDPDDASIPELLDSRFDVDVAHLFPQVVKNVASQSLEVKKLVYLYLLHYADKRQNEALLSINIFQKDLSDINPLVRAWALRTMAGIRLHVVAPLVLVAIKKCARDPSAYVRKCAAYALCKLCD

SEQ ID NO: 340965 - protein, 61 aa, Zea mays
  Clone ID: MRT4577_74129C.1.pep
KGQQDMAGGSGSSSGNNHNKAGGHKYEAIAFRPLWLINRGPELVTCSDPCKCHACLGINFI

SEQ ID NO: 340966 - protein, 63 aa, Zea mays
  Clone ID: MRT4577_7412C.1.pep
VDSQTKHTISVLVSSLRLQWQYICCISILSECDSLWLVSAHDNFVTITGYEFDVKSVCPLAPA

SEQ ID NO: 340967 - protein, 137 aa, Zea mays
  Clone ID: MRT4577_74130C.1.pep
TALSPALPLPLPQVHYRKPLELWSRTSTVSRSAYKEPTRLTAFDIRPPSRPLSPVSRPPDPALDYRHFPLSRTRALLSEMTRWLRKSLVSAVSRESLEEGTAFSNGVGLYDDHAGDHVGEVDHWRSGELQHGLEHQD

SEQ ID NO: 340968 - protein, 49 aa, Zea mays
  Clone ID: MRT4577_74131C.1.pep
CCCVCFQWRGTIEYILEISQPLTIRELLSSWLISSSQVVNGWVNASIYS

SEQ ID NO: 340969 - protein, 89 aa, Zea mays
  Clone ID: MRT4577_74132C.1.pep
PRHIQVKRLNGRVARTQSAEEDAEVFAELLLAPAVTTSKGAITCAKESSDIAPSLSYASGKETGPSATCRTGAKNLKSTARNDADMRDG

SEQ ID NO: 340970 - protein, 167 aa, Zea mays
  Clone ID: MRT4577_74133C.1.pep
IPGALKMLNSGGRVIHRYFVAMQKGAIPMGNSLFRQVSSLVRRLPVSESQKFQDGFLMEFNAPLLMASLAMFPNCSSPMNGLVGKIPPSFEGPPPRRGGRGAFLWLPCHDPAAAFFCGGFSGVAYVPGHFFACNFSWAMGFSAALGSLQPFLAKLMICWNCFRSPLC

SEQ ID NO: 340971 - protein, 78 aa, Zea mays
  Clone ID: MRT4577_74134C.1.pep
NQRVARKKCQSSHRVLAVSFSHRARQVSLLFSGHWARTCSCVSARSLGSAGLPLVAHDFYVVWKCHLCTFSHRYQLLP

SEQ ID NO: 340972 - protein, 110 aa, Zea mays
  unsure (1)..(110): unsure at all Xaa locations
  Clone ID: MRT4577_74135C.1.pep
FLPIVKNRGHDNRKSVYRDMYGDKIFPLTTTFLSIXLARLRLRLCLHSLRPLPPTDAAWGRSERRRFLFHILPLYMIHMTFPVLVKESLYQRIHLNCHIVRVGWLILIGR

SEQ ID NO: 340973 - protein, 107 aa, Zea mays
  Clone ID: MRT4577_74136C.1.pep
GYTHFGARSGIRKKKRCDHLDSGLHDYRDRRRHISTVKSTLLYRNYALKSRQFFDFYQPLLLRVTEHEGTSKTPLRKHGVASLHRKKRQNTRGERDQSQRRERHNLD

SEQ ID NO: 340974 - protein, 51 aa, Zea mays
  Clone ID: MRT4577_74137C.1.pep
VMIRRIAKGQAQDFSLAGSHSITGCFVFGRLVLFSLWERHIFKLFKVLAYA

SEQ ID NO: 340975 - protein, 96 aa, Zea mays
  Clone ID: MRT4577_74138C.1.pep
PAYAPKSLTTLPVLSLMDQPADPTLLTPWVLLNAAFYFSPVKNPLTSSLAEWKNISASCKHDIKMLFPSPLTCLKDGPTDLLGTLTQTQAVGLFID

SEQ ID NO: 340976 - protein, 50 aa, Zea mays
  Clone ID: MRT4577_74139C.1.pep
IISIGYGLRLMRRACPPALNTIHSCTNLGPATTWVRKPYVLSVLWQVLPV

SEQ ID NO: 340977 - protein, 209 aa, Zea mays
  Clone ID: MRT4577_7413C.1.pep
MAKLPRLRCPFAVLALVCILPLFAPRPALSSRAAPKDGVSFAGAGNTIHQLLKDHGLPGGLLPRGVESYTLDESSGLLQARLSAPCYAKYDNGDLAYFDNVVRGNLSKGALRGVEGLSQEELFVWLPVKGILVQDQEPGVILFDIGFAHKSLSRSLFEDPPDCKPSAASGMSAAAAVAAARWKGRQGVITGLRLRREVAADSDEHQEQR

SEQ ID NO: 340978 - protein, 56 aa, Zea mays
  Clone ID: MRT4577_74140C.1.pep
SCSEHCLAAYGLSLELEKFYGCPIQHEPCAGELMKDTVPFIYIYIHIYKGKRLPST

SEQ ID NO: 340979 - protein, 61 aa, Zea mays
  Clone ID: MRT4577_74141C.1.pep
NLSTVIYTSRFIYIENKQAAIKANSTKVSAIDSCSLVQNRDDSIARMWCQSSIRRPVHIMR

SEQ ID NO: 340980 - protein, 154 aa, Zea mays
  Clone ID: MRT4577_74142C.1.pep
MSGNYLDLAPTEQLVVDHVLEKLMVITPDVASQSDFQLHSKVPHRLRLTQVLGRGSCYSWEPEYLGASQNCMGLGSCGKHMYSVHIPEVVYFGSLHGLHIGLSYSGSLRASDIGLEHLDSLNGFHVGFLLDSGNFERCRVSVHVLCCLQYAHLC

SEQ ID NO: 340981 - protein, 115 aa, Zea mays
  unsure (1)..(115): unsure at all Xaa locations
  Clone ID: MRT4577_74143C.1.pep
MDANGASSKAKNGAAGRKAGGPRKKSVSRTVKDGMQFPVGRIGRYLKKGRYAQRVGTSAHVXYLAVVLEYLADEVLELDVNASKDNKKTRIVPCHVLLAIANYVELGALLSGVTI

SEQ ID NO: 340982 - protein, 385 aa, Zea mays
  Clone ID: MRT4577_74144C.1.pep
MIELEEHGSSHHKEGGLNLVPTLESEKFSEDESKLYQRLLNVRMKIAQDIGTAPYAVCGDQTIRNFAKMRPSTGARLANIDGVNQHFISRFSNIFIQNIAELSKELNLPLDNSPFPPPPPTNPAAENIAGIPKPVQNNLPGILGDAKLTAWELWHKQEYSFLKIAYFRRAVPIKEQTVIAYILDAAREGCEMDWSRFCREVGLTPDIATAIRLAISKVGSREKMKPIKEELPENVTYDMIKTFLTIEGCGLSEQVFGNGTADGVSSRIAESPISSCRASEAGGNGVPAVAEASDANPSAKRGQTVCAEEPATKLQRTDEHGAELTGTATATVDSVLDLVASCNGVSLEDVAKHFKGSKRESVLEILEGLESEFTIYKKNGNYMVL

SEQ ID NO: 340983 - protein, 39 aa, Zea mays
  unsure (1)..(39): unsure at all Xaa locations
  Clone ID: MRT4577_74145C.1.pep
RAQLAVRPPRLPHTGPGIRATAHVVQGRIPVXDVRREPQ

SEQ ID NO: 340984 - protein, 111 aa, Zea mays
  unsure (1)..(111): unsure at all Xaa locations
  Clone ID: MRT4577_74146C.1.pep
DICMNTPSPDLRTMTAEKHANKYNVVYSATGLDIQVDAFKNRVKAELPLSNEEVKTAPTPQARRXLNLCKTYYLDALYNLSACKRSIGXRHAFTIRATMSMVAQDTHNCYE

SEQ ID NO: 340985 - protein, 80 aa, Zea mays
  Clone ID: MRT4577_74147C.1.pep
PAKYSVSVTAPAGMKVTVSPTALSFGGKGSKQPFTVTVQVSKVKRNSNDYNYAGNYGFLSWNEVGGKHVVRSPIVSAFAQ

SEQ ID NO: 340986 - protein, 60 aa, Zea mays
  Clone ID: MRT4577_74148C.1.pep
IQSCCNLMLNWAIVHITMRTDMASVTKSSSNREIASNNIRPTYMGNFVGEKMKTNFLASF

SEQ ID NO: 340987 - protein, 217 aa, Zea mays
  Clone ID: MRT4577_74149C.1.pep
MGGRVDHEYSYLFKMVLIGDSGVGKSNILSRFTRNHFSLDSKSTIGVEFATKSLQMDGKTIKAQIWDTAGQERYRAITSAYYRGAVGALLVYDITKRQSFDNVHRWLRELRDHADSSIVIMMVGNKSDLIHLRAISEDEGKALAEKEGLFFLETSAMEAINVEQAFQTIMTEVYGIVNRKALAAKEAAAATASLPSQGKIISIDSTAGNTKRACCST

SEQ ID NO: 340988 - protein, 67 aa, Zea mays
  Clone ID: MRT4577_7414C.1.pep
CKIILEVAKSLVEVVAWIRRVCMFMALGIGGGADEGTHADHAWYVHVFRVASQLSASHDMSFSASLS

SEQ ID NO: 340989 - protein, 89 aa, Zea mays
  Clone ID: MRT4577_74150C.1.pep
HFATQAKPRPPAFLIVGVCLCISTRVQAGARTYVFFFSLIWPPSLFRVCVFVLIKMFLWSSSGQACPRWSGMFIMCAPPSRSVRINPFF

SEQ ID NO: 340990 - protein, 149 aa, Zea mays
  Clone ID: MRT4577_74151C.1.pep
RAVGEPDRIWAKPLTNGCYMRREPGTLPPMCERDGDSDADWGVPMKVCLTPYSKRVSKAKGSELLPWPQRLTTPPPCLEELGISWNNFSEDNEIWHSRVIQYWKHMKFEIQKDSFRNVMDMSANLGGFAASLKKKNVWVMNVVPFTESG

SEQ ID NO: 340991 - protein, 102 aa, Zea mays
  Clone ID: MRT4577_74153C.1.pep
RSILSFNLQLVGVRHIASSTEAGTGCPLMHCCGVNNCRRISVRQRQQELQCSFGTAATVAAAPAVRRKPRLRPGAGAGDTNGDVRLHAPKPLRLQQLVSTER

SEQ ID NO: 340992 - protein, 181 aa, Zea mays
  Clone ID: MRT4577_74154C.1.pep
DILCEKKKKKKKKKKKKKKKKKKKKKKKKKKKKKKKKKSLRLSFQGPPSGARYPSPSRPLPGKRAQSPTRKKFVAANLLGGLAGNSSPSAEDLTAILESVGWEVDNEKMELLLSQLRGKEITELIAGGREKFASVPWGGGGVAVVETAPAVGGAPAAEGKKKEKGEEKEKSDDDMGFSLFD

SEQ ID NO: 340993 - protein, 46 aa, Zea mays
  Clone ID: MRT4577_74155C.1.pep
VGRAEGGLSVRGDFTTVYDGCELKISMRCILVNAPMTSRFGYPDSS

SEQ ID NO: 340994 - protein, 668 aa, Zea mays
  unsure (1)..(668): unsure at all Xaa locations
  Clone ID: MRT4577_74156C.1.pep
FQALRDAXERPGDFLLSDFSKFEHSPVLHLAFXALDKFKKIRHGDPTAGCEQDAQSFLKFAADINEASVGSKLENIDEKLLRHFASGSRAVLNPMAAMFGGIVGQEVVKACSGKFHPLYQFFYFDSVESLPTYQLDPQDLKPSNSRYDAQISVFGSKLQKKLLDANVFIVGSGALGCEFLKNLALMGVSCSSKGKVTITDDDVIEKSNLSRQFLFRDWNIGQAKSTVAAAAAIAINPSLQIDALQNRASPDTENVFHDTFWDGLDVVINALDNVNARMYMDMRCLYFQKPLLESGTLGAKCNTQMVIPHLTENYGASRDPPEKQAPMCTVHSFPHNIDHCLTWARSEFEGLLEKTPNEVNSFLSNPAQYAAVMRKAGDAQARELLERVSECLDKERCNTFEDCITWARLRFEDYFSNRVKQLTFTFPEDAATSTGTPFWSAPKRFPRPLQFSATDSSHINFLMAASILRAESFGIAIPEWAKNTSKLADAVNKVAVPKFEPKKGVNIVTDEKATNLSSASVDDVAVINDLLAKLEEYAKGLPPGFQMKPIQFEKDDDTNFHMDLIAGLANMRARNYSIPEVDKLKAKFIAGRIIPAIATSTAMATGLVCLELYKVIAGEHPMEDYRNTFANLAIPLLSMAEPVGAILIKHQDMRWTVWDRWTIRGNLT

SEQ ID NO: 340995 - protein, 51 aa, Zea mays
  Clone ID: MRT4577_74157C.1.pep
PNQTPFFLFQCPLLFTLQPLTVILHRFSGLEKLDGGALYNGNNFLNPPRGG

SEQ ID NO: 340996 - protein, 90 aa, Zea mays
  Clone ID: MRT4577_74158C.1.pep
STSPLPVGKAPRNQHQQLGQQSAPARTQQAAANPAANGQQTSPGNQQEGANAEGPPRQRPQGLKPRPPATPQGATAAHQEHLFGPRGPST

SEQ ID NO: 340997 - protein, 229 aa, Zea mays
  Clone ID: MRT4577_74159C.1.pep
PNPSLIESNLQLQLALASAETKQEEQNALQSELSTLENTIKNIKDDVSRAESKAQNAKIRCMELTVPNIELNGELNALKSEKSDKASLLEKKLTESNTQLEHAKAAVDAIVEQQGMLKCTMSDMEHIIEDLKGKVSKTETRAECAESKCTLLTGTNLELSEELAFLRGRVESLENSLHEANHAKVSTAKDIGVKTKIITDLVRKLALERERRQIQVYAHTGRLRSQIPN

SEQ ID NO: 340998 - protein, 206 aa, Zea mays
  Clone ID: MRT4577_7415C.1.pep
MAKLPRLPCSFAVLALMCIIPLTAPRPALSSRAAPRDGVSFAGAGNTIHQLLKDHGLPGGLLPRGVESYTLDESTGLLEARLSAPCYATYDNGELAYFDNVVRGNLSKGALRGVEGLSQEELFVWLPVKGILVQDQEPGVILFDIGLAHKSLSRSLFEDPPDCKPSASGGMSAASAARREGTQGVTGLRLRREMAAAGSDQSQEQR

SEQ ID NO: 340999 - protein, 104 aa, Zea mays
  unsure (1)..(104): unsure at all Xaa locations
  Clone ID: MRT4577_74160C.1.pep
MASAVTTLLKRSFLPKKAEWGSKHHLCVAHIRPGTAVVSMGARARAYTDKLVHTPKTISSPRRGILSMDESNTTCGKRVYSIWLXNTEGNRQAYTTLLVSALRL

SEQ ID NO: 341000 - protein, 94 aa, Zea mays
  Clone ID: MRT4577_74161C.1.pep
ASGNNSRWAMLGALGCVFPEILAKNGVKFRDAVWFKAGAQIFSEGGLDYLRNPNLVHAQSILAIWACHVVPMGFVQGYRVRRGPLREWLHKVYP

SEQ ID NO: 341001 - protein, 112 aa, Zea mays
  Clone ID: MRT4577_74162C.1.pep
PAVRPIPCQATLLPYLTPIPPHPAIHHKQLKHMGRRSMLVLSFSTTLSPSSYRGGFLLPASSSISPRTMWLTAPTVSISCYTRTPLISPRYPSRTFPSDTSRSPAFYRWSTT

SEQ ID NO: 341002 - protein, 78 aa, Zea mays
  Clone ID: MRT4577_74163C.1.pep
KKKWEHPGQVDELTQTTPTITRNLPGGAGLVFFFGQVLTQTDAKGEYPNQWTRDLFFTRGFFGPASLQEIPGFPPELS

SEQ ID NO: 341003 - protein, 164 aa, Zea mays
  Clone ID: MRT4577_74164C.1.pep
SQQRLWPLEVRPRFWLRSEVYKPQPPLQHPEVDGWQLVESKHIRQLRCKASHFPCRMVSLDLQGKCFNCLSASHIAASCRRPTCCCICHLLGVLWQGQGGGGSLVSVWDQLDPLPVPSDRESKAELKWRSGWHRIMPAAIPQLPRPARLWHSLLVLGVCCCAGR

SEQ ID NO: 341004 - protein, 44 aa, Zea mays
  Clone ID: MRT4577_74165C.1.pep
VSSICSFELKFKQKKKKKKKKKKKKKKKKKKKKKKKIKKKKKKR

SEQ ID NO: 341005 - protein, 74 aa, Zea mays
  Clone ID: MRT4577_74166C.1.pep
LIDHRLPQAFISYRTMSIVISLSILSASIRTSSTSRIESIPSSSRYLTFSDSSDQAASYAGLTCNGIFYAFGIF

SEQ ID NO: 341006 - protein, 75 aa, Zea mays
  Clone ID: MRT4577_74167C.1.pep
SQFFLKCLSPKTYKGLLSLHPREGEKQPQLKPPTAGAKTPGPGRTGKPRQGQSQHPERGWEKQGNQKTKAKDKKP

SEQ ID NO: 341007 - protein, 85 aa, Zea mays
  Clone ID: MRT4577_74168C.1.pep
PLKVLLWTGGKTTPGSPGAFYLLNPFLKVFLMAIKKGSYFFVRNFFGCIQFLKCPRLLPDLFPFWGICPGHAVPIPFFLLGMEME

SEQ ID NO: 341008 - protein, 114 aa, Zea mays
  unsure (1)..(114): unsure at all Xaa locations
  Clone ID: MRT4577_74169C.1.pep
ERYFEPELXXEEAAARIRQPAEGMRTLRPMLETMSWKYVLFYVRLKSKYLGLDLTTAMAGVPAGRRADYVRVANELVDNMTEFDRFVRTPKVYESYLFYEKTLKSLDDVAEFLV

SEQ ID NO: 341009 - protein, 93 aa, Zea mays
  Clone ID: MRT4577_7416C.1.pep
EDASDDEETTLVAQTTFEDPIFLTTIEDDPSHSMVEGNTEPVLVEDAPDDEEATLAIHGPSLSMVEDNIEPRLVEDPPIETRSSSSTRAREDE

SEQ ID NO: 341010 - protein, 77 aa, Zea mays
  Clone ID: MRT4577_74170C.1.pep
YAFFIRKSSSRFLPASRMVLAEQIDFEVRCLHRRHGSPAHTRPAWPGPNLDEISPSLYHRPPMFRSRLLGGQDLTTE

SEQ ID NO: 341011 - protein, 93 aa, Zea mays
  unsure (1)..(93): unsure at all Xaa locations
  Clone ID: MRT4577_74171C.1.pep
PQRATCTIIGVLYYNNMMVWNASIGLGGPRSRXWDCDTYLAVYRRLAXYTPSTERFVCTMFDPNIYADGSILLHIIDNQTSPIYDVAAFLTSI

SEQ ID NO: 341012 - protein, 668 aa, Zea mays
  unsure (1)..(668): unsure at all Xaa locations
  Clone ID: MRT4577_74172C.1.pep
MGIRACSVCWLFYVLVLVCSLCQVLYVGSVAAQTAQLTVDASPQNAQIIPGNMFGIFFEEINHAGAGGLWAELVSNRGFEAGGSNTPSNIDPWLIIGDESNIIVATDRSSCFASNPIALRMEVLCGASETNACPSGGVGIYNPGYWGMNIERTKVYRVTIYIRSSESVELMVSLTSSDGLQNLASHTIMGDKEDFVEWTKVEFDLQSNYINTNSRLQLTTTKSGIIWFDQVSLMPSDTYMGHGFRKDLASMLANLKPRFLKFPGGNYVMGNYLINAFRWSETVGPWEERPGHFNDAWAYWTDDGLGFFEFLQLAEDLGACPVWVVNDGASIYEGVPSATIAAFVKDVVNGIEFARGDPETAWGSVRAAMGHPEPFQLYYVSIGNQECSKYYYKDNYVKFYSAIKASAGRGTLIAALAEAAFLIGLERDSDVVEMASCAPLFVNDNDQRWNPDGIXLTHGSTMGXQSTGCCTFSKIQAAPHFIRPLFNXNYDQLVTAAXAPLFVNDNDQRXNXSAIVFNSWQHYGCPNYWMLHFFKDSSSATLHPSTIQLPNYDQLVTSAITWNNPHDGNTYMKIKVVNFGSKAVSLNISVTGLETDIQTFGSIKTVLTSGWLRDENSFQQPDKVVPAASPITNAGKQMGVILNSYSLTSFDLLLDSESQVRASIQAYD

SEQ ID NO: 341013 - protein, 83 aa, Zea mays
  unsure (1)..(83): unsure at all Xaa locations
  Clone ID: MRT4577_74173C.1.pep
MRVLLVGLALLVLGXSATSTHPSGGWGCQPPSPVHIPPPAHQSPSGGGPPAVHLPPMGHLTSPVQLPPPAHAPLSDHFMTPPC

SEQ ID NO: 341014 - protein, 161 aa, Zea mays
  unsure (1)..(161): unsure at all Xaa locations
  Clone ID: MRT4577_74174C.1.pep
MGIRACSVCWLFYVLVLVCSLCQILYVGSVAAQTAQLTVDASPQNAQIIPGNMFGIFFEEINHAGAGGLWAELVSNRGFEAGGSNTPSNIDPWLIIGDESNIIVATDRSSCFASNPIALRMEVLCGASETNACPSXGGVGIYNPGYWGMLAEDLGACPRLG

SEQ ID NO: 341015 - protein, 98 aa, Zea mays
  unsure (1)..(98): unsure at all Xaa locations
  Clone ID: MRT4577_74175C.1.pep
MGIRACSVCWLFYVLVLVCSLCQILXLGSVAAQTAQLTVDASPQNAQIIPGNMFGIFFEEINHAGAGGLWAELVSXRGFEAGGSNTPSNIDPWLIIGG

SEQ ID NO: 341016 - protein, 48 aa, Zea mays
  Clone ID: MRT4577_74176C.1.pep
PPFFFFFSATKGSFLSISMDQKRRQQKSKDNGFQTEIRSRSRNNLPAP

SEQ ID NO: 341017 - protein, 437 aa, Zea mays
  unsure (1)..(437): unsure at all Xaa locations
  Clone ID: MRT4577_74177C.1.pep
IRHEAYMGHGFRKDLASMLANLKPRFLKFPGGNYVMGNYLINAFRWSETVGPWEERPGHFNDAWAYWTDDGLGFFEFLQLAEDLGACPVWVVNDGASIYEGVPSATIAAFVKDVVNGIEFARGDPETXWGSVRAAMGHPEPFQLYYVSIGNQECSKYYYKXNYVKFYSAIKASYPDIKIISSCDRSAISSDNPADLYDVHVYTSSGDMFSKSRMFDNTARTGPKAIVSEYAVTGNDAGRGTLIAALAEAAFLIGLERNSDVVEMASCAPLFVNDNDQRWNPDAIVFNSWQHYGCPNYWMLHFFKDSSSATLHPSTIQLPNYDQLVTSAITWNNPHDGNTYMKIKVVNFGSKAVSLNISVTGLETDIQTFGSIKTVLTSGWLRDENSFQQPDKVVPAASPITNAGKQMGVILNSYSLTSFDLLLDSESQVRASIQAYD

SEQ ID NO: 341018 - protein, 58 aa, Zea mays
  Clone ID: MRT4577_74178C.1.pep
PTNTISTLFHIQKSLTSPLMIFNLSVINLTQFKVLQKIFFLTTIQLLLILNAYYKQII

SEQ ID NO: 341019 - protein, 120 aa, Zea mays
  Clone ID: MRT4577_74179C.1.pep
KKKKKKKKKKKKKKKKKKKKKKPKKKKKKKKKVGPWAGTPLGGIFGNFLHTGGRSSLLLGGPFRLLGGGFTFNGPGFNNGGGGKTLGFPNLMAWEKIPFSPVGVIAKGPPPFAFPNICPP

SEQ ID NO: 341020 - protein, 36 aa, Zea mays
  Clone ID: MRT4577_7417C.1.pep
PTRPVQSSDRVCTVHTIFLHLVLLFSEKRSVTFGCL

SEQ ID NO: 341021 - protein, 65 aa, Zea mays
  Clone ID: MRT4577_74180C.1.pep
RAPQHLHWWSRRVRIVLLHRVPLSRPFSLVGTIGSGYHCIGKSVSPCDTLSSDPEQIFSGLLPIN

SEQ ID NO: 341022 - protein, 157 aa, Zea mays
  Clone ID: MRT4577_74181C.1.pep
GTSPVIEYNHPLCRATPSSTLPSIQGEPFLSPSIWSSPTSIPMTGVGQPASTPSFPTPMATTTVLPFPASTRHKSGDGALTGNITTTLITNCASARRAYELHGTTECVLPSLPVLRWRSSRADLLYARHRDATPPPHTRRSRCARGHGQLGACLGPS

SEQ ID NO: 341023 - protein, 62 aa, Zea mays
  Clone ID: MRT4577_74182C.1.pep
KRMVSGNFRGLRLMNMFLRYSQKRLPLRLQKRVVLGTPSPCIVVFPPLCVLFLCSIAPSLLF

SEQ ID NO: 341024 - protein, 77 aa, Zea mays
  Clone ID: MRT4577_74183C.1.pep
RPGHLEFQAGFVLELLLASMFFEVGPFGFNPWAQFPGAVWVIGKLWFFPVLQALTLSFKIPASGKTQELFFFFCLEP

SEQ ID NO: 341025 - protein, 70 aa, Zea mays
  Clone ID: MRT4577_74184C.1.pep
FGTSVSVARLWPALDPSVIFPVSRSGRWSQHMAAVVLSLSSLLRYAEAASCIFFPARSLPWLVRDDLPMS

SEQ ID NO: 341026 - protein, 124 aa, Zea mays
  unsure (1)..(124): unsure at all Xaa locations
  Clone ID: MRT4577_74185C.1.pep
MPLAAVLEFLIVCALEMLDRYLDLARKSGGLTDEQIKARLVYMQLLKEAEQLXTPVPSAQAAKINRLAAVKEKELAKMQEQDXEGKQCLYDKYTKXFVXTKVIIYXLELDLCFWSTPVSAVSQH

SEQ ID NO: 341027 - protein, 187 aa, Zea mays
  unsure (1)..(187): unsure at all Xaa locations
  Clone ID: MRT4577_74186C.1.pep
DHCQTNXGHIGQRALXEGMKEDFTDQCCAHMCASVPFIQKIIEEIFGTYFLMYLVCGAVTINASINGHITFPIMAIVWGLALMVMVNAIGHISGAHFNPHLTLAFTISLRIPWRLLSPYVLAHMLGDTLGSRTLCLMFGVLYEHLHETLPTAFEMHSVVIEIIITYXYLMFYISGVISDNRAINELS

SEQ ID NO: 341028 - protein, 51 aa, Zea mays
  Clone ID: MRT4577_74187C.1.pep
TFMTLPLQYLPGEEQVPLKEDYYDEISRRLSVNCWRQENNISSIHLLSGIL

SEQ ID NO: 341029 - protein, 592 aa, Zea mays
  unsure (1)..(592): unsure at all Xaa locations
  Clone ID: MRT4577_74188C.1.pep
MTPPASTSGKRAVAIDEPLLPESSAGGRHGGGASVSGAVFNVSTSIVGAGIMSIPAAMRVLGVVPAALLIAAVAALADVSVEFMLRYTGRGWGGGGKDEAATSYAGTMGDAFGRAGAALLNVFVALTTTGTLVVYLIIIGDVMSGSVGGGDEHAGVLQELFGARWWTGREFVLLVTAVFVLLPLVLRRRVXESEVMDGVLRNFGPSTLNVAYFQELMVVLCSQGEKHRXMASVYGGCLALQDGGVPIKFPVAGIEMGLVLDTQEFGGDGSPLILSDITGAEDGSGDMDLKIAGNESGISAFQMDTKVVGITLPVMEKALLQAREGRQHILNSLRFTSAISILLAVVFMLISSGIALYALFKGTATMPRMFPDFSRLSSPFELFTAVPVIVVAFTFHFNVHPIRAELSKTSDMKVAVRVSLVLCAAIYAAVGFFGFLLFGDATMADVLANFDRSSGAGVPQALNDAARLSYALHLVLVFPLLLFSLRVNVDELLFPGRRPLAADTRRFVSLTAVLMAVLYVLAIAIPSIWTLFEYSGSTFAVTISLIFPGAIVLXGCSWNSEAQGQGIGGNDDRSGSGHEQHRHCLEHHELHQ

SEQ ID NO: 341030 - protein, 99 aa, Zea mays
  Clone ID: MRT4577_74189C.1.pep
HWVPRGRPGLCKARARTARFVLDLSSRSSARPRPRGRNPSLALLRPVAAATATMMDCAGGRDPVEDFLLGGAGDDGDLVAVFCDDGGYGDADRSTPFSS

SEQ ID NO: 341031 - protein, 35 aa, Zea mays
  Clone ID: MRT4577_7418C.1.pep
EIGLAQASMTEGASPIRRIGVSLLSPARRAPDSQC

SEQ ID NO: 341032 - protein, 123 aa, Zea mays
  unsure (1)..(123): unsure at all Xaa locations
  Clone ID: MRT4577_74190C.1.pep
AACXNFADWARKLRVRAQGAGHDEIRRAAVEAAELFRPQPGERNVGGSEAAAEAAAAAPCAMGSFEIGGGEFPYYPVDDGLEFEMRGYLDMAQGMLIDPPQPAAGQSAWIEDEYECEVSLWSY

SEQ ID NO: 341033 - protein, 242 aa, Zea mays
  unsure (1)..(242): unsure at all Xaa locations
  Clone ID: MRT4577_74191C.1.pep
GAIVGNRYHGILIVDPARLRDNKTIVDFQQMLADAYEXTTGDGKTXQQQDLRDAEQRRRRRPRLGIVSRKGTRVIENQAAVARLASSVGFDVDILETANGLPLSAWYASLRACDALVGVHGADLTKFLFLRPGRASLTQIAPLGVSPIAREDFGEPAARMGLAYEQYEVRAGESSLARRYAPGDVVLTDPEAAKRDKGGWNLVARVYLGGQNVTLDLARFRQTLARMHAHAKRQRRRQERTV

SEQ ID NO: 341034 - protein, 141 aa, Zea mays
  unsure (1)..(141): unsure at all Xaa locations
  Clone ID: MRT4577_74192C.1.pep
RKASLTTRSSGFSRTXLSDHAELPLRKPRGGGLLHRCREDNPDQDDCIHDNHTAEMDSVENAAHETWXLQNAQGRAVGLPSDDDVAHHAVGHTXVGAGQTLALLANLGYAAVDSRKTYDGXACNYIKESXETGSLIPMLYS

SEQ ID NO: 341035 - protein, 67 aa, Zea mays
  Clone ID: MRT4577_74193C.1.pep
SMSRIVSSSLRVKKNSSCTRSGLSYVLDADISSFTDNTRSHLGACTCEMNFCLGALMEHVSGLPRAA

SEQ ID NO: 341036 - protein, 68 aa, Zea mays
  unsure (1)..(68): unsure at all Xaa locations
  Clone ID: MRT4577_74194C.1.pep
FLGFPPVCFFFSFFFCKAPPKVCLKKIFFSPPKKKKKKKKKKKKKKKKKKKKKKKXKKKKKXKKKKKX

SEQ ID NO: 341037 - protein, 395 aa, Zea mays
  unsure (1)..(395): unsure at all Xaa locations
  Clone ID: MRT4577_74195C.1.pep
MHAYVSSEFGSRRAMVVEANSGSTLAAVGVAGTGSSMAVHSHQLSTVVPSSVTGEEVNYELADADLLHKVHYVRAVHVFRAPTAVAAPPLTIRELKEPMFPWLDMYFPVSGRLRRRQAAEGEEAAAAAVGRPYVRCNDCGVRIVEVDCDATVEQWLEAEAERGGLCKALAYDKVIGPELFFSPLLYVQVTSFKCGGMALGFTWAHLIGDIPSAVASFRKWAQVLGGNKAPAPTLRDPLAVPPSAPPTSVTVPPSVKATAAPVGDHWVVPTTHDMVSFSFHVTEQQLQGLXQRDQGLPSAXVVGPFELVSALMWRALAAIRGPEEEEATRTVTVVKTGAAPTSGGSPRPALTNEHRIGHVVFATGGSSPATADVAKLAALLAGAHLEEASAVAAAD

SEQ ID NO: 341038 - protein, 93 aa, Zea mays
  Clone ID: MRT4577_74196C.1.pep
HFEHDRKLSPPQTLIPHHRHTYMKHQRDAGAVPLSLALSLGGGGGGVAPKHGISKKPRRPSSSSFLCRVSFAARARPERSKGQPIAAGLCTLE

SEQ ID NO: 341039 - protein, 105 aa, Zea mays
  unsure (1)..(105): unsure at all Xaa locations
  Clone ID: MRT4577_74197C.1.pep
LLLFRXFXVPVLAVFLGXPWLARPCAGXXAVPVVGXXAVVVAGPCPSALVXPXFGASLVVLRRPPLRRLXLRXGPCLRCRPPLAAGXPPVALAFCRPRSPRLSSL

SEQ ID NO: 341040 - protein, 124 aa, Zea mays
  Clone ID: MRT4577_74198C.1.pep
HLSVALSMGDNKPLPVALKEARFSLGVKFFIVSPGALAFPLRKGPVKVPRFFGGSSPLSPPCGFVLSLGPPVFAFLSAGSVFPRLSAGPLFRPSFQRAPYWHRCFSDRTISEIAGSTRGSGNSW

SEQ ID NO: 341041 - protein, 80 aa, Zea mays
  unsure (1)..(80): unsure at all Xaa locations
  Clone ID: MRT4577_74199C.1.pep
YNLLLFALFXGHLGHPFPDFLISHLFINIFSYSILFSDPDSVIRISYXLTCQNILENPLYLVRGDFPFVTAIFIGSDQFV

SEQ ID NO: 341042 - protein, 126 aa, Zea mays
  Clone ID: MRT4577_7419C.1.pep
GPRGLFFFFFYINNKRLQIATLLRSLGGSFSWAVFQWFYTGGDGCGFQAFPLFGLEAYKKRFYFDFSPSLVGIGMICPPMVNFSLLLGAVVSSAILWPILQGKRGEWYDADASPSSLRGLNGYKVT

SEQ ID NO: 341043 - protein, 102 aa, Zea mays
  Clone ID: MRT4577_741C.1.pep
MAAAAGGVRRALAALRSGSPSTISATLSRQAAARSLELAAASLPRASRRRLAISRVPVAALGGVQASLMPMHNATASALLTSMLGLKPGSWGWLSEGFATPL

SEQ ID NO: 341044 - protein, 72 aa, Zea mays
  Clone ID: MRT4577_74200C.1.pep
MALLVLRAPAAVHAASRLLPPPRRRWRRLVAVASAASSAPSGDVSSQHGAAAAAATGSWETGPDCLGTYRLQ

SEQ ID NO: 341045 - protein, 102 aa, Zea mays
  unsure (1)..(102): unsure at all Xaa locations
  Clone ID: MRT4577_74201C.1.pep
PLGLRAAAVSCAAVAGGGAXPLSVCGFGRAASCWFPTAPVGRCSRSPSGASGPSGGALVRRVAGRRRLVCRLSSSPWLPRSLPVPPCLAAGCLNGPXAGSXR

SEQ ID NO: 341046 - protein, 42 aa, Zea mays
  unsure (1)..(42): unsure at all Xaa locations
  Clone ID: MRT4577_74202C.1.pep
HVMANLGXKLPDKEVEKKIFXTHVGGDGQINFKEFVKVIMAK

SEQ ID NO: 341047 - protein, 60 aa, Zea mays
  Clone ID: MRT4577_74203C.1.pep
KFFGLVPRGPRGFILKAKPFGSLWLYNGPPWGGLPRCFDPNFFQKCLTNPPNVLKTRNLF

SEQ ID NO: 341048 - protein, 73 aa, Zea mays
  Clone ID: MRT4577_74204C.1.pep
HASADAWGSRSRAAARDVERANRTRVTISRTTILALMDTLTATDVDCHNSSHDRLCRSILVQTHARFPTHEHL

SEQ ID NO: 341049 - protein, 385 aa, Zea mays
  Clone ID: MRT4577_74205C.1.pep
MPSPSSAHWLSLVGSIWLQTINGPNADFPVYSSQLKDLKHITQVQLNFLAFASDAGKLFGWFSGVAALHLPLWLVALVGASFGLVGYGVQYLFLDSAALRYWHLFLLTSLAGNGICWINTVCYLLCIRNFGSSRSRVAVSLAASYLGLSAKVYTSLADSIPGHQATSKAKTYLLLNAVVPMLVTVAVAPSLRAVDLTVTGEGQAGASTDAAFLVMFAITLATGACAVVGSIGSTSGGGLSSREHVVSLAVLLATPVLIPLALRVRESLHRIRETKRENRIYDLGTDDGVVVDVAATAGSKDGDGVVTEKPQEEIDGLRLLRKLDFWLYFFSYMFSGTLGLVFLNNLGQIAESRRLGQTSTLVSLSSSFGFFGRLLPSFLDYYSAK

SEQ ID NO: 341050 - protein, 58 aa, Zea mays
  unsure (1)..(58): unsure at all Xaa locations
  Clone ID: MRT4577_74206C.1.pep
RGSVTPTSGQCQAKTWRIREELSEIKRLNVELRANRXRSLCERLTNTGDPPISELQAP

SEQ ID NO: 341051 - protein, 38 aa, Zea mays
  unsure (1)..(38): unsure at all Xaa locations
  Clone ID: MRT4577_74207C.1.pep
ITSKTYRCFKRKCSIYLRSPTFXWKKINPNGCERIHFH

SEQ ID NO: 341052 - protein, 551 aa, Zea mays
  unsure (1)..(551): unsure at all Xaa locations
  Clone ID: MRT4577_74208C.1.pep
MPSPSSAHWLSLVGSIWLQTVNGPNADFPVYSSQLKELKHITQVQLNFLAFASDAGKLFGWFSGVAALYLPLWLVAFVGAAFGLVGYGVQYLFLDSAGLRYWHLFLLTSLAGNGICWINTVCYLLCMRNFGSSSRVAVSLATSYLGLSAKVYTSLADSIPGLVASGSKAKTYLLLNAVVPMLVAVAVAPSLRVVELRSEASTESDAAFLVMFAITLATGACAVVGSIGSTSGSGGLSSREHVISLGVLLATPVLIPLALRVRESLNKIRATKRENRIHDLGADDDAGAGAGVVVDVGGAGPESKEGEGDGGVSEKPREEIGGLRLLRKLDFWLYFFSYMFSGTLGLVFLNNLGQIAESRRLGQTSTLVSLSSSFGFFGRLRPSFLDYYSAKSGYSISRTGSMASLMAPMAGAFFLLLNSSDFFLYLSTAVIGTCTGAIASVAVSATSELFGAENFGVNHNVVVSNIPVGSLCFGYLAAYLYQRAARGGSSHQCIGAACYRDTFAVWGATCAVGTLLCAVLYARGRRRAAPXRSKDGTCLARLAIAASCLSS

SEQ ID NO: 341053 - protein, 101 aa, Zea mays
  unsure (1)..(101): unsure at all Xaa locations
  Clone ID: MRT4577_74209C.1.pep
AERLQEEFKALASHVYLACRANEQQLVHARKEAAELHLHKSQIEELLQKAQGDLGSVQDQHLVKVQQLITLEDFKSKEIDXLLKELKCMSDECHNQKRCGE

SEQ ID NO: 341054 - protein, 118 aa, Zea mays
  Clone ID: MRT4577_7420C.1.pep
GCWSTPLLTTGSPFPPKRLKTPLVLRPTFVKRGPPRAKGVFLKKQIRGPVLGKTKLAAIPVFISPIQIFGRGTIKAFFRFGRIFFIIGLNFQPFFRNPFGFIFDQVGIWFLLLKPLFP

SEQ ID NO: 341055 - protein, 34 aa, Zea mays
  Clone ID: MRT4577_74210C.1.pep
GHVNYHPYYFFIMITLIGAEPIKNSPSINHFATY

SEQ ID NO: 341056 - protein, 97 aa, Zea mays
  unsure (1)..(97): unsure at all Xaa locations
  Clone ID: MRT4577_74211C.1.pep
GXXXXXXXLLXSXRXXRTXFSXPXXXXXVVXYGXXXXXYRXXXTSXDNGXLSSXXXQYXXXXXXXQXLXCHCWXTXCAXYXXXXXXSRIPSXRTXXX

SEQ ID NO: 341057 - protein, 132 aa, Zea mays
  unsure (1)..(132): unsure at all Xaa locations
  Clone ID: MRT4577_74212C.1.pep
EEHHXEXKADXGAXKTXPQQXGTXXKNGXXXXKNXPXKGXEGGGGKXXKXGHAKGHXXAXDTXKGKKXEXXXXATHNXDXPQANXXEHQXXXXXEXGPASXXXXDGXXKDDXRPPTEEXPXAQTKEGGESGK

SEQ ID NO: 341058 - protein, 119 aa, Zea mays
  Clone ID: MRT4577_74213C.1.pep
TKKKKKKKKKKKKKKKKKKKKKKKKKKTRFGPKHSHKNLHPPLSPLFPSPQGALLRESRGAAASFTPLAGFLRTVIPKNSPRARGGLVKMGNAVDDIIWERDGGDPVQGCAQGKPRNVL

SEQ ID NO: 341059 - protein, 72 aa, Zea mays
  Clone ID: MRT4577_74214C.1.pep
GPPPWGEGGPQFNFLVGKKRGQGSFLTARKGKKSWGGAPQIWGGTWAPPPPIKPRFVEKFGTGGRQMLKPVC

SEQ ID NO: 341060 - protein, 139 aa, Zea mays
  unsure (1)..(139): unsure at all Xaa locations
  Clone ID: MRT4577_74215C.1.pep
RTTDTTITTKWIPGADPFLDLILMMADTANACKPHCSDPTVPTTPVVPTPSNDTHRLCPIDELKLIVSTNEIEHDKSCLPHHDXCCPSVEELLDHNDALCLCNDIKANGIVIKLHQPVTLYFFHNNCTRHXTDNFTCPI

SEQ ID NO: 341061 - protein, 145 aa, Zea mays
  unsure (1)..(145): unsure at all Xaa locations
  Clone ID: MRT4577_74216C.1.pep
RACTRRREDPERARPFFFFFFFGTKQLRGENRNRGGGAKNXGGKHRHQRRVRGPGRPRNQRQGGQRGAPKKGHTXPGGGGKGGKKTQGPKRETNAGPAQGKGAAGTRTPNGGPGGGAKKGHRGAPQPGGRDQQKIGGTRGGPKPP

SEQ ID NO: 341062 - protein, 81 aa, Zea mays
  unsure (1)..(81): unsure at all Xaa locations
  Clone ID: MRT4577_74217C.1.pep
AFFLSCGCLLALPLVGGXVFSXAFVVCGGARVSGARWLGPXXFFRVASLCPRSPPPCPPSPSFSVQNHVSLMALEPXSELR

SEQ ID NO: 341063 - protein, 41 aa, Zea mays
  unsure (1)..(41): unsure at all Xaa locations
  Clone ID: MRT4577_74218C.1.pep
FSEPPPRAXXLWLVEPTKFPLVFPAAQPTCPQSLPFNSPYR

SEQ ID NO: 341064 - protein, 587 aa, Zea mays
  unsure (1)..(587): unsure at all Xaa locations
  Clone ID: MRT4577_74219C.1.pep
MGRRRRFAQLDDDDDDDEDXCPSISSPRVAPPPRTPNPGSPSRRRSSAAXVSDDDDEDVEEVELEEEEDDEKDLEAMRRAEEEERREQEAETKTRRRRGRPKRRRDPGSEDEEPEELELQTEDPREEEITEAVPVAVGDPVKITGKGKKQKKHYASFEYEGNSFELEDPVLLTPEDSNQKPYVAILKDITETDGSLYVTGQWFYRPEEADKKEGGFWVARDTRELFYSFHTDDVPAESVMHKCVVHFIPQQKQIPSRKQHPGFIVQKVYDAVEKKLWNLTDKDYEDNKQQEIDLLVKKTIDRIGQLPDLEPEETPLENNYLSNKRGLRKKPVNPIDVTREPPVGKSEQFAKAETPGSDKIRNYDTLVKYKVLTGHSHRDRWLDKLIESIPLASKENAGTSADANSTAKSSISGSPAKDVGSAENEKSYGLDVVVEIMTALERSAYEALGTDFGKYNQKLRQLQFNIKNISKLRRRLMDKELDPPVLLTMSPDELKAGLTSAEKTSEPEESRKLQMTDTRCQRCSEKKVGISDIIHAGHGDRYQLECTSCGYTWFSSRDAITTLTEDAPSTAGNVGTAPLATAKVEGR

SEQ ID NO: 341065 - protein, 174 aa, Zea mays
  unsure (1)..(174): unsure at all Xaa locations
  Clone ID: MRT4577_7421C.1.pep
CNDRRREVAATQIIANKQIDRTFAFDKVFGPSSKQKDLFEQSISPIVNEVLEGYNCTIFAYGQTGTGKTYTMEGGGTRKTKNGELPTDAGVIPRAVRQIFDILESQCAEYSMKVTFLELYNEEITDLLAPEEPKFPVLEDKTKKPIALMKXWKGFVFVRGLEEXVVYSAGEIYK

SEQ ID NO: 341066 - protein, 93 aa, Zea mays
  Clone ID: MRT4577_74220C.1.pep
NRWGVPCPFLLQWSQQQGHQVVVHIHKTCPQRDTPMCLTTLKLQYRSAFFLPPPLHTFPTELLYNTHASHAYIRKSCTCTPKFFTYVAPPQCG

SEQ ID NO: 341067 - protein, 65 aa, Zea mays
  unsure (1)..(65): unsure at all Xaa locations
  Clone ID: MRT4577_74221C.1.pep
ICSKKKKKKKKKKKKKKKGLRVLQLTAGPPRXWQGAPSRCRQIIQAPCKAGLXTQRGPAALPWAA

SEQ ID NO: 341068 - protein, 93 aa, Zea mays
  unsure (1)..(93): unsure at all Xaa locations
  Clone ID: MRT4577_74222C.1.pep
TAVHAPTLTTYTGMIGGRWLKHWIXVGAVLSSIGLYSDTFTSAAFQLLGMSDLGLLPRAFAARAPVFRTPWVXLLSSSAIIPGMSFHSFNSIV

SEQ ID NO: 341069 - protein, 109 aa, Zea mays
  Clone ID: MRT4577_74223C.1.pep
SVEPLELPTHLYVVNNFTIVPLVTKVSTGLVLLALWQFVSDPPEWTPLNLPSLVSVDVMSTGFVRTPVESATPWSRLERCVVFFPVSLVPPDSPLFQVLVSPRCAERVY

SEQ ID NO: 341070 - protein, 145 aa, Zea mays
  Clone ID: MRT4577_74224C.1.pep
PFGVKKFEKNAKNHKFHPQSLYIYPYPGGAHSTHHFISFLSSKLAFSTLLHVIIAVPGRSYSQRTLGLIMRACVILHNMIIDDERDADLDETYETVDSTVGPSIYYNATPSLAARIQMDNEMTDTSMYTQLLNDLVEHVWGHNNH

SEQ ID NO: 341071 - protein, 90 aa, Zea mays
  Clone ID: MRT4577_74225C.1.pep
TMSPSPAKGIGALHFIFFKETSFSPPKGGIFFPHPEWPLLVLLARAGFGHWAPHYCHCHRVWKELSFKLLGPPARRVWCLPSLARAFTEN

SEQ ID NO: 341072 - protein, 101 aa, Zea mays
  Clone ID: MRT4577_74226C.1.pep
APFQNEDQPGGWGLALSARRPGLGTWFGLDLKRANGTRGFCRPQGYPPGGFLASKANFSTHFNTENFHPFTFGGWWPPVYLNRPARGTRTLPPGAFPAGSP

SEQ ID NO: 341073 - protein, 53 aa, Zea mays
  unsure (1)..(53): unsure at all Xaa locations
  Clone ID: MRT4577_74227C.1.pep
XLHGDAXXXXPLGGXXHXREGLXRGRXRFTAGSGXRCRYXGQXAVTXXRXGKR

SEQ ID NO: 341074 - protein, 204 aa, Zea mays
  Clone ID: MRT4577_74228C.1.pep
MTTPPNPSPLLSSRPNPSLPLHRRPRFPHSPAAANTTGAASAPDWFRPRRTPDSDPSISGGRVTARDPGVRVKAKEGAEEEKDKKAKRRRWWERWSGDKESYLVDDVEPLPIPLTVPETEPMSREELDRRLSCDVEIDECKTVSYEWTGKCRSCQGTGLVSYFRKKGKETICKCVPCAGIGYVRKITLREDIQKIDELDNEKLP

SEQ ID NO: 341075 - protein, 62 aa, Zea mays
  unsure (1)..(62): unsure at all Xaa locations
  Clone ID: MRT4577_74229C.1.pep
NSLVQCRIDAGKPKVCTSGVGLVKVGLAPFEACWPLVXGLVVLGAALCLCAEGEGRVLGKLL

SEQ ID NO: 341076 - protein, 53 aa, Zea mays
  Clone ID: MRT4577_7422C.1.pep
ITQVSSGDNTVSALYCATLDSMIRQHHVYGMQYIKKQAKKQGSRRIPSLRRGA

SEQ ID NO: 341077 - protein, 41 aa, Zea mays
  Clone ID: MRT4577_74230C.1.pep
PCIDKSHHEFKDVPSDIRNFNVPSILFLVKRCFQLDMRFKV

SEQ ID NO: 341078 - protein, 68 aa, Zea mays
  Clone ID: MRT4577_74231C.1.pep
IHCKVSFMYGTSYLNELSLCISLFFLFLKVMCVSLSVQLCKCCLSCFIIIYKYFYRLGSLICFINLQL

SEQ ID NO: 341079 - protein, 38 aa, Zea mays
  Clone ID: MRT4577_74232C.1.pep
LKYSYPKTFLITPFHPKTFNPNLYINPSQLKLFPNKLS

SEQ ID NO: 341080 - protein, 68 aa, Zea mays
  Clone ID: MRT4577_74233C.1.pep
PLFFGISIVAVRKPSITALFLQKYDTNFHLFSTTKEMEKQVAPTPIAFCFVPITGLPMLYIDTVAMHV

SEQ ID NO: 341081 - protein, 33 aa, Zea mays
  Clone ID: MRT4577_74234C.1.pep
TGTVPGMYAHSSQRVVLTSSDLFSIICMILSPY

SEQ ID NO: 341082 - protein, 127 aa, Zea mays
  Clone ID: MRT4577_74235C.1.pep
MPGMMWTPELALLRGFSTEAERLVWKQEGICGSDIGVFLELLLEGSYEALFFHSTTQTILNSTMMAEEKIDSYLEKQIVNFLDCSTDLEEIERQQLVFLLGVSSLQLFVQSNWTGPLVDLHPQDFLP

SEQ ID NO: 341083 - protein, 58 aa, Zea mays
  unsure (1)..(58): unsure at all Xaa locations
  Clone ID: MRT4577_74236C.1.pep
ERYLGALSSYLYKDRLHLLKEESINEEELVSDLSIFLFFFKPXLRPGGGGPAVYPPMN

SEQ ID NO: 341084 - protein, 49 aa, Zea mays
  Clone ID: MRT4577_74237C.1.pep
GTPWDLLGLGLLPGGPWQQLGCRAECDLWPYHGLEWDLAGLRILCLEIA

SEQ ID NO: 341085 - protein, 237 aa, Zea mays
  unsure (1)..(237): unsure at all Xaa locations
  Clone ID: MRT4577_74238C.1.pep
MCGSKKSVAYFAHDRAHRLLPIAGGDDFTCGGCLVAGAGPRYRCAHPGCSFTVHEACARRSPRTLRSAVHPLHRLRRXGRGSRRQRRRRRXCEVCGEAVERACYACVACGVAVHPLCARMPGSARGPAHPDDGHEAWLVRVAXAGRRRWQAXQKQAAGCGSCGRALGAWRYRCVTCAAELHPRCLVPAVDQCRGAGEGEAGRAGSAASSCCLGLVHDLTRCLATLGTALHYRGYYNG

SEQ ID NO: 341086 - protein, 49 aa, Zea mays
  Clone ID: MRT4577_74239C.1.pep
KLGRLIHRSREDNLQRNVHQPDHLIGQHDHRLPPQLILLLVHQHLTLLH

SEQ ID NO: 341087 - protein, 52 aa, Zea mays
  unsure (1)..(52): unsure at all Xaa locations
  Clone ID: MRT4577_7423C.1.pep
ARVRKKKKLNKKKKKKKKKKEXKKKKKKKKKKKKKKKKKKKKKKNKKKCLPF

SEQ ID NO: 341088 - protein, 142 aa, Zea mays
  Clone ID: MRT4577_74240C.1.pep
LLCSAEGARPRAARSAGCPPSRRGRWAALRADGSLGWGPCRLGPVGRVRAGGPAPGRAALFAGGRWGGRLSLPARRREPLPLAPPGGACWSSRRPCRRTIPSGGVLRSFAAWGRDPDGRACPPTAAAPVCWEAACGPARAGP

SEQ ID NO: 341089 - protein, 60 aa, Zea mays
  Clone ID: MRT4577_74241C.1.pep
NASLLTDGPACSKQSLGASDPFQGVGVQDAIIGRRNKGYALVISWLVFYDKVRYISPPSL

SEQ ID NO: 341090 - protein, 294 aa, Zea mays
  unsure (1)..(294): unsure at all Xaa locations
  Clone ID: MRT4577_74242C.1.pep
IRLEEMERAKDRLAVQRATREAHERAFAEVRAKAERIALERITSARQRASAEAHEKEEKATAQAARAQASREARMKAERAAVERATAEARERAIEKAKAAADAKERIGKFRSSFKDSFKAPNQDNQHEASSQKTAYNKHGKSMDSCVEVVEVESALRHKAKLERHQRTAERAAKALAEKNMRDMLAXRSTFGXQRLAEFLDPEVKRWSNGKEGNLRALLSTLQYILGSDSGWQAVPLTDLITAAGVKKAYRKATLCVHPDKVQQRGATIRQKYICEKVFDLLKEAWNKYNSEER

SEQ ID NO: 341091 - protein, 178 aa, Zea mays
  unsure (1)..(178): unsure at all Xaa locations
  Clone ID: MRT4577_74243C.1.pep
HAPADPAIKTAVATAAPPNDTHRDMYRKXFKKKDXKLVAELAALLLYVDLCTTAHDAEQEGTKPKCRSXNNNEDATDHADSTAYSKNYKKXKSSDEGSEAREXLHESHDTANATPDEDTYDDTVNERLKKISXDDEXMSSRETDTDTNTAADNAAARTARLAAGLEKDKSIATSIPCS

SEQ ID NO: 341092 - protein, 119 aa, Zea mays
  Clone ID: MRT4577_74244C.1.pep
PPNREGGGRPRPSVWAFGLFSSFSNPDGGLGPLPRGLGPFPFLGNLKAPLVVRLPLELGPPPSPSLDRKKPFPVWLCGWKWCTTKAYHVIKKNRKRKKKKRKKKKKKKKKKYSALLPLL

SEQ ID NO: 341093 - protein, 74 aa, Zea mays
  Clone ID: MRT4577_74245C.1.pep
CHASDHTSGRMVRELFNMTDLMGLQIQVRTIHCVTYIPSLLMMQGYMVHVTMIKATCRQLLKFYRLHTPIHIIF

SEQ ID NO: 341094 - protein, 69 aa, Zea mays
  Clone ID: MRT4577_74246C.1.pep
RQDRLGDHAGHPDRRQQHDVGTWFVEKENGLVVVHSQDDHLSSRRVGRTKTSAALRGSHGVAKSRTTSG

SEQ ID NO: 341095 - protein, 99 aa, Zea mays
  Clone ID: MRT4577_74247C.1.pep
PKKEPLPLTPFLGIKGWPHSSFGGPGGVVYSKSISQPGGIIWVVVANQPVGAKKRIKFSVMLLTTSWFIELQILVRCPAPFFERSRFFPPECKFEVRVA

SEQ ID NO: 341096 - protein, 70 aa, Zea mays
  Clone ID: MRT4577_74248C.1.pep
LVTASSIAYRGYSAMYAQPVVISLDILAEMICLVMSVIVDRMVDLNSIGLHGSAYWCIIPDQDTCSLSLQ

SEQ ID NO: 341097 - protein, 113 aa, Zea mays
  unsure (1)..(113): unsure at all Xaa locations
  Clone ID: MRT4577_74249C.1.pep
MGLGVVAELVRLGVLSSTSDHASVVSINLFVALLCACIVLGHLLEENRXVNESITALIIGLCTGVVILLTTKXKSSHILVFSEDLFFIYLLPPIIFNAXXQXVRRXQFFRNFM

SEQ ID NO: 341098 - protein, 49 aa, Zea mays
  Clone ID: MRT4577_7424C.1.pep
GSTIWKLMISAAFEHRKLAPPRTGTPLFFSLYFFNYFLFIIFFFFFFFF

SEQ ID NO: 341099 - protein, 95 aa, Zea mays
  unsure (1)..(95): unsure at all Xaa locations
  Clone ID: MRT4577_74250C.1.pep
HDYLCTYHLLINDCSEVXLLVRDDXRHRTPLPKHTDPVLLTLDFNMNAPSLDSTCEPIMTKPKPATKTQTTPPHTITIHTETETSVPRAPEPQRG

SEQ ID NO: 341100 - protein, 114 aa, Zea mays
  Clone ID: MRT4577_74251C.1.pep
GSVALGTTRLYTITGLPSHVIKPAPAAIANTAPAGLGPPGTVWSSTPGKKWTFFAFLKSIFNIQSTLSHLKKYLLLNNTVNWSFTLNKIFKIYWTISINVDTIYMPLTRMNYTL

SEQ ID NO: 341101 - protein, 63 aa, Zea mays
  unsure (1)..(63): unsure at all Xaa locations
  Clone ID: MRT4577_74252C.1.pep
RXVAAPRYYIHMLSSRSDICFIVCTQTSIELYHDSHGSELRICIMILVSDTLQCVLSCPTDAL

SEQ ID NO: 341102 - protein, 84 aa, Zea mays
  Clone ID: MRT4577_74253C.1.pep
PTRPPTRPKHSTKNQREATAAAAATSSATYEATTRRSAWRTSGFHRYSRPSPLTPSHMSMESGSAFHRCNFCLQELLLLGEHSS

SEQ ID NO: 341103 - protein, 76 aa, Zea mays
  Clone ID: MRT4577_74254C.1.pep
GAGGHPTVPVPGPGAGGKGGRGTGTEFMLPVAPGGAGGPWVCPKPASAPPNGHGASEIVILAKRACGVNSKGHRFG

SEQ ID NO: 341104 - protein, 154 aa, Zea mays
  Clone ID: MRT4577_74255C.1.pep
MEGTYPVVLVDQRHGPYLYTATLSEEDVAGTVRPLKSRALCRGALLRNTQEQARKIFTHPAAVTKINEANLLLLIYRIFNNPPNYLYMQYLMEYNWDIVDLLPDITTAVYNLMLLANHYLYLILGTLSYQSPDIVATTPNFLQHDISFMVRFIT

SEQ ID NO: 341105 - protein, 78 aa, Zea mays
  unsure (1)..(78): unsure at all Xaa locations
  Clone ID: MRT4577_74256C.1.pep
DSLLCARALVQILPYTFSEIGVAVYVGESALGAQWRFFITGSSXLIGAAIKGPRITXRNVIRVILWEAVEVYGVFVAI

SEQ ID NO: 341106 - protein, 46 aa, Zea mays
  Clone ID: MRT4577_74257C.1.pep
LHFLSTHPNVIGLLYNEAVTNPLPISSSKPTFQSLNLPTNIPSPSR

SEQ ID NO: 341107 - protein, 115 aa, Zea mays
  Clone ID: MRT4577_74258C.1.pep
GGPLYPLRGGGLTTPGPGKTPGHAKNKTWVARRNPLFWWGRAETLNEAPGPYFSFATSAPPFLKRDPPFWGGLTPGGGGFTPKGAGNPPKAPTPLSLGFFPSFFRDVPCFSPQGG

SEQ ID NO: 341108 - protein, 127 aa, Zea mays
  unsure (1)..(127): unsure at all Xaa locations
  Clone ID: MRT4577_74259C.1.pep
AVLYPTGCLPLLHPCTEVGYNRIDGFXWVRQDYYLTHTFKYIGIHVWYDRKETEFVELXRMHGXSGVKSKDLLIYSHHLTTSSLSPSCTKIVLRTPWGLGRSLPVTAFQFEPEGDHKARDAGAAFAN

SEQ ID NO: 341109 - protein, 62 aa, Zea mays
  Clone ID: MRT4577_7425C.1.pep
ACLCCLPIFVFTHENLGWKLVQLHHKNPFLKNKKNTKKKKHKTKYENNNTIYNALHNTKTHY

SEQ ID NO: 341110 - protein, 104 aa, Zea mays
  Clone ID: MRT4577_74260C.1.pep
QVSDYFFSLAFSLGPCLGGFKNKRKCLGGPFFYLVLPRVPVLPPGLVPPGGPLFLGGGPRSFFCPGKKILFCFLTPFPPRFFFPSPPSFFFLGVAFSPPLPFLF

SEQ ID NO: 341111 - protein, 313 aa, Zea mays
  Clone ID: MRT4577_74261C.1.pep
MSPFYLARGASKLVRRITSETSVELKILSDKWRLLLAGLIFQYIHGLAAHGVHYLHRPGPTLQDLGFMILPELGKERGYISETLFTFVFLTFVLWTFHPFILQTKRFYTVLIWRRVLAFLCASQFLRIITFYATQLPGPNYHCREGSPLARLPPPQNAAEVFLINFPTGVIYGCGDLIFSSHMIFTLVFVITYQKYGSIRFCKMLAWCIAVAQSLLIICSRKHYSVDVVVAWYTVNLVVFFVDKKLTELPDRSVGSTSVLPVSARDKDTKLKEENTRLLNGNSMDSADRRPRTQMNGKQIENESHVDSETVKT

SEQ ID NO: 341112 - protein, 276 aa, Zea mays
  unsure (1)..(276): unsure at all Xaa locations
  Clone ID: MRT4577_74262C.1.pep
KHSRLLQSLXDLVLKRGSIIQKASNTDGLTIIPEYDWKLFSEEWSATPGKGISAEIAFSKSSQDKLHGSSEAVPITDGNLGQSLDDTNDDLGAREPYIRTDPEVCEECIGERESCALVEKLNYQNEDIHVYFVHGKEAPKSIKEASKAVTVPDRRTSKRSRRTSSGNSISLKVSGSTSVYQLKLMIWESLGIVKENQMLHKGSVEIEDDFATLADKSIFPGDFLWVRDSEIYENRDIADEISEQKDDMLQAEEGFRGTLLTSTVSAQLCQDIAFSE

SEQ ID NO: 341113 - protein, 313 aa, Zea mays
  Clone ID: MRT4577_74263C.1.pep
MSPFYLARGASKLVRRITSETSVELKILSEKWRLLLAGVIFQYIHGLAAHGVHYLHRPGPTLQDLGFMILPELGKERGYISETLFTFIFLAFVLWTFHPFILQTKRFYTVLIWRRVLAFLCVSQFLRIITFYATQLPGPNYHCREGSHLARLPPPQNAAEVFLINFPRGVIYGCGDLIFSSHMIFTLVFVITYQKYGSMRFCKMLAWCVAIVQSLLIVSSRKHYSVDVVVAWYTVNLVVFFVDKKLTELPDRSVGSTSILPLSAKDKDTKLKEENTRLLNGNSMDSADRRPRTQMNGKQIDNESQVDSETVKA

SEQ ID NO: 341114 - protein, 77 aa, Zea mays
  Clone ID: MRT4577_74264C.1.pep
ITSETSVELKILSDKWRLLLAGLIFQYIHGLAAHGVHYLHRPGPTLQDLGFMILPELGKERGYISETLFTFVFLTFV

SEQ ID NO: 341115 - protein, 98 aa, Zea mays
  Clone ID: MRT4577_74265C.1.pep
MGAYKYVSELWRRKQSDVMRFVQRVRCWEYRQQSFIVRLTRPTRPDKARCVVYKAKQGYVVYRVRVKRGGMNMPAPKGIGYSKPKHQGNTQLRFHMNK

SEQ ID NO: 341116 - protein, 48 aa, Zea mays
  Clone ID: MRT4577_74266C.1.pep
RGALMLRQPRRQMIILSGLFFLRSLPSGKEHHDSSRASRQRQTLAYSE

SEQ ID NO: 341117 - protein, 51 aa, Zea mays
  Clone ID: MRT4577_74267C.1.pep
MQKTMFKFTPMAPPMFTFRSFTGKEVHPKLKDTRILVLVEVKSINCVKGPN

SEQ ID NO: 341118 - protein, 67 aa, Zea mays
  Clone ID: MRT4577_74268C.1.pep
PLVHPLVRSLFRNHQLPIEGLCIAQWSAVSNFTLKYAFSIIHLHIYVVIYLFHTHIILISSYYYLCN

SEQ ID NO: 341119 - protein, 82 aa, Zea mays
  unsure (1)..(82): unsure at all Xaa locations
  Clone ID: MRT4577_74269C.1.pep
RPSSHSAAFSSSSPPPGSAPLPVTGALPSQRWXWXCRRWSRRSRXSSFEHGEXPRSTTTTXSXTXLDPTXXFLXXLXRXERX

SEQ ID NO: 341120 - protein, 178 aa, Zea mays
  Clone ID: MRT4577_7426C.1.pep
PPKHLGELVFLFRAFSRVLPTKFSPPHSPGGDIGFFGFFLGGPFASFVLELFFFKGLPPGLGGGAPLPMGGISPVPNFPKKNRAPFGSPPPPPRGPVGSPGRAPPPGSPFFSPLLLGLAPCDLFFPFTGGGGVCQTVLGTNNPRIKQILWENRGQKKKKKKKKKKKKKKKKKKKKKKK

SEQ ID NO: 341121 - protein, 89 aa, Zea mays
  Clone ID: MRT4577_74270C.1.pep
ISKKEEANRAQSLFENHSAYHGFEFQEHRVLTFFPGGAVVQLQRYEQRGPVAGRGLRPRRSTHILPRRSCQNLSCRRTPTDGGPTELTK

SEQ ID NO: 341122 - protein, 94 aa, Zea mays
  Clone ID: MRT4577_74271C.1.pep
MFSGGTPPNTKQTTRTKRAKGKGYRTKTDLTIPHRYQPTKLKKKAQGVHTKGQKLKHNKKHPNGAQTGNPPTGQGVDNKKDQTLHGLDWTRHTA

SEQ ID NO: 341123 - protein, 70 aa, Zea mays
  Clone ID: MRT4577_74272C.1.pep
GTGGIPPKGILKIVKGNFDFGAGMVIINLGLKKGGNGGYLKKGGFGPFGRGGPAFPWEGGEPLQLGKPFA

SEQ ID NO: 341124 - protein, 113 aa, Zea mays
  Clone ID: MRT4577_74273C.1.pep
DLYSDQQLRNYDETYCRVNLVLCNVCVENQNNCGVLEEKYGKNLDQDVHNLYKDVKLHDCLCVLLYLENLRCLRVIIGLLQHLLDCSLGHLCLNYNLCHLQLIEQLYYDDLGV

SEQ ID NO: 341125 - protein, 84 aa, Zea mays
  Clone ID: MRT4577_74274C.1.pep
GIWVLISPSKSWVPPMWVGCSSSSGVPSPRHGTNLEAARPTTHTTDMIAPHVLLLADEPDYPISPSSSSWLKLPDVRPVSWSYS

SEQ ID NO: 341126 - protein, 113 aa, Zea mays
  Clone ID: MRT4577_74275C.1.pep
LKNSNVVHELTINVFNDVYQVVWIPGCTHSWTIRNSALQYKLYALGCLGVSAVLLVNIHKLAQQTLLVALTIATQFFLCQLLHRLGRYSWYTPCCIRSRTIVHDNYRQQGSDI

SEQ ID NO: 341127 - protein, 35 aa, Zea mays
  Clone ID: MRT4577_74276C.1.pep
GAGLRCDFTDGLRCTFCADHQSGARIGSYNLCVGD

SEQ ID NO: 341128 - protein, 111 aa, Zea mays
  Clone ID: MRT4577_74277C.1.pep
IGYLEAGRDTLQSANRRAYLSLLHCTALPCHHIVREPGRERGRGMAAPKLATLALAGLLAATADGSPGRGARGDVELHRAQHDDGETDNRANERDNVHPAELELDTDSAML

SEQ ID NO: 341129 - protein, 98 aa, Zea mays
  unsure (1)..(98): unsure at all Xaa locations
  Clone ID: MRT4577_74278C.1.pep
VVCTPVVSLLRAVPLRLCVVAMTVMLRNQQSIXYGAVAYFDLGGFKYLVXANGLCAVYSLISAFYTAVPMTATESRSWLVFLLDQVFTYLILAEVTAA

SEQ ID NO: 341130 - protein, 129 aa, Zea mays
  unsure (1)..(129): unsure at all Xaa locations
  Clone ID: MRT4577_74279C.1.pep
GAGNAASGVTAXRPSDPQGNVVAVASPHCTDPLVVAIVYTLPLLGHQTKRRRCVAQFFWSYPTIFAKTVLVDIHGMFQISRTIRMLRDFRESTRLRLPANCVTHHKPAQPHARPPTIPVNSMAPPYPPQ

SEQ ID NO: 341131 - protein, 148 aa, Zea mays
  Clone ID: MRT4577_7427C.1.pep
AVIDFSGHGTRQPTVKGYVSGGRSTAHSPTPPILFDHELPPPHYLSHLGALPLLAIGSVGGRVGGREGGSVTQKQMPSQREQYGGTVHLFIGTGYNPYKITYMPFTFGDNSIALYRGLNGLFIFKSVPFSANMPKLSCFTASALCQPL

SEQ ID NO: 341132 - protein, 56 aa, Zea mays
  Clone ID: MRT4577_74280C.1.pep
IRHEANPCCSLAVRPPAATASSSIPPRSLSLRLPVSSTQVRCPPAAHPRHCRSLDA

SEQ ID NO: 341133 - protein, 74 aa, Zea mays
  Clone ID: MRT4577_74281C.1.pep
VNHARVLSRSCPRARLIYQFYTLQRLHIFTHKTFSLCRLGLIKPLNTAKVSRRGYIVRPLQSSTTGENPLWFPD

SEQ ID NO: 341134 - protein, 95 aa, Zea mays
  Clone ID: MRT4577_74282C.1.pep
MGHQGIIYGSEPSSHHPFWTTAVPYHTPLFNGPPEYPFLLFSLGGRGYQIRGPPRKKKVLGRGQKNKKNGPFARVRALGANKNKLGNPSGGVGGG

SEQ ID NO: 341135 - protein, 43 aa, Zea mays
  Clone ID: MRT4577_74283C.1.pep
LERIDGTHTLYDTPQKRRGQVWSSPGKGGDPSTALRRGCRGGD

SEQ ID NO: 341136 - protein, 49 aa, Zea mays
  Clone ID: MRT4577_74284C.1.pep
RYGVKWQWKFPRDSRRPSSYPFLRTESVELGSTPERGKIGGPRSHFRRA

SEQ ID NO: 341137 - protein, 55 aa, Zea mays
  Clone ID: MRT4577_74285C.1.pep
WEGPNVKNRARAWPPKLEQRAAPPNKLKFWVFGEISPWNLNRGYFNGVGERVLKG

SEQ ID NO: 341138 - protein, 123 aa, Zea mays
  unsure (1)..(123): unsure at all Xaa locations
  Clone ID: MRT4577_74286C.1.pep
SIMPQQLQQLALXNLAAYSQQHQDLPFNQLAELNXLVIMPQQLPFYQIAADYPQQXLAFNQLAPINSGCHLQWRRLPPFSQLADVSPGAFLTQQRLMPVYLHPLPNAGTLLQGPQLPSFNPLA

SEQ ID NO: 341139 - protein, 101 aa, Zea mays
  Clone ID: MRT4577_74287C.1.pep
KKKKKEKKKKKKKKIKKTLKKKKKKNKNFLFISVYPPMGDFSQFPYPWGPLLIPFYCPLFPFFLLFFLSIVLPFSTLAPWDTLPCFPPFSPWTNCPFCRVG

SEQ ID NO: 341140 - protein, 55 aa, Zea mays
  Clone ID: MRT4577_74288C.1.pep
VEPHAGFSSQGCLSVIIPKDPVLFVFLDPCFEDLSVMSLKEIQRGCIFVLVKGGR

SEQ ID NO: 341141 - protein, 56 aa, Zea mays
  Clone ID: MRT4577_74289C.1.pep
HKVSGVSIPTHRHPRGARQHGKLKQSTPLIEWRNGTWVHKRHHGPRTYGQYKIPAG

SEQ ID NO: 341142 - protein, 383 aa, Zea mays
  Clone ID: MRT4577_7428C.1.pep
VIPDQIPCHAKTCMTTLSSKIVNRCKRALAEIAVKAVLAVADLERKDVNLDLIKVEGKVGGKLEDTELVYGIIVDKDMSHPQMPKRIEDAKIAILTCPFEPPKPKTKHKVDIDTVEKFQTLREQEQKYFDEMVQKCKDAGATLVICQWGFDDEANHLLMHRNLPAVRWVGGVELELIAIATGGRIVPRFQELSPEKLGKAGLVREKSFGTTKDRMLYIEKCANSRAVTIFIRGGNKMMIEETKRSLHDALCVARNLIRNNSIVYGGGSAEISCSIAVETAADRHPGVEQYAIRSFADALDAVPLALAENSGLSPIDTLTAVKAQQVKESNPHCGIDCNDVGTTDMKEQNVFETLIGKQQQILLATQVVKMILKIDDVISPSEY

SEQ ID NO: 341143 - protein, 136 aa, Zea mays
  unsure (1)..(136): unsure at all Xaa locations
  Clone ID: MRT4577_74290C.1.pep
WQSVXRFHAGGGNPTTXPPRLLYVAXLQXAAXPFRHXXGLXXNCFXEKARIRXAGXFFRXXYRTRWGEXXGYLCCXKAXXKLWGNXPEVFFPSSRTFVKRQXPSEFCKYRRSLIRGELCAPSRMHCFERXXPSVYG

SEQ ID NO: 341144 - protein, 79 aa, Zea mays
  Clone ID: MRT4577_74291C.1.pep
AFQNWDLLRRKVKKNQPKKFGGCRRPAGLVFLLSAFLLNENVMNSAENVVCMLSWFIFLFYLSIKSVGKAFILNGIWFG

SEQ ID NO: 341145 - protein, 127 aa, Zea mays
  Clone ID: MRT4577_74292C.1.pep
GSPTTNCEPGQHWHGRSPFRNVPPPQKTKQFHTGAGATAKITRMVHTHARQHMMDGTMTMARLKVALRLSLEQNAVVAGDQLMTQRATLQTAVMRIDNPVNSRHHGGPEQWQVSPAEFRADERGQQT

SEQ ID NO: 341146 - protein, 62 aa, Zea mays
  Clone ID: MRT4577_74293C.1.pep
RALKIPINRIPLGTHQKVYDTGALKAAFAEFISTLIFVFAGLRSGMDFSKLTSSSPTTPAGL

SEQ ID NO: 341147 - protein, 100 aa, Zea mays
  Clone ID: MRT4577_74294C.1.pep
HTIKKKKKKKKKKKKKKKKKKKKKPKKKKKKKKKKKRKKKISFKNAKEKKKKKKGFSLPGGPFKGAIFAIFLHLGGRWAFLLGGPFPLLGGRFKFNGPGF

SEQ ID NO: 341148 - protein, 101 aa, Zea mays
  Clone ID: MRT4577_74295C.1.pep
GGGGGEPPLLQDEQSWLFSLGGRGGKNPNAQARKIFQRPRAVLFYRATTCFQIPFSRDSMNLCLSSLRGGILGLHLRAARKQRGFFPLSFFLETWVIPSFS

SEQ ID NO: 341149 - protein, 199 aa, Zea mays
  unsure (1)..(199): unsure at all Xaa locations
  Clone ID: MRT4577_74296C.1.pep
MTEQQERVSKSSSSSISSSTQESEEELTIGTLITEATNTTNSAKSLGKRLSHLDSIPHTPRVNGKIPDFNNATIDHESLLERLGTYGLAEYQIEGDGNCQFRALADQIFRNPDYHKHVRKAVVKQLKEFRKHYEGYVPMEYKVYLKKMKRSGEWGDHVTLQAAADRXLWLSFWCEVHYNSLYAVEDLPTRKTKKKHWLF

SEQ ID NO: 341150 - protein, 71 aa, Zea mays
  Clone ID: MRT4577_74297C.1.pep
GGARPLFFFLKRGWFFNKGPPKKKKKKKKKKKKKKKKKKKKKKKKKKKKKGRPPTSELVDPGINSGPVPAG

SEQ ID NO: 341151 - protein, 164 aa, Zea mays
  Clone ID: MRT4577_74298C.1.pep
VNCESRRRWRGAAIDVRRLWASKGTRRRRTSTTSSRCTPPPPPPPPEPSPLPAPAAEIRHRQQVAVAKQRALPLPLPGGVGTFSISPAPVSVALPSAVVKSEPPPFVLWGQPAATLQPGARGHQQQWALPFAGSLQVSPPPQQAQPDRKGRGGGGVMDSGSRSS

SEQ ID NO: 341152 - protein, 227 aa, Zea mays
  Clone ID: MRT4577_74299C.1.pep
MTEQQEGVSKSSSSSISSSTQESEEELTIGTLITEATNTTNSAKSLGKRLSHLDSIPHTPRVNGKIPDFNNATIDHESLLERLGTYGLAEYQIEGDGNCQFRALADQIFRNPDYHKHVRKAVVKQLKEFRKHYEGYVPMEYKVYLKKMKRSGEWGDHVTLQAAADRFAAKICLLTSFRDTCLVEIVPRDATPTRELWLSFWCEVHYNSLYAVEDLPTRKTKKKHWLF

SEQ ID NO: 341153 - protein, 90 aa, Zea mays
  unsure (1)..(90): unsure at all Xaa locations
  Clone ID: MRT4577_7429C.1.pep
KHTHPGPRSPIPSAIARCRSYLKTLSGKTXITLQVESSDAIENVTAKIHDKEGIPPYQQRLIFAGKQVQAGRPPADXSIQKESTLHLVSR

SEQ ID NO: 341154 - protein, 124 aa, Zea mays
  Clone ID: MRT4577_742C.1.pep
LNFDVEEPGEMKSKQLESSVETETEVRKEKKKKSKAITEDETEAQIRKEKKSRTIEEEEQAGLVDHSDINDEVYARKEKKKKKSRGIEGGKERDSDGEICSPKRRKSGERSKCLKKRSKKQLVA

SEQ ID NO: 341155 - protein, 76 aa, Zea mays
  unsure (1)..(76): unsure at all Xaa locations
  Clone ID: MRT4577_74300C.1.pep
GFSSPSGSGWGSRGSRGFGFVGERIEMAATDVEYRXDTSGASXTTDAQSLHNALSRYREVVRSKVMLGGSTQRSRG

SEQ ID NO: 341156 - protein, 184 aa, Zea mays
  unsure (1)..(184): unsure at all Xaa locations
  Clone ID: MRT4577_74301C.1.pep
VNCESRRRWRGAAIDVRRLWASKGTRRRRTSTTSSRCTPPPXRRRQGRSSPAPRXKTPPPSQGNFLXRRTTSCSRSIRSQERRRSRRRCPLQPRRSGTGSRWRSPSSARXPSPARRRXPSASAPRPCRSRCRRPSSSRSRRRSCSGANLQRRCSRAREGTSSSGRSPSXGSLQVSPPPQQAHPG

SEQ ID NO: 341157 - protein, 88 aa, Zea mays
  Clone ID: MRT4577_74302C.1.pep
THLSSLIDGIGHTDIYISLFSFLLLFEGCVLRWCCYYMYIYTYYYYGYMQYHTGGTHTQASCSTHLYIHPVIVEAFRSASLSITIIYI

SEQ ID NO: 341158 - protein, 64 aa, Zea mays
  unsure (1)..(64): unsure at all Xaa locations
  Clone ID: MRT4577_74303C.1.pep
HQGHXGAKPLXXXAAVPTPLTVYVLGSTSDEDQXSNHRLASGEHGCDSRRGAMFVWLLXWLSTN

SEQ ID NO: 341159 - protein, 67 aa, Zea mays
  Clone ID: MRT4577_74304C.1.pep
FFLPLARLCAPFVGGPSGSQFLVPLLLPSSNCPFAQPLPFPLVVLARPPPLGFTPPPVVCRFSPKKA

SEQ ID NO: 341160 - protein, 146 aa, Zea mays
  Clone ID: MRT4577_74305C.1.pep
MDEKTQDKVEAAVLEILRGSDMESLTEYKVRTAAADRLGIDLDLPLHKRFVRRLVEDYLKSLAEEEDQKQKGGSRKEGKKKQQRQEEEEQEEDEEKEGEEEEEEEEDKGGEGKKEFDDNGDLILCRLSKNRRVTLQEFKGKTLVSI

SEQ ID NO: 341161 - protein, 60 aa, Zea mays
  unsure (1)..(60): unsure at all Xaa locations
  Clone ID: MRT4577_74306C.1.pep
DELLQGAHFLIXPXPSPPXRTNWSPXGCGXFRTSPPXXRIPPXSSSRSSFLYCRTFGLTL

SEQ ID NO: 341162 - protein, 78 aa, Zea mays
  Clone ID: MRT4577_74307C.1.pep
FSRLAPQRGRPVELGWFCGLILDIARPPFFFCLFIFVFSPFLVFFFFFFLFFFFFFFFGRILLNLSVQNRRPPYILEY

SEQ ID NO: 341163 - protein, 68 aa, Zea mays
  Clone ID: MRT4577_74308C.1.pep
GPEEGEVAWLGMAVAAAAGAAGTAAVMLIYLRLKRRSGARLRSSAGSCRRDAAITKLEDFVVMLLLLN

SEQ ID NO: 341164 - protein, 62 aa, Zea mays
  unsure (1)..(62): unsure at all Xaa locations
  Clone ID: MRT4577_74309C.1.pep
MPPKSKASAAAEPVAVEDLFASFHRHIEAGAFXMAAKVADQVLKAAPGDEVAERCKVVAYIK

SEQ ID NO: 341165 - protein, 143 aa, Zea mays
  Clone ID: MRT4577_7430C.1.pep
YHPLSKGGWVIQRAIKWGQIHFQLILFLDLLTKLKCNIYSYRLLGRRRRRYPSLDAFANLAAPTEARRLAVSTLRPTRRRTKAYDEVAPSRGLVQHEGPHVIWPIVTGPVWPLCITGLICKDFSVITVYNPTLWEYSGDNLGA

SEQ ID NO: 341166 - protein, 96 aa, Zea mays
  unsure (1)..(96): unsure at all Xaa locations
  Clone ID: MRT4577_74310C.1.pep
SPSSLLNTSFLVVPDXYXYQFSERMDLCSYRVLRLGSTMXLRVSIICDTVXAHEAXGSYCTWDPKQTWTFIPSPRLSIYFHSSXYPHWEGCRRGRR

SEQ ID NO: 341167 - protein, 631 aa, Zea mays
  Clone ID: MRT4577_74311C.1.pep
MASWPSSPVRDIRKWMGDFRDIRNVAKYAAILGQSFSSSTETLKVHKSEVERIPDITNGTKYIFSDGVGKISANFAVEVAMKCKLKRFAPSVFQIRYGGYKGVVAVDTRSNHKLSLRKSMSKFQSENITLDVLAYSKYQPCFLNRQLITLLSTLGVSDNVFELKQKEALRQLNRMVTEPQAAREAVELMPMGEVTNVVKELLSCGYQPDHEPYLSMLLQTFRASKLLELKTKSRIFITQGRAMMGCLDETCTLKYGQVFVQASYSADDHRKVVVTGKVVVAKNPCLHPGDIRVLQAVDVPALHHLFDCVVFPQQGPRPHPNECSGSDLDGDIYFVSWDPHLIPSRLVDPMDYTPASAETLDHDVTIEEIQEYFTNYIVNESLGIIANAHVVFADQERMKAESPPCVQLAKLFSIAVDFPKTGVPALIPHELHVKEYPDFMEKLDKVTYESKGVIGKLYREIKKHTPHIKHFTREVARRSYDTDLIVDGYEDYITEAIEFKEEYDFRLGNLMDHYGIKSEAEIISGCILKMAKNFTKSSDADAIRMAVRSLRKEARSWFNEMSTGEDGQDAMEAKASAWYHVTYHQQYWGSYNEGYDRPHLISFPWCVYDKLVAIKQGRNLLTQMDRNLRFR

SEQ ID NO: 341168 - protein, 60 aa, Zea mays
  Clone ID: MRT4577_74312C.1.pep
LANTVPKFTVDFLVACMVHIHDFTANTNEARNCVSLTVPSVNTCFTTGMSARTLKAFESF

SEQ ID NO: 341169 - protein, 56 aa, Zea mays
  Clone ID: MRT4577_74313C.1.pep
PPSSLFNTSVFLITNTTNLSHQHFIINPTNSSQIPFLYLISNYLLYLILAITNRST

SEQ ID NO: 341170 - protein, 35 aa, Zea mays
  Clone ID: MRT4577_74314C.1.pep
IELMINQLCLCVLLVYPKMIMGLASVPVCALLFNE

SEQ ID NO: 341171 - protein, 62 aa, Zea mays
  Clone ID: MRT4577_74315C.1.pep
IWGKSKDHLGNGGKPAVAELPLTSAPNGGTNGYGKHALGGGGGGHHVAAGVEAPPPSSKCVH

SEQ ID NO: 341172 - protein, 65 aa, Zea mays
  Clone ID: MRT4577_74316C.1.pep
YFIHFQSHAAFCNLGSYRPPDPLVSFVSTDCYPFVRSAQQSCVLCLVQYYTFHRITPPMILVFVY

SEQ ID NO: 341173 - protein, 134 aa, Zea mays
  Clone ID: MRT4577_74317C.1.pep
GSVAPLRRCILRYVDVLLIYYKQPCLFHPCITHHLSWDYISSTGYHRSILFLNRSQIGVENGSTGGVARRRGRCRRGAAAPHLFLNRSQIGNRGGVAGRRSRRRRGAAMPPRAHPPPCLRHGRRSPLGTNSHAS

SEQ ID NO: 341174 - protein, 255 aa, Zea mays
  Clone ID: MRT4577_74318C.1.pep
MATTAAASTSLRPLSPSPPRIASLPRRWCWGIPVQSSGRSAFHAERRRRSTLLCAADKAPEESLKKTIEVDRLIDMLRDANPRELDQIVVENVLAFDAGFWVRLAARIDLCKSDDDKKDYEELAENVMNIVDRLVHKTDQKIEQSTDVLKAIISPAMHEGDVKWPPRDPDTLKLMEKEITRREQEGQLDEGFLSEVSAQLRQAKQDGDKPGLQAMLQKVLQLYASKSLQKRSYAYKGGQVVVPEKFLECVIQAPE

SEQ ID NO: 341175 - protein, 298 aa, Zea mays
  unsure (1)..(298): unsure at all Xaa locations
  Clone ID: MRT4577_74319C.1.pep
IVVQIKVLIHLFFCKQLDQIVVENVLAFDAGFWVRLAARIDLCKSDDDKXDFTYVENFTFYGWCYLLSQINLTLQLVSLFCLXKDYEELAENVMNIVDRLVHKTNQKIEQSTDVLKAIISPAMHEGDVKWPPRDPDTLKLMEKEITRREQEGQLDEGFLSEVSAQLRQLSLYVXAKQDGDKPGLQAMLQKVLQLYASKSLQKRSYAYKGGQVVVPEKFLEXLKEIHXDEWNKVLLDGLTVGKGDVSPDDLYAVINKRIERVLIRTEGGSYQQRILVEYLKEIQARAEEVVKVLQGPTI

SEQ ID NO: 341176 - protein, 108 aa, Zea mays
  unsure (1)..(108): unsure at all Xaa locations
  Clone ID: MRT4577_7431C.1.pep
KLQRAVYIFSNSTRFVKMFSSIVSKLALMXAKRAFVHXYVGEGMEQATFSEARKDLPALEKDKKKLGAKCNKRKKGNNGDENKKNPNAVIVRLVCSSCPRCGIHNLML

SEQ ID NO: 341177 - protein, 41 aa, Zea mays
  unsure (1)..(41): unsure at all Xaa locations
  Clone ID: MRT4577_74320C.1.pep
VMWFGKKGESFIKKVILWGALGNGVVEMSYGIHSFIKTXNT

SEQ ID NO: 341178 - protein, 236 aa, Zea mays
  unsure (1)..(236): unsure at all Xaa locations
  Clone ID: MRT4577_74321C.1.pep
MATTAAASTSLRPLSPSPPRIASLPRRWCWGIPVQSSGRSAFHAQRRRRSTLLCAADKAPEESLKKTIEVDRLIDMLRDANPRELDQIVVENVLAFDAGFWVRLAARIDLCKSDDDKXDFTYVENFTFYGCCXFISINLTLQLVALFCLXKDYEELAENVMNIVDRLVHKTDQKIEQSTDVLKAIISPAMHEGDVKWPPRDPDTLKLMEKEIXRREQEGQLDEGFLSEVSAQLRQL

SEQ ID NO: 341179 - protein, 157 aa, Zea mays
  Clone ID: MRT4577_74322C.1.pep
AHEVRHLAVARGCFRGKRTHRRPAHARRAAAPSTCEPIRLYFSTPISKHKIKIYPTLHTRHTTRTHTPPLPLHPASVSGRRWRRPPPHPRRSGRCHRPHLASRVCPVGGVGESRCSPPGGAHSMLNGGGGALYYALLIKLLKNPSRRPLKWIGLLIC

SEQ ID NO: 341180 - protein, 82 aa, Zea mays
  Clone ID: MRT4577_74323C.1.pep
MGDTDETVANQVTGETVANQVTEVVDVEKDGECKKRKAIAQRSDAWEHFSKVKLDNGDERVKCKYCAKLFRCDPKINGTSSM

SEQ ID NO: 341181 - protein, 230 aa, Zea mays
  Clone ID: MRT4577_74324C.1.pep
MSFLAKLVRSTNRAPLRNQVAKVKPADSAEQVRKWMTTMTSKAVSNESKNYVVQLSSVISFFNRPAQAEEIPEINWDQWRNEIFTEGLVDKVKANYETLASEEYNVENVITQLVSTPSKELEEITNELFYHGAVWMNAYTDYSVFLYDLGEYGNSNDYLMHENYDFFYGLEAELEELIETHNYFPGSKDDINLRGYYAAQFNWGKKVISYYRHPADDFKAGRATKNILGR

SEQ ID NO: 341182 - protein, 69 aa, Zea mays
  Clone ID: MRT4577_74325C.1.pep
GSRLHARGFRVGSYPHPGCVIVEPWRTGSSSHLVDSHYHLVDYDSDHRMADAVVIFSFSLEALYVPRST

SEQ ID NO: 341183 - protein, 122 aa, Zea mays
  Clone ID: MRT4577_74326C.1.pep
ARPRLSRGVHAAGVARGKRRRPHRRAAPAHAPQARVPAAGAEEGALHAEQPEARRHPWHLRRRGRGIERRRELAGAHGELLRRSRRMRKESEMLLCVMERENRLESLSCAFLLALAVAARIK

SEQ ID NO: 341184 - protein, 72 aa, Zea mays
  Clone ID: MRT4577_74327C.1.pep
PADSDRLLPHYGHQHWVAEAGGQTWLKQVCAELRGLYLALMSSARQFTTSHLRFGLSPNTRCLYERTFLTVM

SEQ ID NO: 341185 - protein, 51 aa, Zea mays
  Clone ID: MRT4577_74328C.1.pep
LVIKGKKKKKKRAASKDTYDLLHAYFYGLNNMARYNADWKTCVPNLMLRHP

SEQ ID NO: 341186 - protein, 43 aa, Zea mays
  Clone ID: MRT4577_74329C.1.pep
TNDPTTAKTQVAKVQSTMQRRPHAEETSPAPDHSHGTGGADGA

SEQ ID NO: 341187 - protein, 80 aa, Zea mays
  Clone ID: MRT4577_7432C.1.pep
QYAEKITMRFRVVHQLVSCECSILRTELLMDRSRLHIYPVSVQVQIFEPHHYDAFPSYLAKDGCRWNAVVFQQCCRFDAS

SEQ ID NO: 341188 - protein, 192 aa, Zea mays
  unsure (1)..(192): unsure at all Xaa locations
  Clone ID: MRT4577_74330C.1.pep
MCTALSFKDLELLALLSVATVTSVARVEQQLKYNANTASQDRSLMAYKIECVPAKDTCHRNPTEAGPDHQGVACGFXGTNHYPISTMTSCGNQPIFKDCKGRXSCYQIPRLKSNHPTCSGVTQTVIXSDMNYYPVAKYXHFDLNGTPIXSMTRWCLNQKLPHAGIIYMQCTRLTCNFHSLTITFPVQHGSNP

SEQ ID NO: 341189 - protein, 193 aa, Zea mays
  Clone ID: MRT4577_74331C.1.pep
MILSKPNDVSEDEDKISSGNADDLSLHPTKLNQEEIQELKTESEEGRSLESGSSPSKASLPNKDHVSMNDVEADTVTIPKETVADTAPTGLDPDGIDERQDGVAPKYSSIHNSVLYESYDDKIAEDTHSLLDDGLSTTFDDDKHVAEDHQIVVLEQRTCPTSLTHARMILCKDVPWPGISLMLKSFRESFQVY

SEQ ID NO: 341190 - protein, 49 aa, Zea mays
  Clone ID: MRT4577_74332C.1.pep
RLQAQILVCIKVVFGSPWVMVSQWKLKNGGFQINECHYMICLVKFCNTF

SEQ ID NO: 341191 - protein, 107 aa, Zea mays
  Clone ID: MRT4577_74333C.1.pep
EKHKGGSIHKPTGVWGGNFVRPRAYYRTENPWPTLPPPKKPPPPQTNKILWQHMEQTKPHKKTWKIGLAKIKIRFNLHPPALGIFIPPWPRTPRALDTRLGERETRW

SEQ ID NO: 341192 - protein, 78 aa, Zea mays
  Clone ID: MRT4577_74334C.1.pep
RRTRRYPNWSQSIIRFFSEFTTQVSIRHNLSRKIAEINLRLEDIINNKEKYKIEAAPNDFPLVTWKPSTDISTVAKSL

SEQ ID NO: 341193 - protein, 51 aa, Zea mays
  Clone ID: MRT4577_74335C.1.pep
ITGYNLRYSYLEKLCAIVSFSPLCSAVIYAFEKHAAKPLNLLFKTMPTLLG

SEQ ID NO: 341194 - protein, 246 aa, Zea mays
  unsure (1)..(246): unsure at all Xaa locations
  Clone ID: MRT4577_74336C.1.pep
MEEKVLVAVGVAVLLVVVLSKLKSVLVTKPKLNLPPGPWTLPLIGSTHHLVTSPSIYRAMRDLAQKYGPLMMLRLGEVPTLVVSSPEAAQAITKTHDIAFADRHMNTTIGVLTFNGTDLVFGPYGERWRQLRKICVLELFSVARVQSFQRIREEEVARFMQSLAASAGAXVNLSKMISRFINDTFVRECIGSRCKYQDEYLDAFDTAVRQTSVLTVADLFPSSRLMAGCGHGATPTRSSAATGSRA

SEQ ID NO: 341195 - protein, 175 aa, Zea mays
  Clone ID: MRT4577_74337C.1.pep
PFPVDAGFSPFGFGGTAPRTPPLGVPPSVPGGGFLFPFPHPLFPVRWRVLFSSWHGGFPVFQAAPGLLRLSFCWVPPWALRALPFLLPARVFFVFLPASRFPPGPRFAPVSARLGPLLGSPSNVFRCLFFALSRFNVQVFLKKKKNNKKKNKKKKKKKKKKKTKKKKKKKKKKAC

SEQ ID NO: 341196 - protein, 98 aa, Zea mays
  Clone ID: MRT4577_74338C.1.pep
MASNYVDTTGEEGRLHTHGHHSNSTTPTGEAASPKNTRRRWPGSASAPSGAGHGPASKCVCAPATHAGSFKCRFHRTNSQGHGHGQGQGSRPSSPPSP

SEQ ID NO: 341197 - protein, 78 aa, Zea mays
  Clone ID: MRT4577_74339C.1.pep
KILFMGVKNKPHPGGFYNPPALFWNHFKKQPPLFGKGGPIKKKMPPYPTLRVPPKRKGPPPPPRGLKTPPGETHFRNK

SEQ ID NO: 341198 - protein, 45 aa, Zea mays
  Clone ID: MRT4577_7433C.1.pep
FLSSLFYADKLFIGIFFDFFFFLFIFFFLFQPKKAEGLLTKKKDF

SEQ ID NO: 341199 - protein, 140 aa, Zea mays
  Clone ID: MRT4577_74340C.1.pep
RRGFRIDRFRSVSFLPFPSSGHSHGAWRRWPWSAPHWRRGSISPGPQAAGSAKGEDSLHAVAVAAHRARAQLKETSGVWRLYGSDGRRPPTPRSCPLMGMTCNVGGFDDAHRNPFGGQCLPDSLPSVTDGSWLTPIGQWA

SEQ ID NO: 341200 - protein, 124 aa, Zea mays
  unsure (1)..(124): unsure at all Xaa locations
  Clone ID: MRT4577_74341C.1.pep
MPCPVATATRCSVEEADGAAKGDGPGLSASDLGTTYXSAVGVWQHXDRVEIIANDQGNRTTPSCGGFTDSERLIXDAAMNQVVMNPXINTVFDAKRLIGWRFRDXASVHSDIKIGPSKAMFRSC

SEQ ID NO: 341201 - protein, 145 aa, Zea mays
  Clone ID: MRT4577_74342C.1.pep
SAAVGPPLARAAASTPRFQIFRPATEMASNYVDTTGEEGRFHTHGHHSNSTTPTGEAASPKNTRRRWPGSASAPSGAGHGPASKCVCAPATHAGSFKCRFHRTNSQGHGHGQGSRPSSPPSPVAANAVPRHPASPSSSSGTVTTQ

SEQ ID NO: 341202 - protein, 69 aa, Zea mays
  Clone ID: MRT4577_74343C.1.pep
ESASILVQVSGAIPLPIHHPIQSASPRHPWRRRRRPPRRRRRGQRRSPTCLLAHLRSEIKEFFFFTGDI

SEQ ID NO: 341203 - protein, 70 aa, Zea mays
  Clone ID: MRT4577_74344C.1.pep
FRLPPPLPLTLAHAPPSPPPPFFTCCRKADTGKATARSTDASSRKQMSCESPSLVLVGRLLCIEQRSGEA

SEQ ID NO: 341204 - protein, 224 aa, Zea mays
  Clone ID: MRT4577_74345C.1.pep
MNTEYLRVKKLQQEAARCLSLHKTMELQPELSLGPVWPGFAAGDLAAKSSSSESDGTSRKKRKHYTASWEEPQQPPASLELQLNDPLPLDWEQCLDLQSGRMYYLNRKTLKKSWVRPQVQSVNLDLNISTAAAIDNCAANGAAAAASDDEDEPRKPAGTLFSGGSMVAVPCANCHLLVMLCKSSPSCPNCKFVQPLAPAVPPAAVAHWRIDAAVKPLETLSLLH

SEQ ID NO: 341205 - protein, 43 aa, Zea mays
  Clone ID: MRT4577_74346C.1.pep
AMSNALESTSRDLYHSRYPSGLRHTFPSVIQVLDLIRQSYQRW

SEQ ID NO: 341206 - protein, 58 aa, Zea mays
  Clone ID: MRT4577_74347C.1.pep
VAHVDDILLVRDRLPVDHALEAPVVGESILYCQKCPRIPPSELRGHHIPRALYHACVV

SEQ ID NO: 341207 - protein, 67 aa, Zea mays
  unsure (1)..(67): unsure at all Xaa locations
  Clone ID: MRT4577_74348C.1.pep
XLXRWVAXRXGSVSSVGXLAXLVVAXXRXGGLXXXLGCXAVXXVAPRPPPAXXLRAISCSWRPFLVV

SEQ ID NO: 341208 - protein, 50 aa, Zea mays
  Clone ID: MRT4577_74349C.1.pep
TRSRNCQISMRLYFPCALIRGALTPLGMQCSVSADMSNLSACSFVVRTKT

SEQ ID NO: 341209 - protein, 52 aa, Zea mays
  Clone ID: MRT4577_7434C.1.pep
ILRTLFIKLVPESTVLRRLLLHVPDNLDMVIFPTYQSNIDRMTLMIHLLRPL

SEQ ID NO: 341210 - protein, 100 aa, Zea mays
  Clone ID: MRT4577_74350C.1.pep
LQALRPLTPLSAFLSQLQAVRLSATVLTALFRFLISVTAVFVLFCYFVLRLYYSYCFFFLFYLFLFYFVFKAVKHRMNCTARVGGRVGVRVVGCVGRTRG

SEQ ID NO: 341211 - protein, 168 aa, Zea mays
  unsure (1)..(168): unsure at all Xaa locations
  Clone ID: MRT4577_74351C.1.pep
GLGTPPAPGFFKPAPGGLAGNKVRQGLGLPMAPRVKGGAKTGAQNLWVISGEGHQGHLDCLPSERGGDLVLAPLKKGKAPPRKEVMPPVLVXQGNSWPPKGGVNMSLPNNPGEIXYPHGAIEGFPTPGPIVKECCDFWPRIACPANSLVLEPVGIFFVFQIFFLLTVG

SEQ ID NO: 341212 - protein, 123 aa, Zea mays
  Clone ID: MRT4577_74352C.1.pep
EKRSFNLGGKEIKDDPYLTGISQGLTGPKKTSQISRTFIHAPHPYNNRIKKAGKTGPLPTHDQKSSAERTGSPALPAKPPSKWFPPPPWKHPPKGPSKRNPPHGGPWPNPHAGGPTCPPPWPP

SEQ ID NO: 341213 - protein, 121 aa, Zea mays
  Clone ID: MRT4577_74353C.1.pep
LCRGMEVEALEKKGHAAFAKAMKSFGSSERYKRSTRYFEDMYATDALRSSDKTIVLPMPEVVKAKVKCDITKEAQPGRGAQSTLRKEILQLEKHLKDQQAVRGALEKALGPNAGPVSLSPE

SEQ ID NO: 341214 - protein, 94 aa, Zea mays
  unsure (1)..(94): unsure at all Xaa locations
  Clone ID: MRT4577_74354C.1.pep
RITAQQLPQRVLSTINQVVAANLAXYLQQQQFLSFNQLTGGNPGGYLQAQQLLPFNQLGGNPAGILMEQQVLAFRLPSGANLGGFLQQPPLVAF

SEQ ID NO: 341215 - protein, 275 aa, Zea mays
  Clone ID: MRT4577_74355C.1.pep
MDMEEQLLHLEHFMPSSPGFFDVGSGHDPAHFPNGGLFVEQVGATDDGGWVEELMQLGEELFGGPGDGGIMGDADDHYQQWQCDDDVDGGSPDGGPPPSVSLDGDDASPGEQGAGELASEPHREDGDDVSGATRKRRDRSKTIVSERKRRVRMKEKLYELRSLVPNITKMDKASIIADAVVYVKNLQAHARKLKDEVATLEARPRSPTRQDQPQHGRRAGPGRRRQQQQQQVERRDAGSAGAGARVTHVGAAQVGDGRFFVTVECERRDGVAAPC

SEQ ID NO: 341216 - protein, 144 aa, Zea mays
  Clone ID: MRT4577_74356C.1.pep
MASSTMAWASPAFAGKAVKPAASDVLGSGRVTMRKTVAKPKGPSGSPWYGSDRVKYLGPFSGEPPSYLTGEFPGDYGWDTAGLSADPETFARNRELEVIHSRWAMLGALGCVFPELLARNGVKFGEAVWFKAGSQIFSDGGLDY

SEQ ID NO: 341217 - protein, 245 aa, Zea mays
  Clone ID: MRT4577_74357C.1.pep
MAMVTIDNAAATIAAAEKPQDAEKPDYAPYNGASTAADGGTGAGVRGGGGGGRVVDSVVARWRREDMLDKSPLALHGAAAVFALVALVLVASNQHGGWMQFDRYEEYRYLLAIVSLGLLYSLAQAVVAYLLMSALSAAVPITNRMRSAVVNNFTDATAAAISMAFFAFVALALSAVVSVGSMCVHRIMRGIPEYDCFPFLDIVVMMRTFNFYEHKQKLSCTGDPMGDPYPCGYGYGGGSSMFGAH

SEQ ID NO: 341218 - protein, 34 aa, Zea mays
  Clone ID: MRT4577_74358C.1.pep
VVQMAAANQHCFHEEVRVRPRVRNAPRLRVGPGI

SEQ ID NO: 341219 - protein, 216 aa, Zea mays
  Clone ID: MRT4577_74359C.1.pep
MAMVTIDNAAATIAAAEKPQDAEKPDYAPYNGASTAADGGTGAGVRGGGGGGRVVDSVVARWRREDMLDKSPLALHGAAAVFALVALVLVASNQHGGWMQFDRYEEYRYLLAIVSLGLLYSLAQAVRRAYRMRGGADPVSSASGRLLDFVGDQVVAYLLMSALSAAVPITNRMRSAVVNNFTDATAAAISMAFFAFVALALSAVVSGYKLSKQTYM

SEQ ID NO: 341220 - protein, 94 aa, Zea mays
  unsure (1)..(94): unsure at all Xaa locations
  Clone ID: MRT4577_7435C.1.pep
RILVSLSRKKCSNRPLPTSRAVYTTRPTGEAPITYYPGQDKLTTSGDGGDRGVGGTVARPAKISGEKEKMGGGEEKRKKKXKGGXKKKKEKKKX

SEQ ID NO: 341221 - protein, 113 aa, Zea mays
  unsure (1)..(113): unsure at all Xaa locations
  Clone ID: MRT4577_74360C.1.pep
LKNNPLQHYFMVSTHQGVHANPDYPNMGGGLGNRXNEANLTEMSGERNKEHDYLCTLTSMIXTLQDTARSISNKACTLPFTCLCGMDPHLHKPASCLHNSCPVSSLPPSPFFY

SEQ ID NO: 341222 - protein, 91 aa, Zea mays
  unsure (1)..(91): unsure at all Xaa locations
  Clone ID: MRT4577_74361C.1.pep
PTVLGVCGYGSLMRNPGFDFDDKILGSIKGYKRTFNLXACIDHIGTPEHPARTCTLETDDXAICCGIAYCVXGWPRKRALXAIQCLEKREC

SEQ ID NO: 341223 - protein, 118 aa, Zea mays
  unsure (1)..(118): unsure at all Xaa locations
  Clone ID: MRT4577_74362C.1.pep
MDYCCIFSLPRYLLSIASLALLYSLAQAARHAHRXRRRRPRLLSIXRLLDFVGDQVVAYLLMSALSAAAPITNRMRSAVVNNFTDATAAAISMTFFAFAALALSAVVSGYKLSKQTYM

SEQ ID NO: 341224 - protein, 94 aa, Zea mays
  unsure (1)..(94): unsure at all Xaa locations
  Clone ID: MRT4577_74363C.1.pep
MRSMASGGGVPTDEEQATGLEREIMLAAKKGLDPYNVLAPKGASGTREDPNLVPSISNKRIVGCICEEENSVVXFWLQKGRDPKRCPRCGAQYK

SEQ ID NO: 341225 - protein, 65 aa, Zea mays
  Clone ID: MRT4577_74364C.1.pep
ISHAGRLVGRYAAGGSRHAGRVKVGSSSRSGRDAGSLRCVRERHGPALNNVNARGARERRHPVGG

SEQ ID NO: 341226 - protein, 62 aa, Zea mays
  Clone ID: MRT4577_74365C.1.pep
KFSVRRLHSYHNDRQPYFDIKPVTTHVPEGRKTEVDDVVLRGFFLHQQALGLQHVQRQIFHR

SEQ ID NO: 341227 - protein, 82 aa, Zea mays
  Clone ID: MRT4577_74366C.1.pep
VCSSPSGRVQYIGGQFGWWNVRAHYFVQRLRASRVISLNARKIVCVARSAMMLRVQVIARHEHFEPNLCCSCGQCSCVRHHQ

SEQ ID NO: 341228 - protein, 92 aa, Zea mays
  Clone ID: MRT4577_74367C.1.pep
MAASTVASHSVPETTTTFAAAAAAGGADVLIDDPRRAGAGRDRIPAAARRGGGSGRKDAERTSGPATPPEITDKVPESNKQAEETCADEQKG

SEQ ID NO: 341229 - protein, 83 aa, Zea mays
  Clone ID: MRT4577_74368C.1.pep
FSLSIFLYIGVVLIGVVSSVSIICVVHGRGGGVCVATEWRIGGRVVADSETYADGFGGKEGDGEGGAEEAKGSEREGRWRSRP

SEQ ID NO: 341230 - protein, 102 aa, Zea mays
  Clone ID: MRT4577_74369C.1.pep
SLARAFVLGLDWQKQACLPPWPQPREVDRVPKILCKCCLHAPLLRGPRHGVFPGVSFPWREKSGVSKRVGSIFQACSFRSPDGVSPKNGKCCWKILDLLNPF

SEQ ID NO: 341231 - protein, 50 aa, Zea mays
  Clone ID: MRT4577_7436C.1.pep
GCPGHSWDLQSVGPAWRYFPSKHVQAQSEFQVSLFRAILRSLNPAQCQTA

SEQ ID NO: 341232 - protein, 57 aa, Zea mays
  Clone ID: MRT4577_74370C.1.pep
VLAASQESRTTTSGGNPNTILPLFTLTLLTHTTSLSIALPDPEASHPRTSTRTATST

SEQ ID NO: 341233 - protein, 95 aa, Zea mays
  unsure (1)..(95): unsure at all Xaa locations
  Clone ID: MRT4577_74371C.1.pep
VWEAPPPPVSLSLPRCVQFMNPPGILQPFFCLDVPPFSVFIPMSLVQYDXHPITKRQVGLCLFDGLVAESPPPLFGLRRRTIFFLYLPGSKPAPS

SEQ ID NO: 341234 - protein, 337 aa, Zea mays
  Clone ID: MRT4577_74372C.1.pep
MSGRVFVLAAAFGVLLAAAAVSSRPVLTPLGTSRPAAGDLSVYFHADSCPQLETIVRSSVDAALQQNVRLTAGLLRLLFHDCFPQGCDASILLDNGERGLPPNVGLQQEAVQLVEDIRGKVHAACGPTVSCADITVLATRDAVSLSGGPSFTVPLGRLDSAAPASSNDVFTLPPPTATVDELLTAFGSKNLSDPADLVALSGAHTVGKARCSSFGDVAGPATDDVTRCVTATCSAPGSGDTLRDLDFLTPAVFDNLYFVELTLRKNKGVMLPSDQGLVSDPRTSWLVQGFADNHWWFFDQFRTSMIKMSQLRGPQGNVGEIRRNCFRPNTNGIAASA

SEQ ID NO: 341235 - protein, 155 aa, Zea mays
  Clone ID: MRT4577_74373C.1.pep
LTAFGAKTLSDPADLVALSGAHTVGKARCSSFGDVAGPATDDVTRCVTATCSAPGSGDTLRDLDFLTPAVFDNLYFVELTLRKNKGVMLPSDQGLVSDPRTSWLVQGFADNHWWFFDQFRTSMIKMSQLRGPQGNVGEIRRNCFRPNTNGIAASA

SEQ ID NO: 341236 - protein, 82 aa, Zea mays
  Clone ID: MRT4577_74374C.1.pep
TQLENILYSICKAGLHRLRLQQSTSTKAYNNRCACHTWCRRSSPSSVTRCAYLDICIIYRRFILSTTRPLHLTLGPSCVLSC

SEQ ID NO: 341237 - protein, 171 aa, Zea mays
  unsure (1)..(171): unsure at all Xaa locations
  Clone ID: MRT4577_74375C.1.pep
MTEVADASPPPPTAGGGDRKGGGASPVPPLPGQHKRRREEGGGGFNRRRLGPVGGGGHEQDDRRYGNGLGGIXGRGGDGRYTNRAPDSGRGGWNEGSGNSRREGLMSYKQFIQELEDDVSPVEAQSRYEEFKSEYITTQKKAYFALHKXEDWLRNXFHPTNLENVFERRNE

SEQ ID NO: 341238 - protein, 57 aa, Zea mays
  unsure (1)..(57): unsure at all Xaa locations
  Clone ID: MRT4577_74376C.1.pep
LLXXLSTXLIXQNXXXYFYQPLLYILPNIFLTHXLQYNHHNLIHQISTYQXLLLYFT

SEQ ID NO: 341239 - protein, 49 aa, Zea mays
  unsure (1)..(49): unsure at all Xaa locations
  Clone ID: MRT4577_74377C.1.pep
WKXGCGGRGSGYHRHPTISAALTDEKGRGVDCALISVERIRRLLSYLTD

SEQ ID NO: 341240 - protein, 618 aa, Zea mays
  Clone ID: MRT4577_74378C.1.pep
MHGAFPPDIPAPPVLMPVPGAGPLGPFIPAPPEVAMHMLRDQGAPPPFEPSGGPHPRKAGTGSGGPPMRGPSPVFSAPLPHHGNRCEEGAGNSRREGLMSYKQFIQELEDDVSPVEAQSRYEEYKSEYITTQKKAYFALHKDEDWLRNKYHPTNLENVIERRNELARTTADDFFLQLQSGSLDTGPGLTGSAVSKSGNNSSKNLDAVEGDGKKGKLGKGSDDSYYAAPKAHPVSSEVRRIRIDIEQAQGLICKLDSEKGIENNILSSSNHEKSDRDKSHGSMGPIVIVQGSSTVKGLEGTELLDTLVTYLWRIHGVDYYGMSETNEPKGLRHVKADARTYNGASSSATEWENKLDSFWQDRIQGQDPLEILKAKEKIDGAATEVLDPYVRKIRDEKYGWKYGCGAKGCTKLFHAAEFVQKHIKLKHTDLVVDLTSKAREDIYFENYMNDPKAPGGTPIMQQPAPRGKGRQRPPIESRLRDERGNHRLDSDGSGENPDDPVYDSFGDPTMHGAFPPDIPAPPVLMPVPGAGPLGPFIPAPPEVAMHMLRDQGAPPPFEPSGGPHPRKAGTGSGGPPMRGPSPVFSAPPPHHMHDPRRIRSYQDLDAPEDEVTVMDYRSL

SEQ ID NO: 341241 - protein, 526 aa, Zea mays
  Clone ID: MRT4577_74379C.1.pep
MSYKQFIQELEDDVSPVEAQSRYEGYKSEYITTQKKAYFDLHKDEDWLRNKYHPTNLENVIERRNELARTTANDFFLKLQSGDLDIGPGLTGSAVSKSGINSSKNLDAVEGDGKKGKHGKGSDDSYYAASKAHPVSSEVRRIRIDIEQAQVLIRKLDSEKGIENNVLSSSDHEKSDRDKSHGSVGPIVIIQGSSTVKGLEGAELLDTLVTYLWRIHGVDYYGMSETNEPKGLRHVKADARTYNGASSNGAEWENKLDSFWQDRIQGQDPLEMLKGKEKIDGAATEVLDPYVRKIRDEKYGWKYGCGAKGCTKLFHAAEFVQKHLKLKHADLVVDLTSKVREDIYFENYMNDPKAPGGTPIMQQPAPRGKGRQRPPIESRLRDERGNHRFDRNVDSPKRDGSGENPDDPIYDSFGDPAMHGAFPPDIPAPPVLMPVPGAGPLGPFIPAPPEVAMHMLRDQGAPPPIEPTGGPHPRKAGKGGGPSMRGPSPIFGAPSPHHMHDPRRIRSYQDLDAPEDEVTVMDYRSL

SEQ ID NO: 341242 - protein, 104 aa, Zea mays
  unsure (1)..(104): unsure at all Xaa locations
  Clone ID: MRT4577_7437C.1.pep
MGVKFLVLLGVVLASLVFQDVAFARELTKANNEDEGKNMKQGGMTELKDEKWGGGYNGGYGYGGGYGXXQERDEDVNGGSCGIVLEVGNREGGGEGGLVDCGFF

SEQ ID NO: 341243 - protein, 79 aa, Zea mays
  Clone ID: MRT4577_74380C.1.pep
GELFHTHLTSHHEMDVPSYDGSHKHTHPPHKKAATNRPAALAAKAKRARASIRTTYTWPASSAPCATNASSAPTINPDA

SEQ ID NO: 341244 - protein, 82 aa, Zea mays
  unsure (1)..(82): unsure at all Xaa locations
  Clone ID: MRT4577_74381C.1.pep
AWVDVRSPSVCPTYRCSTCNNTASPISVPNLXSXWNIFRYARKNYSNNKILSRLEIVHGKAGSYTWLTYKQLYYTVLNVRSA

SEQ ID NO: 341245 - protein, 67 aa, Zea mays
  Clone ID: MRT4577_74382C.1.pep
DLGGTLYNRAGHYSLPLDIKGCHSLGSSSSSWRGGGAAPHIPFQPCTSHQGYFPQHGPFYQTQQIAP

SEQ ID NO: 341246 - protein, 67 aa, Zea mays
  Clone ID: MRT4577_74383C.1.pep
CVIERLNGACSTGVLLSTSITTSYSSDWLYTHATLYAKPTDASLDVSRCCCSFKVLNKPSFHSMCSC

SEQ ID NO: 341247 - protein, 112 aa, Zea mays
  Clone ID: MRT4577_74384C.1.pep
PFLTFKMAPKFKEFFWAQVGVPPPSLEGFPNTLPKNDSPYPIYDFAFVPPKNVQKTRFFFFLWSPPPPKVKTKIFFSSSTQKFKRGPNGLQGELPAFYPSEIPLFEIKDGAP

SEQ ID NO: 341248 - protein, 67 aa, Zea mays
  unsure (1)..(67): unsure at all Xaa locations
  Clone ID: MRT4577_74385C.1.pep
FPCRRCSYVGGRPXFXGFFFWEILAFLFHSLKGKKRLDDSIPSMLLLTFNHFETTLPIFSQIKHIYS

SEQ ID NO: 341249 - protein, 112 aa, Zea mays
  Clone ID: MRT4577_74386C.1.pep
PPPHAPHLPRTPSLCPVYSTVAVTAPPSIDGTRRHNFLHPIHASLMEGIHADVEMYGIHVEVVEGKRNPSLTTGPFHPRCPLTIDGALQHTICSCYILIQRENTVELILQTE

SEQ ID NO: 341250 - protein, 73 aa, Zea mays
  Clone ID: MRT4577_74387C.1.pep
EAQGSCTPRLNHQMRAGKVIRLHNHFPGTMLSKYHEADLGVYLWGIVMDLANRMLADSLDWGPVKNQTATPQK

SEQ ID NO: 341251 - protein, 100 aa, Zea mays
  Clone ID: MRT4577_74388C.1.pep
PWSTISPIGVSLSAFAAVLPRPFRLVALLSRQSLGFQALSPAASASCWPSGRWPLCAAISFPHSGSAGHGRQPVVSFAAALICFPPPQFLACSAWVLSFF

SEQ ID NO: 341252 - protein, 73 aa, Zea mays
  unsure (1)..(73): unsure at all Xaa locations
  Clone ID: MRT4577_74389C.1.pep
GVDAYSISCGSSLRXNSMFPRPKERLFNKVVYVARQVAKVQVPSYRRHLDVVVACEDADDNDVDIPLVSIYFR

SEQ ID NO: 341253 - protein, 104 aa, Zea mays
  unsure (1)..(104): unsure at all Xaa locations
  Clone ID: MRT4577_7438C.1.pep
MPHVTVLPDALKRMLNAQHIGKQPLLHLPPSNEIINLLTAMHLHGYLGHVHHLDDHRPAKIXVELNGILNKCEVITPRXDDVLDERDQMDVRGIVLPSRQIGYI

SEQ ID NO: 341254 - protein, 712 aa, Zea mays
  Clone ID: MRT4577_74390C.1.pep
ELTRFPIAGSADDAQKLIDLAIGINETLGESKLEEIDKKLLQHFASGSRAVLNPMSAMFGGIVGQEVVKACSGKFHPLYQFFYFDSVESLPVEPLEPSDLKPENSRYDAQISVFGAQLQKKLEQSKIFMVGSGALGCEFLKNLALMGISCSQNGKLTVTDDDVIEKSNLSRQFLFRDWNIGQPKSTVAATAAMTINPELHVEALQNRASPDTENVFNDAFWESLDAVVNALDNVTARMYIDSRCVYFQKPLLESGTLGAKCNTQMVIPHLTENYGASRDPPEKQAPMCTVHSFPHNIDHCLTWARSEFEGLLEKTPTEVNAFLSNPGGYATAARTAGDAQARDQLERVIECLETDKCETFQDCITWARLKFEDYFSNRVKQLTFTFPEDAMTSSGAPFWSAPKRFPRPLEFSSSDSSHLSFLLAASILRAETFGIPIPDWAKNPKKLAEAVDKVIVPDFHPKQGVKIEIDEKATSLSSASVDDAAVIEELIAKLEAISKTLPPGFHMNPIQFEKDDDTNFHMDLIAGFANMRARNYSIPEVDKLKAKFIAGRIIPAIATSTAMATGLVCLELYKVLAGGHKVEDYRNTFANLAIPLFSMAEPVPPKTIKHQDMSWTVWDRWTVTGNMTLRELLEWLKEKGLNAYSISCGTSMLYNSMFPRHKERLDKKVVDVAREVAKLEVPSYRRHLDVVVACEDDDDNDVDIPLVSIYFR

SEQ ID NO: 341255 - protein, 642 aa, Zea mays
  Clone ID: MRT4577_74391C.1.pep
RTRGRTRGRTRGRTRGVESLPVEPLEPSDLKPENSRYDAQISVFGAKLQKKLEQSKIFMVGSGALGCEFLKNLALMGISCSQNGKLTVTDDDVIEKSNLSRQFLFRDWNIGQPKSTVAATAAMAINPKLHVEALQNRASPETENVFNDAFWESLDVVVNALDNVTARMYIDSRCVYFQKPLLESGTLGAKCNTQMVIPHLTENYGASRDPPEKQAPMCTVHSFPHNIDHCLTWARSEFEGLLEKTPTEVNAFLSNPGGYATAARTAGDAQARDQLERVIECLETDKCETFQDCITWARLKFEDYFSNRVKQLTFTFPEDAMTSSGAPFWSAPKRFPRPLEFSSSDSSHLNFLLAASVLRAETFGIPIPDWAKNPKKLAEAVDKVIVPDFQPKQGVKIETDEKATSLSSASVDDAAVIEELIAKLEAIFKTLPPRFHMNPIQFEKDDDTNFHMDLIAGFANMRARNYSIPEVDKLKAKFIAGRIIPAIATSTAMATGLVCLELYKVLAGGHKVEDYRNTFANLAIPLFSMAEPVPPKTIKHQDMSWTVWDRWTITGNITLRELLGWLKEKGLNAYSISCGTSLLYNSMFPRHKDRLDKKVVDVAREVAKVEVPSYRRHLDVVVACEDDDDNDVDVPLVSIYFR

SEQ ID NO: 341256 - protein, 98 aa, Zea mays
  Clone ID: MRT4577_74392C.1.pep
TPCCTGSCLCKLGPLYRPSRHPSSTCCARSTTLSQCPPAAVVTSPAEYSRQWPCGTAPVSKTSLLCWSLHSCNRTKLGWGIHCSHDKLGLHPARGWPG

SEQ ID NO: 341257 - protein, 45 aa, Zea mays
  unsure (1)..(45): unsure at all Xaa locations
  Clone ID: MRT4577_74393C.1.pep
KNKFQVLFNSTILLFTYLYXXGXXHXPPPPPQIHLXIIKKKSIEV

SEQ ID NO: 341258 - protein, 277 aa, Zea mays
  unsure (1)..(277): unsure at all Xaa locations
  Clone ID: MRT4577_74394C.1.pep
GYLEAGRKFQKKKKKKKKKKKKKKKKINDAFWXESLNAVVNALDNVTARMYIDSRCVYFQKPLLESGTLGAKCNTQMVIPHLTENYGASRDPPEKQAPMCTVHSFPHNIDHCLTWARSEFEGLLEKTPTEVNAFLSNPGGYATAARTAGDAQARDQLERVIECLETDKCETFQDCITWARLKFEDYFSNRVKQLTFTFPEDAMTSSGAPFWSAPKRFPRPLEFSSSDSSHLSFLLAASILRXTETFGIPIPDWAKNPKKLAEADKVIVPDFHPKQVI

SEQ ID NO: 341259 - protein, 187 aa, Zea mays
  Clone ID: MRT4577_74395C.1.pep
MLPRKRGVDAGEDQDLHNKALRAAAVAQDKEKVVAEMGGRAPEIDEDLHSRQLAVYGRETMKRLFGSNVLVSGLQGLGAEIAKNLVLAGVKSVTLHDDGKVELWDLSSNFFLSEKDVGQNRAHACVPKLQELNNAVIISTVTGDLTKEQLSNFQAVVFTDISIEKAAEYDEYCHSHHPPIAFIKSEA

SEQ ID NO: 341260 - protein, 112 aa, Zea mays
  Clone ID: MRT4577_74396C.1.pep
EPVPPKTMKHQDMSWTVWDRWTVTGNMTLRGLLEWLKEKGLNAYSISCGTSLLYNSMFPRHKERLDKKVVDVAREVAKVEVPSYRRHLDVVVACEDDDDNDVDIPLVSIYFR

SEQ ID NO: 341261 - protein, 1056 aa, Zea mays
  unsure (1)..(1056): unsure at all Xaa locations
  Clone ID: MRT4577_74397C.1.pep
MLPRKRGVDAGEVQDLHNKAPRTAATVPVQDKDKHQEEVAEMAGRAPEIDEDLHSRQLAVYGRETMKRLFGSNVLVSGLQGLGAEIAKNLVLAGVKSVTLHDDGKVELWDLSSNFFLSEKDIGQNRAQACVPKLQELNNAVIISTITGDLTKEQLSNFQAVGFTDISIEKAVEYDDYCHSHQPPIAFIKSEVCGLFGSVFCDFGPEFTVLDVDGEEPHTGXVASISNDHNPALVSCVDDERLXFQEXDLVVFXVHGMTELNDGKPRKIKNARPYSFTLEEDTTSYGTYIRGGIVTQVKPPKVLKFKTLKEAIKEPGEFLMSDFSKFDRPPLLHLAFQALDKFRTELTRFPIAGSADDAQKLIDLAISINETLGESKLEEIDKKLLQHFASGSRAVLNPMAAMFGGIVGQEVVKACSGKFHPLYQFFYFDSVESLPVEPLEPSDLKPENSRHDAQISVFGAQLQKKLDAVKNLPFGSGALGXEFLKNLALMGILAIYFSQNGXLTVTLDVDVMRSQSLFLSXNIGPSCATDAELXMAINPEXMISCGALQDRASXETENVFNDAFWESLDAVVNALDNVTARMYIDSRCVYFQKPLLESGTLGAKCNTQMVIPHLTENYGASRDPPEKQAPMCTVHSFPHNIDHCLTWARSEFEGLLEKTPTEVNAFLSNPGGYATAARTAGDAQARDQLERVIECLETDKCETFQDCITWARLKFEDYFSNRVKQLTFTFPEDAMTSSGAPFWSAPKRFPRPLEFSSSDSSHLNFLLAASILRAETFGIPIPDWAKNPKKLAEAVDKVIVPDFHPKQGVKIETDEKATSLSSASVDDAAVIEELIAKLEAISKTLPPGFRMNPIQFEKDDDTNFHMDLIAGFANMRARNYSIPEVDKLKAKFIAGRIIPAIATSTAMATGLVCLELYKVLAGGHKVEDYRNTFANLAIPLFSMAEPVPPKTMKHQDMSWTVWDRWTVTGNMTLRELLEWLKEKGLNAYSISCGTSLLYNSMFPRHKERLDKKVVDVAREVAKVEVPSYRRHLDVVVACEDDDDNDVDIPLVSIYFR

SEQ ID NO: 341262 - protein, 77 aa, Zea mays
  Clone ID: MRT4577_74398C.1.pep
TTSMPFTLTLVLRIIYQGLDNLFPFRSVPFFADNPQLSPQVAFQLVDPFPNPCFLYHVLLDTKAQGAWFYICTCISC

SEQ ID NO: 341263 - protein, 115 aa, Zea mays
  unsure (1)..(115): unsure at all Xaa locations
  Clone ID: MRT4577_74399C.1.pep
VTIVRLTSSSSGPKLDLSFTWSAEKDRQLLGVYWCKALECSHIFTADPRGVLKLWNIRNVLFSSTDXQCTSDVSXVAVFEPSFGARIMCLDASPEEEILIAGDKKGNITAYPFPK

SEQ ID NO: 341264 - protein, 155 aa, Zea mays
  unsure (1)..(155): unsure at all Xaa locations
  Clone ID: MRT4577_7439C.1.pep
HRRLRSRIDVSGRLPCVVFGPGGAPCRPRMGMHRXKRGLLRCEAHRAILCRECHVSVHTASDLTMRHARFLLTGVRLSAEPAAACPAPEDEEEEDDENSSGSFCCSAGDAAAHPPPLPSSAPATSHGSDSSSISEYLTKTLPGWHVEDFLVDEAA

SEQ ID NO: 341265 - protein, 218 aa, Zea mays; identical to SEQ ID NO: 340491
  Clone ID: MRT4577_743C.1.pep

SEQ ID NO: 341266 - protein, 188 aa, Zea mays
  Clone ID: MRT4577_74400C.1.pep
MKVATSARATTPTFQRSRSWKDGLLDPSLATLLVGVTSTMRSTPCCTRHSTGALGLSSIVVLSFSIVAGFTRTWEATCLVRRPENSLCGAEVCSEHYSISKQDSAEVAMQDATRCALSHYCSVLGGVADGLNLKYYPLHPSGSTRGMVVSPVGEDNPRLSSTVNLAVALNTELDHALDELSRARAEIA

SEQ ID NO: 341267 - protein, 92 aa, Zea mays
  Clone ID: MRT4577_74401C.1.pep
FFRPDGSWGVVSHTHPVRAWLTSLLENLLGTAHTVDGTSGYLKDAVLKVRLMTNVTCASLWTNSDGWHSWRIYLLSSCTCDLSPHVGLCRGC

SEQ ID NO: 341268 - protein, 69 aa, Zea mays
  unsure (1)..(69): unsure at all Xaa locations
  Clone ID: MRT4577_74402C.1.pep
VCVVCFNGGGGAFVIRSVAVQKNRFLFIDRLDWXQQARIALNKXXACLGFFFIASHLAIRKFKILPNKG

SEQ ID NO: 341269 - protein, 99 aa, Zea mays
  Clone ID: MRT4577_74403C.1.pep
MVLRRAAVESPKKVAALVDLVNLPTALREFAGGRSQMSHLSFFLGVWSHIKNNNLQDPTNRNIVNCDEKLKTVLLGRSKVELSELPMLVKLHFPKVFKS

SEQ ID NO: 341270 - protein, 178 aa, Zea mays
  Clone ID: MRT4577_74404C.1.pep
MDRQLLRTVKQATKNHAGLMYHRLVGHIPHLLVVTLLVVVAPQLSTLTPEKVRALWNTAVNAPALAMACWAAALAAYTYASSRPQPVYLVDLAGYKPPVELEASRAKTIVHFSRCGRFSEQSMAFQKRMLERSGLGEATHFPMSLIRLPVDMCERTGMEESHAVIFGVVDEVLRKNRR

SEQ ID NO: 341271 - protein, 52 aa, Zea mays
  Clone ID: MRT4577_74405C.1.pep
HEVDVILPDLHVFNVRAGFNVDQVRFFGVGGPDNWLIAWGLGVGLPKKVFSS

SEQ ID NO: 341272 - protein, 92 aa, Zea mays
  unsure (1)..(92): unsure at all Xaa locations
  Clone ID: MRT4577_74406C.1.pep
TWYHIALAIKKXRGFLXAGGIQVILLGDAALIYPLSLHKVYHSFYLDWAVHSFIITNCDIQDTTXIHTHMCYSNFNYIIHSIIXLDADVITI

SEQ ID NO: 341273 - protein, 61 aa, Zea mays
  Clone ID: MRT4577_74407C.1.pep
KVLQLAPVRTERSYNGIRAVVHGFIILAANIVFKRLHSSPGSMMLSNLLKTVRKQAPLEPN

SEQ ID NO: 341274 - protein, 56 aa, Zea mays
  Clone ID: MRT4577_74408C.1.pep
DRRVSGTSCCSSALHPGQLMESWTLSFSGIPAQHLPIEMTLKGKRDKKNNPTGFKG

SEQ ID NO: 341275 - protein, 81 aa, Zea mays
  unsure (1)..(81): unsure at all Xaa locations
  Clone ID: MRT4577_74409C.1.pep
RYATEHRCTVVVKGSKLSGYISGTXDSTKYNSLXLLNAEPMDDSRRRXNSAAVINELSXEITHILGSHRINAHRAAEEKNI

SEQ ID NO: 341276 - protein, 111 aa, Zea mays
  Clone ID: MRT4577_7440C.1.pep
MLASPALAGAHSFAASVYGSLLVPSPPVPAPARRAALSVVAKVKVATPQDDRIARHVRLRKKEIAQKIGEVIAKSCLEKGITKVVFDRGGFLYHGRIKALADSAREHGLEF

SEQ ID NO: 341277 - protein, 72 aa, Zea mays
  Clone ID: MRT4577_74410C.1.pep
LTRGHTLRCVSHACWSSLQAGDVRQAPDRHLMALLVLRGCAVPAGVHADPAELPLMCSEMPPRRVEEVDSSG

SEQ ID NO: 341278 - protein, 223 aa, Zea mays
  Clone ID: MRT4577_74411C.1.pep
AREKPQFYVKDGKNYSYKVAGSVAVSSAREAAVMRQTQKETIYGLGRGGNVPFGVPNRQHIDVEAEEVGDADNSGRGSNSRGRGRKGGREGNRPEENESSNGRGSGFGGKRGGWNQGNPAEENWNPNGQQGFGRGGRRGGWNQGGPAKEDGNSSGRQESFGRGARRGSMNHDQSAEDNEGHNNPAQDFTRGPAPRGGHGRGGGRNHHRRDRAMKKHMQGLTGL

SEQ ID NO: 341279 - protein, 104 aa, Zea mays
  unsure (1)..(104): unsure at all Xaa locations
  Clone ID: MRT4577_74412C.1.pep
YASDLGLADGGIYGXLSVVDKRDGLLNLCLNITVNRDTNKSXTASLXRGWWTTLLLTAGVAFAKYFLRYILRRNXVTHTLKQFXQHYDLRXNNLFSLVLDPTDD

SEQ ID NO: 341280 - protein, 54 aa, Zea mays
  Clone ID: MRT4577_74413C.1.pep
PLFFFFFFFTVCDGHITYLHMSKHRAAYIPIIPCHHISSIVRIFGSDVHPCTKM

SEQ ID NO: 341281 - protein, 41 aa, Zea mays
  Clone ID: MRT4577_74414C.1.pep
QDYQLVDESDAFHDNLRSLDRNLPSDSQDFCQHGLEEDFML

SEQ ID NO: 341282 - protein, 94 aa, Zea mays
  unsure (1)..(94): unsure at all Xaa locations
  Clone ID: MRT4577_74415C.1.pep
TRYYXILWVSKDASQDDLKKAYLKAAINNYSDKGGDPKKFKELSQAYDVLIDPEKRXIYDQYGEDALNEGMGSCLGIHDPFDIFHSFFVGVNPF

SEQ ID NO: 341283 - protein, 116 aa, Zea mays
  Clone ID: MRT4577_74416C.1.pep
FWEIFFCGFFQKGHPRESWGVFPQKKEKPLTGFFFGVGPRAPRGLKTFSKPLLPVWGNPGFFFLKPHLGPKGPRYLTLFFLPPPPLNFQTQARAFKGPPPGCPRGGLGNFFGPKFF

SEQ ID NO: 341284 - protein, 253 aa, Zea mays
  unsure (1)..(253): unsure at all Xaa locations
  Clone ID: MRT4577_74417C.1.pep
MAFRACLPSHKASPSPSVAQRRASNGAPPVVAMASTMNEVKTAKKPYAPPREVHLQVMHSLPAQKQEIFDSLQSWARDNLLNLLKPVEKSWQPQDFLPDPSSEGFYDEVKELRERAKEIPDDYFVCLVGDMVTEEALPTYQTMLNTLDGVRDETGASPTAWAVWTRAWTAEENRHGDLLNKYMYLSGRVDMRQIEKTIQYLIGSGMDPGTENNPYMGFLYTSFQERATFISHGNTAXHAKQFGDLXLXQICGT

SEQ ID NO: 341285 - protein, 462 aa, Zea mays
  Clone ID: MRT4577_74418C.1.pep
MGCLPCFGSAGEGAAKEGGARKDDKSKPQGGLDSKKDAVILREGNNQHIAAHTFTFRELAAATKNFRQDCLLGEGGFGRVYKGRLENGQVVAVKQLDRNGLQGNREFLVEVLMLSLLHHDNLVNLIGYCADGDQRLLVYEFMPLGSLEDHLHDIPPDKEPLDWNTRMKIAAGAAKGLEYLHDKASPPVIYRDFKSSNILLGEGFHPKLSDFGLAKLGPVGDKTHVSTRVMGTYGYCAPEYAMTGQLTAKSDVYSFGVVFLELITGRKAIDNTKPHGEQNLVAWARPLFKDRRKFPKMADPSLQGCFPMRGLYQALAVAAMCLQEQAATRPFIGDVVTALSYLASHTYDPNAPAQHNRSNSSTPRVSRGGGSNDQRRLRSSNHHSPDLRREVTTASRYDDEVSRANSGTGSGRRSGLDDADMSGSQLGSPAHTGRKRGSPRTSESQHAIAEAKTYGENSRGRK

SEQ ID NO: 341286 - protein, 79 aa, Zea mays
  unsure (1)..(79): unsure at all Xaa locations
  Clone ID: MRT4577_74419C.1.pep
RRGRAPNADTTRQSPKRTQRTQLTPVPPRGTRQPAVSPPLEDPGPLAEASCSPCRNCGVDTQKPWLGSPGDEPXEGATG

SEQ ID NO: 341287 - protein, 97 aa, Zea mays
  Clone ID: MRT4577_7441C.1.pep
TRIMAAISVSQVMCSMHTLVCRLWSSLCPLRRLDARHNPHFKGKAGGGLTPFEAGSRLAGDGWPGHRAPRLGRLAGGGHGHEGMDVWFAVAIFSFLV

SEQ ID NO: 341288 - protein, 89 aa, Zea mays
  Clone ID: MRT4577_74420C.1.pep
VRRIGKQILHHTSANRTRPGLSLFLRLKTVRPDFLLQKQPSSNREDQENCGNSEVSESTAHKDLRLLNDNGSKSYVWRCGYKPSSFAYP

SEQ ID NO: 341289 - protein, 140 aa, Zea mays
  Clone ID: MRT4577_74421C.1.pep
YGCPNYWMLHFFKESSGAILHPTAIQVSSYDQLVASAIPWQNAKDKSPYLRIKVVNFGNQAVDLNISVAELATGVKKSGSKQTVLTSSSPLDENSFQQPEKVAPVSSPMANAGQQMGASVGPYSLTSFDLLLEPSKHDSV

SEQ ID NO: 341290 - protein, 151 aa, Zea mays
  unsure (1)..(151): unsure at all Xaa locations
  Clone ID: MRT4577_74422C.1.pep
LGQVLNDPTRVGFFKXGSSNSVGQAIKDGVYVPGYFGWLFLGNFEWAMGYPKRFGIVFVGYKNGLFRPPKTSALWFLRLLKGEGGPGPNLANCPQQTSPKRCCFFHINISPRYPFFPVVGLDSCPVRANKLASNVWDLPIPLVAALDPALT

SEQ ID NO: 341291 - protein, 83 aa, Zea mays
  unsure (1)..(83): unsure at all Xaa locations
  Clone ID: MRT4577_74423C.1.pep
AWCTTALXIXXPLYLYPTGVRGSXSLHSYKILFFXNFASAGVGILNHTGLHFVRNTLYPSPAYSSCTXDLGALDSYSPILIMH

SEQ ID NO: 341292 - protein, 50 aa, Zea mays
  unsure (1)..(50): unsure at all Xaa locations
  Clone ID: MRT4577_74424C.1.pep
VSLDEVDGGWIVRVQIWGLCWKCCGLDHCFAFWGLGVLSPLYGFFXXGFS

SEQ ID NO: 341293 - protein, 143 aa, Zea mays
  unsure (1)..(143): unsure at all Xaa locations
  Clone ID: MRT4577_74425C.1.pep
MDAPAAAEGCGKHIVLVHGACLGGWSXYKVATLLRAAGYRVDAPDMAASGADPRALREVPTFQDYTRPLLDLLASLPDGDRVVLVGHSLDGVNVALAAETFPDKVSAVVFLCAFMPDCTARPSHVLEKVRPSRSSRPAAHALL

SEQ ID NO: 341294 - protein, 55 aa, Zea mays
  Clone ID: MRT4577_74426C.1.pep
WGFLFKKFGNLLKIAFLSLEKRFSPRQKECKNVLLPIFLKINWGKFPLRGVGGLN

SEQ ID NO: 341295 - protein, 83 aa, Zea mays
  Clone ID: MRT4577_74427C.1.pep
KIRAEIRTYELHIWLQADGKAIWWAISPAVLGPVEALVDYELDYKIRQNSHHHRQDHLAKNLFRNAPGLEDGHLDLYLTLLKS

SEQ ID NO: 341296 - protein, 161 aa, Zea mays
  unsure (1)..(161): unsure at all Xaa locations
  Clone ID: MRT4577_74428C.1.pep
MASEGDRPTDVELXLKAQVDIGRVSXISYLTPLTQKSAAXLDMPTATYHHXGNAVSSADVLSALSLPSTKLAFLRRVLRILHAEAVFTVNNHTLQQELNRIIPVFYLLVDGXIPHDELMYDTALKLGCTSTRYFEVEISLTXELKRDLVCSXFEEVHASSL

SEQ ID NO: 341297 - protein, 121 aa, Zea mays
  unsure (1)..(121): unsure at all Xaa locations
  Clone ID: MRT4577_74429C.1.pep
MLMARSISSTTRGSETSQMNIAVIGHVNSGKITTTRQTIYELVGIHERTTESLAKEAAEVNKEAVKHAWVLVKAKAXSERGSTIGISDGMTETINDYCKVYEALGHCDCIKDMNTSTYKAD

SEQ ID NO: 341298 - protein, 146 aa, Zea mays
  Clone ID: MRT4577_7442C.1.pep
VVDLVRRAVPLALAPENDPRKEEFERLREKKEAIDRLAHKQVRRILWSGLGFFMCQVGLFFRLTFWEFSWDVTEPIAFFTTASGLLVGYAYFLITSRDPTYQDFMERLFLSRQRKLCAAHKFDMERFMELQKHCRCPLEGHGPRGP

SEQ ID NO: 341299 - protein, 207 aa, Zea mays
  unsure (1)..(207): unsure at all Xaa locations
  Clone ID: MRT4577_74430C.1.pep
MAIGAFPPGRRGEREKLGYTCKMDMAMASFVAATHHHXSPGRRLPLLRASXGRSVGRSGVTISIRAQKKSNSDSGSSSGGGDVRTSSGRRVWRRRKLTKEDDMLRYKLDRIPFLEEKVRKVRENGKIICLDINQLMLSQENRFAFTMEVAEEANAYLEKNRHEYGLKKPILHVLSDRMNESGFSRPEGYLYPYPIKPGPYFIKEEGN

SEQ ID NO: 341300 - protein, 101 aa, Zea mays
  Clone ID: MRT4577_74431C.1.pep
DISDPILNRVAFIAGRGLTCTIINMSISLVGPLLRIIRTLRIHSIVGGGCPIDSSMMTTHSNPRPLLPYYIPGLRLCNPTLRLSHTSFGISQAHKQAHKQA

SEQ ID NO: 341301 - protein, 927 aa, Zea mays
  Clone ID: MRT4577_74432C.1.pep
MDKVLFFKMGKFYELFEMDAHVGAKDLDLQYMKGEQPHCGFPEKNLSVNLEKLAEKGYRVLVVEQTETPDQLELRRKEMGIKDKVVRREICAVVTKGTLIEGEHLLANPDPSYLLSVTESYQRSPNKSQDTCTIGVSIVDVSTSKFIVGQFQDDPERHGLCSILSEMRPVEIIKPSKMLSPETEKALNNNTRKPLINELVPSTEFWDAEKTIDEIKQYYSSANKQKKADDIQDCVDCLPNLLRELIGAGDKTYALSALGGSLFYLRQTLLDEKILPCAEFEPLACSGFINNIRKHMILDTAALENLELLENTRTGGLSGTLYAQLNHCVTGFGKRLLKRWIAKPLYDRREILRRQSAVATFKGVGQDCAAQFRKDLSRLPDMERLLARLFSSCDENKRSSSVVLYEDASKKLLQQFTSALCGCQQMFHACSSISTLICSEGSQLIDLLSPGKGLSNISSILDRFRDAFDWSDADRNGRFIPSEGCDPEFDATCNAIEEIKSSLKEYLKEQRKLLRPASVNYVNVGKDMYLIEVPESLGGSVPRNYELQSTKKGFYRYWTPELKELILELSKAESEKESKLKAILQNLIQLFVEHHTEWRQLVSVVAELDVLTSLAIASGYFEGPSCCPTIKESNGTDDTPTFHARNLGHPILRSDSLGKGSFVPNDVKIGGPGNASFIVLTGPNMGGKSTLLRQVCLTIILAQIGADVPAEKLELSLVDRIFVRMGARDHIMAGQSTFLVELEETASVLSSATKNSLVVLDELGRGTSTSDGQAIAASVLEYLVHQVQCLGLFSTHYHRLAMEHNDTKVSLCHMACEVVEGGGGLEEVTFLYRLTPGACPKSYGVNVARLAGIPTKLLQRANEKSSEFEANYGKRHKMTNDKHVSAQSDDKFSAIRDLFRIVKTWPRPEDQEASISMLRKLQKRAKV

SEQ ID NO: 341302 - protein, 156 aa, Zea mays
  Clone ID: MRT4577_74433C.1.pep
HPATGIKQKRWHPIQQSWQQGKYPQHNTNGVFFSPQPEGCLLKKHRTLHTKRGLKFTQLWVGFTYRLALLFYTILFPLPMETDQDANGNMVPNIYKKGIGGPLSWLDQSQRDTNKGLVLNFMALVLPKNSHITSIQVSQPAWAGLTPPETQLFPHP

SEQ ID NO: 341303 - protein, 81 aa, Zea mays
  unsure (1)..(81): unsure at all Xaa locations
  Clone ID: MRT4577_74434C.1.pep
MGTAVSGGADLSPGPGPRRRGRPPKNPAPAPAVGEVIGDYXRERGARIRENMERMRKLGILDLAQTLSYSGGGSGRGTGRG

SEQ ID NO: 341304 - protein, 196 aa, Zea mays
  Clone ID: MRT4577_74435C.1.pep
MRPFVWEDTNDRIAIVALSAKKPIFFFVEVILFKNELPPQGISFFPVRGRGNPPGGFLLLRFWLKDKGGLKRLKTPRVHCLFGNGAGAKPVVFFKSFWRETTFFSLFLKGNPSGFPADRGPTLIAHKLPFGTPKAPKFKNFSFLTQRGPPGGPSRLSCPNVAFCVSPPLWRYVFITKPHSPFFLGPTKKTPCHFPF

SEQ ID NO: 341305 - protein, 175 aa, Zea mays
  unsure (1)..(175): unsure at all Xaa locations
  Clone ID: MRT4577_74436C.1.pep
GKRPLMAXNGQDSWQRASSFPPARGTPSPGPLSSQLLRPAPPKDGVPGLTGSLPPPPFSALIVPSPPNARSPGKMVPPGSLLFPPICWGSPFNPEKAPVICPYDKGSAKPVRPVSLLFKIPPRPPQLFVPDESVVPYCMPWNFIFGMFIFKKKKKKKKKKKKPKKKKKKKKKTPP

SEQ ID NO: 341306 - protein, 107 aa, Zea mays
  unsure (1)..(107): unsure at all Xaa locations
  Clone ID: MRT4577_74437C.1.pep
KARTIARTSVGTYDAPSLTSGEVXIGMRTYSKYNAAFNPTSFAILCNRLSHVLHARSLSNATTGKVXNNIWHXVPYNIVSISIAASVLLSQYYFGMTSFMSGGLMAL

SEQ ID NO: 341307 - protein, 71 aa, Zea mays
  Clone ID: MRT4577_74438C.1.pep
LPWGDTPAWQLALGWRSRWSPGPRTPWGWTCSSALRPPACDLAGPVVDGDRARELCPATHRRLGKRELITY

SEQ ID NO: 341308 - protein, 56 aa, Zea mays
  Clone ID: MRT4577_74439C.1.pep
IHTPCHPSILPSYTITKRLFYIGFDSSPCPQSVTYNSSPTNIYITCLPAAIRNPHS

SEQ ID NO: 341309 - protein, 213 aa, Zea mays
  Clone ID: MRT4577_7443C.1.pep
MLASPALAGAHSFAASVYRNILVPSPPVPAPARRAALSVVAKVKVATPQDDRIARHVRLRKKVSGTTERPRLSVFRSNKHLYAQVIDDTKQCTLASASTMHKSLSKEFEYSAGPTIEIAQKIGEVIAKSCLEKGITKVVFDRGGFLYHGRIKAPADSAREHGLEFRVVQAFVHISRITCNLLLFLFSPYAEQSCFVVTRLVLQGAKPWPMATR

SEQ ID NO: 341310 - protein, 50 aa, Zea mays
  Clone ID: MRT4577_74440C.1.pep
FHCHKQGAEGPLRQPFVTDDAGDLGEPTGETAASPRKTETPRVSGWQPNP

SEQ ID NO: 341311 - protein, 62 aa, Zea mays
  Clone ID: MRT4577_74441C.1.pep
YPPRSPANPHNIFSIQKPLQRGALANDLTPMPTKYYPPALLLFMTHQCVHIPQCSLVPNAST

SEQ ID NO: 341312 - protein, 88 aa, Zea mays
  Clone ID: MRT4577_74442C.1.pep
MKQGIHGSDNISPLHSKASSEALPGGDATQFPITGVAGTGSGTGHARGRNKLTLFPLIFLIFFEVAGGPYGAEPAVQAGGPLLALIGF

SEQ ID NO: 341313 - protein, 362 aa, Zea mays
  Clone ID: MRT4577_74443C.1.pep
MAVMGKEEEEQQQQQQQHKEEEVVQGDVRVVVQQETAADEEAESALVRKISGLAAAIARLPSLSPSPEVNALFTDLVTACIPRSTVDVERLGPELQRMRAGLIRLCADAEALLEAHYSDLLAAFDNPLDHLPLFPYFTNYLLLSQLEHGLLARHVPGPPPSRVAFVGSGPLPLSSLVLASRHLPAAAFDNYDICGDANDRARRLVRADAALAARMAFRTSDVAHVTRELAAYDVVFLAALVGMAAEEKARVVEHLGRHMAPGAALVVRSAHGARGFLYPVVDPEEIRRGGFDVLAVHHPEGEVINSVIIARKPLPVVDEHAVAGVGHAHAHGAVLSRPCLCCEMEARAHQKMEEVAMEQLPS

SEQ ID NO: 341314 - protein, 362 aa, Zea mays
  unsure (1)..(362): unsure at all Xaa locations
  Clone ID: MRT4577_74444C.1.pep
MVVMGKHDDDEKQQQMEMEMEMEDVHEVGAVEVLPLENEAEAALVRKISGLAAAIAKLPSLSPSPEVNALFTDLVTACIPRSTVDVERLGPELQRMRAGLIRRCADAEAQLEAHYSDLLAALEDNPLDHLPLFPYLGNYLLLGELEHGLLARHVPGPPPARVAFVGSGPLPLSSLVLAARHLPAAAFDNYDICAEANGRARRLVRADAALAARMAFRTSDVAHVTRDLAAYDVVFLAALVGMAAEEKARVVDHLGRHMAPGAALVVRSAHGARAFLYPVVDPDEIRRAGFDVLAVHHPEGEVINSVIVARKPVPVPVAGVGHXTRHAHGHGAVLNRPCCLCCEMEARTHQKMEEVAMEQLPS

SEQ ID NO: 341315 - protein, 79 aa, Zea mays
  unsure (1)..(79): unsure at all Xaa locations
  Clone ID: MRT4577_74445C.1.pep
FXXFFFXXXFXXXPLNFTCFTTQVFGNQTKTGPKGLWGGKLLSGRNRAVFHFRGVPSPFGRPPPKVPLPGFYWPFKASF

SEQ ID NO: 341316 - protein, 83 aa, Zea mays
  Clone ID: MRT4577_74446C.1.pep
AGVWKEQKLLLPKLVEAYAKDVRLSPQGLVDMVQPPLPETIRVAVQRCQQRGRASSGKVVDWVPPNPAFRYLLTRDLAFLHLN

SEQ ID NO: 341317 - protein, 51 aa, Zea mays
  Clone ID: MRT4577_74447C.1.pep
FSKGFFYFFWVFWFTRVQNPLKLLVGTRLLIYNFTRVIKDNKVDKFQFDPI

SEQ ID NO: 341318 - protein, 135 aa, Zea mays
  Clone ID: MRT4577_74448C.1.pep
VCSPFWPPRVSPFFFRFVFFVELWGDYNFPQGTPFPIFSPNLGPGWGPLGTPPSVLEFAPRGVPPPPGLILGKKGVLEKKKKKKKKKKKKKKKKKKKKKKKKKKKKKKKKKKLVTCPGGRSKGRFCSILTWRPSE

SEQ ID NO: 341319 - protein, 44 aa, Zea mays
  Clone ID: MRT4577_74449C.1.pep
QGLIIQDSKFLRKTRQLESLAYIMSANASPSIHFHSDPTASLPT

SEQ ID NO: 341320 - protein, 165 aa, Zea mays
  Clone ID: MRT4577_7444C.1.pep
MLASPALAGAHSFAASVYGNILVPSPPVPAPARRAALSVVAKVKVATPQDDRIARHVRLRKKVSGTTERPRLSVFRSNKHLYAQVIDDTKQCTLASASTMHKSLSKEFEYSAGPTIEIAQKIGEVIAKSCLEKGINKVVFDRGGFLYHGRIKALADSAREHGLEF

SEQ ID NO: 341321 - protein, 47 aa, Zea mays
  Clone ID: MRT4577_74450C.1.pep
DESRMEGPVRCPLWTKSNMESYTSGARWVPKRRGYLCIIFVLRRRQL

SEQ ID NO: 341322 - protein, 96 aa, Zea mays
  Clone ID: MRT4577_74451C.1.pep
NNKTTIHPIELPFFPGLLSKITPLPTPSLHTILFSLLSPNLNFPPLAFPPFLWHNLAFPNLILLEPFPPFPNWVSIKKPSPLPLYSSSSHPNDPSP

SEQ ID NO: 341323 - protein, 129 aa, Zea mays
  Clone ID: MRT4577_74452C.1.pep
MQMLLSPSVEVREMEENSSSLLKLHDRFLRTVKRISRQLEVVSIAEGNPTVLTPFKLSYEVVTEKSAKIEFGDYYKLPDDHLGICKPRSKQSFLYRRLIETIGRALEERDTDSPRGPAAVTKDAKTHQV

SEQ ID NO: 341324 - protein, 50 aa, Zea mays
  Clone ID: MRT4577_74453C.1.pep
IFVYNPFQIKRLSILRLLFGYPYLWHLHICWWHCKNNVKTQFLPRPCWFN

SEQ ID NO: 341325 - protein, 150 aa, Zea mays
  unsure (1)..(150): unsure at all Xaa locations
  Clone ID: MRT4577_74454C.1.pep
PQIYKKKKEDEGPPPGGGGGLKKKKAPPPPXIKRAGGGGGGLINPPPPPALXGGGAPPPPPPLFVNPAGRKSFPPPPFFLGKTPPPPGGGGGTPGARHGVIGWGNGNNSFVFADPFVFFQTVLPGPFKPNNFSSFVRQLNPFVSLIPPPR

SEQ ID NO: 341326 - protein, 86 aa, Zea mays
  Clone ID: MRT4577_74455C.1.pep
TCTSLWFVLLHPELRPLASDFKMMSQICERQCHIVCSLLRKVMFMHVTMFYDIVNAHSTCPAVQYKQVSVFSRPYPTQEVTGVYAR

SEQ ID NO: 341327 - protein, 81 aa, Zea mays
  Clone ID: MRT4577_74456C.1.pep
QINSSELSLELGRESNFDEMVMVAYGSELSWLQTVVAWMAAALLRGYRGDKSMVDGLRCYGGMYLYRLEGVRLYDRSNMVT

SEQ ID NO: 341328 - protein, 111 aa, Zea mays
  unsure (1)..(111): unsure at all Xaa locations
  Clone ID: MRT4577_74457C.1.pep
HAIARGLDCTHDRGFMPGAIPGAHGGIQACHTPTLTDDFGDHSGVQTGGRTXGHARGAAPGAAAKQAGVQACVQARDQGRDRAEEGNATIKATGKRTAARATCREIWKESN

SEQ ID NO: 341329 - protein, 81 aa, Zea mays
  Clone ID: MRT4577_74458C.1.pep
HASAHASAHSFSHASDLQRNEFFICQSTFFNPLDRKANFFFLLVFVIISHSFYLFNSSKILSTEFTSEHGIIKINFLHRFY

SEQ ID NO: 341330 - protein, 140 aa, Zea mays
  Clone ID: MRT4577_74459C.1.pep
RTKKSHGGPSRPSHFKGQPETILGCFWLNLWPQTQQPNLGGLFHPGLLLEPNPQKHPIAPPAPKGLGVSFQQNIPPWGPKTKGQTPPKKLQAYFLTGSQDPYKGSGMAPELQKGNLSGRELGWLLLLTKPWEKLVTASIA

SEQ ID NO: 341331 - protein, 172 aa, Zea mays
  Clone ID: MRT4577_7445C.1.pep
MLASPALAGAHSFAASVYGNILVPSPPVPAPARRAALSVVAKVKVATPQDDRIARHVRLRKKVSGTTERPRLSVFRSNKHLYAQVIDDTKQCTLASASTMHKSLSKEFEYSAGPTIEFDIGFQEIAQKIGEVIAKSCLEKGITKVVFDRGGFLYHGRIKALADSAREHGLEF

SEQ ID NO: 341332 - protein, 589 aa, Zea mays
  unsure (1)..(589): unsure at all Xaa locations
  Clone ID: MRT4577_74460C.1.pep
MCGILAVLGCSDCSQARRARILACSRRLKHRGPDWSGLYQHEGNFLAQQRLAIVSPLSGDQPLFNEDRTVVVVANGEIYNHKNVRKQFTGAHSFSTGSDCEVIIPLYEKYGENFVDMLDGVFAFVLYDTRDRTYVAARDAIGVNPLYIGWGSDGSVWMSSEMKALNEDCVRFEIFPPGHLYSSAAGAGFRRWYTPHWFQEQVPRTPYQPLVLREAFEKAVIKRLMTDVPFGVLLSGGLDSSLVASVTKRHLVKTDAAEKFGTELHSFVVGLEGSPDLKAAREVADYLGTTHHEFHFTVQDGIDAIEEVIYHDETYDVTTIRASTPMFLMARKIKSLGVKMVLSGEGSDELLGGYLYFHFAPNREELHRETCRKVKALHQYDCLRANKATSAWGLEVRVPFLDKEFVDVAMGMDPEWKMYDKNLGRIEKWVLRKAFDDEEHPYLPEHILYRQKEQFSDGVGYNWIDGLKAFTEQQVTDEMMNSAAQMFPYNTPVNKEAYYYRMIFERLFPQDSARETVPWGPSIACSTPAAIEWVEQWKASNDPSGRFISSHDSAATDRTXATSWRWPTAAGTXANGTVNGNDVAVAIAV

SEQ ID NO: 341333 - protein, 32 aa, Zea mays
  Clone ID: MRT4577_74461C.1.pep
PKSPLFTRMIRQSPIDATPLSRAIPIDMLALP

SEQ ID NO: 341334 - protein, 52 aa, Zea mays
  Clone ID: MRT4577_74462C.1.pep
FKNRPFQAGFFFPHPGGVYISTPTHLLGGFITRMLHKTQNHSRILHPSSHVG

SEQ ID NO: 341335 - protein, 122 aa, Zea mays
  unsure (1)..(122): unsure at all Xaa locations
  Clone ID: MRT4577_74463C.1.pep
MAGLDTFLFTSESANEGHPDKLSQQVSDAVLDACLAEDPDSTVARETCTKTNMAMVLGEITTKANVHYQKIVRETCRTIGSMTNDGRLDADHCKGLVTMVPHLPXILSVAHGHCTTRPEEIG

SEQ ID NO: 341336 - protein, 165 aa, Zea mays
  unsure (1)..(165): unsure at all Xaa locations
  Clone ID: MRT4577_74464C.1.pep
MDQPLHLVHVKILAADLLSLTVRHTSPTTFLRCGRRVARAELVGVVVSRDRRERFLRFLVDDGTGCVPCILWLNHQYLNARTSSGPSXTMILLXEMALKMSEEVRLGTLLRVRGKITSYRGAIQITVRDVVPEKDPNSEVLHWLQCVRLAKECYDLPPPSAQGRT

SEQ ID NO: 341337 - protein, 59 aa, Zea mays
  Clone ID: MRT4577_74465C.1.pep
MLRWAIIFFIIALVAAVLGFGGISGMSFEIAKFIAIIAVILFVVSLLVGGLRGRGGPRI

SEQ ID NO: 341338 - protein, 79 aa, Zea mays
  unsure (1)..(79): unsure at all Xaa locations
  Clone ID: MRT4577_74466C.1.pep
MAGLDTFLXGGESVFFGHPDKLCDQVSDAVLDACPAEDPDSKVACETCAKTNMGMVFGEITTKGNGGLHKIGRETCRNI

SEQ ID NO: 341339 - protein, 65 aa, Zea mays
  unsure (1)..(65): unsure at all Xaa locations
  Clone ID: MRT4577_74467C.1.pep
MEGRAPKKSDNIXYYEILVVPKXGNRMNSRLSXRQAVLTNHSDKGXGDPDKTKELAPAYEVLRDP

SEQ ID NO: 341340 - protein, 42 aa, Zea mays
  Clone ID: MRT4577_74468C.1.pep
FSPLTAISRVVSPLPPGGRVSNSLNYPFKWEGIIYKEKKGLG

SEQ ID NO: 341341 - protein, 44 aa, Zea mays
  Clone ID: MRT4577_74469C.1.pep
ACSCYSDCLVSYLFWLWYVELTWSPFVICSGDKVCLLVNVAKCV

SEQ ID NO: 341342 - protein, 44 aa, Zea mays
  Clone ID: MRT4577_7446C.1.pep
KLLLLISVVQGPWLDDLFHTTLEVALHASRSVRSEAAPGHGIFL

SEQ ID NO: 341343 - protein, 95 aa, Zea mays
  Clone ID: MRT4577_74470C.1.pep
GLVGISTGRTALSLTLVIVMLPVAATWPSRCGHWGKGTERHSIIIKPSGKSGWIEVQESGSNRLNNGDGQPMHYEAEAHDSLKKNEQPKKNRRAT

SEQ ID NO: 341344 - protein, 64 aa, Zea mays
  Clone ID: MRT4577_74471C.1.pep
GERAAPGGVPFSVKGGRLLGKAIGEGLIGITATRAIGGWATRGNKVGTARGLTGKTVEIAGPRN

SEQ ID NO: 341345 - protein, 64 aa, Zea mays
  unsure (1)..(64): unsure at all Xaa locations
  Clone ID: MRT4577_74472C.1.pep
VTVRGKRKIXMLXEGKVLQYAEKERYXCYXKAKSRFDSFCREGNHHHNHASCSLKHQADQPPLP

SEQ ID NO: 341346 - protein, 67 aa, Zea mays
  Clone ID: MRT4577_74473C.1.pep
FEAVNWLVRSGPVEFRTPCAAVESSGPAGYEAAASGEVSGARATFGLEAVGFDFDIIGHVAEDLAAS

SEQ ID NO: 341347 - protein, 42 aa, Zea mays
  Clone ID: MRT4577_74474C.1.pep
TFDEWREAMNSRQLLNRNMFKLSQGEHGAVEYLEGSHKLSPG

SEQ ID NO: 341348 - protein, 67 aa, Zea mays
  Clone ID: MRT4577_74475C.1.pep
KQKKMSRRRLQIKARRRQLMIGKTFYGRSGMGNPSIHPSMTEFTLIVLGRVGKKGFDGGHDLGFFPG

SEQ ID NO: 341349 - protein, 209 aa, Zea mays
  Clone ID: MRT4577_74476C.1.pep
MERKAVVVCAVVGFLGVLSAALGFAAEATRVKVSDVQTSGSPGECIYPRTPALALGLISAASLMLAQSIINAVAGCICCKKHPVPSDTNWSIALISFIVSWCTFIISFLLLLTGAALNDQRGEENMYFGSFCYVVKPGVFSGGAVLALASVALAIVYYVALSSSKGPPPAFAAPQNQGIAMGQPVIIPQQSSEPVFVHEDTYNRRQQVP

SEQ ID NO: 341350 - protein, 333 aa, Zea mays
  Clone ID: MRT4577_74477C.1.pep
MSAPSDAAAASAAPAPAPTTAAASSSGGFTFKLHPLVIVNVSDHHTRVKAQAACSADSSSPSSGPGAGQPPRVFGCVIGVQRGRTVEIFNSFELVLDPVSGTLDRAFLEKKQELYKKVFPDFYVLGWYSTGSDVHDTDMQIHKALMDVNESPVYLLLNPTINLSQKDLPVTIYESELHVIDGCPQLIFVRSNYTIETVEAERISVDHVAHLKPSDGGSAATQLAAHLTGIHSAIKMLNSRVRVIHQYLVAMQKGDIPMDNSLLRQVSSLVRRLPATESQKFQDDFLMEYNDTLLMTYLAMFTNCSSTMNELVEKINTSYERPTTRRGGRGAFM

SEQ ID NO: 341351 - protein, 332 aa, Zea mays
  Clone ID: MRT4577_74478C.1.pep
MSAPSDAAVAAAAPASTTTAAASSGGLTFKLHPLVIVNVSDHHTRVKAQAACSGDSSSPSSSAPGAGQPPRVFGCVIGVQRGRTVEIFNSFELVLDPVSGTLDRAFLDKKQELYKKVFPDFYVLGWYSTGSDVHDTDMLIHKSLMDINESPVYLLLNPTINLSQKDLPVTIYESELHVIDGIPQLIFVRSNYTIETVEAERISVDHVAHLKPSDGGSAATQLAAHLTGIHSAIKMLNSRVRVIHQYLVAMQKGDIPMDNSLLRQVSSLVRRLPATESQKFQDDFLMEYNDTLLMTYLAMFTNCSSTMNELVEKINTSYERPTTRRGGRGAFM

SEQ ID NO: 341352 - protein, 90 aa, Zea mays
  Clone ID: MRT4577_74479C.1.pep
GYRRPSLGFFFFFFFFFFFFFFFFFFGIYTTYPFIEKTTDPSLMGNNIFKQMGGFNNENLKMGVHICLHGPIGGSIGKEKAFNTNLFLKQ

SEQ ID NO: 341353 - protein, 44 aa, Zea mays
  Clone ID: MRT4577_7447C.1.pep
EPSSLRLRPPSSSALLVEWSSSLSSDRGSWGFGAAAGEAAATGV

SEQ ID NO: 341354 - protein, 360 aa, Zea mays
  Clone ID: MRT4577_74480C.1.pep
MELGGTAMSLLLLLLVLAASPLQQARAVGGGRPRVPAILVFGDSIVDTGNNNAVLTLTKSNFRPYGKDLNGGVPTGRFSNGRIPTDFVASRLGLKDLVPAYLGTDLSDDDLCTGVSFASGGTGYDPLTSTLVAVLPMQEELNMFAEYKERLAGVVGDEAAAAGIVAESLFLVCAGSDDIANNYYLAPVRPLQYDISAYVDFLVEQACDFMRQLYQQGARRIAVLGMPPVGCVPSQRTLAGGLARDCDPARNHAAQLYNSRLKEEVVLLQKELACQRIGYVDIYDVLQDMITNPCKYGFEVSTRGCCGTGDLEVSLLCNQLTAPTCPDDRKYVFWDSFHPTEKAYEIIVDYLFPRYIENLL

SEQ ID NO: 341355 - protein, 42 aa, Zea mays
  Clone ID: MRT4577_74481C.1.pep
SLAKSLEKNINVLPNTNTKGICLQLLTSNHLSHASIFSLKHL

SEQ ID NO: 341356 - protein, 73 aa, Zea mays
  Clone ID: MRT4577_74482C.1.pep
VVSVEPCGQLKVDVVASQVDDDRNVVAQGLVDFTPKMAGVSHGICDLGFCVLRFSVHWSLPCYAGEHVGLITK

SEQ ID NO: 341357 - protein, 167 aa, Zea mays
  Clone ID: MRT4577_74483C.1.pep
MSYPPLPTEGTRGPIQERRLPPVRHGTGLGHTTAMCPPSVLSTPDGYTAHATAHDHTDDMTDHSTHLDNVCENLRAISDIDDLYVPTYESGTHLVTAMYLNDCTPPLSKDTQYSLARDAGSVVYLAAYNKAHCCMTMPQLTKWSNEHPWWSMKSSRTTLSTYRYLKS

SEQ ID NO: 341358 - protein, 60 aa, Zea mays
  Clone ID: MRT4577_74484C.1.pep
PNPFYILLFKRMAGWLICPLIVSLISQFHGNQKMGYFFFCPKHSLHVQNIRCWKSEKCEV

SEQ ID NO: 341359 - protein, 191 aa, Zea mays
  unsure (1)..(191): unsure at all Xaa locations
  Clone ID: MRT4577_74485C.1.pep
NSARGRERERERERERERERERESEGHPDRLCDLDSDAVLGACLADDPHREVVCETCTNTNMVICFAEITAKANVDYTNIDTXTCRNFGFVSNDLGLDSYHWMVXILNIEQHSPDIAQGVHGHISKRPVEIXGAHDHVLMFAYATAYTPELMPLSHVLATTLGARLTDVRKNXTCLWLMPDAKSQVTVQYR

SEQ ID NO: 341360 - protein, 79 aa, Zea mays
  unsure (1)..(79): unsure at all Xaa locations
  Clone ID: MRT4577_74486C.1.pep
NKGSFSVFGLKGAVSFKGKLNVLASKRNQVVFXAPEIKVGSLGFXYGGESEVKLEIPYVSQKIRLGKGSKGLLFVFLKR

SEQ ID NO: 341361 - protein, 355 aa, Zea mays
  Clone ID: MRT4577_74487C.1.pep
MTSGAGGAAAGIGGTRVPTWRERENNRRRERRRRAIAAKIFAGLRAYGNYNLPKHCDNNEVLKALCNEAGWTVEPDGTTYRKGCKPLATERPDPIGRSASPSPCSSYQPSPRASYNPSAASSSFPSSGSSSHITLGGSNFMGGVEGSSLIPWLKNLSSSSSFASSSKFPQLHHLYFNGGSISAPVTPPSSSPTRTPRIKTDWENPSVQPPWAGANYASLPNSQPPSPGHQVAPDPAWLAGFQISSAGPSSPTYSLVAPNPFGIFKETIVSTSRMCTPGQSGTCSPVMGGAPIHHDVQMADGAPDDFAFGSSSNGNNESPGLVKAWEGERIHEECASDEHELELTLGSSKTRADPS

SEQ ID NO: 341362 - protein, 43 aa, Zea mays
  Clone ID: MRT4577_74488C.1.pep
LVFVFPPPGSHGHVWLARRQPARLKCKSPLFYRANGNGLTGPP

SEQ ID NO: 341363 - protein, 53 aa, Zea mays
  Clone ID: MRT4577_74489C.1.pep
AERPGELRRRAGRRQRGGRRPAAYLDGCIKVRGMDWSEAAIVSSRAVRTRLEG

SEQ ID NO: 341364 - protein, 102 aa, Zea mays
  Clone ID: MRT4577_7448C.1.pep
HLPARGRWYHRARHHAHCVATTRPERYTQVRASSKVDMPLSDRSHRGLRGRGYADLPLCPERPDGRDHPGCQEGRAPGPDRQACRACACVCVCLKEIIRPAQ

SEQ ID NO: 341365 - protein, 69 aa, Zea mays
  Clone ID: MRT4577_74490C.1.pep
LGYPIPPGDMHTPVFFHSPTPSMFEGFNPNEGPAIFPFGVLSHAQVSPPHSRRDATVNRASPENLMASS

SEQ ID NO: 341366 - protein, 152 aa, Zea mays
  unsure (1)..(152): unsure at all Xaa locations
  Clone ID: MRT4577_74491C.1.pep
MSTSRASRTTRENTIGCSPSTSTPLLTDTRPRTHLARAGRVTSATSGTNEARSGSYCQVLNPDSLIGYLVEGPSXFARGHYTIAEEIDDLCLGRIRNLANKCTGLQMYLVFYSVGGETGSGLGSLLLERQTGDYGXKSNDRFTEYPSPQVST

SEQ ID NO: 341367 - protein, 70 aa, Zea mays
  Clone ID: MRT4577_74492C.1.pep
TAGDGAALAAVVLAPADVTRWWRTCVPVRWPRIGCTNRSGWSRNSYCNRTTLSPGVLPIKLSYLLPSSIL

SEQ ID NO: 341368 - protein, 58 aa, Zea mays
  Clone ID: MRT4577_74493C.1.pep
PVAYLIPLVEDNTEVKRNRQERLVYGHGRAGSKDLRFWGPVPFPSRASARLGLRSSCR

SEQ ID NO: 341369 - protein, 80 aa, Zea mays
  unsure (1)..(80): unsure at all Xaa locations
  Clone ID: MRT4577_74494C.1.pep
CYTIGQIAAFFYFISCMHKHKICNVSFINCLLQHMLIVFSQSIDSMSSRISQYAYSKYFLVLXKCSILWLAFFLNSVFGV

SEQ ID NO: 341370 - protein, 164 aa, Zea mays
  Clone ID: MRT4577_74495C.1.pep
MASTAKVTITLGRSGQVVKRRTISDIGNDDEVPVSGRKRPVRERLGNNVTDSDFYGNQQSNKRRQTESSSSQLGDDGLVRQIGSDDLRLKLMRKGLTQKSNSEAEQNGVDLREKLSRKSKKLQGYEARRGDPESRSSYDEGEIQNQDLDMVRGGEFQSQEPLPL

SEQ ID NO: 341371 - protein, 111 aa, Zea mays
  Clone ID: MRT4577_74496C.1.pep
MTAAISRYQPWGCSATGLTRARLDGVDAREDSDARPYSREGTATVRERGGSPCVPGTIGWISQEFGEVCYELGEADDQAMGATVSAYAARCEHYWHKGPTAKSLRAGDQER

SEQ ID NO: 341372 - protein, 123 aa, Zea mays
  Clone ID: MRT4577_74497C.1.pep
TFHFHYQYTKISKQSFLSDTSFCFHAYVGLHNIEVRQIGSDDLRLKLMRKGLTQKSNSEAEQNGVDLREKLSRKSKKLQGYEARRGDPESRSSYDEGEIPESGSGYGSRGRVPESRASTLVSQ

SEQ ID NO: 341373 - protein, 115 aa, Zea mays
  Clone ID: MRT4577_74498C.1.pep
FYGQQEKQGAQPTCREEHLPTGPQRLTPNKQKGVENRKTWVIFFSKHNKIPMGGSQGGPGNNCTTTTTRYKNKNHLRGRRPKGAVDAGAAPNCHHQKRLRGRTWRTSPSPKQEGG

SEQ ID NO: 341374 - protein, 170 aa, Zea mays
  unsure (1)..(170): unsure at all Xaa locations
  Clone ID: MRT4577_74499C.1.pep
MDLALLXEEALLGLFAAAVVAIAVAKLTGKRYRLPPGPPGAPVVGNWLXXGRTNPEPTRQNPWMGPNWAEKRGFRGEKIFFSFFLPQKGGPFAPQNPWGGGGGGFSNPPPGNFFSTQKGGGVFFYKKKQEGWGGKKKYFFFFLPPHPPPQKRRGGGGVVFTTIFFFFSPP

SEQ ID NO: 341375 - protein, 75 aa, Zea mays
  unsure (1)..(75): unsure at all Xaa locations
  Clone ID: MRT4577_7449C.1.pep
GCWRRXXXTVKWFNDTKGFGFISPEDFSEDLFIHQSSIKSEGFRSLAEGEEVEFSVSDGDDVLTKAHYMTSPYKS

SEQ ID NO: 341376 - protein, 218 aa, Zea mays
  Clone ID: MRT4577_744C.1.pep
MAKVHLYVAAACAVVLALAAPALAGDPDMLQDVCPADYASPVKLNGFACKANFSADDFFFDGLRNPGNTNNPAGSVVTAANVEKFPGVNTLGVSMARIDYAPGGQNPPHTHPRATEIIFVLDGTLEVGFITTANALFTKTVTKGDVFVFPRGLVHFQQNRGHGPAAVVAAFNSQLQGTQAIAMTLFGAVPPVPSDILAKAFRISSGEVDHIKANFAPK

SEQ ID NO: 341377 - protein, 160 aa, Zea mays
  unsure (1)..(160): unsure at all Xaa locations
  Clone ID: MRT4577_74500C.1.pep
MSDSEEHHFQSKGDAGGCKTYPQQGGTVRENGVIVIKNRACEGGGGSTSKTGEHGHAKCHFVAIDIFNGKKXEDIVPLSHNCDIPHVNRTEDQLSEISEEGGVRLLTSYGDTKEELILPTEETLVGQIKEGVESGKDLVVTVHSAMGEEEICAXKDVGPK

SEQ ID NO: 341378 - protein, 53 aa, Zea mays
  Clone ID: MRT4577_74501C.1.pep
LFDLVMNRKNGMDDTVYHKDNHENVIVLVSRKNLHIIKTFIKMQYCKEFLSVH

SEQ ID NO: 341379 - protein, 62 aa, Zea mays
  Clone ID: MRT4577_74502C.1.pep
PLPPFPSGPLTPRSAYPLPLTLFPPHPESCSTALPRKTPAALGRMCGGNSTQDSPNNWSPVL

SEQ ID NO: 341380 - protein, 55 aa, Zea mays
  Clone ID: MRT4577_74503C.1.pep
PARGLLPDHEHPLDTHARSGLTKGLRLYLYMHVYIHINVFQFTCVKVDYTKGIAA

SEQ ID NO: 341381 - protein, 237 aa, Zea mays
  unsure (1)..(237): unsure at all Xaa locations
  Clone ID: MRT4577_74504C.1.pep
MNMNYGSMGPGAMVRCRQCSSSITAMPGARAVQCMQCSCVTRVXGVAGSSTATARVTGTAAGXMPPMXSHPGLRRRPXGKKRAVLIGIKYTNRRSCELRGPINDVKCMRYLLTERFGFPNDCVLILTDEERNPCRQPTKDNIRMAMHWLVQGCSYGDSLVFQFSGLGAQVPDDDGDELDGMDEALCPVDSFQQGPILDDEINEAIVRPLVHGVKLHAIVDACHSATVLDLPYXMHVS

SEQ ID NO: 341382 - protein, 328 aa, Zea mays
  Clone ID: MRT4577_74505C.1.pep
HASALFLVLVPPGAISPGFAGLCLSYALTLTSAQIFLTRFYSYLENYIISVERIKQYMHLPVEPPAIIPDSRPPTSWPQEGRIDLQDLKIRYRPNAPLVLKGITCTFAAGNKIGVVGRTGSGKSTLISSLFRLVDPAGGRILIDKLDICSIGLKDLRTKLSIIPQEPTLFRGTVRNNLDPLGQHSDEEIWEALEKCQLKTAISTTSALLDTVVSDDGDNWSAGQRQLFCLGRVLLRRNKILVLDEATASIDSATDAILQKVIRQQFSSCTVITIAHRVPTVTDSDKVMVLSYGKLLEYETPAKLLEDKQSAFAKLVAEYWANTKRNST

SEQ ID NO: 341383 - protein, 98 aa, Zea mays
  unsure (1)..(98): unsure at all Xaa locations
  Clone ID: MRT4577_74506C.1.pep
LTFTYNFSWIWSTKFRRCLEGWVXFCEGVLIRVAKTEAFMVKDHRXXLYKNLYLPTLKDEVWMFEKIXKDGLFHKMLNKSGISTCDDFLNLLVRDLHI

SEQ ID NO: 341384 - protein, 46 aa, Zea mays
  Clone ID: MRT4577_74507C.1.pep
NSFVTAFVLIMPSQSKQALHLSIYKVHLDINLKMPIPPSYLKVKSP

SEQ ID NO: 341385 - protein, 141 aa, Zea mays
  unsure (1)..(141): unsure at all Xaa locations
  Clone ID: MRT4577_74508C.1.pep
PIIQTLLPMSAKGEIWDVNGVWVDAKEDKLFRLTTKEGKLXLEREKVKIQTQPFSPWSVKQDPVQILDAXMLPLYLNSQILRALQDSLSSELAGRISAMISAPLNAIEPRKNLSIAFNKQRQFKIVGEILQIVTGADAHPV

SEQ ID NO: 341386 - protein, 101 aa, Zea mays
  Clone ID: MRT4577_74509C.1.pep
CGRKLLLILFGKYLWQVFGVDGSVQRHASGYAVLFLYQVWRFRMSKCCPWFNPQIDTCREPISGSSACRTDLYRGVLRGHLGSHFFVSKLTLGQHGFCLFQ

SEQ ID NO: 341387 - protein, 117 aa, Zea mays
  unsure (1)..(117): unsure at all Xaa locations
  Clone ID: MRT4577_7450C.1.pep
SGDAAFDRPRSVSVDAGVNLYFTDLFYXSFLCFSYFFXHFYNFLYVFYFLXLIILILFLFFFLFFFLLIFIIFYXILFFFFYIFFFXFFYFFISVILFFFFYLNYXFIYFHILFIYF

SEQ ID NO: 341388 - protein, 70 aa, Zea mays
  Clone ID: MRT4577_74510C.1.pep
LVFFCAMLSGEEDLGSRWSGLSSPRCRGPSGRDITGHRSSRPLRVKHTCCFIRAVSMCSVRSHPVGRDGG

SEQ ID NO: 341389 - protein, 92 aa, Zea mays
  Clone ID: MRT4577_74511C.1.pep
KTNHSSLTEPCRSKFDPAATSNPARKGLNLLCGIRRTGRRRTKPACRTQPNKYAPPPILYIINWPCNQGWFAMDPAVAPEPLILMCPLRKGG

SEQ ID NO: 341390 - protein, 95 aa, Zea mays
  Clone ID: MRT4577_74512C.1.pep
GLSGGPTCQSSNGRTLTVGLRGWPTGLSGARFDSSLPQRALWWLGAINTPQPAHFKAFKFSANTFNTRASAFNTSHKKIESKSFQVPIPLKAISD

SEQ ID NO: 341391 - protein, 43 aa, Zea mays
  Clone ID: MRT4577_74513C.1.pep
IPSAQKCRSLVRIYMKHLSGTQLATRVNKPQMRKGPFTEISHN

SEQ ID NO: 341392 - protein, 106 aa, Zea mays
  unsure (1)..(106): unsure at all Xaa locations
  Clone ID: MRT4577_74514C.1.pep
LETVVDDLTVKIVLPEGSKNPEPVVPFVAKKPFXTSYSSPSVVGRTTVVLKKKNVVGEPNVPFPGGXEIKPIFMLGEPLKVKFAGVLFFVALLGDFPKDLSLKKSS

SEQ ID NO: 341393 - protein, 104 aa, Zea mays
  unsure (1)..(104): unsure at all Xaa locations
  Clone ID: MRT4577_74515C.1.pep
CIWTLNRNCAHICSILCSCFPMTIGIKKFHGFRKRRVIFFLLFSRNCQLHSQSLAFTVFYSRCPRGTDTPCPAKRPGAFGWGLRRRRLFPCSEPLSVSSACLFX

SEQ ID NO: 341394 - protein, 95 aa, Zea mays
  Clone ID: MRT4577_74516C.1.pep
AGHARELSTEGREAREPCGALRRRRVFGQHPRSRRLGGGARRRAVAGRVPRWRRRRHADAEPARKLLHQGGFQGVSSSSNYNAGARRELGRRQRS

SEQ ID NO: 341395 - protein, 109 aa, Zea mays
  Clone ID: MRT4577_74517C.1.pep
MKHLAAYLLLGLGGNTSPSAADVKAVLTSVGIDADEDRLNKLISELEGKDIQQLIAEGSEKLASVPSGGAGGASGGAAAAGGAAEEAKEEEKEEEKEESDEDMGFGLFD

SEQ ID NO: 341396 - protein, 141 aa, Zea mays
  Clone ID: MRT4577_74518C.1.pep
LTRRNPSRSVEPSAAAPPSALSFLLRSKMKFIAAYLLAYLSGNASPSAEDLTSILESVGCEIDNEKMELMLSQVKGKDITELLAAGREKFAAVPSGGGGVAVSAAAPAAGGAAAPAAESKKEEKVVEKEESDDDMGFSLFD

SEQ ID NO: 341397 - protein, 96 aa, Zea mays
  Clone ID: MRT4577_74519C.1.pep
YGLMNAMAASETNLNPTPTEMTDTFKEKWATTTRTTIHALTVLDTTTDRLLMHNRATMRTLLERIYTQHTDINAYDVTKRVTGHARVSRTQCYTCS

SEQ ID NO: 341398 - protein, 265 aa, Zea mays
  unsure (1)..(265): unsure at all Xaa locations
  Clone ID: MRT4577_7451C.1.pep
MPTPPAAGRSLVLHCCCCLILLVLLPACHAFPLCTDHRAPLPLNGTLAFCGNAGAGASCCDAAADKALRDQLQAANVSDAACAAVLKSLLCAKCNPYSAELFDAGPKLRTIPFLCNSASSATSAHQSKQSTVQDYCKLVWDTCKDATMRNSPFQPPLQGGGRLPSSSSKLTDAWQSESDFCTSFGGAPSNRSVCFSGSTVSFNATQPSASPKGVCLERINNGSYAYLNMVPHPDGSNRVFLGTQAXKIVLATVPDQGSGGTLQFS

SEQ ID NO: 341399 - protein, 52 aa, Zea mays
  Clone ID: MRT4577_74520C.1.pep
SEPNNLIRGLADFVVSGTKDGAHFFAQADDALVERADLDPGRVDTCRDGNEL

SEQ ID NO: 341400 - protein, 60 aa, Zea mays
  Clone ID: MRT4577_74521C.1.pep
NKLTSLEAQESSSTNVDLMYVSICCHLFTIVTSECGSESPEESFVYIILSSIEIKVPRIS

SEQ ID NO: 341401 - protein, 121 aa, Zea mays
  Clone ID: MRT4577_74522C.1.pep
SPQVCARVSPSLKWGHLGRKSRCSEFSSGWLRANEQPIWFYFCGRGGVFVISGMCWLRATPQRGGLGRVFFRLGPAPGCPPVVCGSFSGAAPGCQPVFCCSFWGRPPAGVQNGKFLWQGPL

SEQ ID NO: 341402 - protein, 59 aa, Zea mays
  Clone ID: MRT4577_74523C.1.pep
YSVLLVTLIFIIISILILLVKEMLYIEFIYTFTISLSFLIFLTYINFFKVFIYNIIIIN

SEQ ID NO: 341403 - protein, 45 aa, Zea mays
  Clone ID: MRT4577_74524C.1.pep
PFNLFTSDTLLILLPVPLSGEYDLFSLPQFPHYSNPHHLLISHKF

SEQ ID NO: 341404 - protein, 534 aa, Zea mays
  unsure (1)..(534): unsure at all Xaa locations
  Clone ID: MRT4577_74525C.1.pep
MTTRMADPYLLLLFLLVFVTSNSSSQSMAQITDASELATLLAIKKGWGSPSALSSWSSQNASYCSWAGVRCVNGQVSALSFQNLSIANPVPVPAASICNLKNLWYLDLSYNKLTGQFSTALYSCSAVRFLDLSNNRFSGALPADINKLSSAMEHLNLSSNGFTGSVPRANNNLFTGEFPEKVWSGFPLLTTVMIQNNSFTGTMPSAISSNITRIEMGNNRFSGDVPTSAPGLKTFKAGNNQFSGTLPEDMSGLANLIELNLAGNTISGAIPPSIGSLQRLNYLNLSSNQISGAIPPGIGLLPVLTILDLSSNELTGEIPEDFNDLHTSFLNLSSNQLTGELPESLKNPAYDRSFLGNRGLCAAVNPNVNFPACRYRRHSQMSIGLIILVSVVAGAILVGAVGCFIVRRKKQRCNVTSWKMMPFRKLDFSECDVLITNLXDEDVIGSGGSGKVYRVHLPARGRGARLRRHGWWPVKKLCSRGEGAEEKLDXEFDTEXVKIXLGDIRHNNIVSXLCYISSEDTKLXVXYEYMGERQ

SEQ ID NO: 341405 - protein, 29 aa, Zea mays
  Clone ID: MRT4577_74526C.1.pep
VKLGVVTLVLMVSFQVCSVLEKEVYFKNP

SEQ ID NO: 341406 - protein, 62 aa, Zea mays
  Clone ID: MRT4577_74527C.1.pep
MSKQGGKAKPLKAPKVDKKEYDESDLAYLQKKKDEEKALKELKAKAQKGAIGGSGLKKSGKK

SEQ ID NO: 341407 - protein, 61 aa, Zea mays
  Clone ID: MRT4577_74528C.1.pep
WKLIRQVFMGAPYYRPPGGFIPGVLRAREGQQVPGFPAVSPIAYLARGGTPPHPPLRETVG

SEQ ID NO: 341408 - protein, 67 aa, Zea mays
  unsure (1)..(67): unsure at all Xaa locations
  Clone ID: MRT4577_74529C.1.pep
RDGWVRGAGGKAKPLXKAPKVDKKEYDESDLAYLQKKKNEEKALKELKAKAQNGAIGGSRLKKSGKK

SEQ ID NO: 341409 - protein, 51 aa, Zea mays
  unsure (1)..(51): unsure at all Xaa locations
  Clone ID: MRT4577_7452C.1.pep
THXQRSVXKLRVCXHXHXTHLLHTHILNIQTLKTKLISPTIPTLINLPQSF

SEQ ID NO: 341410 - protein, 70 aa, Zea mays
  Clone ID: MRT4577_74530C.1.pep
TKEAIEGPMYASNKRNKNPVILKWLLELALLKACICCHKRNRGGGGFCICCHKRYFFYSSKFEVGAIAFP

SEQ ID NO: 341411 - protein, 110 aa, Zea mays
  Clone ID: MRT4577_74531C.1.pep
PRHPKAIGVVNRPRRVQRGFRVAARRGGGVAIQRGGKEALTWPLVRPSTPPCVARMASMAAAGRALLYAFLDCNTHVSLFGSIFTLYVILFYTQTLKILRFLHFWIISIT

SEQ ID NO: 341412 - protein, 62 aa, Zea mays; identical to SEQ ID NO: 341406
  Clone ID: MRT4577_74532C.1.pep

SEQ ID NO: 341413 - protein, 62 aa, Zea mays; identical to SEQ ID NO: 341406
  Clone ID: MRT4577_74533C.1.pep

SEQ ID NO: 341414 - protein, 162 aa, Zea mays
  unsure (1)..(162): unsure at all Xaa locations
  Clone ID: MRT4577_74534C.1.pep
PGLSNLTIGPCIDLKELPPRVFEIGSLETISISKCPDLPELPXKLGGVGCLRILRVXACPALWGLPGSVFTLKRLKYLDIFQWINLGGLPEEVGPLTSLEKINMGECLRLRSLPRLLSSLKSLGHFVFEKKTALFWGXAEQVIPYPRVQVAEEFYNLGWLPE

SEQ ID NO: 341415 - protein, 38 aa, Zea mays
  Clone ID: MRT4577_74535C.1.pep
SVKILRSENHSGHGEVCKPSTVAVIRVANFNKINFKAA

SEQ ID NO: 341416 - protein, 80 aa, Zea mays
  Clone ID: MRT4577_74536C.1.pep
MSCSSGKCNCGSSCSCGSSCNCMSPDVETAAANSIKTMVLAAPTTKASAGGFEAATEGGGCDCNTCNCGTSCGCSCCSCN

SEQ ID NO: 341417 - protein, 37 aa, Zea mays
  Clone ID: MRT4577_74537C.1.pep
AAARDLNQGVRHCCPNRTSSYHGGLSRRSNKATYSLT

SEQ ID NO: 341418 - protein, 99 aa, Zea mays
  Clone ID: MRT4577_74538C.1.pep
EDKPTKACERVPEFPFAVETHVPPRHSQSNSADFSFPPPPPQIQFHEEENGRTWSDSDAQTKNRPEKKKKDGNLTHKPAGRSVGVQASVSFHAMTNTLK

SEQ ID NO: 341419 - protein, 135 aa, Zea mays
  unsure (1)..(135): unsure at all Xaa locations
  Clone ID: MRT4577_74539C.1.pep
MIISMYHALLCRVAKTAVLAFLLSCAWCGPTKVPPSKNITATYGKDWLDAKPTWYGKPTGAGPYYNGCGCCYKDVNKPPFNSMVSCRNIPIFKDGLRCGSCFXIKCDKPVQCSGKPVLVHITDMNYEPIAAYHFD

SEQ ID NO: 341420 - protein, 126 aa, Zea mays
  unsure (1)..(126): unsure at all Xaa locations
  Clone ID: MRT4577_7453C.1.pep
NSMISAIQNMTANKLTGRSFPVSXPQSGPGAGAATYSASAREEEGYHGGPSDLGXEEGAASSGRHEGGGGGSADVASSGGRNQAGVEVCAAGVGDLMVSCMGPLLASLELSCLSIVTGYRSLLSPC

SEQ ID NO: 341421 - protein, 115 aa, Zea mays
  Clone ID: MRT4577_74540C.1.pep
MINEQAGGARSSEEERYVPVRRVVYRSMTPAAASAATTAEAAAAAASYEPFEVCEGCRCCAPSSSSSNGSSSCVDTSCCYAIDCDLPGKPFGTCAFTPQTCGCGGASSNCTQPSS

SEQ ID NO: 341422 - protein, 153 aa, Zea mays
  unsure (1)..(153): unsure at all Xaa locations
  Clone ID: MRT4577_74541C.1.pep
KKHLSTVGNTQGGPRGNHKKKKKKXKRGDKTGKKQEKKAEKQRGGENKGKKGKMXEAGNKRGQKNQTQQDPTRXTARPEQPAGTKGEEEARXTRTQKPGKKPQGDQKGTKGKKKKGLKTRGKTGDIGGLGDKATAPKNPKPTKRXGKKGKDRG

SEQ ID NO: 341423 - protein, 139 aa, Zea mays
  Clone ID: MRT4577_74542C.1.pep
RRPPAHLLLLPAANSRRSQKQRGGAVRAGAQGGVPVHDTGGGECGDDGSGSGAARRRRRRPTAAAAAWTRAAATPSTATSPASPSAPAPSPRKPAAAAATAPSPRPDDDSSFLQLGYFFWIIHRLTLRYDLMTEDDMIS

SEQ ID NO: 341424 - protein, 135 aa, Zea mays
  Clone ID: MRT4577_74543C.1.pep
MTMIPLAGFTALSAAGLLLIFSSFLLQTQGGARSSEEERYVPVRRVVYRSMTPAAASAATTAEAAAAAASYEPFEVCEGCRCCAPSSSSSNGSSSCVDTSCCYAIDCDLPGKPFGTCAFTPQTCGCGSNCTQPSS

SEQ ID NO: 341425 - protein, 105 aa, Zea mays
  Clone ID: MRT4577_74544C.1.pep
KKKRGTKKGLKGPENLGGGGPSFSTLKRCTKSRGKKVFQKRGTQGFTLKKLKKRGGQFLVRVKTYDPFSLKESSWGKRKGGGKCIKKVNLMGVVKKPLLWELWGG

SEQ ID NO: 341426 - protein, 138 aa, Zea mays
  Clone ID: MRT4577_74545C.1.pep
MTMIPLAGFTALSAAGLLLIFSSFLLQTQGGASSSRSSEEERYVPVRRVVYRSMTPTPAAARATTAEAAAASYEPFEVCEGCRCCAPSSSNGSSSCVDTSCCYAIDCDLPGKPFGTCAFTPQTCGCGGASSNCTQPSS

SEQ ID NO: 341427 - protein, 420 aa, Zea mays
  Clone ID: MRT4577_74546C.1.pep
MAMQEELNNFKRNEVWSLVPCPKQNIVGTKWMFCNKQDEYGVVTKNKARPVTKGYDQFTAYVVHHSFKLFQMDPKSAFLDWPIKEEVYVEQPPDFEYERYPDHVYKLSKALYGLKQAPRAWYKCLRGFLISNAFKVGKVDPTLFTKTCNGDLFICQNYVDDIITDSTNQKFCEEFSMVMMQKFEMSMMGELTYFLRFQVKQLKEGIFISQTKYTQDILKKFRTKDVKPIKTPMGINRHLDLNAGGKYVYQKVYQSMIGSLLYLCAKKPKIMLSGCMHARFQSGPKECHLVVVKKILRYLVHTPHFGLWYPKGSTFDLIGYSDPDYAGCKVHRKSTSGICQFLWRSLVSWISKNQHFIALSTVDAEYIVVGQCCAQLLWMRQTLRDFGYNLSKVPLLCDNKSVIRLADNPIEHSHTKHIDI

SEQ ID NO: 341428 - protein, 233 aa, Zea mays
  unsure (1)..(233): unsure at all Xaa locations
  Clone ID: MRT4577_74547C.1.pep
MVRKLALASLFFNXAREASAFPPRPPXTAASWQWPSCTQARTRSFRXARSCPCATSTPAASERSXEGYKTSMNPAYVVHDCYSSSLSDSSAAPAEPAADEDEAIIHGLRSSTTRRLLFEPESTSSIVKKTKKEAAFSGATALAIESADPYGDFRRSMEEMVLSHGAGDDWAWLEEMLGWYLRANGEKTHGLIVGAFVDLLVALASSSGPSRLRGPASLKQSSHLILEAANIES

SEQ ID NO: 341429 - protein, 138 aa, Zea mays
  Clone ID: MRT4577_74548C.1.pep
MTMIPLAGFTALSAAGLLLIFSSFLLQTQGGARSSEEERYVPVRRVVYRSMTPAAASAATTAEAAAAAASYEPFEVCEGCRCCAPSSSSSNGSSSCVDTSCCYAIDCDLPGKPFGTCAFTPQTCGCGGASSNCTQPSS

SEQ ID NO: 341430 - protein, 138 aa, Zea mays; identical to SEQ ID NO: 341429
  Clone ID: MRT4577_74549C.1.pep

SEQ ID NO: 341431 - protein, 58 aa, Zea mays
  Clone ID: MRT4577_7454C.1.pep
SAGVGIPVAVPVAAAYCRSYCLSKPPTASFGRARSTSQAHQATAWMNCTASSFLGGHG

SEQ ID NO: 341432 - protein, 92 aa, Zea mays
  Clone ID: MRT4577_74550C.1.pep
TPYKGQLKKPQREINDETNTEEGKDPHINTAEATQGQERETTITPRDRAPNHGEGTAAEIRRKNAAPTRARRAPRDAGKAKAPTHPEDRAPL

SEQ ID NO: 341433 - protein, 60 aa, Zea mays
  Clone ID: MRT4577_74551C.1.pep
GGASHYRVVSYSSASIVSKYSSGRCSGKVLRNMFRNCGVVFNPLTYVVIRYISRLSIHSF

SEQ ID NO: 341434 - protein, 69 aa, Zea mays
  Clone ID: MRT4577_74552C.1.pep
GVRAGVAPGVPVVGLPPRNPGKVFKNPGATFLVKVFQDPEFLSVFQQGPVGVEPPPENAQGLWGGPCGP

SEQ ID NO: 341435 - protein, 119 aa, Zea mays
  Clone ID: MRT4577_74553C.1.pep
SESDVDLRAEDLEVVLREAYAHPAVEGVIFWGCMQGHMWRQDACLIDADGNVNDAGERFVDLRREWTSHARGQIDSAGHFKFRGYHGTYIVQLATATGKVHKTFSVEKGDTPLVLDMNL

SEQ ID NO: 341436 - protein, 89 aa, Zea mays
  Clone ID: MRT4577_74554C.1.pep
MVYWNIIDWRWDNQTPQPLHSAGFFLNPLFFDGIRGDISNGIFSGMLDCIERLVPDVKIQDKVQRELHIYRSETAVDFRRQMAVRSRRT

SEQ ID NO: 341437 - protein, 63 aa, Zea mays
  Clone ID: MRT4577_74555C.1.pep
LKKKKKKKKPHGFKKKKRQKKKKKKKKKKKKKKKKGPPPFKKPNLTSPSFQRKNFLKGPPKSN

SEQ ID NO: 341438 - protein, 71 aa, Zea mays
  Clone ID: MRT4577_74556C.1.pep
HIDDGVNSGFHHIKGFTRRFTLVIEFQSLRSLFKQLSGKYRCAKPSSIISIGRVVRRVNGRVDIRVILHVN

SEQ ID NO: 341439 - protein, 103 aa, Zea mays
  Clone ID: MRT4577_74557C.1.pep
SKHSHQDTPLFTLVLLLPMEQEHLHLAMVHSLYSSLSQLDSTNGCSCCWMENDNPSLHHALFCLSKIFLFAPSGLNPYKCTWHWLPICRFITSHEKDTCWTTR

SEQ ID NO: 341440 - protein, 92 aa, Zea mays
  Clone ID: MRT4577_74558C.1.pep
VSLIPPMGVHAVSIVTSSPFILSWLSIAYMASTLLPFQPMVSPSLAGWMASDNPSLHPAVFHLSNISVCSQWLEPLQVHLALVTNLQIHNIS

SEQ ID NO: 341441 - protein, 121 aa, Zea mays
  unsure (1)..(121): unsure at all Xaa locations
  Clone ID: MRT4577_74559C.1.pep
FVIDADASPTGGPXPNQACGFWGWCWAPXSLVEVFIYCRVRNVGGWGCFFFSXXAGAWGCVCGRRWGTMSMWLGSAAGWALALRGVFFRRVWAFGVGRVLPCCGRSCGGRWQVRGFSFLVF

SEQ ID NO: 341442 - protein, 158 aa, Zea mays
  Clone ID: MRT4577_74560C.1.pep
SPVPRAHETPRLKKPKADGSIRRRGSPAYPGRRPVDRPHAQAACCHRGLQRWPLLCLPPSLGSVGGSRGAPRAAGGSMHEGTHGHRRAGTPHACARVRGSRARHGQGREGKGPDCRSSRPASRVHAQGGRGAGSMRSPVVRLVGAPARSSSPRNLIMQ

SEQ ID NO: 341443 - protein, 112 aa, Zea mays
  Clone ID: MRT4577_74561C.1.pep
SGKKSRSKYGQKQNTKACKLKKLWKAGVSTCFKSSGGWGHGKNSTLQEIKSLLFHNKPTVVVWLRKRDLHCKSHVQFLAKCFQTTLTNVMFPSLAVKNFAPENAYKCDFFFP

SEQ ID NO: 341444 - protein, 117 aa, Zea mays
  Clone ID: MRT4577_74562C.1.pep
VAMLLDYTNNWNDSWVEKDGRKWKIASLRVTAVCYLSTSTSSGALLMWFNPSRHDCGLNVFFIVMTLMLAFAHAIHALHAKVHGSVIPGSDISVYCAYLSFTSLLSEPDDYECNGLY

SEQ ID NO: 341445 - protein, 191 aa, Zea mays
  unsure (1)..(191): unsure at all Xaa locations
  Clone ID: MRT4577_74563C.1.pep
MQESSQPRSENDEGLRXARTLRYKEXALSSASCPAAAGPAAXLARQSFERAPLRVENARLRXEVDRISSIXAAKYVGRPMVPFPVLSSPLAXXGARAPALPPLDMAPAXYGAAADMFGGGGVVAAAGAAGAGDLLXGAPAVQSDADKPMIVXLAXAAMEELXRMAQLDSXLWNAPAGLDGSAEEETLNEEE

SEQ ID NO: 341446 - protein, 83 aa, Zea mays
  Clone ID: MRT4577_74564C.1.pep
SSSMNYVMVTCVSFDISLTGPAVTRVGWPRILRRGKDVVSSMVLVFSCKKSPSIVFSWAWTSNKRVSCIIHKNSEKKGRRTQV

SEQ ID NO: 341447 - protein, 101 aa, Zea mays
  Clone ID: MRT4577_74565C.1.pep
KKKKPPPKIFFGPGAGGKITERGLMGGAGLKKGGPGGKRNLAVVAGKGPKRGPGLKNPLFLDMGGPPRWDQGGGFGFGKKALGGNPAPTMVEILFRGGEGL

SEQ ID NO: 341448 - protein, 91 aa, Zea mays
  unsure (1)..(91): unsure at all Xaa locations
  Clone ID: MRT4577_74566C.1.pep
NYSSDWLDAHATWYGKPTCASPDDNWGGCEYKDVNKGPFNNMGACRNRPIFKDGLGCGSXFEIKCYKPAKCSGNPLVVYISNMNYEPIVAY

SEQ ID NO: 341449 - protein, 109 aa, Zea mays
  Clone ID: MRT4577_74567C.1.pep
PGLGATFGDSLYIGGAVGFHLGGPLPPLGAQFTFLGPHFPFAGWGKTLGAPTLFPFQHFPFSEWWMDAQWARPIKPFQKWGLPAGGPVPPSTPYLPPLGVGGLPLWPVP

SEQ ID NO: 341450 - protein, 113 aa, Zea mays
  Clone ID: MRT4577_74568C.1.pep
ILTSSRSRYSSHSPCSRFITDILFLHGPTAKLNLLTLKLSAFFAFTALTSATCVMFHTLKLKAVVKPELFITRSQLRVSKILFGIAVVSLFSTSIFRSAIYSLLPKKKKKKAP

SEQ ID NO: 341451 - protein, 99 aa, Zea mays
  Clone ID: MRT4577_74569C.1.pep
QNSRLPRGEAARRVCRSLTPRSSSTAATGRDRLQLGQLVGELVQPPLRVESAARSESGVPRAFNTELDRELSTASAFVIASPPLAEAQLHLYDLYTIAT

SEQ ID NO: 341452 - protein, 80 aa, Zea mays
  Clone ID: MRT4577_7456C.1.pep
TDVMHAWGINTVTCVCCACYLMRRVLCWTMTQRRAVLTPHKFAWRYWVCNPSAMTNPVNQWLLSYVGELLSAAPLYTGYD

SEQ ID NO: 341453 - protein, 108 aa, Zea mays
  Clone ID: MRT4577_74570C.1.pep
RAAGSRYHACRRAAAGGLRRHQSCSCSAGSHMIGGYMVLLLQSVLYIHISMARVFFAVERRDSDQEIDLLCAMHENGGKAMKGRRRRRRRRTWRRRKHHGPFSLVFLL

SEQ ID NO: 341454 - protein, 107 aa, Zea mays
  Clone ID: MRT4577_74571C.1.pep
APVYLQLFGLSPKSCALTSENFPMISLPYIFSLCNHYTVSSCWQRLVHPSLLSMVMCNRQHICDLSGQKTRQYYLLCSVFRVRYCPVLFADPAFKTFAFLRTAYVWS

SEQ ID NO: 341455 - protein, 81 aa, Zea mays
  Clone ID: MRT4577_74572C.1.pep
SFLKADSSQTRYTRSSASTAISLLVAHVGDSRAIIFKGQGKFIVVTWHISVSVPMLPLVPETFYMMCIFLDEFFPCKIDIL

SEQ ID NO: 341456 - protein, 122 aa, Zea mays
  Clone ID: MRT4577_74573C.1.pep
VWQKLGENKQTKKAKPNEDSKGQRARRNHEESTSPKSRSEHLGPSLAGRILCPARAALPRPALSLTTALRTQDLDTHPRSSAAPKAGPSLEDCEREDGSIRTGWDTAPTKESPTAVPGAGSD

SEQ ID NO: 341457 - protein, 164 aa, Zea mays
  unsure (1)..(164): unsure at all Xaa locations
  Clone ID: MRT4577_74574C.1.pep
MAGEGDDVKLLGAAVSPFAVRVRMTLHLKGVRYEYLEQDLFIKGELLLATNPVLKKVPVLIHAGRPVCESLAIVEYVDEVWAYGASLLPADHYGRAVARFWAAYIDDKLFPAWIGILRAATEEDRAEKLEAALAVVRPLEDALAQCSGXKDFFAGDSVGYLDLA

SEQ ID NO: 341458 - protein, 49 aa, Zea mays
  Clone ID: MRT4577_74575C.1.pep
LKQALKRIVYGHMNRDRKQYTGYVLRHLFLRLTGAHIKYRVNVRVPAII

SEQ ID NO: 341459 - protein, 45 aa, Zea mays
  Clone ID: MRT4577_74576C.1.pep
MASGLEAASTVDSLGLSIAVNGLELSIAPPSRCVCGGAAGAIKVL

SEQ ID NO: 341460 - protein, 68 aa, Zea mays
  unsure (1)..(68): unsure at all Xaa locations
  Clone ID: MRT4577_74577C.1.pep
MTWCNSFNDVRAVENNLASAAAVAAAAAKKQQXQQQASSHVXXVRTCPACGHHAQYEQLQAASTIQDL

SEQ ID NO: 341461 - protein, 163 aa, Zea mays
  Clone ID: MRT4577_74578C.1.pep
QAPVGGRPLTIRTSTAVQATEQSTGLLGGHTHTLSFYMHEHMHRGGGSDALPATHTYIYVSMFVCTVHGAHGYIILYLIQCAVNSTVGLHTTGFCYCWLARLITCTGVSLRGGCHHGIDLVAVCGHAAGVRHGYATLAGDGGVGVHGDTFAAVGEAFGVPVRR

SEQ ID NO: 341462 - protein, 285 aa, Zea mays
  Clone ID: MRT4577_74579C.1.pep
MDMDRPEEEGQQRRETMTPVLLRLFGVDVHRGGGSGEPEESPMDLRKSSSMPDLTINPLLSPEEKEGCKGYASDDAELASGQQKRRRRKAQDRKKGIPWTEEEHRKFLDGLRQLGKGDWRGISKGFVTTRTATQVASHAQKYFLRQTNPGMKKRRASLFDVGIADYKDNQVPGPQSIVAAKPAPTQEIIHTDRGDVPIPRYRGLGEILGSNMQVNQLTDYYYFNKNSHVPAGTSLSMASGLETASTVDSLELSIAVNGLELSIAPPSRCVCGGAAGAIKGSVTRW

SEQ ID NO: 341463 - protein, 189 aa, Zea mays
  unsure (1)..(189): unsure at all Xaa locations
  Clone ID: MRT4577_7457C.1.pep
PASWRRPDTHPGPIPCIYYCGSFTSAXTFNIRSESLTELMPTQEHAHLIDCFINGIDNGRGPGKGPFVAASVTAADPKTIHKTIVLQPMLIADTSEAADVIHRANQGPDRSTRCRMPVFMSRFSYLCCNMHCYLHRYYCKHDCQTDYRTATGNAIAKANPVEDGQEPRQALRQPLGERIGYYLVLSIML

SEQ ID NO: 341464 - protein, 153 aa, Zea mays
  Clone ID: MRT4577_74580C.1.pep
SAPSVFGANESPRSLGGAPEHDVAGGSVAGAALVALVSSEGQSAGSHYNVVRGSSIMTHHHRHPRHHPRVLSALVGLVDPVFRQRMSARFAVGLSPPVSGFVLGAGIAAGASDSGSVGRARVLALVEVSVVLLHHPCLLTVNIPFVLCPFPCI

SEQ ID NO: 341465 - protein, 146 aa, Zea mays
  unsure (1)..(146): unsure at all Xaa locations
  Clone ID: MRT4577_74581C.1.pep
RGDPDPTITIYDAAMTEXGAHDVPYCVXHLTVAXKENASREALEAAPIGCNMYMTKYARKAALHLRCRFHPLHVLTLNKILSCALACRMQTAMRCALVKTEGTGARAGHWQVLLLAXCMDNMAEHARESLLRAMITLTARHKIIVS

SEQ ID NO: 341466 - protein, 592 aa, Zea mays
  Clone ID: MRT4577_74582C.1.pep
MESVKGWVAADYAAEPMASVQHSLRVAYVVFSFCAAFFLGGIKAVVVGPVAAAVMIVGNVGVILVLFPAHVWWAIYSLIKTDRINAGLKLAVLLALPVLFGLWLGLGILGSALVGLGYGFFTPWISTFEAFRQESEAKKFVHGIVDGTWGTIKGSCTVVRDFADICFHSYPVYLKELREGSQNREPHSIRLLDVPSCIVVALLGLVVDIPLYTVIALVKSPYMLFKGWQRLLHDLISREGPFLETVCVPIAGLAILFWPLVVVGSVLLAIVSSIFVGLYGAVIVFQERSFQRGVSYVVAMVAEFDEYTNDWLYLREGTVLPKPSYRKRKPSNSTEFSVRTNASGGKGADHPPGPSEAPAMLVPNLAPARSVREAIQEVKMVQIWENMMKSCEQRGRDLLNQNVITAAGLAEWLRGAKEGGHHETVSLGLPSYSLLCTVLQSIRAGSGGLVLGSFEVNQHNRPQDRLLDWFFHPVLVLKEQIQALRMTEEEVRFLEKLTVFAGNVAGAGAGGWENGAGMMVVPQDPVRLAQIQAISRRLVGIVRSLSKFPTYRRRYRHVVKLLIAYSVERESSGRSSASGRSASYFEITQLDV

SEQ ID NO: 341467 - protein, 544 aa, Zea mays
  Clone ID: MRT4577_74583C.1.pep
MGASSSTGNPSPEAHEQREQETLASAALSLPLLRAAFSRSAANALPDALAPPPASFRLPGSPAPPPPHFHDILGGLGPAIASQFFGHGAAAVTDGGAGWVQFLRGFNRCCARVTASRSLALLLRVYAAACAGAGAPCGVQLQPDEGDGDEDGKVVGELAPEEIAVFLWVCWVMAWSASASRVVSDGGDKSEPVTVLLPDVTHLVLSALVSAGVVTDDAGVWGWDVSSGGKGVKVQEFMSWVLSTPFGLGNCLSRYVRDKFRSLAADSVEESSVSTVSTTFDTSDVYLLTRGRAWAIALSLRNKLSEKLLSASVIGMDTEDLLYRSSVHGKGLSRFWSCVEGYKGPMLILLSAFSKGGGENVDSDRRWVIGVLTEEGFENKDTFYGSSGFLCAAHPIFRMLPPSGKEKNFMYCHLHPQIRAYEANPKPVGLAFGGTIGNERIFLDEDFSGVLVRHHAVDKTYQHGSLIPNQGYLPVEASVLDVEVWGLGGEATKRQQNMYKKREDIFSEQRRKVDLKTFASWEDSPEKMMMDMMSDPNTVRREDR

SEQ ID NO: 341468 - protein, 45 aa, Zea mays
  Clone ID: MRT4577_74584C.1.pep
SMLRWIRSCDLSTACNICRQSLHQMTRFVDSPEVSSLFCHRMPLV

SEQ ID NO: 341469 - protein, 76 aa, Zea mays
  Clone ID: MRT4577_74585C.1.pep
FGFYFSFLFIFFFYIIFYFYFFFLSSAHEKSSIVSSVRSAITITVSGSHCATQHQHQHEPPQQKGYRKTRQQAWTP

SEQ ID NO: 341470 - protein, 124 aa, Zea mays
  Clone ID: MRT4577_74586C.1.pep
NKGGQFAQIIKGLPPPDNLERKPFPGDLKKPTPPECLTGLHMIGLRVFWSPILFFHAQPKGGVFRTPTFMVDDYIILLQTLGFWQALGPWEKSLYGQPPSPSKFGVFGPPPNPFFPRCGPNLFF

SEQ ID NO: 341471 - protein, 150 aa, Zea mays
  unsure (1)..(150): unsure at all Xaa locations
  Clone ID: MRT4577_74587C.1.pep
XXXXXREXKEVRRLLXXTNTSSSGGAQMXLAGGKXXLLDLLGQSRKSGQNGNGQKFLGGEGGXSQEKLENATSSPWASKEESSXISCXAEXPLRNRXXLHGPPSMNLWXYXRRXRRSWRTHXLWGYRLRIICPHSLXXTLIXTSAKSLGK

SEQ ID NO: 341472 - protein, 100 aa, Zea mays
  unsure (1)..(100): unsure at all Xaa locations
  Clone ID: MRT4577_74588C.1.pep
MVAAATTPHSLLLQRAAIPGAPSRASADAAPVRLPVCAARISCAAVAAPSTAAAXPQMTXVERGVYNFAAGLATLALSVLTRAHAELVDDNGYRISIEEM

SEQ ID NO: 341473 - protein, 117 aa, Zea mays
  unsure (1)..(117): unsure at all Xaa locations
  Clone ID: MRT4577_74589C.1.pep
MEQRLTYRRRCTYARMQPTRTQDPWRKLECQXTRKRASAPKGTMTGKKMQCIPHLXRQYEYKRDRLNTNRTSVNRPYGRVLSCTAHGERIIRAFLDEEQKSARKGLELHKTKDITFS

SEQ ID NO: 341474 - protein, 52 aa, Zea mays
  Clone ID: MRT4577_7458C.1.pep
RKKWKKKYNIYTGLKVQPQGARGNKDLFFSSLEDHQLEDAKLSADANVCLKD

SEQ ID NO: 341475 - protein, 41 aa, Zea mays
  Clone ID: MRT4577_74590C.1.pep
AGEGGLGSRRVLIRRAVLQKNGWFLRSTAPSQWRKDHGVPR

SEQ ID NO: 341476 - protein, 248 aa, Zea mays
  unsure (1)..(248): unsure at all Xaa locations
  Clone ID: MRT4577_74591C.1.pep
MADAEDIQPLVCDNGTGMVKAGFAGDDAPRAVFPSIVGRPRHTGVMVGMGQKDAYVGDEAQSKRGILTLKYPIEHGIVSNWDDMEKIWHHTFYNELRVAPEEHPVLLTEAPLNPKANREKMTQIMFETFNTPAMYVAIQAVLSLYASGRTTGIVLDSGDGVSHTVPIYEGYALPHAILRLDLAGRDLTDYLMKILTERGYSFTTTAEREIVRDVKEKLSYIALDYDQEMETSQTXSSVEXSYELPDGQ

SEQ ID NO: 341477 - protein, 36 aa, Zea mays
  Clone ID: MRT4577_74592C.1.pep
FRVKKFKQIAKLASWSKLIINCPTTRNPRNCTLYSS

SEQ ID NO: 341478 - protein, 53 aa, Zea mays
  Clone ID: MRT4577_74593C.1.pep
TTRYLFLRSMGRVMTERAYINPDPLTELFLDGKAALPSGTCYRPQRVKRFTST

SEQ ID NO: 341479 - protein, 90 aa, Zea mays
  Clone ID: MRT4577_74594C.1.pep
LTTTTWARRRRSRRGSWTAALLVLAAGAGTASAAVSCGEVTSSVAPCLVYAMGSAPSPSSACCTEVRSLNSRASSEADRHATCNCLKSMY

SEQ ID NO: 341480 - protein, 62 aa, Zea mays
  unsure (1)..(62): unsure at all Xaa locations
  Clone ID: MRT4577_74595C.1.pep
PHPHLLPRVNSRDATPAPVILSHSPSXALPHTPSSEVLIQGYSYTMCNYTQHEAAEVLEIDS

SEQ ID NO: 341481 - protein, 54 aa, Zea mays
  Clone ID: MRT4577_74596C.1.pep
LLFTAITLPFDLIMFPFFVDNHPAMIMSYFSTLLFISVIAQRSWQPLGKRTRRQ

SEQ ID NO: 341482 - protein, 105 aa, Zea mays
  unsure (1)..(105): unsure at all Xaa locations
  Clone ID: MRT4577_74597C.1.pep
HASAHASDHVSVAMTFTISNYCPHPIWPETLAGAGTSQLSTTGFKLEPGQTAQLAAPAGWSGRIWARTGCVFDAEGAGVCQTDDCGGRVECRGSGATXPATLFEV

SEQ ID NO: 341483 - protein, 41 aa, Zea mays
  Clone ID: MRT4577_74598C.1.pep
SYIIPNPLNSFTLITHINFHFTISKNSPYIIISPPTRIYHI

SEQ ID NO: 341484 - protein, 42 aa, Zea mays
  Clone ID: MRT4577_74599C.1.pep
YNISNGSPNKTHLNLLNHNLIYLHFLYTDIIHYTLYHIINIL

SEQ ID NO: 341485 - protein, 122 aa, Zea mays
  Clone ID: MRT4577_7459C.1.pep
MGGGGSSNKRNITILKNENGILKPSRMTLLLGPPSSGKSTLMRALAGKLDKNLKVSGSITYCGHPISEFYPERTSAYVGQYDLHNAEMTVRETLDFSRRCLGIGARYEMITELARKERDAGI

SEQ ID NO: 341486 - protein, 218 aa, Zea mays; identical to SEQ ID NO: 340491
  Clone ID: MRT4577_745C.1.pep

SEQ ID NO: 341487 - protein, 103 aa, Zea mays
  unsure (1)..(103): unsure at all Xaa locations
  Clone ID: MRT4577_74600C.1.pep
PIFVKAMLHSXVVRGFWLGLPSHFCDTYXPKQDATITLVDEKDEEFDTNLPCYKKGLSGGWAGFALYHAIQDGDSTVFQLIKPTTFKVHIVRAATDDSSEVDE

SEQ ID NO: 341488 - protein, 239 aa, Zea mays
  Clone ID: MRT4577_74601C.1.pep
MEAAVAETQGMSPYEAARERNLQENKRKMEALNLRHLSAVIKEAPKTPSPMKPKRRRIIEDAVVVPSPPRRSRRLANVPEVKYAEIAPHRADRMTRSPRRPADLIYLARRGSISMKARLEATRKAEELESQLDPEIPSFVKAMLHSHVVRGFWLGLPSHFCDTYMPKQDATITLVDEKDEEFDTNYLAYKKGLSGGWAGFALYHAIQDGDSTVFQLIKPTTFKVHIVRAATDDSSEVDE

SEQ ID NO: 341489 - protein, 115 aa, Zea mays
  Clone ID: MRT4577_74602C.1.pep
MRSNTYGGGDGYGAAFIRYGDAVAVYSNANRARTYGNSDYNWKYRAVISAGQKCPAHLQDTESTILTDHKSLSQLNEQRLHTPWQHKVFTKLLGLHYKILYRPGTDNRVADALSR

SEQ ID NO: 341490 - protein, 130 aa, Zea mays
  unsure (1)..(130): unsure at all Xaa locations
  Clone ID: MRT4577_74603C.1.pep
KSYNETQAIFTPPGPTHTRRGARVHAHYRDAPPPPASPPPKHTRGGTPKKGXPPPPGAPPPPMRGGYNKXAETEIGVXSGGKRYPGAKSHQTRTAGKKQTPPGXPQERAPPTKGGGTPPPLQREKPPPPE

SEQ ID NO: 341491 - protein, 85 aa, Zea mays
  Clone ID: MRT4577_74604C.1.pep
LRERSRLRTGLALDSHNYYRDMYSVFTRLLVTYLFIYMEQASSLRDSFIPLLPVRETKRMSSSVPKDFRASSKLFIVTRSCFLDP

SEQ ID NO: 341492 - protein, 88 aa, Zea mays
  Clone ID: MRT4577_74605C.1.pep
IRCTCPCSSYDCRVPALYVAENVLAVTADNSSVVVSLVGTLYVGPCRRQTMAAQRGSAAAKGSADLVNEQVFYVRLLTERVQISGNKN

SEQ ID NO: 341493 - protein, 42 aa, Zea mays
  Clone ID: MRT4577_74606C.1.pep
GYIRDFFTKRNLFNLSPNTHWKLGTRNNYQTNCSYFLKTNLL

SEQ ID NO: 341494 - protein, 57 aa, Zea mays
  Clone ID: MRT4577_74607C.1.pep
QIMLHCTSTLQKIAFGNVKECSFRLHNTTRWQEEHDDYNQKCPQLKRDRTQFMCNYS

SEQ ID NO: 341495 - protein, 167 aa, Zea mays
  unsure (1)..(167): unsure at all Xaa locations
  Clone ID: MRT4577_74608C.1.pep
PAPGRNPGPTRPCSSPSASDPGFHPKNSSSSRLVGXRNFSCQRVHSAXPRHQVPARFCCGVAXNCPAVVSNVRPPYAVGYGPVSTAGLVIADTLRAPGRAVPGFVLGCSLESAHQPSAGLAGSGRGAPSAPEQLGLPKVSYCLLSRRFDDNAAGSGSIALGGTGGGE

SEQ ID NO: 341496 - protein, 90 aa, Zea mays
  Clone ID: MRT4577_74609C.1.pep
HVQLQACIAIKSIGSVDRHNHGHLCHGQLLIMEGGVHLIPSCPLSSNMTAELSLTIQPCTVCYPVPRQAKGIHQYHRIDHQRALGRVGQP

SEQ ID NO: 341497 - protein, 353 aa, Zea mays
  Clone ID: MRT4577_7460C.1.pep
METLASAMRRENRRSKAPPSSSASSALASGRVPLVMAFLSCLAWLYVAGRLWQDAQTRAILSGLLEKSSTSVPKVLSVEDKLRNLGCKAIGRKIVEAEMDLTKAKSEGYLWGNRTAAVDSDKKQQLLAVIGVYTGFGSRLKRNVFRGSWMPRGDALKKLEEKGVAIRFVIGRSANRGDSLDRNIDDENRQTKDFLILESHEEAAEELPSKAKIFFSAAVEAWDAEFYVKVEDNINLDLAGLIEMLEGRRGSQGLYMGCMKSGMVISEEGQQWYEPEWWKFGDSKTYFRHASGSLFILSKNLARYININSASLQSYAHDDISVGSWMMGLNATYVDDDRLCCSSSRQEKICSNA

SEQ ID NO: 341498 - protein, 275 aa, Zea mays
  unsure (1)..(275): unsure at all Xaa locations
  Clone ID: MRT4577_74611C.1.pep
GRRDYLRYALDNAEAFGGTGWAVSEFSWDIKYAGLQVLASQLLVEAKEERLRLSAEEVAVVEQLRSNAEYYVCSCMNRNPGGAKHNAGRTPAGLLFIRPWNNLQYVSGAAFLLTVYSDVLASLGQPLRCGSGDDGGEPAAGDAGGVLAFAKSQADYILGTNPMRTSYLVGYGAAYPXRVHHRAASSASYRHDRDFIGCLQGFDSWYSARQENPHDLVGAVVGGPNGEDVFNDHRGAYMQTEACTYNTAPMVGVFSRLMQLEGQSPRPAPAPAEDL

SEQ ID NO: 341499 - protein, 96 aa, Zea mays
  Clone ID: MRT4577_74612C.1.pep
REGWDSTPNNSARGSLGEQQRLGMARLFFHHPKFGILDECTNATSVDVEEHLYRLATSMGITVITSSQRPALIPFHALELKLIDGEGNWELCAIQQ

SEQ ID NO: 341500 - protein, 53 aa, Zea mays
  unsure (1)..(53): unsure at all Xaa locations
  Clone ID: MRT4577_74613C.1.pep
AITTKACIRPQRSPAPRATITQMLPPDTXMGDEHPAVQAYRLQRALAERRLQQ

SEQ ID NO: 341501 - protein, 98 aa, Zea mays
  unsure (1)..(98): unsure at all Xaa locations
  Clone ID: MRT4577_74614C.1.pep
GYLXAGRDLSRPSVTRFDPAGPRGRVTQTEINLQSPELAARSSTRCIISLPTAATTSTFPPVRRRPRWTSSFYKLFQCSQWIMQHHCLELSCGCDLAG

SEQ ID NO: 341502 - protein, 172 aa, Zea mays
  unsure (1)..(172): unsure at all Xaa locations
  Clone ID: MRT4577_74615C.1.pep
RPAPRGGRGTPEKPAXQPDSSQQAXATSNXPXAHRXAQQPPARXXAQPTAQTXGGEQXQQXAPPXXSQAARANXXPDXQQQQXXPGNQRPRPNPXAQXQQQQPRPASQRAAADAQQQQGPPANPRAAPNPXAAGQQPKRRPXGQRXTTSPATGPTQQQXXPXHQQXGANPAT

SEQ ID NO: 341503 - protein, 83 aa, Zea mays
  unsure (1)..(83): unsure at all Xaa locations
  Clone ID: MRT4577_74616C.1.pep
YVFGFLLLVLMLLANVCADVSLILTYMHQCVEDWKSWWKSGFAAGXVAIYTIMYPSNDLVFDLKSLTGQLYASLYIGNAIVMV

SEQ ID NO: 341504 - protein, 115 aa, Zea mays
  Clone ID: MRT4577_74617C.1.pep
PQETGSKKGFFRCCPQGPQGLPKVQCPPQVYGVQLGGGSSWDLLFLKTRGLFQGGTPQKFSIQRLLFFYPIGSPVIFSLSPLFLKKQGFSPGGSKKNPKNPKKNPKKKKKKKRNK

SEQ ID NO: 341505 - protein, 145 aa, Zea mays
  Clone ID: MRT4577_74618C.1.pep
MEEEFQEAEILWPAGVSGNSQGEDGGGEAAPACSVRHRPRAATPVDISRQKRRCRPCPVSSSEHYYATTLDDQETDDVGDGAKGTTANHGSAVVPPHVLVARRRRLVRGRTAAYSMCAGKGRTLKGRDLRDVRNLVLKMTGFIEE

SEQ ID NO: 341506 - protein, 175 aa, Zea mays
  Clone ID: MRT4577_74619C.1.pep
FLGRPGVVPRRNPKESPGGGPFLCPFGVPAPKTLFFFFFLKKKGGVGVFLFRALFIFSTGFFQKRPFPLVFSKRGKFGALIPKKIKFFRGGGKIGQLFPQKLNLGPKVWGPPLTPPFFKPISQKFFFLGFLGRGTPPRSKIPKTFGVFFGKIFKILGQKKKSLGGGKKPIPLFFF

SEQ ID NO: 341507 - protein, 101 aa, Zea mays
  unsure (1)..(101): unsure at all Xaa locations
  Clone ID: MRT4577_7461C.1.pep
AHAHAPXRHIQMMLRVSPFSAVAVPTQLSGAPATPAPVVRVXAPRGVDXPAAGAACRAVGKGMEVLRGVVFHSCEGIKGELALVPXVPRQGSSXHKFVHDC

SEQ ID NO: 341508 - protein, 139 aa, Zea mays
  unsure (1)..(139): unsure at all Xaa locations
  Clone ID: MRT4577_74620C.1.pep
MEEEFQEAEILWPXRRGRRRRGGACLLGPSSSQGSHAGRHLSAEAAVPXARCRRRRSITTPPRSTXQETDDVGDGAKGTTANHGSAVVPPHVLVARRRRLVRGRTAAYSMCAGKGRTLKGRDLRDVRNLVLKMTGFIEE

SEQ ID NO: 341509 - protein, 72 aa, Zea mays
  Clone ID: MRT4577_74621C.1.pep
DTHQLAPAAKLRRRRAISSRPGGGAACSALIGEPRTQTQAQLASQQVNDTSRRQELTDTEKQPRARGARARA

SEQ ID NO: 341510 - protein, 74 aa, Zea mays
  Clone ID: MRT4577_74622C.1.pep
WNLRGGEFKGADLPGYLRQVVYFCGQPNKITSCILSYRLRMNESLGRNNINFLIEHPLLRVVGIHLRPPIYPCA

SEQ ID NO: 341511 - protein, 119 aa, Zea mays
  Clone ID: MRT4577_74623C.1.pep
FSWGAYLWGKRRLSLIQCAPLSRVKFSRAITRGERYTSLYTGATGRYCTHPFCGRSLVVPLHLVGRLFQPCVCFRFVPSSYGGLWMHPLLLLCVVSAARFLIRGLLSVFGSFTLGNNHL

SEQ ID NO: 341512 - protein, 52 aa, Zea mays
  Clone ID: MRT4577_74624C.1.pep
KKGIVWGVCKKKKNRVLRLAISFGMLGDSFWANEGGLKSMLVDPMGFAVTKY

SEQ ID NO: 341513 - protein, 197 aa, Zea mays
  unsure (1)..(197): unsure at all Xaa locations
  Clone ID: MRT4577_74625C.1.pep
WVGGRAGRSFGATAAKPAAGGTEGHQKPPNFGSRGRPGQPRPQKPKNATTPSNGGGGGKXGGKGGHPQEREEPKPTPEKAGGPQTPGVAPKGKSPKTTECKGGGRRGPGGPKKPPGGRGXPGGADGAPGTQKSPRGKKGGXGRTGTTPLRTHWGGGRPGGPGGPXAKGGESPAGGGPPARDNGGAGRGHQCHRTNPT

SEQ ID NO: 341514 - protein, 66 aa, Zea mays
  Clone ID: MRT4577_74626C.1.pep
SCTALTITRRVHIPTMPDHLNTLLIYDLLHRTDPSRGYSPLQARRCIFPPCRTYYTRALLLTNTNA

SEQ ID NO: 341515 - protein, 45 aa, Zea mays
  Clone ID: MRT4577_74627C.1.pep
FFFTRKVGIRENLGPANRLGNLKEVPLPIWASLLKQLDSDDADDQ

SEQ ID NO: 341516 - protein, 88 aa, Zea mays
  Clone ID: MRT4577_74628C.1.pep
LFPRSLAARASPACLPVRALSLPHGGLLPARVGRLPPPLAAAGDPRRHWHRRPRGRRRRDPARGRRRRRRGGARGAARRHPRRRRQGV

SEQ ID NO: 341517 - protein, 183 aa, Zea mays
  unsure (1)..(183): unsure at all Xaa locations
  Clone ID: MRT4577_74629C.1.pep
MGEVSDDNSNMSFLKRIATSDVPLLKEYGVNGVVVALLLAVVTPVLLSMMFGKKTKQRAVRADVGGEEGFAMRNNRFSSLVEVPWEGATTMSALFEMASKKYSRRRCLGTRKLIKREFMESSDGRKVEKLHLGEYEWDTYTEAFNRACNFSSGLYQMGHDLDSHAAIFSDXRAEWIIAAQGCF

SEQ ID NO: 341518 - protein, 108 aa, Zea mays
  Clone ID: MRT4577_7462C.1.pep
PLGGLFIGVEQLVQNQAKKGDFVNGAVGGFFSGAFVLGSKGKGFPSALLGGPGWGFPFGGGGLGGHTPRVFPGQGFFASPPGKRPANFFQVCPFSKHFWPPSTPGFLS

SEQ ID NO: 341519 - protein, 61 aa, Zea mays
  Clone ID: MRT4577_74630C.1.pep
PVTDVKLSILCAMTKLKSHDVKLLQIKIIPTLGLFFLSHSHRRTKLLCISSLDTHTHTTRA

SEQ ID NO: 341520 - protein, 164 aa, Zea mays
  Clone ID: MRT4577_74631C.1.pep
HGLGNDRFICSSQKKEIPRLSKQERESEKIMSAKLFSRRELNLKQKWGNIASETRTQEPHEQTQKRFPGATRQTDEELQRRTETDLSWRGGLEATRQGPRLAVLDRHPPGGEGGLAGVLGDLQGLRERGPGGAPGPADDVLAPNPSSRRLETERESSRASGDTR

SEQ ID NO: 341521 - protein, 161 aa, Zea mays
  Clone ID: MRT4577_74632C.1.pep
MGEVSDDNSNLSFLKRIATSDVPLLKEYGVNGVVVALLLAVVTPVLLSMMFGKKTKQRAVRANVGGEEGFAMRNSRFSSLVEVPWEGATTMSALFEMASKKYSRRRCLGTRKLIKREFVESSDGRKFEKLHLGEYEWDTYAEAFNRACNFASGLVRWATTR

SEQ ID NO: 341522 - protein, 165 aa, Zea mays
  unsure (1)..(165): unsure at all Xaa locations
  Clone ID: MRT4577_74633C.1.pep
MSDQLDLIWEHGDNIYPGFKCKYCKKQWKGGGTTRFKQHLASRARXGGDVQGCRNVLPDIADYFRLEIGKVHDKKKARVVEEARKLQIAGPHCGFDDHDDDVELQAAIRDEEIRRRAHVTGGTYETSGGLSQGGVRAAFGRTSSRKEKPRMVQTRIDTRPFSKAV

SEQ ID NO: 341523 - protein, 77 aa, Zea mays
  Clone ID: MRT4577_74634C.1.pep
CGWRGGICNAEQPVKEVQQSLSKAAKAARLERFEVPAKIELLPEPWTPESGLVTAALKLKREQIKAKFKDDLDKLYH

SEQ ID NO: 341524 - protein, 98 aa, Zea mays
  Clone ID: MRT4577_74635C.1.pep
APQESAATGTMPHPYPALTPDHIKELADIAHRIVAPGKGILAADESTGSTAKRLQSIGSENTEENRRFYRQLLLTADDRVNPCIGRVILFHETLYQKA

SEQ ID NO: 341525 - protein, 726 aa, Zea mays
  Clone ID: MRT4577_74636C.1.pep
MGEVSDDNSNMSFLKRIATSDVPLLKEYGVNGVVVALLLAVVTPVLLSMMFGKKTKQRAVRADVGGEEGFAMRNNRFSSLVEVPWEGATTMSALFEMASKKYSRRRCLGTRKLIKREFMESSDGRKFEKLHLGEYEWDTYTEAFNRACNFSSGLIKMGHDLDSHAAIFSDTRAEWIIAAQGCFRQNLTVVTIYASLGEDALVHSLNETQVSTLICDSKQLKKIPAISSKLQSLRRIIYIEDEPVEAETLNQVKHLTTLSFTEVEELGKTSHVDARLPSGSDTAVIMYTSGSTGLPKGVMITHGNMVATTAAVMTIVPNLGMNDVYLAYLPLAHVFELAGETVMLASGSAIGYGSALTMTDTSNKIKKGTKGDVSVLNPTLMISVPAILDRIRDAVFKKVGEKGGLTKKLFDFSYKRNIAAIEGSWFGSWAPERMLWDHIIYKPIRAMLGGRLRFVLCGGAPLSSDTQRFMNICLGVPVGQGYGLTETCAGAAFTEWDDTSVGRVGPPLPCCYVKLVSWEEGGYKISDSPMPRGEVVVGGHSITKGYFNNEAKTNEVYKVDERGIRWFYTGDIGQFHPDGCLEIIDRKKDIVKLQHGEYVSLGKVESALATSNYVENIMVYADPFHNYCVALVVPAHQALEKWAQNSGINYEGFAELCQNDRAIKEVQQSLSKAAKAARLEKFEVPAKIVLLPEPWTPESGLVTAALKLKREQIKAKFKDDLDKLYH

SEQ ID NO: 341526 - protein, 65 aa, Zea mays
  Clone ID: MRT4577_74637C.1.pep
GQIMHPVKACSHKCSDGPMFCISKSKEEVSNGNSKGIRIRFKKPKPKARQTRSRALVKPQDAWPV

SEQ ID NO: 341527 - protein, 73 aa, Zea mays
  Clone ID: MRT4577_74638C.1.pep
VKSVERPSYNGWLGGGTQGDQGSPATRRRDPQCSCLGSSEVGLLLHKTSLGGDQRPCHTAPSIWQQPLAATTS

SEQ ID NO: 341528 - protein, 144 aa, Zea mays
  Clone ID: MRT4577_74639C.1.pep
RELPGFPGGGAFAPPSRPRGWTFPFRGPSRWGGSSTAVGGSPPATNALKRLLSFFSLLPRGAQGGFLFPSQIQSFKGSSPDLGFLFPPPMQSFKGSSPDWAFRVRHFSLFHFPLGSSQMPLCPLCDPGPTFFYLGSIIVLRVYF

SEQ ID NO: 341529 - protein, 56 aa, Zea mays
  unsure (1)..(56): unsure at all Xaa locations
  Clone ID: MRT4577_7463C.1.pep
GTPTILRSDPHCSHKKGPSGGEMLHNYSPTSEDMPCLVWVMEALSSFGXMFGTITP

SEQ ID NO: 341530 - protein, 102 aa, Zea mays
  Clone ID: MRT4577_74640C.1.pep
PKRQEKGKEIGKVGERGRQGKLSSSSSSSRIPSLVPVVGGGFPRFLKGERGCGGEGWGGTRGSRCGRPRSAPESPPPSPLDSSVSSFPCRTHTTDSSSFHVI

SEQ ID NO: 341531 - protein, 183 aa, Zea mays
  unsure (1)..(183): unsure at all Xaa locations
  Clone ID: MRT4577_74641C.1.pep
MGRNRKGRKARVSHDADSDADGCEDERATTAGRSLYEILGVEKTASQQEIKKAYHKLALRLHPDKNPGDEEAKEKFQQLQKVISILGDVEKRALYDETGITDDDALVGEAANNLQEYFRXHKGNMNRLFCAMICSEPKLDSHRFKDIIDEAIGEGELKSTKVYETWAKKISRMEPPTNPLERR

SEQ ID NO: 341532 - protein, 233 aa, Zea mays
  unsure (1)..(233): unsure at all Xaa locations
  Clone ID: MRT4577_74642C.1.pep
HTRILGVEESASQQEIEKAYHKLALRLHPDTNPRDEEAKEKFQXLQKVISILGDTEKRALYDDTGITDDALVGEAANNLQEYFRTMHKKVTEADIEEFEAKYRGSNSEKTDLKELYTKHXGNMNRLFCTMICSKPKLDSHRFKDIIDEAIGEGELKSTKVYEKWAKKISGMEPPTNPLERRANAGXERKKQFNSILSNIMSKCDSKASSSEPTEEELEQAQQRLESRRAKRRK

SEQ ID NO: 341533 - protein, 106 aa, Zea mays
  Clone ID: MRT4577_74643C.1.pep
KTHKKGFFLAKGGRMVFLNPHLGGVFTGWFFNFSTGKFNLVFTRFSKKHGPILGDNGGPPGGTRGAPFFLSCQKKTCLPLGPPWIGGPQTRRVPGSPTEFWWFLVN

SEQ ID NO: 341534 - protein, 261 aa, Zea mays
  Clone ID: MRT4577_74644C.1.pep
MRAIASPLAPPRPEPPIAVRSRSNALERATLPPVPLTAARLRLRRQPEPGPSPPTRLSHPMPPPTATMSPAAGGSFPELTCPADFATVAAPGGRFSVVGFGSLLSERSARSTFPELEGFRVAVLRGFRRVFAHAAPIFFERGIAIEATKEFSSLSVEPCDSELIVVTVFEIKEEEVPAFIEREHEFRFLAVVPEGLDGVPFTNRAVVCARYSNEEYFQERCRGSQEIYNKYFGRYNIDKIWRDDILPCRLYLKHCVIAAKN

SEQ ID NO: 341535 - protein, 284 aa, Zea mays
  Clone ID: MRT4577_74645C.1.pep
MGRKGRKARVSRDADVDGSEDEMAAAPAAAAGRSLYEILGVEKTASQQEIKKAYHKLALRLHPDKNPGDEEAKEKFQQLQKVISILGDAEKRALYDETGITDDDALVGEAANDLQEYFRTMYKKVTEADIEEFEAKYRGSDSEKTDLKELYTKYKGNMNRLFCTMICSEPKLDSHRFKDIIDGAIAEGELKSTKAYEKWSKKISEMEPPTNPLERRAKSRKKSEENDLILAISQRRAERKNQFNSILSNIMSKCDSKASSSEPTEEEFELARQRLESKMAKRRK

SEQ ID NO: 341536 - protein, 286 aa, Zea mays
  Clone ID: MRT4577_74646C.1.pep
MGRNRKGRKARVSHDADADADADGSEDERATTAGRSLYEILGVEKTASQQEIKKAYHKLALRLHPDKNPGDEEAKEKFQQLQKVISILGDVEKRALYDETGITDDDALVGEAANNLQEYFRTMYKKVTEADIEEFEAKYRGSDSEKTDLKELYTKYKGNMNRLFCAMICSEPKLDSHRFKDIIDEAIGEGELKSTKVYEKWAKKISGMEPPTNPLERRVKKKKNSEENDLILAISQRRAERKKQFNSILSNIMSKCDSKASSSEPTEEEFEQAQQRLESRRAKRRK

SEQ ID NO: 341537 - protein, 83 aa, Zea mays
  Clone ID: MRT4577_74647C.1.pep
PTRTPTRPPTRSPTRPLDPVGCSPLLRWLPCSRTTSCGRPPTWPKYPNSTRPSLDSSAYLTPPTLPYRFHGSGLWGFATSWPH

SEQ ID NO: 341538 - protein, 216 aa, Zea mays
  unsure (1)..(216): unsure at all Xaa locations
  Clone ID: MRT4577_74648C.1.pep
MGPPRGWTLPAAAVATAGVASVVATIILSAAAADVVEERLTVPMTIVAGAASAGADFYNWNRVKLRYCDGGSFMGDSAVYINSSSVLYFSGQRIWDAIVADLLRKGLATADKVLLSGCSAGGLATFFHCDGLKQRLGAAATVKCLSDAGFFLDLSDISGSNTIRQFFSSLVSLQGIQKNLNMDCLSSTXDNAYLCFFPQFALANIRTPXFILNSAY

SEQ ID NO: 341539 - protein, 159 aa, Zea mays
  Clone ID: MRT4577_74649C.1.pep
MGPPRGWTLPAAAVATAGVASVVATIILSAAAADVVEERLTVPMTIVAGAASAGAVCLDGSPPAYRLHGGSGAGARSWLLQFEGGGWCNDVRSCAERAGTRRGSTRLMAKAESFSGILSNRPAMNPDFYNWNRVKLRYCDGGSFMGDSAVYINSSSVLY

SEQ ID NO: 341540 - protein, 173 aa, Zea mays
  unsure (1)..(173): unsure at all Xaa locations
  Clone ID: MRT4577_7464C.1.pep
MFRRVREHRHGTVELDVFFFLSSCGGWGGGFFTWGARPLRGGWADSLQPPSASGTRSGAGLRELVGVAFXVVITFALVCTVYATVAGPRKGSLGTVGPIAFCFIVGANILGAVSFCGGSMNSARSFWPVVAAGDFVXNXVYWVGPLXVVGGLLALGCGDLFIGGFYLPVLGRD

SEQ ID NO: 341541 - protein, 357 aa, Zea mays
  unsure (1)..(357): unsure at all Xaa locations
  Clone ID: MRT4577_74650C.1.pep
MRPTPALDAGGRMVTSFLSATEWMLPSPATQVHTISVLPSRRDFAFSNLTMSLRNSGGNEGESGSTKFHVVRDDLLHPLANGNKARKLDALLPVLRRCGATDIVTCGGCQSAHAAAIAVHCAEWGIRPHILLRGEQLDVPTGYNLISLMFGNVTYVSRSLYAQRDEMLYEHAIKVAGYSGTVMWADEVIGKGLGVDEDTTDGNGSRRVMIVKEGAGSVQALLXLQWRVTAVMLADTLEGYKQRERSLVSDFEKVFPEIYHGMEEDATHDNLVQWVERFSPRRFGKVLDGEIAMCRQVAQQTGILLDPMYTLAAWEQAVDICCGDSEAKVLMIHTGGTLGLFGLAQRYSSQFNTGEQP

SEQ ID NO: 341542 - protein, 57 aa, Zea mays
  unsure (1)..(57): unsure at all Xaa locations
  Clone ID: MRT4577_74651C.1.pep
GSCSSWAGKVVSGSVGQSCQRYFGGGQISEGWVLPCHAIPPLSGCVXTPKEEEVSGE

SEQ ID NO: 341543 - protein, 82 aa, Zea mays
  Clone ID: MRT4577_74652C.1.pep
RARVGPNTPPATVAILPQVGRTISGNEHTPHVSSSNREIQWRRQMGNVCSWQRIGRRTTLYDLNTQESRSRSSFYLSKNVLI

SEQ ID NO: 341544 - protein, 313 aa, Zea mays
  Clone ID: MRT4577_74653C.1.pep
MRPTPALVAGGRMVTSFLSATEWMLPSPATQVHTISVLPSRRDFAFSNLTMLLRNSGGNEGESGSTKFHVVRDDLLHPLANGNKARKLDALLPILRRCGVTDIVTCGGCQSAHAAAIAVHCAEWGIRPHILLRGEQLDVPTGYNLISLMFGNVTYVSRSLYAQRDEMLYEHAIKVAGYSGTVMWADEVIGKGLGVDEDTTDGNGSRRVMIVKEGAGSVQALLGVMRLLKYLSGLTLFRKDEKVHIVVHSGTGTTAVGLALGAVCLGLQWRVTAVMLADTLEGYKHRQRSLLSDFEKVFPEIYHGMVEDATHDN

SEQ ID NO: 341545 - protein, 188 aa, Zea mays
  unsure (1)..(188): unsure at all Xaa locations
  Clone ID: MRT4577_74654C.1.pep
HAFTLTTAPEXNXREXKGSPKRKAAPNTXAXEQHXEXPTEEERPKAEAPHGXXQEXRXATKANXAERHPTAQXXHKTXXXNRGAXXXENXNTKELPKEMANVKHTKTQKKGRKPKTVVHRAAVLDPSTKTEFVKDYNNTDGDNVDMKTREPKRYLKKYYPEDEKNMRSQRPQGPNTPEEQTRREPANA

SEQ ID NO: 341546 - protein, 84 aa, Zea mays
  Clone ID: MRT4577_74655C.1.pep
CYESGERIRRCWTCCGTTWWPGLARRRASRSSTRAPPPVRSKSTKALQGRDQELPPLDRPRWMDSEQAMVAGPSGYLKRTHALL

SEQ ID NO: 341547 - protein, 145 aa, Zea mays
  unsure (1)..(145): unsure at all Xaa locations
  Clone ID: MRT4577_74656C.1.pep
MSAPLSNRLLTEMRRQFFVLAYWKCPAXTSDHAEKIDKNLNEXQVPPSYVEEVVVMPPYVFLPVIKSLLRQEFHVVAHNCCPKNVRAFTGAIXADMLDMLGVPXTFLLHSERIALLPQSHEFVAYNAAYALSQGLSVLACVWDDP

SEQ ID NO: 341548 - protein, 56 aa, Zea mays
  Clone ID: MRT4577_74657C.1.pep
VGFFFFFLFFFFGNTMFVSCFKGAWLSKVLKGLKFPDTLLLFGQKEKKSFYFCPAL

SEQ ID NO: 341549 - protein, 126 aa, Zea mays
  unsure (1)..(126): unsure at all Xaa locations
  Clone ID: MRT4577_74658C.1.pep
TLLDTPLKVRNRRSVRLPLRLPSPRSIVFKRKCRDHANQPTVLHKLGGQFHLHSIISERVRDHNICPSVSSYERKFDTMYYMTQNLLSPSMIVCERINVPVMLTPICANAPVXKGRHHLMIDFMMG

SEQ ID NO: 341550 - protein, 128 aa, Zea mays
  Clone ID: MRT4577_74659C.1.pep
ALRTFRVRAEKKLPGIVDYFGWCTWDAFYQDVTQEGVEAGLRSLIAGGAPPKFVIIDDGWQSVATDTNESAGEDKPPLLSRLTGIKENSKFQNADDPAAGIKTVVRLAKEEYRLKYVYVWHAITGYWG

SEQ ID NO: 341551 - protein, 81 aa, Zea mays
  Clone ID: MRT4577_7465C.1.pep
NVIIALSRMSKLILSYKIVQRLATRCLIRYRIALFRFVLFLFICIHVHRASQLGTIIDRVMRKTSQVDPKRGLIRKMMLMD

SEQ ID NO: 341552 - protein, 112 aa, Zea mays
  unsure (1)..(112): unsure at all Xaa locations
  Clone ID: MRT4577_74660C.1.pep
RARXRARARXAPRGRPRPXCRPGPCXXXXSPSLGSPVCGXPSSPPPXXGFSSLXXGPPSXLSLCLSLSLLXXCVXSGAXXXGGGARPPGXXGCPGEAPGPGCFCKXPALFGA

SEQ ID NO: 341553 - protein, 212 aa, Zea mays
  Clone ID: MRT4577_74661C.1.pep
MAGVVEPTRKEMLALPAPASPGTPPPAATAEAQSPVSPAQAPRTEPVANAGEVEREEWVTVFGFSIGDTNLILREFEKCGVILRHHSGPRDGNWIHILYERSYDARKALQKNGMQLSNSLIVGVKPIDAVHRQQLDKGFAQSNQGGFMVSLPSKSLGLKSAGASNQLGALPRPYDPKANTNVSRDAGRRATGSVAAPAKSIVTNVMDLIFGI

SEQ ID NO: 341554 - protein, 46 aa, Zea mays
  Clone ID: MRT4577_74662C.1.pep
CIAKNLSNPDLSTSPGRSVYLRSDQSVVIRIQQNTYGMLQTVHIRS

SEQ ID NO: 341555 - protein, 35 aa, Zea mays
  Clone ID: MRT4577_74663C.1.pep
CIGRAYAPLHGCTPFIMHFALSGLPSACMPFCLNT

SEQ ID NO: 341556 - protein, 97 aa, Zea mays
  unsure (1)..(97): unsure at all Xaa locations
  Clone ID: MRT4577_74664C.1.pep
MLSMRHTRHSHGASNLSVRLLDQHDGELIESFLAVLDNFERGKVQIKVETEGAVILTNGYQRVYSHSIEILNXNGSLKIXTVEEQCTPMLNEGIMRE

SEQ ID NO: 341557 - protein, 67 aa, Zea mays
  Clone ID: MRT4577_74665C.1.pep
PMALTPWSANALTLLDTCCEHRRLLLAWILTYKPSDIILAHGIFSPLSFQPITMTYLVNQRFLFYYF

SEQ ID NO: 341558 - protein, 88 aa, Zea mays
  Clone ID: MRT4577_74666C.1.pep
LALSDGAASPPTAREEIDGSCCYARCCNRRRRPNRPLLLLRFRGRQQQHQHEARVDSPRPVLGLSTNGSGSWPSAARGCSSKTPCAWT

SEQ ID NO: 341559 - protein, 74 aa, Zea mays
  Clone ID: MRT4577_74667C.1.pep
LLSYLISRSPTSVRRFIPTAQSATITTYILLPLALQWGTLRSCTTRCLHPQGHLAAGTSRRVQGPPQEMGPPTS

SEQ ID NO: 341560 - protein, 102 aa, Zea mays
  unsure (1)..(102): unsure at all Xaa locations
  Clone ID: MRT4577_74668C.1.pep
HIPYTXXAVGRSRIRHGGVQVCLGVWRRIAIHVMRSCSRALLESGSSSIVVYKATARLAALLQATEMCYDSLACEKAARFLWSTQVTVTKTSSVDAASVLVY

SEQ ID NO: 341561 - protein, 50 aa, Zea mays
  Clone ID: MRT4577_74669C.1.pep
MYKMRTILAKKKKKKKKKKKKKKKKKKKKKKKKKKKKKKKAPREPDRNLN

SEQ ID NO: 341562 - protein, 305 aa, Zea mays
  unsure (1)..(305): unsure at all Xaa locations
  Clone ID: MRT4577_7466C.1.pep
HQSEALSREKEXXXXXXXXXHLEEKYLSQCXXFDETDIRCKEAXXXXXXXXELADVARVEASAAQKDXXXAQRLAMERFALIERMEXXXXXXXXXXXXXXXXXXXXXXXXXXAVSKVALLERNVGEREKEIDGMLKQNNEQRSSTVQVLESLLATEREACAEANKRAEDLSLMLQATQGKLDMLQQETTLDSKLKTSARRLRGEGTESVHDMDIDEDNGRRRKRSKSTTSPLKSNHTEDGGSVFIGEDTCNGSQQGTETEDYTKFTVLKLKQELTKRGFGAQLLQLKNPNKKDIVALYEKHVVGK

SEQ ID NO: 341563 - protein, 78 aa, Zea mays
  Clone ID: MRT4577_74670C.1.pep
MFSVTIVVAYLMKKHQMSLESALSLVRSKRPQVAPNGGFISQLEKFQKSLQGKTQIVAFVLLYVKMVSEQGDMCILLN

SEQ ID NO: 341564 - protein, 143 aa, Zea mays
  Clone ID: MRT4577_74671C.1.pep
MYGSPVSKDLNLPVQPPMASSGLLRYRSAPSTVLGDLCEDFLSSAPRAASPDAGADNVFSRFLADHHIRDDKPSPLASAAVHFPTETDTASQQQQQQMMFHSQQQQEMVSAKSGLYRTVSSGVETGSAAGAGGASSSANASNL

SEQ ID NO: 341565 - protein, 90 aa, Zea mays
  unsure (1)..(90): unsure at all Xaa locations
  Clone ID: MRT4577_74672C.1.pep
MGKNHPAVSAEYREAQGKARCMLRTLIDEKSXAPLMLRLAWYCEGAFDVXTRTGGAFGSKKCPVELAYGANVGLDMWERMFKHCKEEYPT

SEQ ID NO: 341566 - protein, 133 aa, Zea mays
  Clone ID: MRT4577_74673C.1.pep
PHPHAPVPPPSLTPAPSAPRCPPPPSPPSTPGTRSPDRDARSTTPAIPRCRRSRHACDAPTTIVVVPGTARRDNPLLAHRPRMPLLDACDTWVTTVVVPSNARRDGRERGGGHTDQPSRATRSFSLLFCVGYA

SEQ ID NO: 341567 - protein, 75 aa, Zea mays
  Clone ID: MRT4577_74674C.1.pep
IQNKRITQAQERARVTRRHSLFRILSKHTLDWDSKSIVPSNRRLHIHFTTEQTKARHSSIYIFTSLGSQQHASIL

SEQ ID NO: 341568 - protein, 71 aa, Zea mays
  Clone ID: MRT4577_74675C.1.pep
VHLRENQTSGRGALFNRGVISFLGVGGPPRSVGFYRLRTGKTGYGLGPSGPLYWGLGGESRDRNLIPPHFL

SEQ ID NO: 341569 - protein, 130 aa, Zea mays
  Clone ID: MRT4577_74676C.1.pep
PAGSCSSLPHLCNSVRPLLLHLQLAPSPPPPCVQFCPTMAAPPPSPPSLAGAQVPWSRALASARPCARSSPMASSPSTPCHGARPMFWTLALLFLSGGRTPPHNNNNTFIHGAQLLLGVYGDDLYIPLLF

SEQ ID NO: 341570 - protein, 22 aa, Zea mays
  unsure (1)..(22): unsure at all Xaa locations
  Clone ID: MRT4577_74677C.1.pep
RSLFIALVRFIYXDKGLVICHE

SEQ ID NO: 341571 - protein, 151 aa, Zea mays
  Clone ID: MRT4577_74678C.1.pep
MVKAVAVLAGTDVKGTIFFSQEGDGPTTVTGSISGLKPGLHGFHVHALGDTTNGCMSTGPHFNPVGKEHGAPEDEDRHAGDLGNVTAGEDGVVNVNITDSQIPLAGPHSIIGRAVVVHADPDDLGKGGHELSKSTGNAGGRVACGIIGLQG

SEQ ID NO: 341572 - protein, 89 aa, Zea mays
  unsure (1)..(89): unsure at all Xaa locations
  Clone ID: MRT4577_74679C.1.pep
MRECISIHIGQAGIQVGNACWELYCLEHGIQADGQMPGDKTIGGGDDAFNTFFSETGAGKXVPRAVFVDLEPXVIDEVRTGTYRQLFHP

SEQ ID NO: 341573 - protein, 700 aa, Zea mays
  Clone ID: MRT4577_7467C.1.pep
MTSHARVRKLGIRLEKKHIEEDSLREAHEDAMRKAISAFNVSAVGAGSARSKFEKLLHSSLKKAFEDYKRNAFLEADLQCSNKVHNMESKVRAACNRSNAKLDDIVRLLDDLLTEYESMAYGPGKWKRLATFLQQCLAGPVLDLFRRQLEHIDAERNAMRLKCNSSDDKLALLRKQLEASESHRAEYVRRYEEVLNDKQKISKDYSIRITELQAKSSKLEQRCLSLSSSLETAKQESNDWKSKYDHGILQQKADESKLKSQIASLESRVSISEGRLSATREQADSAQEEASEWKRKYEVAVSEAKTALQRAAVAQERTNKKVQEREDALRVELANQLSEKEEEIARLHAKRSQMEIHATSLISRLEATEAKSKSHESDSLALREEIRLLTDNLESVRSEALSREKEVGILEQEKNHLEEKYLSQCKKFDETDIRCKEAEREAKRATELADVARVEASAAQKDKGEAQRLAMERFALIERMERQVEALERDKAKLVEEIERLHQSEKDAVSKVALLERNVGEREKEIDEMLKQNNQQRSSTVQVLESLLATEREARAEANKRAEELSLMLQATQGKLDMLQQETTLDSKLKTSARRLRGDATESVHDMDIDGDNGRRRKRSKSTTSPFKNNHTEDGGSVFIGEDTYNGSQQGTESEDYTKFTVLKLKQELTKHGFGAQLLQLKNPNKKDIVALYEKHVIGK

SEQ ID NO: 341574 - protein, 151 aa, Zea mays; identical to SEQ ID NO: 341571
  Clone ID: MRT4577_74680C.1.pep

SEQ ID NO: 341575 - protein, 55 aa, Zea mays
  unsure (1)..(55): unsure at all Xaa locations
  Clone ID: MRT4577_74681C.1.pep
ILNPTPQFIQRHSSAKGDLXPPGKGFPIIFFSFPLNRSSQNKIRGGGDFGLFTPK

SEQ ID NO: 341576 - protein, 56 aa, Zea mays; identical to SEQ ID NO: 236257
  Clone ID: MRT4577_74682C.1.pep

SEQ ID NO: 341577 - protein, 151 aa, Zea mays
  Clone ID: MRT4577_74683C.1.pep
MVKAVAVLAGTDVKGTIFFSQEGDGPTTVTGSISGLKPGLHGFHVHALGDATNGCMSTGPHFNPVGKEHGAPEDEDRHAGDLGNVTAGEDGVVNVNITDSQIPLAGPHSIIGRAVVVHADPDDLGKGGHELSKSTGNAGGRVACGIIGLQG

SEQ ID NO: 341578 - protein, 77 aa, Zea mays
  Clone ID: MRT4577_74684C.1.pep
SGFVSAGDASGASGGGCFSISADDASGNGWLSSAGASGSPSAMGSSKREGKMLGFGRVGGFVRERRWAREGELLTRN

SEQ ID NO: 341579 - protein, 56 aa, Zea mays; identical to SEQ ID NO: 236257
  Clone ID: MRT4577_74685C.1.pep

SEQ ID NO: 341580 - protein, 319 aa, Zea mays
  Clone ID: MRT4577_74686C.1.pep
MGSIRNSLRDSRQRLHVDWATLQSSWRCASCGRRFSPLCKEHGGAKGQGRNAGDLGTMSAARRWCLLVSNISVSQIPLAGPLSIIGAAVDVHADPDHLGKGGDELSKSSGKCGRTCCLWYHWAPACLASGKLELSSPRFANLPQRGRRQDSLQAPHLAQGGSPEITETMVKAVAVLAGTDVKGTIFFSQEGDGPTTVTGSISGLKPGLHGFHVHALGDTTNGCMSTGPHFNPVGKEHGAPEDEDRHAGDLGNVTAGEDGVVNVNITDSQIPLAGPHSIIGRAVVVHADPDDLGKGGHELSKSTGNAGGRVACGIIGLQG

SEQ ID NO: 341581 - protein, 46 aa, Zea mays
  Clone ID: MRT4577_74687C.1.pep
QWSSLATLLSLTRNLSVETENVVLNFVAALLQIWIYHIALSYHLLS

SEQ ID NO: 341582 - protein, 73 aa, Zea mays
  Clone ID: MRT4577_74688C.1.pep
QQYLKQVWMHTCGPCSQLTPGSTTGDTILGKIYKVYTKKMNALVRTITNTVDYKSHSNEWTTRGIFRAFITKH

SEQ ID NO: 341583 - protein, 64 aa, Zea mays
  unsure (1)..(64): unsure at all Xaa locations
  Clone ID: MRT4577_74689C.1.pep
PXPPPRAAGQAARTGXEATRTEAPEHRRQHTPLPRGSGRGRRPETRAGGQQPHREGAPRESHRT

SEQ ID NO: 341584 - protein, 50 aa, Zea mays
  Clone ID: MRT4577_7468C.1.pep
RKEIMYGIINSSCQQSTFLVCQGTVALDPCWIGATFDMVMLRGFGGKYRV

SEQ ID NO: 341585 - protein, 43 aa, Zea mays
  Clone ID: MRT4577_74690C.1.pep
HLGIIVALASHAARARSIRREYILAAFVELLLLLNSTFYVACS

SEQ ID NO: 341586 - protein, 93 aa, Zea mays
  unsure (1)..(93): unsure at all Xaa locations
  Clone ID: MRT4577_74691C.1.pep
RTGEAGARAPEPQERGASGGEPTPRTAGRAGTXGSLRQPXRAQPRPEKXGKPPPSGWEGCPEPAPGRLPELVPTGAVRKSLRRGAAGSVWSLG

SEQ ID NO: 341587 - protein, 211 aa, Zea mays
  unsure (1)..(211): unsure at all Xaa locations
  Clone ID: MRT4577_74692C.1.pep
MEVQKEAQRIMTLSVWKMYHSRMQRGGLRLHRSLQLSLVMRSARELYLSAKVEAHQPEFPPSRRALDPRLHPPREAEVAVEVASPEAVQPPEPMDTQEEVLRVQETPALCDPPPARVSRKRRSSSDLSDSSDAGLVPSKKARLEEVEGEATSEVPDRLQLPPAQSEGAFPNLARVLQRRFSSLLNCGPAVPPXTPPTCEAKPACRPADICS

SEQ ID NO: 341588 - protein, 123 aa, Zea mays
  Clone ID: MRT4577_74693C.1.pep
PWKKPKSKAKAKAKDTERERRRQARIKAGIELEAAAPTTSLLTYTKLLAFDSFPQVARARILLFQFQQLSTCHRGLSAAAAGNVLYGLFVVFEPRVATAAAYAAAAAAGAGVRTHASAAAAGG

SEQ ID NO: 341589 - protein, 43 aa, Zea mays
  Clone ID: MRT4577_74694C.1.pep
GVGFPPPPNSCFAPKKKKKKKKKKKKKKKKKKKKKKKKKKKKH

SEQ ID NO: 341590 - protein, 66 aa, Zea mays
  Clone ID: MRT4577_74695C.1.pep
RIPLLSKLEPALGGYEIGPSELPQENSTHAEGSVLSLGIKDELTDCELPGLCENVSFSSRQRSDSN

SEQ ID NO: 341591 - protein, 64 aa, Zea mays
  Clone ID: MRT4577_74696C.1.pep
LNVSIILQMCYAKLLSHYHFNLSTHIIQYFYFSLLYFKIYIFYIHIYSSPYYLLYLLYFSIIIF

SEQ ID NO: 341592 - protein, 59 aa, Zea mays
  Clone ID: MRT4577_74697C.1.pep
FKRPTRSFSPCSNNQKSPPTPLKISAGATGSSGELIFPWVEKKLFGPIKCKFTLGPPMV

SEQ ID NO: 341593 - protein, 161 aa, Zea mays
  Clone ID: MRT4577_74698C.1.pep
MAECVNSCIPTECAADPSGRQGRCEKRYVPSVTSALIVGSILGLLQAVFLVLSARFVLNIMGVKSGSPMQGPAVRYLTIRSLGAPAVLLSLAMQGVFRGFKDTKTPSWQASRSAASSGWPRLFSPMDWPWQDRRCLQARSPRTTVRRSVTFCVTLGGVPGR

SEQ ID NO: 341594 - protein, 150 aa, Zea mays
  Clone ID: MRT4577_74699C.1.pep
LARVVAVTFCVTLAASLAARHGPTVMAGFQICCQLWLATSLLADGLAVAGQAVLASAFAKNDSKKVAAATSRVLQLSIVLGMGLTVVLGLAMRFGAGIFTSDVPVIQVIHRGIPFVAGTQTINSLAFVFDGINFGASDIGGRCSYGTIPS

SEQ ID NO: 341595 - protein, 64 aa, Zea mays
  Clone ID: MRT4577_7469C.1.pep
LVGRRGGFFRSARARCPGVCRHPVPQPLPLPPAGRRLVARWMVQLVVLTPPPGSLRLRGGLFRR

SEQ ID NO: 341596 - protein, 66 aa, Zea mays
  Clone ID: MRT4577_746C.1.pep
EQKDKTGEIFCLLGQWFFGGKPHLISPFPEKKKKAKKKKKKKKKKKKKKKKKKKKKKKRKKKTQGW

SEQ ID NO: 341597 - protein, 62 aa, Zea mays
  Clone ID: MRT4577_74700C.1.pep
LQCSDSKSELSSISSSLLLGCNAPRSCLHACNRQQGAGAQNTTTTTRWLSCAPAQMHLLAWE

SEQ ID NO: 341598 - protein, 553 aa, Zea mays
  Clone ID: MRT4577_74701C.1.pep
MEDNGAAAAAAAPATSMPAEKRVAVIQGDAPPEPAAGLLPCGPRKTGLHLFVMNIRSVFKLDGLGSEVLRIAVPASLALAADPLASLVDTAFIGRLGSVEIAAVGVSIAIFNQVSKVCIYPLVSVTTSFVAEEDAIISKAVRGNSSQEEDVEKASHVGFDPETSNLHASGPAGMAECVNSCIPTECAADPSGRQGRCEKRYVPSVTSALIVGSILGLLQAVFLVLSARFVLNIMGVKSGSPMQGPAVRYLTIRSLGAPAVLLSLAMQGVFRGFKDTKTPLYATVVGDAANIILDPILMFVCHMGVTGAAIAHVVSQYMITLILLCRLVQRVHVIPPSIKSLKFGRFLGCGFLLLARVVAVTFCVTLAASLAARHGPTVMAGFQICCQLWLATSLLADGLAVAGQAVLASAFAKNDSKKVAAATSRVLQLSIVLGMGLTVVLGLAMRFGAGIFTSDVPVIQVIHRGIPFVAGTQTINSLAFVFDGINFGASDYRYSAYSMVAVASVSIPCLLYLSAHNGFIGIWIALTIYMSLRTIASTWRMGAARGPWTFLRN

SEQ ID NO: 341599 - protein, 94 aa, Zea mays
  Clone ID: MRT4577_74702C.1.pep
QEKEYRRWKAKYFSCVGTLAFSCEGALLASGSADCTVKLWDVAFSTKALKTEDTKGSSSANRLRLLKSLPTKSAPVYSLRFSRRNLLFASGALA

SEQ ID NO: 341600 - protein, 657 aa, Zea mays
  Clone ID: MRT4577_74703C.1.pep
MEDEEMEKKVQQYLQRKGFRLTELALQEERNRLSTSAISDVALARSDNDPARYYDGYSRLRTWAYSSLDQYKHELLRVLYPVFIHSFMDLVAEGHMQEARSFFHTFREDHEVMHSRDLQKLEGVLSPSHLEEMELARSFRKNKFKIKLCEYSYELLLQYLQKTQALVVLGVINEHITFEVSPGQPSLISDDADVVALIGTSKDLAKQINQKEVHWGLLEDSVEERMEKALAESDKIEAESKDADAEDNKKRNAEGGKQGASLKKAKKDKLVGATGKSVRTETSMVSVAPRVKPELTLPATPVEVEQSILEDLRNRAQLNSVALPSVSFYTFLNTHNGLNCSSISHDGSLVVGGFSDSSVKVWDMSKMGQPAKISRSQGENGPSQGERISTLDEGKRTYTLFQGHSGPVYSAAFSPFGDFLLSSSSDSTIRLWSTKLNANLVCYKGHNYPVWDVQFSPVGHYFASASHDRTARIWSMDKIQPLRIMAGHLSDVDCVQWHVNCNYIATGSSDKTVRLWDVQTGECIRMFIGHRSMVLSLAMSPDGRYMASGDEDGTIMIWDLSTGRCVSPLLGHSSCVWTLAFSCEGALLASGSADCTVKLWDVASSTKTLKTEDTKGSSANRLRLLKALPTKSTPVYSLRFSRRNLLFASGALSLSSS

SEQ ID NO: 341601 - protein, 119 aa, Zea mays
  unsure (1)..(119): unsure at all Xaa locations
  Clone ID: MRT4577_74704C.1.pep
ISLSVPSSVLHQVPEGHVGVYWXGGALLKTITPPGFHLKLPLITQYEPIQVTLQTDQVRDIPCGTXGGVMISFDRIEXVNRXRXEFVHXTLLNYXXVHYDKTWIYDXIHHEIYQFCSAH

SEQ ID NO: 341602 - protein, 313 aa, Zea mays
  unsure (1)..(313): unsure at all Xaa locations
  Clone ID: MRT4577_74705C.1.pep
QIKTLGXFHQATTTSISLGIEDLLTIPSKGWLVQDAEQQSFLLEKHYYYGAVHAVEKXRQSVEIWYATSEYLKQEMNSNFRITDPSNPVYLMSFSGARGNASQVHQLVGMRGLMADPQGQMIDLPIQSNLREGLSLTEYIISCYGARKGVVDTAVRTADAGYLTRRLVEVVQHIIVRRRDCGTIQGISVGPQNGMTEKLFVQTLIGRVLADDIYIGSRCIASRNQDIGIGLVNRFITAFRAQPFRAQPIYIRTPFTCRSTSWICQLCYGRSPTHGDLVELGEAVGIIAGQSIGEPGTQLTLRTFHTGGVFTGG

SEQ ID NO: 341603 - protein, 35 aa, Zea mays
  Clone ID: MRT4577_74706C.1.pep
LIVSHDSTFNASVQQLVPPAVPWYHERLMHQTSLG

SEQ ID NO: 341604 - protein, 78 aa, Zea mays
  Clone ID: MRT4577_74707C.1.pep
MVKQERVSTVTVAAVSTVAPALPMQEHRLPLSNLDLILPPIDVGVFFCYDADPAGGRSHQPVAAALKAALAKTLVAYY

SEQ ID NO: 341605 - protein, 78 aa, Zea mays
  Clone ID: MRT4577_74708C.1.pep
RTRVRPRVRAGTYSRLRPVDPSESWAPAVAQLCSLAFIKAPRCEDDFGQEAGETLSDCVLRSSKQYRAMIDEHDTSGG

SEQ ID NO: 341606 - protein, 145 aa, Zea mays
  Clone ID: MRT4577_74709C.1.pep
VDKAHDLDAIRGHGPKPTEKLQNAGAGGAPSRQPDATIVNDLVAMGFPQNRAERAALAVENKGTEDAMNWMLAHMDDDDAGVPDDRNAAAPAASGVDEAKVANFVGMGFDAARVRYALTVNNSDDEQTLNWLFAHADEPIPAEAP

SEQ ID NO: 341607 - protein, 78 aa, Zea mays
  Clone ID: MRT4577_7470C.1.pep
SPFISFPLLQLSLYSTFLHLSPLPTSSHLYYNYILSLFIFPLTSIFSFFILNLSPTPFLISLPFLYFLLSIPSLSPPL

SEQ ID NO: 341608 - protein, 109 aa, Zea mays
  unsure (1)..(109): unsure at all Xaa locations
  Clone ID: MRT4577_74710C.1.pep
QGWNSAILPGGARLLKGPCLWVLLSWRVSRRLDSLRSTYRCAIPLRCGWREAARRLPVAHLMGWTPLCGLXAGVGFARGRSLPPLRRSLLLPSFSPARGFPLALFGAPL

SEQ ID NO: 341609 - protein, 38 aa, Zea mays
  Clone ID: MRT4577_74711C.1.pep
KHNRNDVHGDLVHTKGNFMVSCQRKSPKYCDAGRPGCG

SEQ ID NO: 341610 - protein, 678 aa, Zea mays
  unsure (1)..(678): unsure at all Xaa locations
  Clone ID: MRT4577_74712C.1.pep
MNTAIARRRLIAKAVVLVAVMSAWLDAWLRHRLHARRCITYGPMHQRDQERQNNLRFIYESTDVECIDLLRMRRAPFMQLCDLFRTRQLLRDSIHSSVEEQVAMFLHVVGHNQRFRVIHMTFRRSIETISRYFKEVLFAVGELRNEMILPPSTATPTKIRDSHRWYPYFKDCIGAIDGTHVLARVPRNQRAAFLGRKHTTTQNILAAVDFDLRFTYVLAGWEGSAHDALILADALEREDGLKVPQGKFYLVDAGYAVRPGFLPPYRATRYHLSEYGGRNPQNPKELFNLRHSSLRVTIERAFGALKNRFKILYNKPFHPYKTQXTWAANQVHEEAPHDLIMDNAAWSATRDNWAQQMWQXGPHIGDNAMADMVSEVAGQGARPALRWTAVMSGFVLRRFVDLIGNGVKTDKGFKEIHLNSVAKNVSEFCGQEVTGQQVYNHLRKWRSRWVKVCKLKDISGALWDEDNFVISLEEGHYAAYKCPSLGNNHXVIKDHPKDADYLNRPIENYMPMQIIFGSGVATGRFAMGSNEPLGKPTDIVDILDDGIEVTSEFVDGSNLTGKGKTVDKGTPGDSNDSKPMSNLGKRKRYMTDEDVVVFNGMKEAVSDVAAAVRESIHAEAAPEIYNAVINCPGFSREALMYALNHMMEHKATSLVFLDMTPDDRDLWLKTFLAKHYHI

SEQ ID NO: 341611 - protein, 120 aa, Zea mays
  Clone ID: MRT4577_74713C.1.pep
VEATPPAGHTGPLKKRPPGQGTQKKGGEKSKQSPAKQKAGGDASPGQNTRATRGAGGDLREADGPGRGNLNGLGTLGGKAEGEPHGDATVAGGGGEGAQAHPLKALGEALDAWGPPLGGP

SEQ ID NO: 341612 - protein, 153 aa, Zea mays
  Clone ID: MRT4577_74714C.1.pep
MSILVVHEESRLRMDGRKASDHSGKMTTPHMQIIPAAQPSSSTDHTTVPSYVASTGNKVRYLLDDITRLVACTLIIKYECNMISGRSFMVPIPMLVLVKGSDNEELKGKKDEEVEKHIQDMKKDFEARYATYIGHAMLQFQDREAIVASYNFK

SEQ ID NO: 341613 - protein, 166 aa, Zea mays
  unsure (1)..(166): unsure at all Xaa locations
  Clone ID: MRT4577_74715C.1.pep
MAPAGRPXLNHXXHPVLXSHLXPNNESVSRHHLSSSPRSGERRGNLXFTPRSAKVGGGNGXQLVALEISRAGPTMWAALTANEXLGKWKGKGWDHFWXNFPERIMDGSNADIGANSXHMCKTDGXLRKEMGMDAYRVSIAWPXILAKGTGEGRINQGGIDYYKRRI

SEQ ID NO: 341614 - protein, 81 aa, Zea mays
  Clone ID: MRT4577_74716C.1.pep
AALVVSVIGGVLSSVSLALCHSLSSSRAPPSRSRRPSRRSSRLARRGSCTARRRCSLLYVNVFVIHIIITACGAGAGPAPV

SEQ ID NO: 341615 - protein, 100 aa, Zea mays
  Clone ID: MRT4577_74717C.1.pep
AQGARPHKGLHLGLGNHNQPLTFTGGGCTSSCRQTRLVCTTVQWAHSLHAVESCGQRPGERWSPLLCEAVALLHTPGGQPQTQWNAKAVPQCTRWRLQRL

SEQ ID NO: 341616 - protein, 159 aa, Zea mays
  Clone ID: MRT4577_74718C.1.pep
WPLKTDRSLPGVPFFSPPSLYKRDSRTLSHPPYPSSLPFLALSRSSFVVGVCRSSPEPVEFAGATPSVVRSQAPALLHRVLVMVDYARGHLASAYSTGSGRLDTGIVPKALPCGLDYKLVTVGVPYAVDHFQHLRNEDSREKPRSETLVIHLGSEYGSS

SEQ ID NO: 341617 - protein, 126 aa, Zea mays
  unsure (1)..(126): unsure at all Xaa locations
  Clone ID: MRT4577_74719C.1.pep
LPDHSSASDSXXHPESDYRPITAADSDSDSDPDFDAALPHHRIEETGNGVSALDLASDEDEAAEGAEEDDGDXETRRAPLPAGAAARIVDAMRGVEFPGAPPAWAGSVPEDQWLDRLQSLRAGRPN

SEQ ID NO: 341618 - protein, 106 aa, Zea mays
  unsure (1)..(106): unsure at all Xaa locations
  Clone ID: MRT4577_74720C.1.pep
HGEDPLFCLDLPXTXXNPPTTKNTPTPPQLITGQAQPKPAGPKIDHNPQPKNANPGYTHPATHKTPSNKSNEHRTSRLNARTNHSPSCETISPTDKTTYVTTNPTK

SEQ ID NO: 341619 - protein, 392 aa, Zea mays
  Clone ID: MRT4577_74721C.1.pep
MKKSSGLTTSYIFLERPGSSFPSISPLHLHLLLVRPVPPSNRLAPCPLLKTLALPQPSSMAADFRTPDRLLPAATEEPTTPQGHPPNPVLSTPTVPDATHDGLRFWQYMLAGSVAGVVEHTAMFPVDTLKTHMQASTPPCRPTLSLRAALRNAVAGEGGALALYRGLPAMAFGAGPAHAVYFSVYEFAKSSLTDRLGPNNPAAHAASGVVATVASDAVLTPMDTVKQRLQLTSSPYTGVGHCIRTVLRDEGPSAFFVSYRTTVVMNAPYTAVHFATYEAAKRMLGDMAAEEESLAVHATAGAAAGALAAAVTTPLDVVKTQLQCQGVCGCERFSSSSIGDVFRTIIKRDGYSGLMRGWKPRMLFHAPAAAICWSTYEASKSFFQRFNEERRK

SEQ ID NO: 341620 - protein, 42 aa, Zea mays
  Clone ID: MRT4577_74722C.1.pep
YSARGSGGGLPGQTELLRPATHNLTFKMHIFVKTLTGKTITL

SEQ ID NO: 341621 - protein, 174 aa, Zea mays
  Clone ID: MRT4577_74723C.1.pep
MAADFRTPDRLLPATAEEPTTPQGRPPSPVLSSPAVPDATHDDLRFWQYMLAGSVAGVVEHTAMFPVDTLKTHMQASAPPCRPALSLRAALRNAVAGEGGALALYRGLPAMALGAGPAHAVYFSVYELAKSALTDRLGPNNPAAHAAWGVVATVASDAVFTPMDTVKQRLQLTS

SEQ ID NO: 341622 - protein, 236 aa, Zea mays
  unsure (1)..(236): unsure at all Xaa locations
  Clone ID: MRT4577_74724C.1.pep
FGTRHRRLPASPHLTSSPPPVLPPSLRRLPFLXPASHSRPPQIEKPPPXTPPPPPHGHGSPAAPAPQAPPXPSPPPRPRPSRPSPAPPRRRSTRWPTXAPLPGPGPXPRPTRGRSSPSRWPPAPATPRSHXPPDAPPAPRGPPXPPRXAVPVRDPPRPHPXRASPTPPSPPPPSPAPPPSAPSTSPAPAGSAPRASPRSPPRARTSPTSSCGMGVPPPGPPWLAVGCAGSGPLWKA

SEQ ID NO: 341623 - protein, 173 aa, Zea mays
  Clone ID: MRT4577_74725C.1.pep
EAVGEGRLGELVDGEVDSVSGARAERHGPNNPAAHAASGVVATVASDAVFTPMDTVKQRLQLTSSPYTGVGHCVRTVLRDEGPSAFFVSYRTTVVMNAPYTAVHFATYEAAKRMLGDIAAEEESLAVHATAGAASGALAAAVTTAFDVVKTQIQGQGVRGCDRFSRQSISDVF

SEQ ID NO: 341624 - protein, 262 aa, Zea mays
  unsure (1)..(262): unsure at all Xaa locations
  Clone ID: MRT4577_74726C.1.pep
IRHEGSVGGGVGAGAGGGAQQASPATVFRIRLKQSPASLRHKMRVPELCRNFSAVAWCGKLNAIACASETCARIPSSNSSPPFWIPIHILNPERPTECSVFNVKADSPRDFVQFIEWSPRSCPRALLVANFHGRITIWTQPTKGPVNLVRDASLWQCEHEWRQDLSVVTKWLSGISPYRWLPTNSTSSNLKTFEEKFLTQQPQSAVGWPSILLRLVQFFHQGSVQLHWSQWPSXNSAHSRXWFSTSXGLLGAGPSGIMAADA

SEQ ID NO: 341625 - protein, 117 aa, Zea mays
  unsure (1)..(117): unsure at all Xaa locations
  Clone ID: MRT4577_74727C.1.pep
EHYCETLSNLPPVSTDDLLKRXDYLLRNGCIPCLKCSKVPFVYRDNSTSPRYYDVRYWTMRKLPMFGCHDATHXHKELXQEAIKSYPDAFHRVIXGFDNIKKTQRVRFIAYKPPGSD

SEQ ID NO: 341626 - protein, 60 aa, Zea mays
  Clone ID: MRT4577_74728C.1.pep
HSFLQIIHGHLTPGATTRHWVVPAEAEHTTAERLLHSRAYATARQQGPPVFWDCMWTFKP

SEQ ID NO: 341627 - protein, 156 aa, Zea mays
  Clone ID: MRT4577_74729C.1.pep
MDPKGKGIVINDKEKEILNNNKSTGDKPNNSGSNNKSKDGKKKRLFTVIDPHLVNLIHENPRYTKMLSEDIFDARYVNDIANRPLPLYKPQPVALKATTSMETLPNKVQDNKEKKEKKKFYRKTKVEAHIGKEWDSDCSSSDSGVERGPWAAAGRG

SEQ ID NO: 341628 - protein, 65 aa, Zea mays
  Clone ID: MRT4577_7472C.1.pep
IQTQGVYCIFLCTKKPLNCKTVERFFLLFHMHGKLGPYWRTNKQGKEQEPLKAIWSCWSNRLDSN

SEQ ID NO: 341629 - protein, 95 aa, Zea mays
  Clone ID: MRT4577_74730C.1.pep
MQPEQRTATEHTPHTAASAPAAMERAGALCLVLLCLVAAHSPAVHNSTKASAAAPACHYHGAGDRYNKDARARRCDADDSGHHSLCHLAWEERWP

SEQ ID NO: 341630 - protein, 105 aa, Zea mays
  Clone ID: MRT4577_74731C.1.pep
RFPHLIFFPHFVNGGGEKSLLLTTKGPPVFFPPRFFKKNLVGNKTLFPLKKSYFFGGALGGPKKTFFSLQGGRECPPGAPHLLGRVFPSRGASRVKFIPGLDPGD

SEQ ID NO: 341631 - protein, 59 aa, Zea mays
  Clone ID: MRT4577_74732C.1.pep
ANVHYNFMTKTYFCRLLREDIIHHINSACCEPCDDLFALVDALLLDKAQLLTLQPRLCM

SEQ ID NO: 341632 - protein, 175 aa, Zea mays
  Clone ID: MRT4577_74733C.1.pep
KKKKKKKKNCRKALQCLNSCSPTDQVCNYRCIASYESPYLEALSLCVLQKNNCLDLNAEIPSKPNVMPLTMFREQKLSHEIAEDLFVGWLDSMEWSWRVAAGQNPAYDQFPCQYQLLAGLLFVPSHPQPHRERGGGSLPSAARAPLPPDRDPCSAQSTHGGGIRPPLAKVWRLGC

SEQ ID NO: 341633 - protein, 161 aa, Zea mays
  Clone ID: MRT4577_74734C.1.pep
YEVHHVVSSGPLALRLIRRGNNPRGWSRPSTVPRSHRGATSSEGVESNEGFGEGARSSEGSDTKSTVVGGRSADVERGQGHGVAPCGRLQRLRHHESGHRRGGEGRGREGEALNPGRVRRGVLGSCHRGAGQGEQGRRVRTGGAGAAAHAGWERGRRPRAE

SEQ ID NO: 341634 - protein, 53 aa, Zea mays
  unsure (1)..(53): unsure at all Xaa locations
  Clone ID: MRT4577_74735C.1.pep
TXXXLXLTXNXXNXPARXKXXXTXQPEXTLXSFNLLMQTXXNKPTGPKLPNLH

SEQ ID NO: 341635 - protein, 87 aa, Zea mays
  Clone ID: MRT4577_74736C.1.pep
SRSSMRTHYQLCKGCYVSLFPGQGLQSRSRPCLQGRIEILPKASCVSGHSILLSLHPSFACLYPPFIVINPKCLSYLASRPRCSSYS

SEQ ID NO: 341636 - protein, 49 aa, Zea mays
  Clone ID: MRT4577_74737C.1.pep
KQPYKREMKPPLLLEPKKTINHKTQWQRPKPKRNRRKMTQTHKQTSAPP

SEQ ID NO: 341637 - protein, 133 aa, Zea mays
  Clone ID: MRT4577_74738C.1.pep
CDTCRAGFETNATTPIAGAKVRLECRHYMSASGAVERSAEGTTDAAGKYRIELVDNRGAEEVCSVALVSSPVPGCAEKEVGRDRAQVSLFTDAGAGLATTVRRANPLGFLKDKPLANCGQILSSYALGSAPSY

SEQ ID NO: 341638 - protein, 181 aa, Zea mays
  unsure (1)..(181): unsure at all Xaa locations
  Clone ID: MRT4577_74739C.1.pep
MAEHATLPFSCSSTLQTLTRTLSSRGAHQLRGGFLRLPSLAALPRLAHPCRRHVSESAAAAPNGASAEGEYDYDLFTISAGSGGGRXAPRFASALYGSRCAICEMPFAAIGCDELGGLGGTXVLQGCVPQKWLLHACKHSHEXEQAPGVGWTYDTEPSDDWSSLIDRKNTESARLHGIYTN

SEQ ID NO: 341639 - protein, 62 aa, Zea mays
  Clone ID: MRT4577_7473C.1.pep
KGGLENLLASYSSWPCIRGIYEFLSLLVSSTRRLVEQYLPTTRIHLRDRTIRKSNSSKPRDW

SEQ ID NO: 341640 - protein, 86 aa, Zea mays
  unsure (1)..(86): unsure at all Xaa locations
  Clone ID: MRT4577_74740C.1.pep
IASGRSDLELVGPGQFSEVPKAEGFLSHVGQXIATLFSGSSLTDNSNTGVVRLGDGRVLCLTETIKGSIVVDPDTLDTIGKFEYTD

SEQ ID NO: 341641 - protein, 85 aa, Zea mays
  Clone ID: MRT4577_74741C.1.pep
LGGGNKPPSREKKMEAVNQSGKFFPKFGGFFGSPGPLGKKMGIPKPGVRSVGDPRIPGSPNSLGSAVNTPANCSVRLTQLGCPPD

SEQ ID NO: 341642 - protein, 66 aa, Zea mays
  unsure (1)..(66): unsure at all Xaa locations
  Clone ID: MRT4577_74742C.1.pep
PLSYNRCHFLTKHYLNLLVQNDPNXTLSRTSSQLLKRKREKRTTSMDEYASELNKQNALVSYIVCS

SEQ ID NO: 341643 - protein, 186 aa, Zea mays
  unsure (1)..(186): unsure at all Xaa locations
  Clone ID: MRT4577_74743C.1.pep
KTTKKKKKKKKKKKKQTRAAGGDAQTEPPGETKTQTGPAKRAPKAEKKPGEKKPGEEEPAAEKGPAGKKRRGEKRAPAGRPAAKEGGEGKRGKKKGKKSGETNKTNXXKGRKQGHPDRGXPTKARTRRNASRNETXKKPAGEAAKPARQNKKATRTXREXQTPGARDXPGEXAKHAGPGGTKAETK

SEQ ID NO: 341644 - protein, 82 aa, Zea mays
  Clone ID: MRT4577_74744C.1.pep
VTRGGAGSYSSSYQVLFGLQALTDAPHRLSLQVMLITSTLSSGLTKPPLTSRWKKTSSPTVRYSSTRSSPTDRPLGLTVRSN

SEQ ID NO: 341645 - protein, 94 aa, Zea mays
  Clone ID: MRT4577_74745C.1.pep
CVLCPVVALSVVPSVCPSWSVGSLLFAPALSASSFSAVFLCLPFLSARSMMALVLVRGRPLSRVACCTLYGPAPVSAALGCQSPVLPSPGGPPA

SEQ ID NO: 341646 - protein, 114 aa, Zea mays
  Clone ID: MRT4577_74746C.1.pep
PPRRWGGPLGPLGAPFGRAPCPSGGFLYAPRAGGPSNPPFFFWPCPSSCTEFSGGVPWAPSFFFRPFFFLIFPRMAPPRFFFFFVRCLGFPGVVVPPFLGGTPPPLGLKPPFFT

SEQ ID NO: 341647 - protein, 125 aa, Zea mays
  Clone ID: MRT4577_74747C.1.pep
TAPFPQQVSRAFWKSPKIIVGSQSAKGFLLRAADFASSGIFGFFGHPLGIFNVHVENLAYRPVAVVSACPSAVASVFGPCPAFSGQTWQDVSVPCAYCFGIQSCARIYEACCKIQPMDRDCFLLL

SEQ ID NO: 341648 - protein, 236 aa, Zea mays
  unsure (1)..(236): unsure at all Xaa locations
  Clone ID: MRT4577_74748C.1.pep
AMDAAALESLILDLHAIEVVKLGSFTLKSGIKSPIYLDLRALVSHPRLLSAAVLSVDRSIPMLMRRKEVKAHGTAKSIEGSFSPGDTVLIIEDLVTSGASVLETAAPLRAEGLVVADAVVVVDREQGGRENLAANGITLHSLMTLTEVLAVLLKHGKVTEEKAQEVRQFLDANRKVAVPGAAPVTPRVLRKTFSERANLATNXXMGKKLFELMEXKQTHLCVAADVGTXKGLLELA

SEQ ID NO: 341649 - protein, 476 aa, Zea mays
  unsure (1)..(476): unsure at all Xaa locations
  Clone ID: MRT4577_74749C.1.pep
MDAAALESLILDLHAIEVVKLGSFTLKSGIKSPIYLDLRALVSHPRLLSAVASLLHALPATRPYGLVCGVPYTALPIAAVLSVNRSIPMLMRRKEVKAHGTAKSIEGSFSPGDTVLIIEDLVTSGASVLETATPLRAEGLVVADAVVVVDREQGGRENLAANGITLHSLMTLTEVLAVLLKHGKVTEEKAQEVRQFLDANRKVAVPGAAPVTPRVLRKTFSERANLATNPMGKKLFELMETKQTNLCVAADVDEAXNLSDAVDXSGPQRNSLSWLANSFPKFVCCIGSKLHYIALNHILLIFEDRKSDEIGNSVTMQYEGGIFRILDWADIVNAHIVPGPGIVDGLKLKGLPKGRGLLLLAEMSSAGNLAHGDYTAASVKIAEQHSDFVMGFISVNPESWSVKPSNPAFIHATPGVQMVAGGDDLGQQYNTPESVINYRGSDIIIVGRGIIKASDPMKKAWEYRLQGWQAYKNSLL

SEQ ID NO: 341650 - protein, 38 aa, Zea mays
  Clone ID: MRT4577_7474C.1.pep
MTRGTSHKFRVLILVQKSAARGDLAQDAIMSPFWNFNA

SEQ ID NO: 341651 - protein, 48 aa, Zea mays
  Clone ID: MRT4577_74750C.1.pep
EIKTCVIKKLKQETVLFQVLSNSACLIKLISFTGNGSLMICSIVYTLF

SEQ ID NO: 341652 - protein, 70 aa, Zea mays
  Clone ID: MRT4577_74751C.1.pep
DLFSKSAGELHIFVDNRENMPYIKNKKESPPRTRTQRTTTTRSYPGAKRVSAKARLPSCLAPAITQQDLT

SEQ ID NO: 341653 - protein, 90 aa, Zea mays
  unsure (1)..(90): unsure at all Xaa locations
  Clone ID: MRT4577_74752C.1.pep
RLLSHGAPDSPVRLPRHQTVGFRPLELLSSGPPDSLVVHQTVWWYTGQALFSVRCAIWLCSDSGAHXXHLMPSVDDHWREPTRPPTRPRT

SEQ ID NO: 341654 - protein, 478 aa, Zea mays
  Clone ID: MRT4577_74753C.1.pep
MAMDAAALESLILDLHAIEAVKLGSFVLKSGITSPIYLDLRALVSHPRLLSAVSSLLHALPATRPYGLVCGVPYTALPIAAVLSVDRSVPMLMRRKEAKAHGTAKSIEGSFRPGDTVLIIEDLVTSGASVLETAAPLRAEGLLVADAVVVVDREQGGRENLAANGITLHSLMTLTEVLAVLLKHGKVTEEKAHEVRQFLDANRKVAVPGAAPVKPRVLRKPFSERAKLANNPMGKKLFELMETKQTNLCVAADVGTTKELLELADKVGPQICMLKTHVDILSDFTPDFGSKLRSIAEKHNFLIFEDRKFADIGNTVTMQYEGGIFRILDWADIVNAHIVPGPGIVDGLKLKGSPKGRGLLLLAEMSSAGNLAHGDYTAAAVKIAEQHSDFVMGFISVNPASWSVTPSSPAFIHATPGVQMVAGGDDLGQQYNNPESVINYRGSDIIIVGRGIIKASDPLKTACEYRVQGWQAYKNSLL

SEQ ID NO: 341655 - protein, 99 aa, Zea mays
  unsure (1)..(99): unsure at all Xaa locations
  Clone ID: MRT4577_74754C.1.pep
NAQTRSFPQLPGQGCPPGAPPKTDRGCPCQSLQANNLTFPHFRPCVPNGQSILFRRCPSRALGSFHSRGGRFNIRXISKSFRVSPPGTPFKNMKTTSLG

SEQ ID NO: 341656 - protein, 261 aa, Zea mays
  Clone ID: MRT4577_74756C.1.pep
MSGWRVEISGGFAFIYMEDERDAEDAISRLDGIDFGRKGRRIKVEWTKEDRTADRRGNSRRSPTNAKPTKTLFVINFDPINTRIRDLERHFDKYGRVANVRIKKNFAFIQFEAQEDATRALEGANGSHFMDRVISVEYALRDDDEKGERATNGYSPDRRGRERSPGARRSPSPYGRGRERGSPDYGRGKERGSPDYGRGGRSPDGRGGRPAGGGGGGRGDHARGGGRRRSPDYYDRERREASPGYDRPPSCSPGTGRDARD

SEQ ID NO: 341657 - protein, 87 aa, Zea mays
  Clone ID: MRT4577_74757C.1.pep
AFPMGKIDQTRMWKVGERVRSTRPAGDLGPLYPFTAGVYVALMMAQIEILRKKGHSYSEIINESVIESVDSLNPFMHARGVSFMVDN

SEQ ID NO: 341658 - protein, 96 aa, Zea mays
  Clone ID: MRT4577_74758C.1.pep
MVKILDHISIRGFFLLFMVLVASFVGHAQIIRGETKEDNDTKSMMLTTTRPGSYVTSMDEKSSLCFEDIKTLWYICKTTYQLYRTLKDCLSHCNSM

SEQ ID NO: 341659 - protein, 40 aa, Zea mays
  Clone ID: MRT4577_74759C.1.pep
KQFWGFKSFSDHLTTKAPCTNPYSNNNEQTKASIFRPTSY

SEQ ID NO: 341660 - protein, 46 aa, Zea mays
  Clone ID: MRT4577_7475C.1.pep
KTIVLCLFLLKQWMTQNYESDKMVTGSWDLGYLTMKVVLLIVYLCM

SEQ ID NO: 341661 - protein, 43 aa, Zea mays
  unsure (1)..(43): unsure at all Xaa locations
  Clone ID: MRT4577_74760C.1.pep
XFGQLKQGGGGGGAMTNVDSSYPFYFYIRVSHASSKWLYFFFV

SEQ ID NO: 341662 - protein, 246 aa, Zea mays
  unsure (1)..(246): unsure at all Xaa locations
  Clone ID: MRT4577_74761C.1.pep
MAHEAAIVIDQLAGDSPSVKAVLSLLLVPVLLLFVLLRYFSTGATTNGTKGKKKLPPSPPALPLIGHLHLVGAHPHVSMRGLAARHGGEDLMLLRLGTVPTLVASSPRAAQAVLRTHDQSLASRPRSIFGDILGYGPSDVGFAPYGEGWRQAKKLVTTHLLNTKKVQSYRAARXEEVGVVVDKIRRAAMTGAAVDLSEVLSSFTTDMVCRAVXGRSFRVDGLGXVFRDVMDASMAVLXGFSLENFY

SEQ ID NO: 341663 - protein, 35 aa, Zea mays
  Clone ID: MRT4577_74762C.1.pep
KDEPTYLMIVVLFIILKGAARLIPVDMHHLTALLA

SEQ ID NO: 341664 - protein, 187 aa, Zea mays
  unsure (1)..(187): unsure at all Xaa locations
  Clone ID: MRT4577_74763C.1.pep
MGLISGMMMGVIVGVAIMAGWSRVMRRRSTKRIAKAADIKVLGSLSRDDLRKLCGDNFPEWISFPQFEQVKWLNKHLSKLWPFVVEAATVVVKESVEPLLDDYRPPGIKSLKFSKFSLGNVSPKIEGIRIQNLQPGQIIMDIDXRWGGNPSIILAVDAVVASLPIQLKDLQVYTVIRVIFQLSEDIP

SEQ ID NO: 341665 - protein, 236 aa, Zea mays
  Clone ID: MRT4577_74764C.1.pep
MGLISGMMMGVIVGVAIMAGWSRVMRRRSTKRIAKAADIKVLGSLSRDDLRKLCGDNFPEWISFPQFEQVKWLNKHLSKLWPFVVEAATVVVKESVEPLLDDYRPPGIKSLKFSKFSLGNVSPKIEGIRIQNLQPGQIIMDIDFRWGGNPSIILAVDAVVASLPIQLKDLQVYTVIRVIFQLSEDIPCISAVVVALLADPEPKIQYTLKAIGGSLTAVPGLSDMIDDTVDSIVSDM

SEQ ID NO: 341666 - protein, 61 aa, Zea mays
  Clone ID: MRT4577_74765C.1.pep
CFFRQQYSPIHCDPSKDYINRARPYVITLTGPYVITVDWLKQRHHGYLHLLCELRYSRNKI

SEQ ID NO: 341667 - protein, 124 aa, Zea mays
  Clone ID: MRT4577_74766C.1.pep
TPPLRRKDRLLRQKPGDAVKEEKRALWPGAVQKQGDPPGWGNQKQGLSIRGTSRGGPEPNSPYKNTYYAGLLADALQPPDWKNQGVTQLSAFATNPLFISWGIINKDNTERLSKDLYNLKGEGK

SEQ ID NO: 341668 - protein, 41 aa, Zea mays
  Clone ID: MRT4577_74767C.1.pep
SIFTVLHRIVPTKMITSPKSPFPWSCLGTCFYFSEILDPPS

SEQ ID NO: 341669 - protein, 94 aa, Zea mays
  unsure (1)..(94): unsure at all Xaa locations
  Clone ID: MRT4577_74768C.1.pep
QQGDMWHSYVIIANWQRATQFVLLTGGHMPLXTDGSENKGCFNAWTXTRVPCTIPKIRHYEGSELYTNVGAVTRWNFMMYIALSGCFRYCLCIL

SEQ ID NO: 341670 - protein, 181 aa, Zea mays
  unsure (1)..(181): unsure at all Xaa locations
  Clone ID: MRT4577_74769C.1.pep
CSFPGGYAGQATRAQYLSXRLGGAXTATRFAGLLXASHPAQRRAQAIVVMEKKEHELLEILPITTEHMQDEASPPQGXELLLLRLKRSARQQSKNSQFTRMHTTIARLLTVKREPKIKQRITQXLSKKLHTKRNQSIAARPPPSXRGNKHEQKAEQRGNGQNTLHASGAGRSLHVLQPLLR

SEQ ID NO: 341671 - protein, 93 aa, Zea mays
  Clone ID: MRT4577_7476C.1.pep
QRCTLGDLSTEKVPRGEGAAPAPAAKDPLMVSNPIPLPWVRGPAAGWWWWFVSCGRGSLPLNWGAFPLYFFFFFFFFFLGKIFFCSLFRARPA

SEQ ID NO: 341672 - protein, 133 aa, Zea mays
  unsure (1)..(133): unsure at all Xaa locations
  Clone ID: MRT4577_74770C.1.pep
MDSSVAAAVSXTFLGTRLADPAPHNGRIVARFGFWLGGQAKPAPRKVAKTSTSSDRPLWFSGTVAPDYLDGSLVGYYRLDPFGFRKPVEYLQFELDSLNQNLTKNEAGCIIGTRFESYEVKSSQLQSYMEVFC

SEQ ID NO: 341673 - protein, 448 aa, Zea mays
  Clone ID: MRT4577_74771C.1.pep
MSPPTNGAISLAYAPSMMLGAGALTNPPLLPFDGFTDEDFLASADAALLGGADTDQTLLLLPSCPGANCCGGSSSDQGLGALACEVTTAGSFSLLGQPAPGQVSWEVTTAVAADRNTFSRTRDPAPSPPPSPALPLVQTTSQSQRTSIYRGVTRHRWTGRYEAHLWDNTCRKEGQKRKGRQVFLHIPSFALYSILVYASFFDAKGGYDKEDKAARAYDIAALKYWGDNATTNFPRENYIREIQDMQNMNRRDVVASLRRKSSGFSRGASIYRGVTKHHQHGRWQARIGRVAGNKDLYLGTFATEQEAAEAYDIAALKFRGENAVTNFEPSRYNLLAIAQRDIPILGRKLIQKPAPEAEDQAALSARSFSQSQQSSNSLPPYFLTNLLQPLPSQHSLAQALPSYNNLGFGEPSLYWPCPCGDPGEQKVQLGSKLEIVDGLVQLANSAAN

SEQ ID NO: 341674 - protein, 73 aa, Zea mays
  Clone ID: MRT4577_74772C.1.pep
EKLALKIGRKKKSGIYPGGARGKKPFVLGQPLGHRSPPPPPILGGPSPGPHLDHSICPPPGFLAPKEKPSPGL

SEQ ID NO: 341675 - protein, 73 aa, Zea mays
  Clone ID: MRT4577_74773C.1.pep
RVGIWLTKKIGGKDLSEKGPNSGNTHKIPLADETHARKWLMVNNIPCFKEYPARLGKPRFSFSTHQTYFAGQQ

SEQ ID NO: 341676 - protein, 96 aa, Zea mays
  Clone ID: MRT4577_74774C.1.pep
SLGDLIEWCSERHHMPSDCGDQTQHTGVFAAMQEYTCSTGNNGVIYPQSGISHSSGQNGAHGAYLEHQHFEGCMYMSGNGQMCGPYLPEQLYEGLS

SEQ ID NO: 341677 - protein, 1180 aa, Zea mays
  Clone ID: MRT4577_74775C.1.pep
MDGSYDIVRLMLRSFTVIDPHLVNLIRENPRYTKMTPDEILGKFVSGCMMVKEARNKKGKKERKKYYSKAKGEAHIGKEWDSDCSSFDSDDEVLAASAFDKSSLFPNEHHMCLMAKEKKTCKNDYEKLKFARDAYTIGRYPSIKDGLGFQKGTKNLTSQRTSTLNKEKGKAPMTSSPSHDQKNHAYLYAHVKNVSSVAQHDRSYNHATLPNRHDATFNSHAMFESSSSFAHGLCIQGTSWIIDSGCTNHMTGRRKCSPPTSRIGIPMTLSSLEMGTKARRSDGSLAFKGVLYDKLYLVDFSKENVDLDACLIAKTNMGWLWHRHLAHAGMKNLLKLLKGKHVLGLTDVCFEKDRPCAACQAGKQVGTTHQNKNVMTTSRPLELLHMDLFGSVAYLSIGGRVPLRLLNSASNHHQRKLQRLIGAIQENSAARPSPTAVPPARVRLTAAESSLRRNRKLRLARPWASASGGSLRLARPQGSAPASASEGGLRLARPQGSASTSTSEGGLRLARPQGPASISTSGGIASSPDPGLGLRRSLRLARPWARTDHAAGGTPPGSKRRQQDKSKTQGTLKRFLRRAQNEFELKVKKIRSDNGSEFKNLQVEEYLEEEGIKHEFSAPYTPQQNGVLERKNRMLIYMARTMFGEYKTPEQFWVFNKSIGLVKVSSDVVFDETNGSLREQVDIDDVDEDEVPTATMRTMAISDVRPQEQQEQGQPSSSTLVHPPTQYEEQVPQDEVLDQGGAHGEQDKEEEAPQASPAHVLETIQRNHPVDQILDDISKGVTTRSCLANFCEHYSFVSSIESFRVEEALQDLDWVLAMQEELNNFKRNEVWSLVPHLKQNIMGTKWVFRNKQDEHGVVTRNKTRLVLKGYAQVGGLDFEETCAPIARLESIHILLAYDAHHSFKLFQMDVKSAFLNGPTKEEVLSKVLYGLKQALRAWYECLRDFLISNAFKARKVDPTLFANTCNGDLFVCQIYVDDIIFGSTNQKSSEEFSRVMMQKFKMSMMGELNYFLGFHVKQLKEGTFISQTKYTQDLLKMFGMKDANPAKTPMGTDGHLDLNKGGASVHDGSSLLCRSSSRRRYNPRMTTMNVKVMGGFGFQMKVSSCDRINVKGINVLLLRLHPVPMLGAFVFRRYLRTRNKTVHNMKSMVEMKVDAAPKLCARELRLSGRKRNRLKGEKAI

SEQ ID NO: 341678 - protein, 110 aa, Zea mays
  unsure (1)..(110): unsure at all Xaa locations
  Clone ID: MRT4577_74776C.1.pep
PWCPIGPQVGQTXSLLSGGRRGPTAPPVIPMGWMGVKRGKLNKFEISLRGAQWRPRYVFFFQQGGGGGGGHGAVSAFSSSLRPRMGGVGVNSFCKKREEGAKSRPGVWGG

SEQ ID NO: 341679 - protein, 185 aa, Zea mays
  unsure (1)..(185): unsure at all Xaa locations
  Clone ID: MRT4577_74777C.1.pep
MASTSAFSSLQPPSGGIASACSHKPQPGKCRGASRGRWPPATPPGRRRPCAAARRPPPPPIAPGTTRGAACRASSWTTAPASGLSSRSRGRRSPCAGGSSSTTAATSAPPPIGAASPASGTRRSPSRPSPCWWRAASGGWTPRRRRRPPPXGPEAAXCRPPPSPGRSSGHGRRPRTGGTLRTPPT

SEQ ID NO: 341680 - protein, 258 aa, Zea mays
  Clone ID: MRT4577_74778C.1.pep
PMSNFNQQQQMFKAAAPETDIQGADPSNNTLFGINGDGQLGFPMGADDFLSNGIDASKYQGHISTDIDGNYRIPKDGQQEISSSMVSQSFGASDMAFNSIDSGMNDGGFVNRTSWPPAPPLKRMRTFTKVYKRGAVGRSIDISQFSGYDELKHALARMFSMEGQLEERQRIGWKLVYKDHEDDILLLGDDPWEEFVNCVKCIRILSPQEVQQISLDGDLGNNILPNQACSSSDGGNAWRARCDQNSGNPSTGSYDQFE

SEQ ID NO: 341681 - protein, 54 aa, Zea mays
  Clone ID: MRT4577_74779C.1.pep
AAESPRVPALVIRLCIYLFCPPAVAAIHETSSWGCMEPNRVHILTIDNVLITPP

SEQ ID NO: 341682 - protein, 41 aa, Zea mays
  Clone ID: MRT4577_7477C.1.pep
CYLTFTAHTSFSLHVIVMFNSFKFKLSSYILVTKVPILLLF

SEQ ID NO: 341683 - protein, 234 aa, Zea mays
  Clone ID: MRT4577_74780C.1.pep
MAGGAGGRDPLVASEIHGFLTCADLNFDKLMMEAGTRWFRPNEIYAVLANYARFKVHAQPIDKPISGTVVLPRVRPRVRFRKDGHNWKKKKDGKTVQEAHEKLKIGNEEKVHVYYARGEDDPNFFRRCYWLLDKELERIVLVHYRQTSEESALPPSHVEAEVAEVPRINMIHYTSSTDSASAHTELSSSAAAAPEDINSNGGGAVSSGYTSVSSFGEFAETDNQATSLSSFWVD

SEQ ID NO: 341684 - protein, 111 aa, Zea mays
  Clone ID: MRT4577_74781C.1.pep
PNRLPNPVQQARLANGRCQLLTHLYADHLLPTPSFYDVAPFEVAPPGLLGLQWGHYCRCCSPHVSEPAGAEVHQSVQWTYARFSSCVAAYLPHASADAWAKASVAPESPAL

SEQ ID NO: 341685 - protein, 97 aa, Zea mays
  Clone ID: MRT4577_74782C.1.pep
LIHLEGLVGKRENQTWPPLGGGAPGVCEKRPKPPEGGGAPQVPPTPRKKQTRGSPAGTCWGGRCFLGGEPPPKPGGGQGSPKHRPTTPMGGPLLGPP

SEQ ID NO: 341686 - protein, 86 aa, Zea mays
  Clone ID: MRT4577_74783C.1.pep
MAMRCALTSLPARLRSPAVVASGTRRLLSDGKGRVLSEEERAKENVYIQKMERERREKLKKKLEQEKDAADKAKSGADGKKAEGTN

SEQ ID NO: 341687 - protein, 98 aa, Zea mays
  unsure (1)..(98): unsure at all Xaa locations
  Clone ID: MRT4577_74784C.1.pep
PTRPRTRGRTRGSTRVRVNDDMLRATFKEIAYQATQDNFQKGSIFRPFTXIIKISAHITAAVVAXSYELGLATRLTHTIDVMIYAXNCMYIPVYRNYR

SEQ ID NO: 341688 - protein, 116 aa, Zea mays
  unsure (1)..(116): unsure at all Xaa locations
  Clone ID: MRT4577_74785C.1.pep
MHIFVKTLTGKTITLEAESSDTIDNVKVKIQDKEGIPPDQKRLIFAGKQLEDGRTLADYDIQKESTLRLRLRLRGFFYTRKKKTNTKSKKIXHKYNKEKIAALQFYRVDDLTGKVF

SEQ ID NO: 341689 - protein, 120 aa, Zea mays
  Clone ID: MRT4577_74786C.1.pep
SHQYHKPHPAAAGENQRHLRLGRPPTEKRAVAKMYIFVKTLTTKTITLEAESSDTIDNVKAKIQDKEGIPPDQQRLIFAGKQLEDGRTLADYNIQKESTLHLVLRLRGGVLPARRRRTPR

SEQ ID NO: 341690 - protein, 71 aa, Zea mays
  Clone ID: MRT4577_74787C.1.pep
ANSFGGISYLGFEKLTFVPIQSKLIESSLMSASEINWVNDYHEEVWEKVSPLLSGHSRDWLWKNTRPLLDV

SEQ ID NO: 341691 - protein, 215 aa, Zea mays
  unsure (1)..(215): unsure at all Xaa locations
  Clone ID: MRT4577_74788C.1.pep
NFGTRGYSSSKPPLTKIVESANGRPQDMDVVAAMRNGEVLGRLTVLKSDHCPGSHSLNLPERVEGAPNFREIPGFPVYGVANPTVDGIRAVIQCISTSKGGRPVLWHNMREEPVIYINGKPYVLREVERPCKNMLEYTGIDRDRVERMEARLKEDILREAERYGGAIMVIHETDDGEIFDTWGNXRYEAGLTPLEGYKNLVSEGLSIKYARVPIT

SEQ ID NO: 341692 - protein, 134 aa, Zea mays
  Clone ID: MRT4577_74789C.1.pep
ANLPVRFTVNEHNPNQKIGMYYDEVVASVFYGDQLVATGSVMHPFYQVPKGDTPVQGTLTARGPVPSDPSWGRFAGEVSAGSVGMRLELSSKLQFQAKMWDSKNHHIKVECDFTMQGDGTLRKQDKDSQCTLYF

SEQ ID NO: 341693 - protein, 92 aa, Zea mays
  unsure (1)..(92): unsure at all Xaa locations
  Clone ID: MRT4577_7478C.1.pep
TGNLMTFGLVYTEYATAADPNKGILVTIAPIDIGFIVGANILVGGAFDNASMNPTESFGHALISWESNYQXVHYVRPVITGSLADAIYELLF

SEQ ID NO: 341694 - protein, 206 aa, Zea mays
  unsure (1)..(206): unsure at all Xaa locations
  Clone ID: MRT4577_74790C.1.pep
MAARVLVIGSGGREHTLAWKLAQSPQVKQVLVAPGNAGTACAGKISNAAVSVNDHSALAQFCKDEKIELVVVGPEAPLAAGIVGDLTSAGVRCFGPTAQAAQLESSKKFAKEFMDRHEIPTAQWRAFTNPEDACSFITSANFPALVVKASGLAAGKGVIVAKSQAEACRAVQEIMQEKSFGAAGETVVVGEVLEGXEEVPCLCFTD

SEQ ID NO: 341695 - protein, 124 aa, Zea mays
  unsure (1)..(124): unsure at all Xaa locations
  Clone ID: MRT4577_74791C.1.pep
KKKKKKKKKLKKKKKKKKKRKKKKKKKANSLLLRLKSDWPAFSQLVARLDPNVFRVHKVRFPPFGPKGAPKTPSELKDASSLXRLKNPVVLRALSALPFKDYRVCWSLSDSKFSETAMFIKKMF

SEQ ID NO: 341696 - protein, 55 aa, Zea mays
  Clone ID: MRT4577_74792C.1.pep
GACIAAALALFFSTTFSHYEFNAQPFSNELRFIDKEDSDLGSLVRSRHRHGLQQK

SEQ ID NO: 341697 - protein, 60 aa, Zea mays
  Clone ID: MRT4577_74793C.1.pep
TVFSYSTHDVSSLRLIVHSYFEVFKGVSSLPQAYSVLQTALRSDYIYERQHALSSRLPAA

SEQ ID NO: 341698 - protein, 101 aa, Zea mays
  Clone ID: MRT4577_74794C.1.pep
RQQDGPVGSPYPVVFQRRCAYRFGGLNGLVRDDVGAFRATTISWLGSCSLPTSWRVQHARECPWSRLARLLAETELPPLCFFLSSIQSRNYIPKKKKKKRP

SEQ ID NO: 341699 - protein, 68 aa, Zea mays
  Clone ID: MRT4577_74795C.1.pep
CYNKHLLTMESLGLMNLSRRLVFIYGISFIVRPYLILVIGIQTFNMTQTLSRGTNTPLVNGEYNRVNF

SEQ ID NO: 341700 - protein, 48 aa, Zea mays
  Clone ID: MRT4577_74796C.1.pep
SVLFYRLLLSYTPLNLSFSFIIRMVLIHISPPSPKSSMLSMSIMSPPT

SEQ ID NO: 341701 - protein, 87 aa, Zea mays
  unsure (1)..(87): unsure at all Xaa locations
  Clone ID: MRT4577_74797C.1.pep
VAARVPKXVLQFAGIEDVFTSSRGSTKTLGNFVKATFDCLMKTYGFLTPDFWRDTKFVKSPFQEYTDLLAKPTKALMIDAPVENVEA

SEQ ID NO: 341702 - protein, 102 aa, Zea mays
  Clone ID: MRT4577_74798C.1.pep
IRIPPCSLTRGEPHIYNRFLTYLYEHKLYHRMQEKNRSRGTRNHRLLFDSSTVPTAPPPFFPLSAHFTHKAQQATQGSQQRELQLFVEPIQNYHNALQVTRI

SEQ ID NO: 341703 - protein, 52 aa, Zea mays
  Clone ID: MRT4577_74799C.1.pep
PPGGPEIEKFRDRGRVPFPSNKGIKQQGVRFPNPLPFFPKGPPKGWGPPPQK

SEQ ID NO: 341704 - protein, 54 aa, Zea mays
  Clone ID: MRT4577_7479C.1.pep
MITPVIFTNHHTYAVHFNEDDRAGCALPVQSTGRVYSPLRAKTNQVRFSPEYRQ

SEQ ID NO: 341705 - protein, 218 aa, Zea mays
  Clone ID: MRT4577_747C.1.pep
MAKVHLYVAAACAVVLALATPALAGDPDMLQDVCPADYASPVKLNGFACKANFSADDFFFDGLRNPGNTNNPAGSVVTAANVEKFPGVNTLGVSMARIDYAPGGQNPPHTHPRATEIIFVLDGTLEVGFITTANALFTKTVTKADVFVFPRGLVHFQQNRGHGPAAVVAAFNSQLQGTQAIAMTLFGAVPPVPSDILAKAFRISSGEVDHIKANFAPK

SEQ ID NO: 341706 - protein, 95 aa, Zea mays
  Clone ID: MRT4577_74800C.1.pep
ELLTNPARVIPAQEKFIKLLENSRYVPVKPAPSGFILLRDLQPTEAEDLALTDAPTTVAGSTGNTAPAAGQQGSGSSAMAVDDEPHPPQPFEYTS

SEQ ID NO: 341707 - protein, 60 aa, Zea mays
  unsure (1)..(60): unsure at all Xaa locations
  Clone ID: MRT4577_74801C.1.pep
KRPTLGFYFYFSKSHFHLLWGSGATTTQAQSHLEAELTRMIPSDHMPINXYGSKNGACFT

SEQ ID NO: 341708 - protein, 46 aa, Zea mays
  Clone ID: MRT4577_74802C.1.pep
HDRLMLAVSSHSKAAIRIYTESWDNGRKSNMCNKREQQKSHRIRKK

SEQ ID NO: 341709 - protein, 1081 aa, Zea mays
  unsure (1)..(1081): unsure at all Xaa locations
  Clone ID: MRT4577_74803C.1.pep
MAAQKFNELTESDSIFVSRLIMPLKRPELRPTEPKLRLIVFVSCCRLIQADPRYPNPRTFSAVAAAAYGTAEMAMEAVATVSSASGLLAMLQEPAPELKLHALARLNSVVHLFWPEISTSVPTIESLYEDEEFEQRQLAALVVSKVFYYLGELNDSLSYALGAGPLFDVSDDSDYAHALLAKALDEYASIKTRALKATEEEENIDPRLEAIVERMLEKCIFDGKYQQAMGMAVECRRLDKLEEAIVGCDNIQGALSYCINLSHQYVNHREYRFEVLRCLVKIYQTLPNPDYLSICQCLMFLGEPETVACILDKLLSGNKDDALLAYQTAFDLVENENQAFLLNVRNRLASPTPVPSNPDSEPAVQDDQTASTVGTGTEAAGDVQMRDDTAPNGNAHTVDPNEVAHADRLEKIKGILSGETSIQLTLQFLYSHNRSDLLILKTIKQAVEMRNSVCHSXTICANAIMHAGTTVDTFLRENLEWLSRATNWAKFSATAGLGVIHRGHLQQGRALMAPYLPQSGAVGGGSPYSEGGALYALGLIHANHGEGIKQFLRESLRNTSAEVIQHGACLGLGLAALGTSDEEIYEDIKNVLYTDSAVAGEAAGIGMGLLMVGTAXEKASEMLAYAHDTQHEKIIRGLSLGIAXTVYGREEEADTLIEQMTRDQDPILRYGGMYALALAYRGTANNKAIHQLLHFAVSDVSDDVRRTAVLALGFVLYNEPEQTPRIVSLLSESYNPHVRYGAALAVGISCAGSGLSDAISLLEPLTSDVVDFVRQGALIAMAMVMIQTNESFDSRVGAFRRQLEKIILDKHEDTMSKMGAILASGILDAGGRNVTIKLLSRNKHDKLTAVIGLAVFSQFWYWYPLLYFISLAFSPTAFIGLNSDLKVPKFEFLSHAKPSLFEYPKPTTQQTTTSTVKLPAAILSTYAKAKSRAKKDAESKANQEKATEEASGSTSSKTAKAQEKDADAMQVDNASEKKAPEPEATYQLLTNPARVIPAQEKFIKLLENSRYVPVKPAPSGFILLRDLQPTEAEDLALTDAPTTVAGSTGNTAPAAGQQGSGSSAMAVDDEPQPPQPFEYTS

SEQ ID NO: 341710 - protein, 421 aa, Zea mays
  Clone ID: MRT4577_74804C.1.pep
GRGPCTDRCSHSSWRKHRQHWHSCKPSDPPGCRNSARADVSDDVRRTAVMALGFVLYNEPEQTPRIVSLLSESYNPHVRYGAALAVGISCAGSGLSDAISLLEPLTSDVVDFVRQGALIAMAMVMIQTNESFDSRVGAFRRQLEKIILDKHEDTMSKMGAILASGVLDAGGRNVTIKLLSRNKHDKLTAVIGLAVFSQFWYWYPLLYFISLAFSPTAFIGLNSDLKVPKFEFLSHAKPSLFEYPKPTTQQTTTSTVKLPTAILSTYAKAKSRAKKDAESKANQEKATEEASGSTSSKAAKAQEKDADVMQVDNATEKKAPEPEATYQLLTNPARVIPAQEKFIKFLENSRYVPVKPAPSGFILLRDLQPTEAEDLALTDAPTAVGGSTGNTATAASQQGSGSSAMAVDDEPQPPQPFEYSS

SEQ ID NO: 341711 - protein, 73 aa, Zea mays
  Clone ID: MRT4577_74805C.1.pep
ALLLIRLVIAYHSASYQLHQFITFFHSAALQHVFLSCLFTAAHSATNQLPSWCESCHFLDSQPVAVVLIASSA

SEQ ID NO: 341712 - protein, 85 aa, Zea mays
  Clone ID: MRT4577_74806C.1.pep
MGNVFSNLFKGLFGKKEMRILMVGLDAAGKTTILYKLKLGEIVTTIPTIGFNVETVEYKNISFTVWDVGGQDKIRPLGRHYFQNT

SEQ ID NO: 341713 - protein, 103 aa, Zea mays
  unsure (1)..(103): unsure at all Xaa locations
  Clone ID: MRT4577_74807C.1.pep
DPTHLVFKKGAVLGVFKTYSVKNIKPFNARVLNKVXKLKXKTPGGLFFSGNSKGKPFFGTVVTVGPGPLDKEGERVPLSVSPGGPFFFSKYPGKEFKGAPGPK

SEQ ID NO: 341714 - protein, 39 aa, Zea mays
  Clone ID: MRT4577_74808C.1.pep
NSPKKKKKKKKKKKKKKKKKKKKKKKKKKKKKKKKKKKK

SEQ ID NO: 341715 - protein, 63 aa, Zea mays
  Clone ID: MRT4577_74809C.1.pep
FPVKKNKPGRLIYRRGGNVSLNPHQSFHTGGKNTTGLYRVVLQFAQVPRGWGKQTTFSLAWLN

SEQ ID NO: 341716 - protein, 197 aa, Zea mays
  Clone ID: MRT4577_7480C.1.pep
GPILSQINHRNIVKLLGCCLEAEVPLLVYEFISNGTLSHHLHVEGTISLSWDDRLRIALEISKALAYLHSSATKPILHRDIKSSNILLDDNLTAKVSDFGASKYIPIDRTGVTTDVQGTFGYLDPMYYYTSRLTDKSDVFSFGVLLIELLTRKKPYAYRSDDGDGLVSEFSSLLDQGTLVDIIDPQIMEEDKQVDEV

SEQ ID NO: 341717 - protein, 125 aa, Zea mays
  unsure (1)..(125): unsure at all Xaa locations
  Clone ID: MRT4577_74810C.1.pep
GHHAPHDRLPNSRXARMVYFVWKPRGHKDXPAARGITLPPAXTQKLGLFYEIGPFNMPHSLPLDCHDYGRAKGSNLIYVFLPDGSGYNSSQDVGHTQXEXARISSEPYECLPAFFDGHPLQARYE

SEQ ID NO: 341718 - protein, 99 aa, Zea mays
  unsure (1)..(99): unsure at all Xaa locations
  Clone ID: MRT4577_74811C.1.pep
KLMTNILYSYRGMGLSVGGMTAGWDETDPGLYYVDSEGGRLKGMRFSVGSGSPYAYGVLDNGYRYDMSVEEAAQLARRAIYHAXTLRDGDSGGDASVDY

SEQ ID NO: 341719 - protein, 102 aa, Zea mays
  Clone ID: MRT4577_74812C.1.pep
QAMRRSRLSKKEPNWSAAYLIRRGTYDGSPQDAFVCCKMTNAFLVSAQKPLEGGTDEVTRPGRSNFIKFTPVLEGFLHGATTRRRINVTVRSNQSEHRKPVC

SEQ ID NO: 341720 - protein, 63 aa, Zea mays
  Clone ID: MRT4577_74813C.1.pep
NRDAPSFQGSQLLGPPVGCVHLDGHDFRRLFSERCHGGVCALFLALAVPSRSVLFCALSSRYM

SEQ ID NO: 341721 - protein, 95 aa, Zea mays
  Clone ID: MRT4577_74814C.1.pep
MSLSPTALFTEWVENLREKDTSWNMEELTSRTDCTFPWKSTSNLSLLKVNLPEGYGIPEITAQTKVALGAELVDTTFVTFWMPTDYLCFRGSFAF

SEQ ID NO: 341722 - protein, 44 aa, Zea mays
  Clone ID: MRT4577_74815C.1.pep
NQKKKKKKKKKKKKKKKKKKKKKKKKKKKKKKKKKKKKKRGGPF

SEQ ID NO: 341723 - protein, 90 aa, Zea mays
  Clone ID: MRT4577_74816C.1.pep
SWHTPEWNPRVPPVWKGPWIFPNTHRSQPSAMLMAEKIRTWSPFLTGEENLSSGFAEKVPPYARSTLSLLCARISYLEGQGNVEYLNELV

SEQ ID NO: 341724 - protein, 116 aa, Zea mays
  unsure (1)..(116): unsure at all Xaa locations
  Clone ID: MRT4577_74817C.1.pep
YETFGARRKLQQLAVQFELVDXHRPSSTCMSSDEQLRRSPSVSVIIRRRSCLGLKTAGGGGSRRINSSRSAVISRRRRRLFGSSASAQAQAPAPQAEGKDSDDDTTNVRDEDISHT

SEQ ID NO: 341725 - protein, 74 aa, Zea mays
  Clone ID: MRT4577_74818C.1.pep
MASRLAVAVAVAAPASSPSPVATVAPPRVVLRRGLPPTWHALRALPRSRGAAVVCQAHGGQDTVMQVPDVSKCT

SEQ ID NO: 341726 - protein, 90 aa, Zea mays
  Clone ID: MRT4577_74819C.1.pep
YFGDQLQYFKQSNPWYAVTKAFCIAFVMTFFSVFDVPVFWPILLCYWIVLFVLTMKRQIVHMIKYKYVPFSIGKQRYGGKKGPAASAFKE

SEQ ID NO: 341727 - protein, 96 aa, Zea mays
  Clone ID: MRT4577_7481C.1.pep
KQAPFIIPNFVPPTLEKGILLLNDGPKNFIKKPLALQKILKNSFFSPLRDWALPTSNEYPPVPIPPKKNLPQIILEPEKFFGEKNHFLSYRGPPLK

SEQ ID NO: 341728 - protein, 86 aa, Zea mays
  Clone ID: MRT4577_74820C.1.pep
TRSAITRFVGSTHRIWRALPPVQSIDANSTETNTLFWACHTTSRLNLNIRRTLRGRTPVRKVRRPHGAHDHTMLVHRGSARGPKEL

SEQ ID NO: 341729 - protein, 201 aa, Zea mays
  Clone ID: MRT4577_74821C.1.pep
MAGESSIRRPLFGGAISTAFPARFQDVSNIREVPDHQEVLVDPARDESLIFELLDLKGEVEDGGSALWFLRDVANEQDAADNLVVEHSGTIELAGLRSGEAPAVAGTAIGKLAVSKGRQGREAQNIVRLYLANIRLKNAATDVVITAYEPLLINPLSESAQAVAAGPAVPAEQAGCLPMSEVFRLAVTNFDVHDWNLFNGS

SEQ ID NO: 341730 - protein, 109 aa, Zea mays
  Clone ID: MRT4577_74822C.1.pep
MPSVGNPNGPCKNRLAARASKARKDRRKKSQAPKDKVAKADTTRGARKGLLPTSGPRAKMSAKKARKVEKAMAHAMKRKMEADGEAEMKDAPEAETEEKTEEAEMADIQ

SEQ ID NO: 341731 - protein, 86 aa, Zea mays
  Clone ID: MRT4577_74823C.1.pep
DIGAQIKDRQADRKLEQRHRGTKHVLRLAVIRISSRAAAHHWLTNRNRDDHQPKDRDRILDFLERGRPLRTLRSRASCGASACTCP

SEQ ID NO: 341732 - protein, 53 aa, Zea mays
  Clone ID: MRT4577_74824C.1.pep
ARTPQRPCAPRAVCLSTATTSAYDIAVPRNVLIGLAGANSRRFRRARRLRVMA

SEQ ID NO: 341733 - protein, 82 aa, Zea mays
  Clone ID: MRT4577_74825C.1.pep
CTPSFFFLNSQGRLKKPKHTFSLFKPTLQNQTSDHVIERHLYIMVYPFVPILIVPLCLPIPFYSYVHIIIYTCLSITSDHVI

SEQ ID NO: 341734 - protein, 87 aa, Zea mays
  unsure (1)..(87): unsure at all Xaa locations
  Clone ID: MRT4577_74827C.1.pep
WGGGGCVFYFFLGVFFFFFFFFFAXHTTGVPCFGFDLIILGFSFYNLXXKHRGRWGVLFSKKIIFKHFFFXLXFYHLLPGVSNHFGI

SEQ ID NO: 341735 - protein, 55 aa, Zea mays
  Clone ID: MRT4577_74828C.1.pep
CNPPPPFFLPLFLTRTSIFFLHTVSKMGIDPHHHFPPKAPQIVLMYLVTLFYITL

SEQ ID NO: 341736 - protein, 58 aa, Zea mays
  Clone ID: MRT4577_74829C.1.pep
KGFSFFPPPLCYSSPPETTKEYKKPKIKKKNKKKKNNNKKKTKKKKKKKKKKKKKKKH

SEQ ID NO: 341737 - protein, 176 aa, Zea mays
  Clone ID: MRT4577_7482C.1.pep
MPPYPMHPFRPDAPMGHFEMGDHRPPPVHSMEYMGADRMPYLYGVEQGGPRPFLEQPSPRTCPPEAPRTNSEVPRNMSDAVPATDFRKGPVAIENQVATPTGTTEVIIPCNYIGFVCGNNGSEIEEIEKMSGASITVHDPKAGDANSKVVICGDPEETKKAQSLIHAFIFCGLYQT

SEQ ID NO: 341738 - protein, 176 aa, Zea mays
  Clone ID: MRT4577_74830C.1.pep
GPAPALAPSPGGRRGGTQCPAPSSTSRPGVTLARAPRPFDFVFRCSTGEKRTQLDDPTRRSPLPSIKASSQEGRKSIGGAVLGSAQRCLLVVRRLESKGHMDLSYQGSKECNIRTTDNSLGAIKLCSKRVFAQQETTRITRSKKNIAQPDATLTPRHNIDYHTQGIVEGKFNYYVS

SEQ ID NO: 341739 - protein, 62 aa, Zea mays
  Clone ID: MRT4577_74833C.1.pep
GSQFFICPVKTLWLNERHFVFGQFLKGMNFVILIKSQETQKGARPKKKVVISKCGELPVVKV

SEQ ID NO: 341740 - protein, 157 aa, Zea mays
  Clone ID: MRT4577_74834C.1.pep
MAAPLRRSLPSLGRALLTPAPARMLSAEASDALVEIKPGEIGMVSGIPEEHLRRKVLIYSPARTASQQGSGKVGRWKINFLSTQKWENPLMGWTSTGDPYANVGEAGLTFDSAESAKAFAEKHGWNYVVRKRHAPLLRPKAYAENFKWRGPPKAEQA

SEQ ID NO: 341741 - protein, 95 aa, Zea mays
  Clone ID: MRT4577_74835C.1.pep
QSGGRHLPPQGTWPARSSCVSSGDRRGGLGAAVRCDLLRCHPFCTCCLQHVHDCPRSLRPVSWNCQQGVIYHGLTSFSTWHGSTIQTMKSSLLDN

SEQ ID NO: 341742 - protein, 169 aa, Zea mays
  unsure (1)..(169): unsure at all Xaa locations
  Clone ID: MRT4577_74836C.1.pep
PRVRARGRPSGQARARQQEDTXKSHRDGNXDAAEKHGEATEYNGPIMTHGGEERGVTLWCGGGCGKLSIPAIEMPGLGSFCLGVGLPGSAEGSFNQSEXCNSWRTXVFVASILSGASKGFSLTSKDELKAEGTSRSGSAVPSLKVNLVQALGSDXSVVTSENEGAKSDL

SEQ ID NO: 341743 - protein, 50 aa, Zea mays
  Clone ID: MRT4577_74837C.1.pep
ILFILIIRHVWDGLVIDVVRANTVKSSNFRTHDPEQVHCSHNGLYFRSNI

SEQ ID NO: 341744 - protein, 50 aa, Zea mays
  Clone ID: MRT4577_74838C.1.pep
RSCDVHFSMEGTFIMYPLIKRLMMIVKVDNISHESSVVNHFISIRLTFKS

SEQ ID NO: 341745 - protein, 73 aa, Zea mays
  Clone ID: MRT4577_74839C.1.pep
ACSMAVRSTVQHMKIRFVRSLSVMTVYTLSRHETERTKRRKRSSWAPEANGEAAGDGHGLRFEGVGERVGERV

SEQ ID NO: 341746 - protein, 49 aa, Zea mays
  Clone ID: MRT4577_74840C.1.pep
RKLGSSRTAAPADDNRGLLLLIVVTPAIGWVLFNILQPALNQINRMKSD

SEQ ID NO: 341747 - protein, 82 aa, Zea mays
  Clone ID: MRT4577_74841C.1.pep
KNYNFFFIFLIFLFIFINIFLPFPESPFWAIFDIFFNLVGGFFFLLKGHIPLLGKLFKIYFASFFPLVPWKNFGFPKFNFFK

SEQ ID NO: 341748 - protein, 110 aa, Zea mays
  Clone ID: MRT4577_74842C.1.pep
KTKKQKLFKQTVCFTFPGPHFPGFLAPIFLKFNPPDKKKKQAFGQPPIPPLAPPPGKESHQPGGALFANIETGGENYFPRSIFFPGAPFGETLPGGGAEPKDWNNGLAPK

SEQ ID NO: 341749 - protein, 96 aa, Zea mays
  unsure (1)..(96): unsure at all Xaa locations
  Clone ID: MRT4577_74843C.1.pep
VFLKQVKSGRVLISGPFMINGVPIRHVNHTYVIATSTNVDISGVDVANFDDKYFAWVKKHKVKKTEGELSETDXEASNSLPDFKNDDQNAVDSALI

SEQ ID NO: 341750 - protein, 42 aa, Zea mays
  Clone ID: MRT4577_74844C.1.pep
IRQSSWLYRFYHGPCKDPRGGQMKDLIASMHHSASLKSCFGR

SEQ ID NO: 341751 - protein, 76 aa, Zea mays
  Clone ID: MRT4577_74845C.1.pep
NFLEKGGNWPCLPKIPGEMAPPPPFQLIRAPHRAGGRDPNKPVFSLDRRNPRSGDLSSNNASQGGGPPDLYPLPPV

SEQ ID NO: 341752 - protein, 122 aa, Zea mays
  Clone ID: MRT4577_74846C.1.pep
NCHQPFFYFMRKQNLGQRGPHKANLPCKNHQRRFLVLPKAGRLRLNKRMLIPSWWIMPRKRRFWNQNQLFTSGQTKLGGLLAQEKLFKFLETSAYFLVKPGPFGLILLQDFYPIGALYFALD

SEQ ID NO: 341753 - protein, 118 aa, Zea mays
  Clone ID: MRT4577_74847C.1.pep
IDLSIGSTPMEKQSSQELSIENKSAGFSRVEKPKVAEIQLQLLPYDVLRDILSRLSIKDVGRMSTLSGEWRQQRICHPDLVFTKDTFGISTDPDPDFTKTIDAIIRDTDTKRASWTAE

SEQ ID NO: 341754 - protein, 118 aa, Zea mays
  Clone ID: MRT4577_74848C.1.pep
NSKKGDHAHCRSRSTHGTTPTFIAGAAAGLLVSCSEMTLCQSQRRRRVPSPYSSSPQRLGHVVEQPWLLLFRFLPVLPPPQHNDLGTHVSRYSIVAAPPTCDPVASAPGCRKSKAPRD

SEQ ID NO: 341755 - protein, 81 aa, Zea mays
  Clone ID: MRT4577_74849C.1.pep
FICHGVYEIHSHRIPSDEEMADRIDTMLGELVTNILWVNSDCGLRTLKYKVEKPRLPNMACADKLIRTEYRSGQVSSYFTS

SEQ ID NO: 341756 - protein, 65 aa, Zea mays
  Clone ID: MRT4577_7484C.1.pep
GHAAVGIAPEAAYKLVIRLTLAITTLFITPYIGEYQLIEASRRNGLPTKSPRQHTHSVPHVYQAH

SEQ ID NO: 341757 - protein, 249 aa, Zea mays
  Clone ID: MRT4577_74850C.1.pep
LQVTQPVAGNYYPVNLGVYIVDEKYELSVLVDRAAGASSIQDGQLEIMLHRRLLKDDGRGVAEPLDEVVCVDQDCQGLTARGTYYINVEKLGHGAHWRRTYGQQVYSPFLLAFTHEDATSSKPYSVAKDSMMDGNYSLPDNVAIVTLQNLDDGTTLLRLAHLFQAGEDPRYSEVAEVDLKKVFGKRTIKELTETNLSANQKKSEMKQLNWRVIEDAESGPAPVKGGPVDCRALVVALGPMEIRTFLLKF

SEQ ID NO: 341758 - protein, 55 aa, Zea mays
  Clone ID: MRT4577_74851C.1.pep
IGMSIKLHQQNWHIKKAMKLCNILQLNTNLLNTPSIKRTPSRSEVRASVNYKQHY

SEQ ID NO: 341759 - protein, 84 aa, Zea mays
  Clone ID: MRT4577_74852C.1.pep
MGSKPGEAPTWADQWASGEGDGSSANGKAAGKRTVAGNVKAAASEGLVKAKAAALVGAHKLKTGTSSGIKWVREQYQKKRTSSK

SEQ ID NO: 341760 - protein, 124 aa, Zea mays
  Clone ID: MRT4577_74853C.1.pep
MNCSVDLPGNWSLLLFYLYRNSKRHVWKEEKKRAAALPIPMGSKPGEAPTWADQWASGEGDGSSANGKAAGKRTVAGNVKAAASEGLVKAKAAALVGAHKLKTGTSSGIKWVREQYQKKRTSSK

SEQ ID NO: 341761 - protein, 73 aa, Zea mays
  Clone ID: MRT4577_74854C.1.pep
LCLPYHRPIQQLTESKGRDLGMRLCNAETDSFKLPLFFSSFPSVDRQFGWLALLRSAPGISRRQTGVVSAHAS

SEQ ID NO: 341762 - protein, 52 aa, Zea mays
  Clone ID: MRT4577_74855C.1.pep
FSLTEDTDGAHLRGKKVSYRILGAFWENGRCISTCRKSEEHKEAKYFGYHCW

SEQ ID NO: 341763 - protein, 43 aa, Zea mays
  Clone ID: MRT4577_74856C.1.pep
TDLGCCLSFADNAGVIVNPKGEMKGMNCHNNSSSIGPILFGMA

SEQ ID NO: 341764 - protein, 38 aa, Zea mays
  Clone ID: MRT4577_74857C.1.pep
TESIRSVGGPCVNVTSGMTILKGTWQHRLESGQSGCWR

SEQ ID NO: 341765 - protein, 68 aa, Zea mays
  Clone ID: MRT4577_74858C.1.pep
SRAPGPGKEMRSSVNPRSCIYRVRLKSPLPVNSSQIGVALSPVAPVLSFTRVSSGLKRCLCFSRGAPD

SEQ ID NO: 341766 - protein, 71 aa, Zea mays
  Clone ID: MRT4577_74859C.1.pep
IPPGGFVGPPPFRVALFPWGVGLGLKLGPFGGGPFFSCGSLSLFFLRGCCVGCLSRRFRSFSRDQPVMLGG

SEQ ID NO: 341767 - protein, 52 aa, Zea mays
  unsure (1)..(52): unsure at all Xaa locations
  Clone ID: MRT4577_7485C.1.pep
TISIQNFFHSNPLKSLHXSFIYNQIIQKNMNILIKKKKKKXAPPTXSKLTTA

SEQ ID NO: 341768 - protein, 68 aa, Zea mays
  Clone ID: MRT4577_74860C.1.pep
LDVLIYFWTTHTCMHKHAWVGHKHEHRFGYLTIPERLKQRQGMSNKGIYFSSPAPFFLLPRAPPPAPP

SEQ ID NO: 341769 - protein, 112 aa, Zea mays
  Clone ID: MRT4577_74861C.1.pep
GSAVALVVVDFNISHRGADGEVEEEEGGGYLRRWSSGMQVQGSELPEAGRQLAERGLLVVPVVRCLWPRADGPSCYLELVGAQSDVVLPPLPAYSGSFAAIQRSSVELGEAS

SEQ ID NO: 341770 - protein, 69 aa, Zea mays
  Clone ID: MRT4577_74862C.1.pep
ADHDPDDRTALNADEPWPQDRLYDHAQHGPGHSNTSRPLLSADNQLPHGHRASHLRELVDGRNMMTYTD

SEQ ID NO: 341771 - protein, 95 aa, Zea mays
  Clone ID: MRT4577_74863C.1.pep
RAAVRSRRRRAPYVHRDVHSASTTAASPTASTRPASSDRPRRRPAALTTLVNLRPPPRANIQLSHAFSEATHAYRRWHTGAPPLDRWDQARSLYE

SEQ ID NO: 341772 - protein, 480 aa, Zea mays
  unsure (1)..(480): unsure at all Xaa locations
  Clone ID: MRT4577_74864C.1.pep
MASPAAATLHPSPTFLASGPRYRRRGHPSSKVSFRRLAPRLKVNALFGWPRGDTTARELIPPAESYTLSGSASEVGAKPREVSISVASSIMDIPAADWDACACDLDDPGNFNPFLTYAFLSSLEESGSAVKETGWLPFHIVARDENGHIIGVVPLYLKSHSTAXFVFDQSWAEAYYNYGLEYYPKLQSCVPFTPVTGQRILLRNTSYRDQVFDALVKGLMSLTTKMNVSSLHITFPSEGEFSKLKDSGLLQRIGLQYHWRNRNYKSFDEFLMDLKQPKRKNIRQERKKIPAQNLQMKRLRGDEIKSRHWDTFYKFYRNTTDNHWGRPYLTRDFFHLLGEKMGDNVMLIVAEKDDKLVAGALNLIGGDTLFGRLWGCLPDAYFPNLHFEACYYQAIEAAIELNLSKVEAGAQGEHKIQRGYLPVTTYSCHYFSNPGFAAAIGNYLTHETAQVKHAIKVLRDSGPYKEDILKEFAAQQDDDL

SEQ ID NO: 341773 - protein, 82 aa, Zea mays
  Clone ID: MRT4577_74865C.1.pep
SLKYPFKTLFVSLLTNLLPKSQKKFVLSSTQTIFVFNPKAALVKIIFSILVLKKKQHFSVQIHLQGIHHIVPFFQKKTSLWN

SEQ ID NO: 341774 - protein, 84 aa, Zea mays
  unsure (1)..(84): unsure at all Xaa locations
  Clone ID: MRT4577_74866C.1.pep
HASAESERCRSMRLLLXPXXXISSLLPXXLHLHHIIPCPPAVFTPDTQISLLYRPFLLILTQAPLSPKILPPIHLFXLPPFVLS

SEQ ID NO: 341775 - protein, 73 aa, Zea mays
  Clone ID: MRT4577_74867C.1.pep
EIIPWVKAPGEACAAKDGPGFQGFGGARFVPFWEFAGNFRVLVAPPAGGTPPPPPKRCAKCNENGLIMCPLCP

SEQ ID NO: 341776 - protein, 136 aa, Zea mays
  Clone ID: MRT4577_74868C.1.pep
PCSAHREGRKTLKELIAIGHSLVSPPWGCGHVKSVAKNETKKNRRLPRCPGQDGMGSDAGSQGGSESQRKSDGEQRERGRADDTRFDRRFVWSKSAETTMGMKTRRFSWRSSPCGSYHPREFWRHRVVCTVWSGGP

SEQ ID NO: 341777 - protein, 59 aa, Zea mays
  unsure (1)..(59): unsure at all Xaa locations
  Clone ID: MRT4577_74869C.1.pep
NGRGRSVNQWDGITTATIMVLNDTMTLLYRFCAVKTSNKPSSXDSLEPMNTALAVASFG

SEQ ID NO: 341778 - protein, 50 aa, Zea mays
  Clone ID: MRT4577_7486C.1.pep
ACFWLKVFRFTGPPEFPFKLYEFWGYGPLGVYYKVSVRTNLFAVLLNKNS

SEQ ID NO: 341779 - protein, 154 aa, Zea mays
  Clone ID: MRT4577_74870C.1.pep
NYSSSSAGRRTTTHRQNPSPDPVEEHYFLAWRAPLASDGGYFNAIMTFPQNYPNSPPSVRFTSGMWHPNVYPDGRVCISILHPPGEDPSGYELASERWTPVHTVESIVLSIISMLSSPNDESPANIEAAKDWREKRDEFKKKVRQCVRRSQEML

SEQ ID NO: 341780 - protein, 88 aa, Zea mays
  Clone ID: MRT4577_74871C.1.pep
APSSKEVKQVSTTSSADNKMAALYAYPKVQGLCYKCGMTYSRGHRCAETVQLQMVEELWQMVSLPETKMLSSSEANSSSQAVVKGIST

SEQ ID NO: 341781 - protein, 170 aa, Zea mays
  Clone ID: MRT4577_74872C.1.pep
SSSSAGRRTTTHRQNPSPDPVEEHYFLAWRAPLDDSNVFEWQVTIIGPPDTLYDGGYFNAIMTFPQNYPNSPPSVRFTSGMWHPNVYPDGRVCISILHPPGEDPSGYELASERWTPVHTVESIVLSIISMLSSPNDESPANIEAAKDWREKRDEFKKKVRQCVRRSQEML

SEQ ID NO: 341782 - protein, 74 aa, Zea mays
  Clone ID: MRT4577_74873C.1.pep
IPEFPFRLTFLNKKKKTRGGIISTGAAHNNNYLPSHSTHGLVTPLCRGHCQSYRPCAQCQEPSPFLGPARSSLG

SEQ ID NO: 341783 - protein, 68 aa, Zea mays
  Clone ID: MRT4577_74874C.1.pep
REFSTSPLEFVGSLIATLDHDSSSQASVFYHSESQRSTMRSSPCTTLNKIRQSHVMTRPSSKVIIIAP

SEQ ID NO: 341784 - protein, 110 aa, Zea mays
  Clone ID: MRT4577_74875C.1.pep
PDLAKNPVDGFSAGLVDDSNVFEWQVTIIGPPDTLYDGGYFNAIMTFPQNYPNSPPSVRFTSGMWHPNVYPDGRVCISILHPPGEDPSGYELASERWTPVHTVGLLVQGT

SEQ ID NO: 341785 - protein, 192 aa, Zea mays
  unsure (1)..(192): unsure at all Xaa locations
  Clone ID: MRT4577_74876C.1.pep
MAGTPSQASLLLQKQLKDLAKNPVDGFSAGLVDDSNVFEWQVTIIGPPDTLYDGGYFNAIMTFPQNYPNSPPSVRFTSGMWHPNVYPDGRVCISILHPPGEDPSGYELASERWTPVHTVXFLFRAHKCLLALFLCGGGSLLXESIVLSIISMLSSPNDESPANIEAAKDWREKRDEFKKKVRQCVRRSQEML

SEQ ID NO: 341786 - protein, 113 aa, Zea mays
  Clone ID: MRT4577_74877C.1.pep
CPMKHLIPSSYIIYTHSTHTRPAFIYHSSQAPSLPPTCIGFTSHIQKKGVSTAASLLRTTSDPSAGINGNRCLLSNQRHQLRQSYVHEHSSYSPLSSLCIPFRGWLGVYQRSR

SEQ ID NO: 341787 - protein, 146 aa, Zea mays
  Clone ID: MRT4577_74878C.1.pep
ILFSARGRQQEDEEELHLAPSCARAQLKNKPTDLEMLFAPTAAPPQVHKQPQKTGVAFQLASEPAVRKEDNSSQQLRENVKSSALEPTYMEESQAKRDDDETSDITYSRAVDEQADRMHNLKVSFPFALHGACILLFNVEAVKIFK

SEQ ID NO: 341788 - protein, 424 aa, Zea mays
  Clone ID: MRT4577_74879C.1.pep
MGKHEFLTPKAIANRIKAKGLQKLRWYCQMCQKQCRDENGFKCHCMSESHQRQMQVFGMAPDRVVEGFSEEFLESFLSLIRRAHRHSRVAATVVYNEYIADRHHVHMNSTRWATLTEFVKLLGREGYCKVEDTPKGWFMTYIDRDSEQAVKDRLKRKRIKSDMADDERQERMIARQIERAHKSLAKPNGGGAAEGEPESGSEGEYSGSDDDEQEPEDDSKEADKATGKIAIALQKAVPGPKVNPFDDKPKMKFGFDEEDGSGTRDQEKNELTKKMGKDVKAAEAKRSALDELMKEEEKAKERSNRKDYWLCPGIVVKVMSKSLAEKGYYKQKGVVKKVIDKYVGEIEMLESKHVLRVDQDELETVIPQIGGLVRIVNGAYRGSNARLLSVDTEKFCAKVQVEKGLYDGKVLRAVEYEDICKISS

SEQ ID NO: 341789 - protein, 60 aa, Zea mays
  Clone ID: MRT4577_7487C.1.pep
KKKKKKKKKKKKKKKKKKKKKKKKKKKKKKKKKKKFFPLAREPPLRANFWKIIHQTWGPV

SEQ ID NO: 341790 - protein, 153 aa, Zea mays
  Clone ID: MRT4577_74880C.1.pep
PDLAKNPVDGFSAGLVDDSNVFEWQVTIIGPPDTLYDGGYFNAIMTFPQNYPNSPPSVRFTSGMWHPNVYPDGRVCISILHPPGEDPSGYELASERWTPVHTVESIVLSIISMLSSPNDESPANIEAAKDWREKRDEFKKKVRQCVRRSQEML

SEQ ID NO: 341791 - protein, 1015 aa, Zea mays
  unsure (1)..(1015): unsure at all Xaa locations
  Clone ID: MRT4577_74881C.1.pep
GAKVEGESYXMPGYYATGDLNVEASGRWSPYYEEMTSNGQLCNGFATKPTSGYSEFDKEILKHQILEHEAVFRQQVXTLILRNKVHHIIIIFFLSYVFFPVKPHNPLAIQVYELHRVYKIQKDMMKQHQRKEVYSYPTLAGASHTNSPSQVPPNGAKMMWQMPVPPVSTTYRKAIGEHNDTNQSCMKFLREGSVQSSPNGFLSSDAAPRTRQGTFDLQLPADHYIDDDDTSDNKPIDFLGLASDAKPQNDAELTLVSAERLGKFSDNSSSSGLRTTNNLGSRQVTNLNESNTGFFMGRANGSVSRGLPHTLENSWHQPILRSSTTTFNFSKEYSKEKHTNEGTSSNFFDTSAKLTHDDKPTINKGKQVSSITFLAPRYNDADPPKYFKAADGRPASYNQFLYQGQNSSAGWIARSPLEPSVINNFARVDRPHHLNLGTFTAPVSIPQIDNPSIVSPMGSCTADPRSSVINNPALIPRFNGFSTVNSYTSLSAVTQSIGTSIPKLINVDNVDKRYPGFPLDSFSVSHSRHQVAISSNLEQKNSQKLEDSDQQSHGKGMKNFNLNETLSDCQEDGLVEQDGRCASSFQHDKDGGSVFGISWLKNKPMSADPTALEKAGKIFGHSFGTTMELKNAKDQNEPAVTIRNLSDSASTSLGCGIKKDGPSEDIATGTLLVCNKAQEDATCLPLSCQKHVPKDGQDADGVIKISGASIRNFIDLNDAVPNDDNSEESVVSHECQAEPSRNNHPKRAFVIDLEVPACEEDAAWDFDQECAQPKPDAHQEVDGRSDTSALAAAENIVALSRIIPTALEASDDMLQWFADLAVLNIKDLAEQAELQACTNDSSNDESDSFESLTLKLEETKIDEYWSRPLEPEITTDEQLISTAHLLTKPRRGQQRRRRQKRDFQKDILPGLSSLSRPEIIEDVQLLEGLVQASGGSWESSLTRRGRYGGRTRGRKPRKTVVTVIVEEEVEVSPPPKPVGTGDLEADDRGMVGWGRTTRRCRRARCPSGNNLAAAS

SEQ ID NO: 341792 - protein, 169 aa, Zea mays
  Clone ID: MRT4577_74882C.1.pep
MASTTSQASLLLQKQLKDLAKNPVDGFSAGLVDDSNVFEWQVTIIGPPDTLYDGGYFNAIMTFPQNYPNSPPSVRFTSEMWHPNVYPDGRVCISILHPPGEDPNGYELASERWTPVHTVESIVLSIISMLSSPNDESPANIEAAKDWREKRDEFKKKVRQCVRRSQEML

SEQ ID NO: 341793 - protein, 183 aa, Zea mays
  Clone ID: MRT4577_74883C.1.pep
MAGTPSQASLLLQKQLKDLAKNPVDGFSAGLVDDSNVFEWQVTIIGPPDTLYDGGYFNAIMTFPQNYPNSPPSVRFTSGMWHPNVYPDGRVCISILHPPGEDPSGYELASERWTPVHTVESIVLSIISMLSSPNDESPANIEAAMPLVSEVIHDFALQKDWREKRDEFKKKVRQCVRRSQEML

SEQ ID NO: 341794 - protein, 130 aa, Zea mays
  Clone ID: MRT4577_74884C.1.pep
GKPPFFGNREKVPPKVFKGHLRLPSFLFSEAPSLLRGLFPKEPPKGVGNFPGGTPGIKNPQWFHPLPWRKLGARQIHPSFWPKVPGVSCFSNFSECWAKTPLLGFPVSPPPGGGASNFSGFSFVRAAPIL

SEQ ID NO: 341795 - protein, 89 aa, Zea mays
  unsure (1)..(89): unsure at all Xaa locations
  Clone ID: MRT4577_74885C.1.pep
SPLWPRRLSCSCLLPSLSAXAFRPPVXXSCXLXXFLSXAFFFSALVRLFAXAXXAXXLWPXGARALSRGRSXSPPAPPAFXGXEXRLAA

SEQ ID NO: 341796 - protein, 58 aa, Zea mays
  Clone ID: MRT4577_74886C.1.pep
PVQRSLSKVWRTSRSMCAALAKAFESSSVLVASFWSVVGCAPTDATYASRFGQVSSLL

SEQ ID NO: 341797 - protein, 61 aa, Zea mays
  Clone ID: MRT4577_74887C.1.pep
VIKSKFQTCLWLRKNSCPIQTKIYSVCCHTRPGGENKKRPLLSLRVLKIKNLWIKPKCKWG

SEQ ID NO: 341798 - protein, 59 aa, Zea mays
  Clone ID: MRT4577_74888C.1.pep
IRIEVLCFVVRRFIISVDTILDLVDFTRYFSSNKDLFKKVPIIKRKGVRKFKKLDRQRN

SEQ ID NO: 341799 - protein, 90 aa, Zea mays
  unsure (1)..(90): unsure at all Xaa locations
  Clone ID: MRT4577_74889C.1.pep
MPINRIALRSHQYVFHSCALKAAFAEFICTLIFRFAGQGSGMVFTKLTGGGPTTPAGLIAAAVAHAFALFXVAVSVGANISGGHVNPAVT

SEQ ID NO: 341800 - protein, 51 aa, Zea mays
  Clone ID: MRT4577_7488C.1.pep
RTQAVLLIQLATTFVHMIWAMVLLRIHYWCLYHTTDEATRLCSIDYITPGD

SEQ ID NO: 341801 - protein, 49 aa, Zea mays
  Clone ID: MRT4577_74890C.1.pep
PPSLSVLLLSLTPALVVLSLVSSSMLRPRDQAPPAFILGAKQITACSNK

SEQ ID NO: 341802 - protein, 196 aa, Zea mays
  Clone ID: MRT4577_74891C.1.pep
PAGPGADSLSFSASAVELAEIGITFRANETAELVDMGLKKDVLFAELSLAPLSLNHARASRLVNMAAFEICTVPSFIDAQVEDSAVCSYLLLLCMLVHREEDVHELRRQGILQGGAGLTDKQALKFFTSLQSLPDGQCCTRTRIEIENYRFHKKMQTKVYKKRKTIFKVLSITVATITIFGTLLSISAQLSNVSKG

SEQ ID NO: 341803 - protein, 97 aa, Zea mays
  Clone ID: MRT4577_74892C.1.pep
GGWGYLQINFFFTKFAFALCSFLLLMLLHTYVFTHTALLVWEPPKNEEAWGGTKKPPPSPGKNKKEAGFFFKKKGTPTMVIFSGGRNKENCYTGGDE

SEQ ID NO: 341804 - protein, 147 aa, Zea mays
  Clone ID: MRT4577_74893C.1.pep
VPVRNSRVDPRVRVKVTGKAVMLDEIINYVQSLQCQVEFLSMKLSTVDPRRELDVGCFVVPRDDVTMQANRLCAPATSSSSTAFCYAARSVVTNAKGFETPVPLANHGVAADDRPLERRTRDAGPQAGSLWEEDDLQSLVLMGFRGR

SEQ ID NO: 341805 - protein, 180 aa, Zea mays
  unsure (1)..(180): unsure at all Xaa locations
  Clone ID: MRT4577_74894C.1.pep
LVVLKTVAICDYVARVVPAKYVMKCDDDTFVGPDVRPPDXRKSQIGKSFYLGNMNYYHRPLREGKWAVSYEEWPREEYPPYADGAGYVVSSDIANFVASEMENGRLNLFKMEDVSMGMWVGQFNFNRSGPGSAVAYVHSAGFCQSGCVAGYLTAHYQSPAQMVCLWEKLRRGVAQCCNAR

SEQ ID NO: 341806 - protein, 54 aa, Zea mays
  Clone ID: MRT4577_74895C.1.pep
TRAKRVCLLPRQFLSMKLSTVDPRRELDVGCFVVPRDDVTMQATGCARPDVSSS

SEQ ID NO: 341807 - protein, 191 aa, Zea mays
  unsure (1)..(191): unsure at all Xaa locations
  Clone ID: MRT4577_74896C.1.pep
DGTGDRTGSLLDVISEFLGSXDTCQLISSSAVHPNNCNRGEVRSREASLQQRLLNPPACFCPARTNRGPFDWELQKQTIPRVIIGDKDHTSEIFLKTITXTTLPGHGTIDFSXNSWIYPXSKDRYKRVFFSNDTYLPSQMTWTLKTYRDDKLRNLRGDDRQVPYQEHDRVXRYDGYYDLGLPDRXNPRLVL

SEQ ID NO: 341808 - protein, 208 aa, Zea mays
  Clone ID: MRT4577_74897C.1.pep
MASPAARAASALLLLLALAVAGVLSDGSDHRYKLGDPVPLYANKVGPFHNPSETYRYFDLPFCSPEKVKEKSEALGEVLNGDRLVDAPYKLDFRTDHDSKAVCPKKLTKEDVAKFRNAVAKDYYFQMYYDDLPLWGFIGKVEKGGKPDPSEWKYYLYRHIIFDILYNNDRVIEINVHTDQSALVDLTEDKEVNVDFPYTVKWKETPTP

SEQ ID NO: 341809 - protein, 96 aa, Zea mays
  Clone ID: MRT4577_74898C.1.pep
KEQGGGKCTEACLVLLVNQALLRRYPNKSSCLPDVLQVVVVKSLLLQLLLPPRFPKRAVHGEVLHGGIRNRAEWICGLCEFSGEIKSIAQVLVCVM

SEQ ID NO: 341810 - protein, 95 aa, Zea mays
  unsure (1)..(95): unsure at all Xaa locations
  Clone ID: MRT4577_74899C.1.pep
PTRPPTRPPTRPPTRPPTRPLSGPVRDLSKLPKCNYDDCNTGYDLGEXTDXVILYIQAIFNDPFRMFNNMLEMCDCYTRSNEPDHSNNMYNAVKI

SEQ ID NO: 341811 - protein, 102 aa, Zea mays
  unsure (1)..(102): unsure at all Xaa locations
  Clone ID: MRT4577_7489C.1.pep
RLRCSGSWVPLPARGVCALRGARRGAPLAAPWAGPVLCRSSRGRCCCRPSFPPPGRLVLRLGPSRRWPLWLRLSFGRLRPPGCLRPFGVAAPPVRAALSVXY

SEQ ID NO: 341812 - protein, 185 aa, Zea mays
  unsure (1)..(185): unsure at all Xaa locations
  Clone ID: MRT4577_748C.1.pep
MVTAVLVPTDGNTTQVDRSRTSLRKPKKGIGTEHAPASPXVSIEWQYATTMSGYRIPDRXSRKLMNLLLLGAISXPTESMAVPYXAILVTDDYVNDYRITYAYDKPYNDMTGEVRFNTYRLNDTTLAQTLQDNPTPLXWLQDKTLDTYSIYSLCTHLGCVMARNXATKTNTSCPCXHKSPYNHHC

SEQ ID NO: 341813 - protein, 69 aa, Zea mays
  Clone ID: MRT4577_74900C.1.pep
PGVKKVVTKPVVVGFGISNPEPVKQIAPWGPSGVILGSPMVRHLGETAFSKQGLRRLEEFSRGMKNALP

SEQ ID NO: 341814 - protein, 139 aa, Zea mays
  Clone ID: MRT4577_74901C.1.pep
PAFFYFFFDQFWKKSSANAKRGLPKRGPGQNVLRWLRHKKKVGANITLNLEPTTGAVTNPHGLKLGPVHLSETLGCGFKKQLLVLKKNSGRQLHVFGQEGDSQGTVGTQVVVPLQEPEVAYRGLLEGTQACLLNTKSGS

SEQ ID NO: 341815 - protein, 45 aa, Zea mays
  Clone ID: MRT4577_74902C.1.pep
GAPIRAIKGALEGNGDHPAQINARVGYFKQDCQQVRVDPGAHPPC

SEQ ID NO: 341816 - protein, 109 aa, Zea mays
  Clone ID: MRT4577_74903C.1.pep
DCQVCVVGLFLSSPPPPAIIYRTNIYTHNTILDNFLAAPAPWRSGRRRLVAVRAGAVVQRASEESSAVDSRSRTPDAQNLGEGSAAVLRRRRAGPPERDVLRTRGRTRG

SEQ ID NO: 341817 - protein, 389 aa, Zea mays
  Clone ID: MRT4577_74904C.1.pep
MSSSARFDLRASSHQLQPPPSHASMSSDGGAFANAENLEHCARYLNQTLVTFGFPASLDLFATDPVSIARTCNCIYALLQQRQRDIEFRESTNDQRQRMQSDISRLEAKIERMDAQLAAKDRELATLTRTEAKNTAALKSQIDKLQQERDEFQKMVIGNQQVRTQQIHEMKKKEKEYIKLQEKLNQVLMEKKKESSRSGMEIMNLLQKEGRQRGTWNGKKNDNDYYKMIVDAYEVKKQELMQENADLRALLRSMQMDMRDFLNAPNGSSQSTVTDNGRQESGSPQSPLGGKTDVFDLPFHMARDQIEESLRTKMTSIKARMTQLQDAQKGAEVTSEATDRELELEAQLVEARSIIQEQACIMSKHFKSDKPSGRRHSGLDGEREASAEV

SEQ ID NO: 341818 - protein, 123 aa, Zea mays
  unsure (1)..(123): unsure at all Xaa locations
  Clone ID: MRT4577_74905C.1.pep
KKAKAWCAXKGTSRPFKRFLXDGTNVENAFPCFVKNAFKNXPEEKLFFPHPVDLVGGTRAPRLFGCCLNIRHPPGVVFFFGFAVVQPSPLYLFGPPWFFTGPFSLCFLSRFLLWAFPLLSGHP

SEQ ID NO: 341819 - protein, 69 aa, Zea mays
  Clone ID: MRT4577_74906C.1.pep
SAFTHDEADDSRRDRHWAFDLVGPGCVDPYVMDVWVWFLNIFWRNGCKDFGYVTLVLPCSPRNTYVGQW

SEQ ID NO: 341820 - protein, 136 aa, Zea mays
  unsure (1)..(136): unsure at all Xaa locations
  Clone ID: MRT4577_74907C.1.pep
PPGGEKRRRYRRRHEPARANPGPRSHRLXPNEGSGTRHHLLASCAQSRTRRWNGRSTGRGARVSSPRGVQTASPSDTPHPGLXPSGFTSGADTSEXNLKGACTDHAKGESSWDHFGHNHPGRSCYRSRSDIAATSH

SEQ ID NO: 341821 - protein, 86 aa, Zea mays
  Clone ID: MRT4577_74908C.1.pep
RVQLLVKFLSQPGLDALNFKVEFYGKLAQHVRLPVPKGCTDPKAGIYVPTDRKKGDTCVYQWDGCPSNLYAPPLRLKQNTNKKRRK

SEQ ID NO: 341822 - protein, 101 aa, Zea mays
  Clone ID: MRT4577_74909C.1.pep
MVFGRSKSTSSTTPSAPSKAAAACSELRTAYHDCFNRWYAEKFAKGQWQRDDCADHWHKYRACLEEHLEDKHLRQILLDAETSAFYAMPEANPPSGQGTTK

SEQ ID NO: 341823 - protein, 76 aa, Zea mays
  Clone ID: MRT4577_7490C.1.pep
KIKGKLGGKKKKLGEKGTEKGESQLKIRRGKIWKKKKGGGLLNKNQIGKKGNFSKGKKVGKTKVFQVKMFKTKAKK

SEQ ID NO: 341824 - protein, 73 aa, Zea mays
  Clone ID: MRT4577_74910C.1.pep
KKKKKKKKKKKKKKKKKKKKKKKKKKPKKKKKKKVSLGPGTTLRGEILENSHHPGGPVKPCIKGAKFPLKGAE

SEQ ID NO: 341825 - protein, 81 aa, Zea mays
  Clone ID: MRT4577_74911C.1.pep
HLALNFYNFFCFMVTFTNFCNIFRCPPISIFSDVHQAFSFLGGNGWSSATINTRCSKERYCCVNILGIPSIFFVMSLSNIC

SEQ ID NO: 341826 - protein, 77 aa, Zea mays
  Clone ID: MRT4577_74912C.1.pep
FERDLSAVRGEGQYRGPIQIQSNALAALEAIDMSVAEEVMRVGCVTGDRINGLVDGMSGSWYIKFDTFTPAAERGLP

SEQ ID NO: 341827 - protein, 288 aa, Zea mays
  unsure (1)..(288): unsure at all Xaa locations
  Clone ID: MRT4577_74913C.1.pep
RPAGPGSPETGKGVGQLAGILHDFLEKTNDMVNGTDDSILYTLPQEELFELFLTLSGQLSLLWNAFLKFHRLNKTKILEYLHDAWAIGRKAEWSIWTIHSKIEIPHRYLQSMSDDSPHRYSLRVSGSRKFHDDHVQNSASRAELHRKSIAQMKINPHYVQDMHIYGDPSRVPVVLIEQHVMVVPQHSSSKDMASNVSEQKDTIVVPKLQGEPLVPKSSAGKKSGRILRAVIFVHGFQGHHLDLRLVRNQWLLLHPGADCLMSEANEHKTXGDFKEMGTRWAGEELPFL

SEQ ID NO: 341828 - protein, 273 aa, Zea mays
  unsure (1)..(273): unsure at all Xaa locations
  Clone ID: MRT4577_74914C.1.pep
IGYLEAGRGESLLRSAQATMAEDATSSHPSRYVKLTKDQDAPAEDIRPGELNQPVHVPQLEGRRCSECGQVLPESYEPPADEPWTTGIFGCTDDPETCXNLVSLLDWXGHGGLLILLATTHADSKYSFSPKCLIKCLLCLALVXLPVNICMESLGRTGLFCPCVLFGRNVEAVREDIPWATPCVCHAVFVEGGITLAILTAIFHGVDPRTSFLIGEGLVFSWWLCATYTGIFRQGLQRKYHLKVANSTQLNSPLFPLLLIKSELTLVWPELSV

SEQ ID NO: 341829 - protein, 284 aa, Zea mays
  unsure (1)..(284): unsure at all Xaa locations
  Clone ID: MRT4577_74915C.1.pep
ADGGKAGVGSRGEQRDLILRSAQATMAEDATSSHPSRYVKLTKDQDAPAEDIRPGELNQPVHVPQVSLSFFLRVGYVSLVLXSDGSGSHPYSPARQQLEGRRCSECGQVLPESYEPPADEPWTTGIFGCTDDPETCXNLVSLLDWXGLILLATTHADSKYSFSPKCLIKCLLCLAPVXLPVNICMESLGRTGLFCPCVLFGRNVEAVREDIPWTTPCVCHAVFVEGGITLAILTAIFHGVDPRTSFLIGEGLVFSWWLCATYTGIFXQGLQRXYHLKVANSLNS

SEQ ID NO: 341830 - protein, 48 aa, Zea mays
  Clone ID: MRT4577_74916C.1.pep
PASAHAFRKKKKKKKKKKKKKKKKKKKKKKKKKKKKKKKKKKKKGGPF

SEQ ID NO: 341831 - protein, 46 aa, Zea mays
  Clone ID: MRT4577_74917C.1.pep
RLALLRSNRTWSSQDTLKYKRTRLNCTIRESQLQTSANPSSEPLSP

SEQ ID NO: 341832 - protein, 78 aa, Zea mays
  Clone ID: MRT4577_74918C.1.pep
KAFLFFPKKTFFPPKKMTPNQINGDTRNSWAKPLSPSWYPTPIQWDPPPNFSQSIPKLKLSVKPKKLSLAQDLHEKPP

SEQ ID NO: 341833 - protein, 223 aa, Zea mays
  unsure (1)..(223): unsure at all Xaa locations
  Clone ID: MRT4577_74919C.1.pep
MPSLNALLSASLAFASIALGAPAVQDKHFSVEQVKNPQFVKNGPLALAHVYAKYGVPLPKGLEKAVQKVKSSHTKRQNGSGSVITTPQDEDIEWLTPVQIGTPAQTLNLDFDTGSSDLWVFSTETSGSSGHDEYNPARSSTSKKLSGATWSISYGDGSTSSGDVYKDKVSVGGLXVSSQAVESAQRVSDQFEQETGLDGXLGLXFSSINTVTPTQQNTFFDNA

SEQ ID NO: 341834 - protein, 63 aa, Zea mays
  unsure (1)..(63): unsure at all Xaa locations
  Clone ID: MRT4577_7491C.1.pep
LLTXGRXFVCRVWDRGRSTCFCFNRGGQHCLXSXRXDLRGRRLGPGPGACGAAARGPSVFHTA

SEQ ID NO: 341835 - protein, 74 aa, Zea mays
  unsure (1)..(74): unsure at all Xaa locations
  Clone ID: MRT4577_74920C.1.pep
FQXTHFKTTXXHRXNSYXTSTLSDXXCWAAGARHETGRGRPPSPKPXAPPRLXKWQXXMTLSPPDGRGVAPGXF

SEQ ID NO: 341836 - protein, 124 aa, Zea mays
  Clone ID: MRT4577_74921C.1.pep
GGFWGVPIDAGYQYGVVGQPSRKFLWFLCGQPPMDGSVFKELVGGAKEEGFHVLKFPKRGPPDPPPEREQSPRGGGMWGVKSLFGKNPFGGGGQPGFFRSEQGGAPKKCLCPSVPGGPSALTGG

SEQ ID NO: 341837 - protein, 383 aa, Zea mays
  unsure (1)..(383): unsure at all Xaa locations
  Clone ID: MRT4577_74922C.1.pep
MAAGRAFLGAPCSSLAAGARCLAFASPLPRNLTPALRCGVRGRCIASASSSPDSPPLPEPYVLTTPLYYVNAPPHMGSAYTTIAADAIARFQRLLEKNVIFITGTDEHGEKISASAEASGRNPKEHCDAISSSYRTLWADLDIEYDKFIRTTDRKHEAVVNEFYSRVLNNGDIYRADYEGLYCVSCEEYKDEKELLENNCCPVHLKPCVERKEDNYFFALSKYQHKLEELLTRNPDFVRPSYRLNEVQGWIKSGLRDFSISRASVEWGIPVPNDTKQTIYVWFDALLGYISALLDDGEQASLQQAVDHGWPASLHLIGKDILRFHAVYWPAMLMSAGLSVPDTVSGHGFLTKDGMKMGKSLGNXTLXPKDLVERFGADAARDF

SEQ ID NO: 341838 - protein, 84 aa, Zea mays
  Clone ID: MRT4577_74923C.1.pep
YLLFYTCMHPWFHMYKAKNVSDNLKQRHDPGFPKKKDPTNLWGRPKKSPKGAKTKMPTPEQIFLKKTGKLLTQKNPPKKSHPGP

SEQ ID NO: 341839 - protein, 311 aa, Zea mays
  Clone ID: MRT4577_74924C.1.pep
MAQGNGGGAPTPLPQLGARATATLSLPQRQATTASTADLTPNHPTSIEDGAGGSSSFTPTPSASPTVVGSSSDTGNKRGRKTTSDVWNDFEQLYKQVNGKKVRYAAKCHYCKSQLTAKGGTGHLHRHRIACASKADRASRPQSLLQFNGDGSVRSWDYNAATARTEMCRLIATLDLPLGFGGHPAFERYIRRSHNPRFRSVCRQTTTRDLVKFFKQRRTVLIDLLQSSVSSVALTSDIWSGNAKEDYISVVAHFVNVDWLLEKRVIGMRLIDVSHSGSNIAERVATVVEEFKLIDKVFYSCILTPRFSGYV

SEQ ID NO: 341840 - protein, 71 aa, Zea mays
  Clone ID: MRT4577_74925C.1.pep
PADHASAHASAHASENILFKKKKKKKRGKLNIRVAVLKDGGLLSRIIPFNLLYVTSHKFYCVAEILQNSDR

SEQ ID NO: 341841 - protein, 51 aa, Zea mays
  Clone ID: MRT4577_74926C.1.pep
DNQCPAKDFRTRGRTRGVVELFLRYDCFDVQVGASALGSSVTITSLKKATF

SEQ ID NO: 341842 - protein, 94 aa, Zea mays
  unsure (1)..(94): unsure at all Xaa locations
  Clone ID: MRT4577_74927C.1.pep
SVFVGDDARRLDVSRWLWSVAGGLLVGFGGECSGIRLGVGSVLCVCGASGWIGGCSPLGAGGLAPAGRXXXGGXGCPLHLFGSPPRGDGQSGGR

SEQ ID NO: 341843 - protein, 90 aa, Zea mays
  unsure (1)..(90): unsure at all Xaa locations
  Clone ID: MRT4577_74928C.1.pep
GGXKRRAHXKAGTXGXRGCYSRSTVSKRLLHTTKPKASKNQSLGKPRDADIRRMPTHRGDSPEQRSNHGQGRKQERADQHTRKRTDRKGK

SEQ ID NO: 341844 - protein, 60 aa, Zea mays
  Clone ID: MRT4577_74929C.1.pep
RRTLPPFPCIPGQPRPPWLLRCPPAPAECYIAVSGLMPCADLLTHIGLSPVPLTSACCDG

SEQ ID NO: 341845 - protein, 107 aa, Zea mays
  Clone ID: MRT4577_7492C.1.pep
SCGEVSLWFHAVAGRPYLRRASRRDSSANRVLPPRVNLYWDGRSNSIPLRPERFTKELMKFMKINPPSTRGEYESWRNCHLAPDLLRNIVPSPGPLRNSELIKKIGF

SEQ ID NO: 341846 - protein, 56 aa, Zea mays
  Clone ID: MRT4577_74930C.1.pep
LLLFAHDKDNSTQKKNLESFTCKSVDKSVIAHQCDRGQCRLCRVHDMREENPDPAG

SEQ ID NO: 341847 - protein, 186 aa, Zea mays
  unsure (1)..(186): unsure at all Xaa locations
  Clone ID: MRT4577_74931C.1.pep
AQRTXXRAFCXGAXGGAARXXXAXGRGRRGAAGRRRPXGGRPKRAPEQRGXAPPRGTGREAPRXAPXQGGGRGPXXXEADRAAXDGDRDQRERRPTPEGARSPGAPFFXAGDSXGVGYGSYPVSLVGDYILLGFAEAPGSVGSPCFPLWSSVVGAGPICPLGGRLLFICPPAGTPRLLPLGRVAWG

SEQ ID NO: 341848 - protein, 177 aa, Zea mays
  unsure (1)..(177): unsure at all Xaa locations
  Clone ID: MRT4577_74932C.1.pep
MSFGRAASKPAERAYHSRPTEQPPLALNTQRGFSQAAIRKSDAHAEETLEEFTRGYEKEFEKSNDGFELQRDLNDCFAYDLDHLTTVITDALRAVGRDIEFPSAVRVFXEGIPFQVENKVQYAENLQERETIHEELGIPLTEGMYPDEKQRKRVRLRISDFPMLLLHILTSNTVARI

SEQ ID NO: 341849 - protein, 387 aa, Zea mays
  Clone ID: MRT4577_74933C.1.pep
MAHLISSAIAGAGNLVADGISGVTGVASQVVEGVEDTLGSIVEAIDQGVKDEDQLDLPKYVCFKGDNGLYLSARTVEGHPYLQFASEDIGDPSVRFITYNHKVNGKRVVRFKSNHLGKFWRRSPNWIWADTDDTSTNNSDTLFEVIKIDEDGVYALRNLGNNHFCHRLTYDGKESCLNATIPTIRKEAHIKIEEAVLSRKISNIEYHLKGAKIFDKKAKTLITREAVNGTSTDSKTTITLKYSVIKGKLWDSSKSMKLGVTTTIEAGVPVVLPATIDRNHESSARSSPPAAEGSPASTKRGGSPYQASSCSCRRTLSDLGPERVQLHLQLGRVHHRERRVLQRLRGRCACILRRHGQRARYTGHLPSPLLLYSGGRFDYRREEGFQV

SEQ ID NO: 341850 - protein, 111 aa, Zea mays
  Clone ID: MRT4577_74934C.1.pep
MMVVLVALARLGLAASATYTHTSGGCGCQPPSSVHLPPSVHLPPAVHLPPTVHLPPPVHLPPPYHLPTTVHVPPTAHVSSPPCRYPTQPARTQANISHTHARANCLMQARA

SEQ ID NO: 341851 - protein, 131 aa, Zea mays
  unsure (1)..(131): unsure at all Xaa locations
  Clone ID: MRT4577_74935C.1.pep
RVLPLRWPSAPGLLLAVVAVSAVWFASSFPWRSGIGAGLAWAGFLSVGVVFGAAPVSLPGCAGAGPRSVRGAGAFGRVALGASVLRAARRWCPCPALGXGGGVRLAGPCPRWRRVAVSENARLRLAAALVA

SEQ ID NO: 341852 - protein, 75 aa, Zea mays
  Clone ID: MRT4577_74936C.1.pep
IKNFQKFESNVFYLNISLFFSHPFGKKESVFLKKNGRSLEVSPPYFHFLPQGRFVKISGPVCSWKACFVSFSKQL

SEQ ID NO: 341853 - protein, 74 aa, Zea mays
  unsure (1)..(74): unsure at all Xaa locations
  Clone ID: MRT4577_74937C.1.pep
XHSLNKDAKALCFAVLIVMAVIFSSCEAGGNRCHAFPGCDSILCWAEGDRLGYSNPKPRCLYPKPNHDGDECCC

SEQ ID NO: 341854 - protein, 34 aa, Zea mays
  Clone ID: MRT4577_74938C.1.pep
TRVRMTPGLLLAHPLHHLRVGTSVQDDSRSGHEQ

SEQ ID NO: 341855 - protein, 105 aa, Zea mays
  Clone ID: MRT4577_74939C.1.pep
MSAAWEGGKEKGAATPAPGGACELCGAMARVYCGADEATLCWGCDAQVHGANFLVARHARALLCRGCARPTSWRAAGPRLGPSASLCDRCVRRSGAVGTGGDVEM

SEQ ID NO: 341856 - protein, 88 aa, Zea mays
  Clone ID: MRT4577_7493C.1.pep
QHEISASSSREKKHDTDIFNRSEDREEVIMACYACLAPCTPPTASNHATGWLHVWHTGSQAHTTRADRSTKPASLILLSWRPTVDEDE

SEQ ID NO: 341857 - protein, 143 aa, Zea mays
  Clone ID: MRT4577_74940C.1.pep
TPGAKTPLFFPGVKKKFGGPKEAFSQPPKGKQNRLKIAFPLFYPDLHPFQFFKVQGAKGPFLKKFFLPTGKAPDPPSFFAKPPPPMQTPPNFPLVRDRSPFFRLDLFSQLKTSLFPPVQRGAIPLSLFCQGPPLEPRPPPFFF

SEQ ID NO: 341858 - protein, 605 aa, Zea mays
  Clone ID: MRT4577_74941C.1.pep
MARPLLLQNPRIPWAPEQERAMQRAIRIAAAATRRALSSSAARASPPPPRGPLAPGWGATRWLCSGREALSYDVVIVGAGPAGLAAAIRLKQLCRAADTDLSVCVLEKGSEVGAHVLSGNVFEPRALDELIPKWRQEDSPIRVPVSSDKFWLLTKNQAWTLPSPFDNKGNYVISLSQLVRWMATKAEELGVEVYPGFAASEILYDENQIVTGVATNDVGIAKDGTKRETFQPGVELRGRITLLAEGCRGSLSEKIIRNHKLRERGQGQHQTYALGIKEVWEIEEGKHNPGSVIHTVGWPLDTKTYGGSFLYHLDDRQLAIGLVVALNYRNPFLSPYDEFQKFKQHPAVRKLLEGGTAIQYGARTLNEGGFQSIPYPIFPGGAIIGCSAGFLNVPKIKGTHTAMKSGMLAAEATFKSLVEGSSMELYWENLKKSWIWEELHKARNYRPAFEYGLIPGMVLSALERYIFKGKSPYTLKHGRPDHEATDTANLHAPIQYPKPDGHITFDVPTSLYRSNTNHEHDQPPHLRLRDPTVPERVNVALYAAPESRYCPARVYEYISDEKGDPKLHINAQNCLHCKACDIKDPKQNIEWTVPEGGGGPGYTVM

SEQ ID NO: 341859 - protein, 161 aa, Zea mays
  unsure (1)..(161): unsure at all Xaa locations
  Clone ID: MRT4577_74942C.1.pep
TLLQPVYGSLESIYQNIFSICISLHPSFLWEWGNTNHEHDQPPHLRLRDPTVPERVNVALYAAPESRYCPARVYEYVXSHSLLNSRCSLHASMTQSFSGQEFSDHYCVCFHVDXSDEKGDPKLHINAQNCLHCKACDIKDPKQNIEWTVPEGGGGPGYTVM

SEQ ID NO: 341860 - protein, 109 aa, Zea mays
  unsure (1)..(109): unsure at all Xaa locations
  Clone ID: MRT4577_74943C.1.pep
SLNQAWTLPSAFDNKGNYVISLSQLVRWMATKAEELGVEVYPGFAASEVSSLFILXPLCGRTNISLNSSLTDXYDENQIVTGVASNDVGIAKDGAKRESFHPGVELRGM

SEQ ID NO: 341861 - protein, 47 aa, Zea mays
  Clone ID: MRT4577_74944C.1.pep
HVIRFIIAPLVPVIASELIQAHSLSVATISPSSSRGRMPITEGLEDT

SEQ ID NO: 341862 - protein, 94 aa, Zea mays
  Clone ID: MRT4577_74945C.1.pep
TPEHIKLPNPGAGGTFLRGSFYPPNFFGESSFGQHLKINLFSLQWVKTWANKGAKTFYFYMTPPLGNLVGPPGPKFFNKKQGFLVNSLSSEHFL

SEQ ID NO: 341863 - protein, 110 aa, Zea mays
  unsure (1)..(110): unsure at all Xaa locations
  Clone ID: MRT4577_74946C.1.pep
SRADAEGGEIAGKDYTDPPPWPLINASGIRTWSCDTASRILQFIVTLLFLYITADTXIGYKHKTDPALPQADPACLGVGVVGIPCGFDEMIFDLGYCTGGISGGHITHGT

SEQ ID NO: 341864 - protein, 45 aa, Zea mays
  Clone ID: MRT4577_74947C.1.pep
INSTSIAHSPTPSPNGLEYFSHAPIGFVHIVGWIKKSPPPNLEPN

SEQ ID NO: 341865 - protein, 175 aa, Zea mays
  Clone ID: MRT4577_74948C.1.pep
SPHFVYGLQSSRQSRRSTREEQRRRRIESSRQQQLPMLLLRGHRPPRSSCVSWRCSWARDSSSASVWPATRGEPKGPGSNPDWRWTDWQLHQGGDPPLLPDVDSTRSNPLSSSSSPLSTEAPPPRLRTPEASCRLRASRILDQLDRSPRDSNQAVMRVGGWLLLFCDFCSECSPF

SEQ ID NO: 341866 - protein, 169 aa, Zea mays
  Clone ID: MRT4577_74949C.1.pep
MMSRERKKAAAALQEKLKILRSITHSHALSNTSIIMDASAYIKQLQQKVVRLNQEIACAQDALRHKSSSYPTVSVETLGVQGFLVNVFSDKSCPGLLVSVLEAFDELGLSVLQATASCAADSFRLEAVGGENVVDNVDEHVVSRHTRTRLYLHCIGRPLMCQRAQLDRV

SEQ ID NO: 341867 - protein, 276 aa, Zea mays
  unsure (1)..(276): unsure at all Xaa locations
  Clone ID: MRT4577_7494C.1.pep
LEAAGARQRRATGVALSLRPSTATCAVLPPPTCASRRFPLRSFIGLRWSAPRFQVRERACASVAVVNGKPGCSFRLGVPTLNVCQSRQRSVVIRNEHAQNADLPRKYSKREKKPFPIPVLELRRRAKERMKAAQGKPKQPMPPPKNGMYCSEIHVGSVGHPFRTCRGMSSDQRRGEHDWGSTLVEAVFLPVEAYHLEDRLGNRIPHDQRFTVPRIPALVELCIQAGVDLPEYPXKRRRKPIIKIXRKEFVDANEDDLPEPEPDRFRQPLLEELRYD

SEQ ID NO: 341868 - protein, 90 aa, Zea mays
  unsure (1)..(90): unsure at all Xaa locations
  Clone ID: MRT4577_74950C.1.pep
GLGLMVKSIEWDQRLVERAQRLDQELLQALEKEEKRNPQVVQTSPRHXPHHVVRWVDPTALCEELLLPLENPCQGRARLLLTGLHACGDL

SEQ ID NO: 341869 - protein, 112 aa, Zea mays
  unsure (1)..(112): unsure at all Xaa locations
  Clone ID: MRT4577_74951C.1.pep
YLVPVSRTIVREPAVALPEAADIYYSSIFSVLPMEACHLLGTDACSAHMDPETMLASAAAMASKRLLEVDKDYLSYDEPRTAFPGEAXCDDLDNEFCYAPYHAGDSNELAHA

SEQ ID NO: 341870 - protein, 189 aa, Zea mays
  unsure (1)..(189): unsure at all Xaa locations
  Clone ID: MRT4577_74952C.1.pep
MSSQVSTSHGLHPPGKLGTFESPHAWPLSAPTAQPEAGRGDDQEVRLLSVAWNQDCGCFAAGTSNGFRIFNCDPFKETFRRDLKSGGFGIVEMLFRCNILALVGGGSNVQYPPNKVMIWDDHQSRCIGEFAFRSDVRAVKLAKDYIVIVLERKIFVYNFTDLKLLYQIDTLSNPXGLCCLSHNSXYFSI

SEQ ID NO: 341871 - protein, 39 aa, Zea mays
  Clone ID: MRT4577_74953C.1.pep
RKILLLGTQEECTPYCSFINKGTKLTQFIKRCSDSNGIR

SEQ ID NO: 341872 - protein, 83 aa, Zea mays
  Clone ID: MRT4577_74954C.1.pep
RTLGGRVGGRVGGASPATGPQRLLPLLPEPPRPAAAVVAVHFRLGGRVRAGFEAARPGAVAVGFPGQRKPRPQSRRTLGLRGS

SEQ ID NO: 341873 - protein, 115 aa, Zea mays
  Clone ID: MRT4577_74955C.1.pep
VRRGRRMRTCQEQQRQQEAAGAPTRPPGHRVTTGQRLSLSLRLSPTRSPSREHTRSNLQRCSSSAPREERLRLLGEDLTGQGGVPSPISASPLGKVSLSRVSRDGHGPEPDWPGR

SEQ ID NO: 341874 - protein, 95 aa, Zea mays
  unsure (1)..(95): unsure at all Xaa locations
  Clone ID: MRT4577_74956C.1.pep
MLTKPCGQGHVLLQQHASDALSYPDPRGKTDLQNDIDLVTQPEDLEKLKHRXKKRLAXSPAXFLMNAKCQGCFRITTYFRHXHTADVCAGCQTVL

SEQ ID NO: 341875 - protein, 66 aa, Zea mays
  unsure (1)..(66): unsure at all Xaa locations
  Clone ID: MRT4577_74957C.1.pep
RESVEGRMNXPNSFXXIXXLIYXLYPPIYLTYPQPLPSHLPQQFLHPPHHLPTHLPYLLLLLLSIK

SEQ ID NO: 341876 - protein, 86 aa, Zea mays
  Clone ID: MRT4577_74958C.1.pep
KKTRVPQRRLGINFRVDEVPIPVAPLHVSYYLIPSKHWMNKIYLQNLIRMDGDVLSLGSCQIPAQKSYHVNPVEICFSIDIGESAR

SEQ ID NO: 341877 - protein, 90 aa, Zea mays
  Clone ID: MRT4577_74959C.1.pep
EAPGDAHLSWESGYPPGLAPLPPKRPTRQARAHRIAMAIQPPLTPEPDTSSGGDPFPAFRGTCESRASPSCLGVVQLASLAHRRKVVFPL

SEQ ID NO: 341878 - protein, 442 aa, Zea mays
  Clone ID: MRT4577_7495C.1.pep
MRTSTATCAILPPPTCSSRRFPLRSFIGLRWSAPRFQVRERAGASVAVVNGKPGCSFRLGVPTLNVCQSRQRSVVIRNEHAQNADLPRKYSKREKKPFPIPVLELRRRAKERMKAAQGKPKQPMPPPKNGMLVRRLIPVAYKVYNARILLINNLKRLMKVVPVKGCKYCSEIHVGSVGHPFRTCRGMSSDQRRGEHDWGSTLVEAVFLPVEAYHLEDRLGNRIPHDQRFTVPRIPALVELCIQAGVDLPEYPTKRRRKPIIKIGRKEFVDANEDDLPEPEPDRFRQPLLEELRYDEIIAPSSPEETVALAEETLEAWEAVRDGALKLMKGYAVRVCGYCPEVHVGPTGHKARNCGAFKHQQRNGQHGWQAAVLDDLIPPRYVWHMPESGEELQRELKTFYGQAPAVVELCIQGGAKVPEKYKATMRLDIGIPSSLKEAEMVV

SEQ ID NO: 341879 - protein, 183 aa, Zea mays
  unsure (1)..(183): unsure at all Xaa locations
  Clone ID: MRT4577_74960C.1.pep
MAKVNITRDLIHRQVKERGALSFERRYHVTDPFIRRLGLEAELQGHSGCVNCLEWNEKGDLLASGSDDQHXTIVWDPLHHKKLLSMHTGHTANIFSVKFLPHAGDRILITGAADSKVHVHDLTVKETIHMXXGDHTXRXVKRIATAPMWPNTFWSAAXDGLIRQYDLSGDSXHSEGLIDLTDT

SEQ ID NO: 341880 - protein, 50 aa, Zea mays
  Clone ID: MRT4577_74961C.1.pep
TQQFNPMIWPRWPYPKLISTSVIEKRFFLLDKTIIYFLIMIKLSFYRNKS

SEQ ID NO: 341881 - protein, 61 aa, Zea mays
  Clone ID: MRT4577_74962C.1.pep
GDPHPPLHGKNKKGRALFIKRAGFTHSWEPPLTSNLLFRTFLAPPPGWWFLTFFWVPGGFC

SEQ ID NO: 341882 - protein, 62 aa, Zea mays
  Clone ID: MRT4577_74963C.1.pep
ERANKIQSDLEELVKSLNEQCKRYGLRAKPTTLVELPFGTCFYPVSLLTSIQYWPVLVLSLV

SEQ ID NO: 341883 - protein, 48 aa, Zea mays
  Clone ID: MRT4577_74964C.1.pep
LGATHPWALKVTGARAKKHGPLAHCELRKKVQLQKKIWAHMIMTMTYN

SEQ ID NO: 341884 - protein, 70 aa, Zea mays
  Clone ID: MRT4577_74965C.1.pep
PPFYSLLFVIVKVFWLLIVCLAVLIIILVFLLCFPFLIVCVYFSPRSFMSYTVLFRLRVNKKKKRRAAVV

SEQ ID NO: 341885 - protein, 68 aa, Zea mays
  Clone ID: MRT4577_74966C.1.pep
GSGIPLISGPFNDSDHKRSYLHDLNRILVTSIVLKSVIAQQFNPTGFQRLSQEELEVHHTRAYNTRQL

SEQ ID NO: 341886 - protein, 61 aa, Zea mays
  Clone ID: MRT4577_74967C.1.pep
MWPTVGTSEACSTLLDGVLTKRTSYNHGMEDPEPECNGIQFMHATGCEHHTGSLGGHLAQM

SEQ ID NO: 341887 - protein, 249 aa, Zea mays
  unsure (1)..(249): unsure at all Xaa locations
  Clone ID: MRT4577_74968C.1.pep
PEERLNSIEETLLTEEVKQLRSQMTLLMEQYHQKALQVELYKQKLDETWLIVRNEAAKCKAAKDIIKVLTDQCKALSEKXWSVSNMRTXTKSNISQGQTFSADLQHHPSEKFATXIRTTRQHXNHQTSSQGDEEYTPSSSSDVQVEGLCGHLNGSRTFASNGRITEGNSLVARVTSNGVIEQIERGVYVTFAVSPCGKKDIKRVRFSRKHFGEKEAQHWWEENKGSVYAKYSTEKAQHQLEVTIKSVQE

SEQ ID NO: 341888 - protein, 69 aa, Zea mays
  unsure (1)..(69): unsure at all Xaa locations
  Clone ID: MRT4577_7496C.1.pep
MDAADSEAIPLRGFAKDSIRLVKRCHKPDRKEFTKVGARTANGFHEMGLSGFFSKFILMPINNIIXGSG

SEQ ID NO: 341889 - protein, 49 aa, Zea mays
  Clone ID: MRT4577_74970C.1.pep
KYLSWAHHTEKQIFQRKHKFRYTNQEFFFFKKGNSSKNLALSIKLQCCC

SEQ ID NO: 341890 - protein, 41 aa, Zea mays
  Clone ID: MRT4577_74971C.1.pep
PPLSYFLSRRTCISRGPLSCISPPFILNKPVLDIYVQVAPW

SEQ ID NO: 341891 - protein, 52 aa, Zea mays
  Clone ID: MRT4577_74972C.1.pep
NTNPTQDPNSRYFDHLPNERAPDHSSALGGKTTPELMNTRVTGPKAGGALLP

SEQ ID NO: 341892 - protein, 74 aa, Zea mays
  Clone ID: MRT4577_74973C.1.pep
FSCFKCWLWELLFFPPLYLESPFFFLLNEITSSVTVLFEKMSLNQKHTSFWNKELTHTEVIPKSPTICIRILLG

SEQ ID NO: 341893 - protein, 72 aa, Zea mays
  unsure (1)..(72): unsure at all Xaa locations
  Clone ID: MRT4577_74974C.1.pep
WPGTGSTFLGTRLGNPAPXNGRFLARFGLGLVGMANLAPRKVAKTXTSSHRPLWFPGAMAPNYLDGSLVRNY

SEQ ID NO: 341894 - protein, 54 aa, Zea mays
  Clone ID: MRT4577_74975C.1.pep
AITISSHLLIKCFRLFPNKHVIHVIVTPHLFNVTGFQHLIHFLSAPLMSEFVSM

SEQ ID NO: 341895 - protein, 93 aa, Zea mays
  Clone ID: MRT4577_74976C.1.pep
MGDGRTGGANRPAWLQQHELIGKIGEGTNGLEYRARHKPAHPAPGRHGPPNAIKKNKQTKEGDGGAPTANREITLQREINHQKAGKLVKVHIN

SEQ ID NO: 341896 - protein, 69 aa, Zea mays
  Clone ID: MRT4577_74977C.1.pep
VSACFSLTTVTVFSPLGALGLYGIAFCSIYCRNSGHFLLYAMSSCNRGRSQGDLRNCLIVACRKYRDHV

SEQ ID NO: 341897 - protein, 110 aa, Zea mays
  Clone ID: MRT4577_74978C.1.pep
RKFGPGPGPNTKDKRFFNPGKPLTQQGPHGRPKGKRTPLLFFKFRGKDPHPHPSWLFYCNKAPPPPWIPKRALPFATMGRGPQKRGKKNPRERILNPRGGLVFVTTKNKC

SEQ ID NO: 341898 - protein, 44 aa, Zea mays
  unsure (1)..(44): unsure at all Xaa locations
  Clone ID: MRT4577_74979C.1.pep
RWNQSPEVLPFSEPPLVLCDHXKLPPAPLPFASGQWXLRGSEVX

SEQ ID NO: 341899 - protein, 240 aa, Zea mays
  Clone ID: MRT4577_7497C.1.pep
MAAPARRLLLLVVTVAGALALPVAAQIKEESFKEDPRSSIMFEKFGFSESGAVRIIVSGASVSSPVARADPRQLGFFLLSDESLLHAIDEAQEGPTREKRAAATNGGGEDPDGGSTGCVLNSPYVKKLFTFKNMKGGHYNMSFPVTRPDEYTLFFANCAPEALVSMAVRTEMYNVNADGSKDYLPVGQAPLPAIYGFFAFCYAAFLAGWGYLTLSRGRVFGHQIHHLMSGLLVARLLYCL

SEQ ID NO: 341900 - protein, 149 aa, Zea mays
  unsure (1)..(149): unsure at all Xaa locations
  Clone ID: MRT4577_74980C.1.pep
MKVTVEGSGAGPAAVKRRRSGAPGRRQSGGVSVRRRVQVDAATAPEPAPLQRLLAACRRAFGGPGTVPAHHDVVLIRDIXDKMGPEDVHLRAVTKAAAASGGPRTHPVPIITRTTIYKCKNFXVGGFLLPPSATXPLHNHPGMTVFNKL

SEQ ID NO: 341901 - protein, 91 aa, Zea mays
  Clone ID: MRT4577_74981C.1.pep
RRLIPHRHRPLGGLPPPRPLVPLAFLWEPPKSLTHLDIEKKCYLVVSMSQYSQFFLLMLLVLILLDVNLFILSLYIGIHDIIYICTCLHIY

SEQ ID NO: 341902 - protein, 134 aa, Zea mays
  unsure (1)..(134): unsure at all Xaa locations
  Clone ID: MRT4577_74982C.1.pep
MMASNTMGLSSTDLVAKAVNETATSGFPQTRVTMRKTTTKAKTATASGRPXTAPTVVLYLRPLSGKPPSYLXTGEISKDYXWDTSQVAEHWQTVAWKRQLEEIHSRCDMMQECPCHFPELVARRGDQYQEARVV

SEQ ID NO: 341903 - protein, 129 aa, Zea mays
  Clone ID: MRT4577_74983C.1.pep
VPEILAQCTIYSAKNSTVCVFPDYQQPSMQPHQLDPKPLEMFSDPQKRNGLEFVSGFGGAGILVNNVSDHVAALKARYGPGSKIMGSDADPWKDIGSSTIPFGSLTCQQRPSATVGSLEVITRCFVSRV

SEQ ID NO: 341904 - protein, 554 aa, Zea mays
  Clone ID: MRT4577_74984C.1.pep
MDSAICRKQSCSKIVEDVCPTEGAILGPDSVLISKQTEGDISNRCIVDVKIEESDKEADKNCSNVDDKRSSDSTHQAGPININCPESTDKLQGTDDAVDQVNMHSSVLNSSNEHAMAMHSEVRSSLHSVDVLQTDKAEGTGTDPSQVEECSHHAVYTPMTAGNSGASAFLTSDSGIKDNVHISNMSGASTVSPAFTSNYQHSLPGDMPLSKPKPLVTPLTPKDLMPVQFSSVLPDPTAFRFEGIKPNFEDSSGNKVSSALGAKDICKYPAFKDPSDNEHDTLFRNIDGYMNHHLTTELPVFSQRTASGTVSTSQTKFQNGRSSSVCLPNSSEGIQWPRKPEEVPEDSLRPCARNAKSEGGEKQKRPGDVKLFGQILSHQPTLPSSGSLCNGSQSKPPSPKIDKTSVRLTNNPRDLVVFSSRPGVSPHVGLEERSVRSYGHLDGSTIQPEPLLVMAKCQRSLASVPFYSAKNSTVGVFPDYQQPSMQPHQLDPKPLEMFSDSQKRNGLELVSGFGGAGILVSNVSDHVAALKARYGPGSKIMGSDADPWKDIGSR

SEQ ID NO: 341905 - protein, 34 aa, Zea mays
  Clone ID: MRT4577_74985C.1.pep
FCSTFSRSSWTALFRVMSRMDDDVSCIVYMHASS

SEQ ID NO: 341906 - protein, 102 aa, Zea mays
  unsure (1)..(102): unsure at all Xaa locations
  Clone ID: MRT4577_74986C.1.pep
IMFDTIVEKLQTLSVQQGSAMNTRVAASYQVLQASEQAISSIRIVALVPAXEHALVPAMASLTGVPTGITPFQSIGVGLLAVTFSMVTTALEEDRRCHKNTT

SEQ ID NO: 341907 - protein, 107 aa, Zea mays
  Clone ID: MRT4577_74987C.1.pep
YPFSFFLEETRQKDSGLEALKNGLIMWAIYMLVPAHDRPPAAIMVMWSQYWEIGVVGPNFQMSSKLGVCFESSVLQLVGDKYCMSTKMFMMPIRLCLNALKCSRVKQ

SEQ ID NO: 341908 - protein, 74 aa, Zea mays
  Clone ID: MRT4577_74988C.1.pep
PYGTKAGVVANGLGMEEKDVKIGAQVARRRLDMLLPNRAHMPVVGHHRRVGWKIQLHPGRGNMGRSRMGSCWIS

SEQ ID NO: 341909 - protein, 77 aa, Zea mays
  Clone ID: MRT4577_74989C.1.pep
HASGSRSRAVALFFFFFFEGLRGHSFNKIQTILNLQYITISKFNEFHKKLVRYSMMLLIVSKKNTAFSSARSCQHEF

SEQ ID NO: 341910 - protein, 597 aa, Zea mays
  Clone ID: MRT4577_7498C.1.pep
MKEDEAKREAQEEEERKKVEEDEKGKTKVDYFDDLVELLVSKVHRNAQAVSVIKGSLGQEEYQKVQGREDARDIWNILKMSHEGDPKAKRHRIEVLESELARDRDDYDEMTPHQLFTKIQQHELVEAPIKTRDSHALVTNDQESSKKSSTNKDHKSKKMIESSSEDESSSDEDIVMFIKSFRKFVRKGDKYQRKGKKRACYECGKTGHSIADCPNKKEQEEKKDFKKDKSKKGERSKGCFKKKKKVSPKVEVKQILKKCSSNDGSSEVVPKYKPLRNNNGKKGLGYNIFKANPSIEGTTLYDALGRIHSSNGNITHEKIDVYSSGGSIWVFDSGCTNHMIGERNMFQSLQLTKESQEIVFGDSVKGEVIGIGETQEILKTFMRHAQNEFELKINKVRSDNGTEFKNSCIEEFLGEEGIKHEFSVPYTPQQNGVMERKSQTLIEAAKTMQDESKTHDNYWVEAINTACHAINRLYLHKIYKKTAYELLTGNKPKVDYFQVFGCKCFILNKKAKSSKFAPKVNEGFLHGYASNVHGYCVFNNTIGLVEIVLNMTFDESNGSQGHVASDIAGDEQQPCDVTKKLAIAEIRPREKENEGRI

SEQ ID NO: 341911 - protein, 97 aa, Zea mays
  Clone ID: MRT4577_74990C.1.pep
SVFSTSVISTTLASISGIHLLKSLPSVTRLLTVFFKFSMADCIECVRLYVSLLPSSILAINHDKESSTRGGAITPPFAYALVKYSCGGSMLALVPKC

SEQ ID NO: 341912 - protein, 63 aa, Zea mays
  Clone ID: MRT4577_74991C.1.pep
YFMPVFCFGSFWWKPIHCSLFFLVRVTRFLPGEFTRQIFGFFVNCGILGFYRWYGVLGIFFLG

SEQ ID NO: 341913 - protein, 82 aa, Zea mays
  unsure (1)..(82): unsure at all Xaa locations
  Clone ID: MRT4577_74992C.1.pep
KPSQPSEPISTSSHNAKPYGRFYNFMENLFRIILEPLCFILLFGCCRIEWWIXLMMTILGYLPGIIYPTYVPLGLDSHQYER

SEQ ID NO: 341914 - protein, 66 aa, Zea mays
  Clone ID: MRT4577_74993C.1.pep
CWLVCCVRCRLGCLCCSWSLFSLLFFLLSCCLFFFPPSVFYRSLWIVTCSMRKSGSSRVFRAGSCP

SEQ ID NO: 341915 - protein, 71 aa, Zea mays
  Clone ID: MRT4577_74994C.1.pep
RHQRLPAAFHPLGWYRHAKTTSGANFNGEHEPLVYDRLRFARSGGQQSIGHVSQLFIDTSGLKLSIILPAT

SEQ ID NO: 341916 - protein, 145 aa, Zea mays
  Clone ID: MRT4577_74995C.1.pep
QVCDKAPLDFYNKWQPENLVVTKWFAFQTTSQIPGNVAKVQKILFPPPFALRNPPKGVPPTGGFCGSPVNFPPKKGFGAKFLGEIVFQLSKKNPPGAPPQVSAFFRGGGGAKTHQTLFKAPLEKIVSAKGLSQNVFEIASKNLAD

SEQ ID NO: 341917 - protein, 93 aa, Zea mays
  Clone ID: MRT4577_74996C.1.pep
LRPANSTGGGGFLKLHRDLFLNTCPECMLKLETTGMLIRGMTIYWSNILETTGEPQSKKTGLVSLKRLFFTGTQLGFHFGGKLILSGSGGPFS

SEQ ID NO: 341918 - protein, 156 aa, Zea mays
  unsure (1)..(156): unsure at all Xaa locations
  Clone ID: MRT4577_74997C.1.pep
MAQMQMFAKSLTGMTVTSDVEXSAHIDIAKALFTKXXGIPADQHRLIFRGKHVDDGRTLDDYNIQKETTLHLTLRXLRAGAKKCKKKTLTTTXRISRSNXKGKLSELQLYKVDDATGNETRLQDECPNTECXTRVFMVNHFYRHYCXKCCLTYVYN

SEQ ID NO: 341919 - protein, 74 aa, Zea mays
  Clone ID: MRT4577_74998C.1.pep
PFPLEGNPSPAGTDASALFLISPGRALGLKGRAHGSFFFGGLKIHGCYTKPSTIIFKLPTFLAEKTHPICFEQD

SEQ ID NO: 341920 - protein, 375 aa, Zea mays
  Clone ID: MRT4577_74999C.1.pep
PCDYTYAGAIAACGELGALKHGKQLHGHIVQLGFEGSNSAGNALITMYARCGAVKEAHLMFLVMPNIDSVSWNAMISALGQHGHGREALELFDRMVAEGIYPDRISFLTVLTACNHSGLVDEGFRYFESMKRDFGIIPGEDHYTRLIDLLGRAGRIGEARDLIKTMPFEPTPSIWEAILSGCRTSGDMELGAHAADQLFKMTPQHDGTYILLSNTYSAAGCWVDAARVRKLMRDRGVKKEPGCSWIEAGNKVHVFLVGDTKHPEAHEVYKFLEMVGAKMRKLGYVPDTKVVLHDMEPHQKEHILFAHSERLAVGFGLLNLPPGATVTVLKNLRICDDCHAAIMFMSKAVAREIVVRDVRRFHHFKDGECSCGNYW

SEQ ID NO: 341921 - protein, 156 aa, Zea mays
  unsure (1)..(156): unsure at all Xaa locations
  Clone ID: MRT4577_7499C.1.pep
RADPGDPNKAPLPPSGALGKQAVALRIXGDAAAFIGCKFIGAQDTLYDHIGRHYFKRCYIQGSVDFIFGNGLSLYKHCHLHAVTNSYGALTAQKRESMLEETGFFFVKCKVTGSGALYLSRAWGVFSRVVFVYTYMDKIITPIGWYDWGDKNREMT

SEQ ID NO: 341922 - protein, 108 aa, Zea mays
  Clone ID: MRT4577_749C.1.pep
PPNASATRLTGSRASLCAARRTMRRTGYCTDTSRKTIGGGGGGERASFVRKNVCGQSQIWDNASNPIGLTELGIGRDTRPQGPFGVFQALETNKDETITTPAEDIIGT

SEQ ID NO: 341923 - protein, 71 aa, Zea mays
  unsure (1)..(71): unsure at all Xaa locations
  Clone ID: MRT4577_74C.1.pep
IKIGINGFGRIGKLYGXVALQSVDVXLIAMNYDFIITDYMSYMFNYXTVHXQSKHHENKRKDFKTLLFYEN

SEQ ID NO: 341924 - protein, 265 aa, Zea mays
  Clone ID: MRT4577_75000C.1.pep
MARGLKKHLKRLNAPSHWMLDKLGGAFAPKPSSGPHKARECLPLILILRNRLKYALTYREVQSILMQRHIMVDGKVRTDKTYPAGFMDIISIPKTGENYRLLYDTKGRFRLHSVRDEDAKFKLCKVRSVQFGQKGIPYLNTYDGRTIRYPDPLIKANDTIKLDLETNKIVDFIKFDVGNVVMVTGGRNTGRVGVIKNREKHKGTFETIHVEDAQGHQFATRLGNVFTIGKGTKPWVSLPKGKGIKLTIIEEQRKRDAAAQAAAKA

SEQ ID NO: 341925 - protein, 129 aa, Zea mays
  Clone ID: MRT4577_75001C.1.pep
VALANVVPGFIGGSADLASSNMTLLKMFGDFQKDTAEERNVRFGVREHGMGAICNGIALHSPGFVPYCATFFVFTDYMTHDSIGLGEDGPTHQPIEHLVSFRAMPNILMLRPADGNETAGAYKVAVVNR

SEQ ID NO: 341926 - protein, 92 aa, Zea mays
  unsure (1)..(92): unsure at all Xaa locations
  Clone ID: MRT4577_75002C.1.pep
LLHLIHRSKSECVGTQIAKVNHVAIECLCSRSSVSPKGRTLSRAIKAEXGNVVVCIRMGRGQDVIDTMVATSEIASYETDKERRRQRDPVLV

SEQ ID NO: 341927 - protein, 60 aa, Zea mays
  Clone ID: MRT4577_75003C.1.pep
ALASRATPSCSHQPSHRHQCPLPRSRPRRSWLPRKLAWWTSPWRASGTRRLRAPSSRPRS

SEQ ID NO: 341928 - protein, 127 aa, Zea mays
  Clone ID: MRT4577_75004C.1.pep
HWGLGKLIAFYDDNHISIDGDTEIAFTEDVSTRFEALGWHTIWVKNGNTGYDDIRAAIKEAKAVTDKPTLIKVTTTIGFGSPNKANSYSVHGSALGAKEVEATRQNLGWPYDTFFVLEDSPMPRSLE

SEQ ID NO: 341929 - protein, 183 aa, Zea mays
  Clone ID: MRT4577_75005C.1.pep
REKKKIQNSLFTFTFVLYRSVLTTYSCQSGQCKLLREKKKIQNSLFTFTFVLYRSVLTTYSCQSGQCKLLREKKKIQNSLFTFTFGLYRSVLTTYSCQSGQCKLLGEKKKIKKGWLPFLLGWIGLDQTQIFGQSGQGKFWGEKKKIKKGWLPLLLGGNGLDQQHIFGKPGKGKFWVEKKKFRK

SEQ ID NO: 341930 - protein, 736 aa, Zea mays
  Clone ID: MRT4577_75006C.1.pep
MATHSVAAAHATIAARAGAAGAPAPAERLGFRLLGSPAGGLRSARRAPPAAASRRHNSARAAAVETLQGKAATGELLEKSVNTIRFLAIDAVEKANSGHPGLPMGCAPMGHVLYDEVMRYNPKNPYWFNRDRFVLSAGHGCMLQYALLHLAGYDSVKEEDLKQFRQWGSRTPGHPENFETPGVEVTTGPLGQGIANAVGLALAEKHLAARFNKPDSEIVDHYTYVILGDGCQMEGIANEACSLAGHWGLGKLIAFYDDNHISIDGDTEIAFTEDVSTRFEALGWHTIWVKNGNTGYDDIRAAIKEAKAVTDKPTLIKVTTTIGFGSPNKANSYSVHGSALGAKEVEATRQNLGWPYDTFFVPEDVKSHWSRHTPEGAALEADWNAKFAEYEKKYADDAATLKSIITGELPTGWVDALPKYTPESPGDATRNLSQQCLNALANVVPGLIGGSADLASSNMTLLKMFGDFQKDTAEERNVRFGVREHGMGAICNGIALHSPGFVPYCATFFVFTDYMRGAMRISALSEAGVIYVMTHDSIGLGEDGPTHQPIEHLVSFRAMPNILMLRPADGNETAGAYKVAVLNRKRPSILALSRQKLPHLPGTSIEGVEKGGYTISDNSTGNKPDLIVMGTGSELEIAAKAADELRKEGKTVRVVSFVSWELFDEQSDEYKESVLPAAVTARISIEAGSTLGWQKYVGAQGKAIGIDKFGASAPAGTIYKEYGITVESIIAAAKSF

SEQ ID NO: 341931 - protein, 100 aa, Zea mays
  unsure (1)..(100): unsure at all Xaa locations
  Clone ID: MRT4577_75007C.1.pep
SPLPFGNAPTYLQHQFFPQILPAFLQLTFANPFSYFQKFFSFNQFNFLNFFWYLXQRQQLLYPFVVANPFFSPFFKQQQFFPYNQFFFINPFFLRQQPIF

SEQ ID NO: 341932 - protein, 74 aa, Zea mays
  Clone ID: MRT4577_75008C.1.pep
SQFIFIQKHPATSFSKKRTASPECIFCNVVPKTYPEELKCGTSICKIFLTPICMSHLFFPNNFTYYFFHPWPLG

SEQ ID NO: 341933 - protein, 69 aa, Zea mays
  Clone ID: MRT4577_75009C.1.pep
LAITPPYASSSRVSSTLTSPLAAHTPEPCPCFSLCSSSHGARSSLQLGQAGASLPAASPLLALLPVTPG

SEQ ID NO: 341934 - protein, 93 aa, Zea mays
  Clone ID: MRT4577_7500C.1.pep
TAVRDAMNVEEEVGRLKEEIHRLGQQQPDGSYKVKFGVLFNDDRCANIFEALVGTLRAAKKRKILTYEGELLLQGVHDNVEITLLPPPAVAAA

SEQ ID NO: 341935 - protein, 67 aa, Zea mays
  unsure (1)..(67): unsure at all Xaa locations
  Clone ID: MRT4577_75010C.1.pep
LTTSXHREISATYLXFWLPTXPGYPTTXXXPXYQSHRGXXXPXTSMVLXHSXTXTIXRPTCSTXSRA

SEQ ID NO: 341936 - protein, 62 aa, Zea mays
  Clone ID: MRT4577_75011C.1.pep
KPGPLGFNLLGLFLGFWPFLPKKKPGGGFGAQKKKKKKKKKKKKKKKKKKKKKKKKKKKKKK

SEQ ID NO: 341937 - protein, 80 aa, Zea mays
  unsure (1)..(80): unsure at all Xaa locations
  Clone ID: MRT4577_75012C.1.pep
MACVTARAPDEALHPSSSSDLLGHSSRLGRTATERTTRRSLKAEAKGEWLPGLYCHSYLDXSLAGDNGFDPLGLAEDPAN

SEQ ID NO: 341938 - protein, 87 aa, Zea mays
  Clone ID: MRT4577_75013C.1.pep
IHGEPLPRVMASVVRVDQINVRKTPAKYLSTGVKDLGSQGSRASIVVAVCGRRQRYTPTTLFPVCWVISLATGLDESRKRDEIDENI

SEQ ID NO: 341939 - protein, 48 aa, Zea mays
  Clone ID: MRT4577_75014C.1.pep
ILKKSFIFPLFQMALKLIFHNLINYMRGARHISIQLVILTNIQRNKTC

SEQ ID NO: 341940 - protein, 49 aa, Zea mays
  Clone ID: MRT4577_75015C.1.pep
GECKAVDGVVGRHWGGDTRRSACAVRVRPADRCSRSDNPVDVVVVVTTS

SEQ ID NO: 341941 - protein, 57 aa, Zea mays
  Clone ID: MRT4577_75016C.1.pep
CNIYTRFCEQVAGSLALGMLAAVGTAVLSAASARNVFRLYYCSSHASPPPRETCAAH

SEQ ID NO: 341942 - protein, 114 aa, Zea mays
  unsure (1)..(114): unsure at all Xaa locations
  Clone ID: MRT4577_75017C.1.pep
KTPYSSSYVRTYTSFKLCFCGAAGVRVRDFRDHRGRRRKRAWLALGRRAPAFSXTKLCNIYTRFLQAGRPQPPALDDWAAVGTAVLSAASARNVFRHYYCSSHSPAAPETCAAH

SEQ ID NO: 341943 - protein, 43 aa, Zea mays
  unsure (1)..(43): unsure at all Xaa locations
  Clone ID: MRT4577_75018C.1.pep
KPYFLKSSNYVLGIIDGSLNGFTNFKVHSIESRKNXAIWVLEK

SEQ ID NO: 341944 - protein, 84 aa, Zea mays
  Clone ID: MRT4577_75019C.1.pep
QQQTLSPKIVHFPNAFQPLNYINFHCTSDFPHSIPPTPRFARTLTFKLKKPPPLSKIFYSLKKPPPNPTPLSPEPQHTFPLFHL

SEQ ID NO: 341945 - protein, 93 aa, Zea mays
  Clone ID: MRT4577_7501C.1.pep
TAVRDAMNVEEEVGRLKEETHRLGQQQPDGSYKVKFGVLFNDDRCANIFEALVGTLRAAKKRKILTYDGELLLQGVHDNVEITLLPPPAVAAA

SEQ ID NO: 341946 - protein, 57 aa, Zea mays
  Clone ID: MRT4577_75020C.1.pep
RREGFLNWRKEFRKIGGKMEPQPKKAEGGDLKIPLIFSSKRGLGVVKHEGGGVGFFF

SEQ ID NO: 341947 - protein, 135 aa, Zea mays
  Clone ID: MRT4577_75021C.1.pep
KLEIAEANSKILKENAEMINEYFSIHVDHDGNLTRLPVVLDQYTPDMDRLPNFVLTMGNDVTWDDEKECFRTAAAAIGNFYALHPPILPNPSGSGVQVYKKNKACMASGEHVDSTDISRREGALALAYQLFRICR

SEQ ID NO: 341948 - protein, 70 aa, Zea mays
  Clone ID: MRT4577_75022C.1.pep
YTLQVVAAGRKTKRDDPPKTKAPQQKKFWGPFQSKGKKKKGLQINSSIPYLGAIYKFYSWVLGAGCVRSN

SEQ ID NO: 341949 - protein, 55 aa, Zea mays
  Clone ID: MRT4577_75023C.1.pep
MSGRGRAAKGLGKGGAIRHRKVLRDIIHGITKPAIRRLSRRGGAKRISGLMYEET

SEQ ID NO: 341950 - protein, 68 aa, Zea mays
  Clone ID: MRT4577_75024C.1.pep
RDWTKLDKWSTIAAVAVTAALRFQMCFLLQVSSDVPSNSENQLVSLAKIEFQTSPNWPVIYKRGKRKG

SEQ ID NO: 341951 - protein, 91 aa, Zea mays
  unsure (1)..(91): unsure at all Xaa locations
  Clone ID: MRT4577_75025C.1.pep
YLEGGXGREIQRGRVTLRVFSSNKLAHIAFVLSESSRKIMAGLCAHFRGTTFTLIIRETASHGIDISHVVFVVPSYILDEGFPGRSISNHC

SEQ ID NO: 341952 - protein, 190 aa, Zea mays
  unsure (1)..(190): unsure at all Xaa locations
  Clone ID: MRT4577_75026C.1.pep
MRLLLXALCILALAALATCTHTXAXANCPPPSQPXLPTMLHLPHTLHLTPPVQVXKPFSLPPPLSLPPSVPFPTPVNPDRSTPCHSPXSSPMTSAQYPSPHSCPXQQXSPSPXSLQGNXCGVRQXTPILAQPVEXFLRHTISPTATPYCSPQCQSLRQKCCQQLRTAEPHHQYQAIFTLVLQSILQQQPQ

SEQ ID NO: 341953 - protein, 69 aa, Zea mays
  Clone ID: MRT4577_75027C.1.pep
GRKLPWVHRISAAIGETKGIQFLHGGIKPGLFANNLKITNILLDQNLVAKIGSYNIPILAETAKSEVKP

SEQ ID NO: 341954 - protein, 131 aa, Zea mays
  unsure (1)..(131): unsure at all Xaa locations
  Clone ID: MRT4577_75028C.1.pep
VQDSDDVWFKKLESCITPAIEAAQLKKFPERLSAIPPRILEGQVPDITEEVYEEDNKLWKKHVNTYKRVNKLIGSSRYRNIMDMNAGLGSFAATLHSSSSWVMNVVPSISERNTXGIIYERGLIGIYHDWC

SEQ ID NO: 341955 - protein, 271 aa, Zea mays
  unsure (1)..(271): unsure at all Xaa locations
  Clone ID: MRT4577_75029C.1.pep
KYGSLQLXCQYYQLQCPVRGSSLNFHPLEHLHSLKFHRPGETALHLAGSTIDLRSRDTSLEVAEMRNALFAEEESTALSTWAVATICGCLRLEHVITLFAAALLEKQIIIVCSNLXCSNLHTCFDILIHTFCVDIAHQLIXIFLICVLANNFLLWQIEQSYMSCYLIKNIVLMXGMLSASVLSIIPLIRPYQWQSLLIPVLPNDMLDFLDAPVPYIVGVQNKTPDLQSRLANAVIIDANKNQVPAKCITFYLPVIFCYFLETISVTTVYCL

SEQ ID NO: 341956 - protein, 93 aa, Zea mays; identical to SEQ ID NO: 341934
  Clone ID: MRT4577_7502C.1.pep

SEQ ID NO: 341957 - protein, 70 aa, Zea mays
  Clone ID: MRT4577_75030C.1.pep
LYFTTNNLINVHMINKQFSTNRTSMAYHPSSLITGLTSAHTCETTRRPRCCQRRHSQESRAGRRPPVAGR

SEQ ID NO: 341958 - protein, 103 aa, Zea mays
  Clone ID: MRT4577_75031C.1.pep
LPDIYCVGKFGENVLVRADGPSLGGLRSNGYLISHPSRNLSSGIVYYVILRRNRHVNSMITKPTVHHSTSLINTSEKLLPQLLRPLMPIRLQQLYTGRPRTQE

SEQ ID NO: 341959 - protein, 168 aa, Zea mays
  Clone ID: MRT4577_75032C.1.pep
GTLEAGRAGLTILLLSPAATKKSGRPPGSIGRRRLSSSLCILFSLSAAQNFSRHEILVPDRPIPSAGLCATERFLLLTVLFISSGRTSTRPPGRTGQWHCAFELDRHCLLSLFLPSAHRLFIFLRRSVQPSASYPFSLCYCAPSCSLFLFNYSEQLVLVTSAAGPMET

SEQ ID NO: 341960 - protein, 131 aa, Zea mays
  unsure (1)..(131): unsure at all Xaa locations
  Clone ID: MRT4577_75033C.1.pep
MIXRHEPKWAFRESKIKDQHEANNANTDAPAKIYRPQGRKAEKEKARVRKHGGSDVNGDPFIKGVKNMREAREETERDRKTRDDKFYELEKSKLELEIMQTDTSTMDEESKQYFKLMKQEILARRFGSSQP

SEQ ID NO: 341961 - protein, 98 aa, Zea mays
  unsure (1)..(98): unsure at all Xaa locations
  Clone ID: MRT4577_75034C.1.pep
VVPVGPPLWSGGLNIXRPPLRFXLPEWVLPASAGGRGTGVGAATQLRSCSAGGWFNDLECSPGLAPGPVAASSTGHLHSSSRLYAARRTRLHLGKQGD

SEQ ID NO: 341962 - protein, 100 aa, Zea mays
  Clone ID: MRT4577_75035C.1.pep
SSYRDKSAGFRVPSAIFSVDRAEGSSPVGPDVSQVKQQVPPGLACLATHSVDAGSDRHEPHAWWGPVCTGSRIRSLPPFPAKKRGSQPGRGGQGGPSLEP

SEQ ID NO: 341963 - protein, 209 aa, Zea mays
  Clone ID: MRT4577_75036C.1.pep
MAMAEGERTECAETPRDEPPADGALKRAEELKTQANDYFKAKDYENAIKFYSQAIELNPGNAIYYGNRSLAYLRTECYGYALGDATRAIELDKKYIKGYYRRAASNMALGKFRAALRDYETVVKVKPNDKDAKMKYQECSKIVKQKAFERAIAGDEHRRSVVDSLDIESMTIEDEYSGPKLEDGKVTITFMKDLMQWYKDQKKLHRECA

SEQ ID NO: 341964 - protein, 44 aa, Zea mays
  unsure (1)..(44): unsure at all Xaa locations
  Clone ID: MRT4577_75037C.1.pep
YWFAHATKDSRMDITLSYCSNGYLCFKGTXHKYFLIYSHFLFRN

SEQ ID NO: 341965 - protein, 97 aa, Zea mays
  unsure (1)..(97): unsure at all Xaa locations
  Clone ID: MRT4577_75038C.1.pep
XGFWGLFNGSLYLFFFXCGKLKTAPQFFKTFFFALEKYFLWEGAFQLGPLKNIWGEIIKGGENNKPFFLKRFFPAFARGHFYFFMRLAKIPPLTSPP

SEQ ID NO: 341966 - protein, 76 aa, Zea mays
  Clone ID: MRT4577_75039C.1.pep
MVGVCVEKKKKKKKKKKKKKKKKKKKKKKKKKKKKKKKKKKKKKKKKKKKGGARFKGPNFPSRGLQGKSFFLGYPK

SEQ ID NO: 341967 - protein, 48 aa, Zea mays
  Clone ID: MRT4577_7503C.1.pep
QAPLIQWISALFCKQLFQSASKRPTISCINLSPFALLRFATAICELGR

SEQ ID NO: 341968 - protein, 213 aa, Zea mays; identical to SEQ ID NO: 190087
  Clone ID: MRT4577_75040C.1.pep

SEQ ID NO: 341969 - protein, 126 aa, Zea mays
  unsure (1)..(126): unsure at all Xaa locations
  Clone ID: MRT4577_75041C.1.pep
VVRGFPXLXPXGXWALPGPSVXXAXXXWLVFXCLXVXFPACXXXLXLFLWXVFAXXXGRFLFVXXWCXXFSPPPPGCXXRWCGGXVLXAXXXLLPVXVPCFVCGXPVVCXXCLPGXFFCFPPPPPP

SEQ ID NO: 341970 - protein, 68 aa, Zea mays
  Clone ID: MRT4577_75042C.1.pep
RLFGWSSKPKLQGKAIKSRPGKKKLLRRPNHPKNKVILGNNGSVACFEPIVRGICWLDGVLSMDRLLW

SEQ ID NO: 341971 - protein, 189 aa, Zea mays
  Clone ID: MRT4577_75043C.1.pep
MNCETCQLKELELELTEIRDVLRCILHTIFFHRTLSLVRPKDVDCDFLDITYVQCGLPELEKEVDEKIDQFSAWVEKHPNRRSQICLSFFDEKHRHPGWFVNKTERIYWEQWFINLQVMFPKRYSKSNSSKGLTNIQANAVEETSTRRAALEASINEVLFQIIKFANEKKDHIPAIPDRIFNHEIMIPR

SEQ ID NO: 341972 - protein, 38 aa, Zea mays
  Clone ID: MRT4577_75044C.1.pep
DCCFLPTARSGRGTIIARKALVKNPSIQYHKYLIFDSV

SEQ ID NO: 341973 - protein, 136 aa, Zea mays
  Clone ID: MRT4577_75045C.1.pep
PGRVFLSKSPKIETHFFKTVVALSKIGAKKTKRFLSNPEGQWGPKVKTGRKISSKHVFLLGPKAIKTSVNGGGAGFFPKKRNGSPPNSSKTAPQPQGLEGEPSNKPQKTSGVGGPQGQKAPTVGEPANQTCIFLAV

SEQ ID NO: 341974 - protein, 76 aa, Zea mays
  unsure (1)..(76): unsure at all Xaa locations
  Clone ID: MRT4577_75046C.1.pep
KKGKTSFLVLSPPHPNLYLCIPALIFFSKSRRLIFLRPERAEACLLPSXLSSAPLIGDFFCSRWPGYCLKSRPYLP

SEQ ID NO: 341975 - protein, 80 aa, Zea mays
  Clone ID: MRT4577_75047C.1.pep
MELAVGASAATLKSLLSKLGSLLAEQYTLIRGVRGDIQFIADELASMQAFLSNLSKCKKSHDDQTEDWIKQIRDISYDIE

SEQ ID NO: 341976 - protein, 57 aa, Zea mays
  Clone ID: MRT4577_75048C.1.pep
AQNKRPTECSRLRSGNKVSETRRRPFFLIPKRPFVKGTYIMNLVAQGLPLFKPNFGL

SEQ ID NO: 341977 - protein, 64 aa, Zea mays
  Clone ID: MRT4577_75049C.1.pep
QLVAYPIPLKKKRPKLGPAGKNEGFTGTGRPARKNLKFSGLVRYVPSPAGRFGHLPPRDCCSTR

SEQ ID NO: 341978 - protein, 111 aa, Zea mays
  Clone ID: MRT4577_7504C.1.pep
CKGDVSSDKWYPRFPVRVVNTPVQLACSQALFQSPPSPFSLSLSYIRSVFPTTSGISSLRMTLHKNNAPKAIYPVTTRLTGHHSTRLIIRYSARSRVPSSGTASVASLAPL

SEQ ID NO: 341979 - protein, 74 aa, Zea mays
  Clone ID: MRT4577_75050C.1.pep
ATEMTDQRRILYKSTRHVMLGRRMERCLQPRHLATHMSHQTPSNKGSPCLLLRDYRTITTCYSASLALCSTINR

SEQ ID NO: 341980 - protein, 314 aa, Zea mays
  Clone ID: MRT4577_75051C.1.pep
MAASNIGMMDGAYFVGRNEILAWINTTLQLGLSKVEEAASGAVACQLMDAAHPGAVPMHKVNFDAKTEYDMIQNYKVLQDVFNKLKITKHIEVNKLIKGRPLDNLEFMQWMKRYCDSVNGGFMSSYNASERRESSKGGKETNRRASVPSHTPAKSASTGHKAQASHGAKRASGQTAGAPQRSAKPSPVANSSGPAYDEQITELKLLVDSLEKERDFYFSKLRDIEILCQNPEVEHVPVHAIQNILYTSEEDPQQQAPALSPIMEASEERPKQEAAHKRKSISDLDEFGMSSSSRQRLSDISDVQLCGSPLTSFS

SEQ ID NO: 341981 - protein, 110 aa, Zea mays
  unsure (1)..(110): unsure at all Xaa locations
  Clone ID: MRT4577_75052C.1.pep
LLGLSASAATATIFPQCFQAPITSLXXXYLSPPLSFLXGGRKXQPYXIQQTIHNKILPLSPXFXQQXXXLLQQLPLXHLXLXQNIXAHKLQQLVLANLAXYFXSQKFLPL

SEQ ID NO: 341982 - protein, 38 aa, Zea mays
  Clone ID: MRT4577_75053C.1.pep
KSMSPLTQVESYRKHPLETLLVKANRRLLLTPASHRRA

SEQ ID NO: 341983 - protein, 94 aa, Zea mays
  unsure (1)..(94): unsure at all Xaa locations
  Clone ID: MRT4577_75054C.1.pep
RTDAGVHALSRGGYVDGERINKKKPGKALTPYEPGVVKPAVNHFLLKSEGDILATEFCCVXPDFHAQYKCLERTYDYRLLAGPESTCDFEKKSV

SEQ ID NO: 341984 - protein, 179 aa, Zea mays
  Clone ID: MRT4577_75056C.1.pep
MFRRLSLLLLAFSILFPATLLAQPPTAPQQCPLNFTALRPFLAPPLPSDDASRCAFALQSVRLLLSLHLAATGSFLVPASSSCLPPLRDALPFPLPPPDACGLAGIDALLSAPGCANISTRAEFDARVPASARRDINASCDRELGAVPVCTTCTTSLSKTAAAYLLPGSPDGGNNVTGC

SEQ ID NO: 341985 - protein, 103 aa, Zea mays
  unsure (1)..(103): unsure at all Xaa locations
  Clone ID: MRT4577_75057C.1.pep
RXXXGXVAVXALXLLXLLXAAVPXGVRGRAAAXSLLVRGCXXGRLVLAAVWCRVRXLGXAGAGVRRVXXVLLRVLGLLLXPLPGRGXXPLRVAGVVAPLGRXP

SEQ ID NO: 341986 - protein, 124 aa, Zea mays
  unsure (1)..(124): unsure at all Xaa locations
  Clone ID: MRT4577_75058C.1.pep
RYKQMSPEEVIGKFMSFELMIKDSKHIVNLEXGATFTPEVQPVAFKATEEKKEESTPSRLPINPSKLDNEEMTLIIKIFWXILKQRKGKPAXKRVCYRCGKSGHFIAKCPYTSDSDRDDDKKGK

SEQ ID NO: 341987 - protein, 107 aa, Zea mays
  Clone ID: MRT4577_75059C.1.pep
GGMERPFCRLVSEHARVISWYIYLCEVLGQGKVIGVILYIIRRLAPYARGQSRPGRRLWERGGSGGGKQRRGGVESGGGGRGGGEGMGRARMDIALPWASVSVCVRQ

SEQ ID NO: 341988 - protein, 65 aa, Zea mays
  unsure (1)..(65): unsure at all Xaa locations
  Clone ID: MRT4577_7505C.1.pep
MIIPERCFTCXRRFGNKWDLYLDLLQVDYSERDXLYAFELIRYCCTRMLTXHVDLIEKLLNYNTL

SEQ ID NO: 341989 - protein, 50 aa, Zea mays
  Clone ID: MRT4577_75060C.1.pep
VVGATEEAVNQNRRLVRNWRRAGKLQRAAAVMVDMADIAAPGLISRPGGS

SEQ ID NO: 341990 - protein, 118 aa, Zea mays
  Clone ID: MRT4577_75061C.1.pep
EKFVMCHWGEGWFMPLSLSFLLDGFVPARQLRDFNCSRIGWVSELVGELPSNKIRGLAIGEKFVVYPGVRGASELMNRSWAESCCLAGPCMETRDKRAGCVYGGLKKGKKPRNGPRVE

SEQ ID NO: 341991 - protein, 75 aa, Zea mays
  Clone ID: MRT4577_75062C.1.pep
QHTTGVGYWLRITPRGETITSTHAKRAPRVRVRLAEIYDQPRCPVGDTPLLSEAKVQGKGRAVPFLENMGPGELL

SEQ ID NO: 341992 - protein, 48 aa, Zea mays
  Clone ID: MRT4577_75063C.1.pep
CMSLLGITGCIQSDPDLLCQALWGPEWKALREGANAFSKTAFVLIIRA

SEQ ID NO: 341993 - protein, 132 aa, Zea mays
  Clone ID: MRT4577_75064C.1.pep
AEKDLCWGQPLRLRASHLRPVSSAFMRDLSVSASASGHTTRIASAVGRAIFSTSSRHQQRTTTLTWRCTCACSPLLLERAPSSSVNPVVVSPHHATQDATEDETQLAALKRLSRTRPHLERDDDLAFIAFQQ

SEQ ID NO: 341994 - protein, 271 aa, Zea mays
  unsure (1)..(271): unsure at all Xaa locations
  Clone ID: MRT4577_75065C.1.pep
MHGNFGPQEQILWPASVLAGIVMCGAVYQMTRHVSSRCFKCYSMLNNRQKVEWNNRGFSTLHALVAAAVSFYLVMISDLFNEDAHNSIIIDRKSWLSDCMFGVSIGYFLTDLTMIMLYFPSLGGNEXVFLILMFQLLHHGLSMYAIGLALLSGKAHMYILMVLFTEITTPFVNLRWYLDVAGQKTCNLYLYNGVALFVGWLIARIILFIYMFTHMYFHLDQARSIFSLGFYSLVAVPSVVAVMNVFWFWKILKGMVKTLSRRKHSENGRTD

SEQ ID NO: 341995 - protein, 79 aa, Zea mays
  Clone ID: MRT4577_75066C.1.pep
FWRSRSRSKLLTRMLALIFGVTRKFIVLKMALITYLAFITKCSTIGPWSVLTEPVLLLSYSGGSRWISVCLIWAYAIDH

SEQ ID NO: 341996 - protein, 86 aa, Zea mays
  Clone ID: MRT4577_75067C.1.pep
MPMGEVFLWPQPPVLRHRIWVSTLLSTRQACPQHAPVLDDILRASLYTGDWPVVLRELYWKNVHHVTPCQTTNNNSRTEDHATHEW

SEQ ID NO: 341997 - protein, 120 aa, Zea mays
  Clone ID: MRT4577_75068C.1.pep
VFMLLWVALHDANIIPAARRMTERPGGLTHVQRMGVGRLLVVLAVTTVELVERRLIRSIHSGSCPMSIVWQVPKFVLMAGSDFFCDIAQLESFYSEARAEMRSMCSAVYLLALPLGFYVN

SEQ ID NO: 341998 - protein, 75 aa, Zea mays
  unsure (1)..(75): unsure at all Xaa locations
  Clone ID: MRT4577_75069C.1.pep
FLNVYLNFFFFFFFFFFFLIFFFFFWKMDDGYYFNMDYKAKFFTWNWQQELILRGPTLHMERGNRXWQVGIFKQN

SEQ ID NO: 341999 - protein, 107 aa, Zea mays
  Clone ID: MRT4577_7506C.1.pep
MAAKRLQEAARGFLMRQVAAAARLQAAACHLQAVARGFLAWRQAAARLAIFRLQHVASWSGVKHGKRWRDCKLRSSGCRTGEMPRLGLCSLGKVVAMGSRETNLVIC

SEQ ID NO: 342000 - protein, 280 aa, Zea mays
  Clone ID: MRT4577_75070C.1.pep
MGCKACDKPKPSYRKGLWSPEEDQKLRDYILLHGHGCWSALPAKAGLQRNGKSCRLRWINYLRPGLKHGTFSPEEEETVMSLHATLGNKWSRIAKHLPGRTDNEVKNHWNSYLKKRVEGPSTPPSDSDDSHCAKPGRGGSTARETGDDRPADYSGSSEPREPSSSPDTSCLTGTPKVMFVDWLDMDCMGGGGGGPPGAAAAAAAPGLGAAAGVARVSTGDDQMTMDDGSASGRADVSLHGTFGDSGGAGCWEFHESFDQMQAAGFCDLLSSIGEYYFGLD

SEQ ID NO: 342001 - protein, 67 aa, Zea mays
  Clone ID: MRT4577_75071C.1.pep
SNIYIYTLPIKYYPKFYCVIHTHKESYLHYGYAYSIRRATKNALERCHFYQSYICAPYLHALNCLSS

SEQ ID NO: 342002 - protein, 144 aa, Zea mays
  Clone ID: MRT4577_75072C.1.pep
EAQKENLGKCRAARPRGVEKTKRPFRCQPASPRVTPRCPLPWPLCICTRNLFFMGESPLFRFMTCGLVKRRLPLQCFWGAWAPVFFFCLGRTGFPAWLATPPVPFPMTRWVANQWPPGHPQGQRVKIKKKIMVFGFMDEFSLPV

SEQ ID NO: 342003 - protein, 99 aa, Zea mays
  Clone ID: MRT4577_75073C.1.pep
AGDESHSALTEFDRTEKDITAIGGFPHYGVVKDDYIMVKGCCVGPKKRVITLRQSLLKQTSRVALEEIKLKFIDTSSKFGHGRFQTTQEKQKFFVRLKA

SEQ ID NO: 342004 - protein, 104 aa, Zea mays
  Clone ID: MRT4577_75074C.1.pep
ADAKFNRILKLKVLSSPDRNTLVLRYNVLLDTEYGKDSSCYATADEPDDNDDGHTHNHYTFKRAPRWVKASVISLFIMMGLIIAVVVSLIYAVHRRRVEEYERI

SEQ ID NO: 342005 - protein, 59 aa, Zea mays
  Clone ID: MRT4577_75075C.1.pep
ATHPLVSPTYPRPPKLSVTQIRNDNRKSPTYRLPTFALLRMDRYSRRVFVHTISKESSR

SEQ ID NO: 342006 - protein, 42 aa, Zea mays
  Clone ID: MRT4577_75076C.1.pep
LGTSPANICVSKYMFCRRTTGWGHTVESLGARIHLDWVGACR

SEQ ID NO: 342007 - protein, 210 aa, Zea mays
  Clone ID: MRT4577_75077C.1.pep
LCIVFNYNLDCTHAGWNRGIMVHPFQGKERGQTLGNKPWLSCTPVTGGSRNAGRRSRAWRGRRRTLSPTADGRRRSRTGGGGRRRAAGRRRRPRARASPGPRRSAADSARTRSAHRGDCCCLRAPGVPAIVAILFRSHSRFLPPAIGWWRDRWTSWWCCRRESGSLLLRPDPVLDQMLARRGEGSLLMFVAFYVGQLEGGRIVTRSCSRV

SEQ ID NO: 342008 - protein, 361 aa, Zea mays
  Clone ID: MRT4577_75078C.1.pep
MGREAAATRPPKLRRGLWSPEEDEKLYNHIIRYGVGCWSSVPKLAGLERCGKSCRLRWINYLRPDLKRGSFSQQEEDLIVSLHKILGNRWSQIASQLPGRTDNEIKNFWNSCIKKKLRQQGIDPATHKPLNDDDNAAAAAAADNDAAVAPHHHRRHQDDHCGAANIDNNNNNNNNNNNRQLPSADDHCFAMSSDDPLAPHSPTVSFDPLSVTNVPTAMQQGSYGSFRSDNDHLCDYGGGGVDVVSDAATAYSAPYTGGGGGGDSSSNSNGTGTWACSGGEPMPPHVAMFGRDAAQAAAYHQFVDPAKYSPWQQHPAARLHDHNVGGAAAGFPIRSMSRDLPGSCFDLARSALEDEFSVDFL

SEQ ID NO: 342009 - protein, 105 aa, Zea mays
  Clone ID: MRT4577_75079C.1.pep
AISSQSAGALGRRISVWGLEIEPRERERDDVVSQCCSSHAGCRRRSRGQVLLWGALRSSEYEQEQGSKRYPVRKKERARRSRRRRVRAKEKESKLTPKPPPRAPH

SEQ ID NO: 342010 - protein, 66 aa, Zea mays
  Clone ID: MRT4577_7507C.1.pep
DLKPNPESLLQPLRYPNWQPNIVSLIQRRRYPDYICLFVSYLPFYWPAVYHLWPVTTGNTLRSYLS

SEQ ID NO: 342011 - protein, 66 aa, Zea mays
  Clone ID: MRT4577_75080C.1.pep
NSQADEYHHSIRRSKYINDNMEYGCACLATVRRSYGRRGHLLRENGNSPGLRRVERGNAVPPRAEF

SEQ ID NO: 342012 - protein, 78 aa, Zea mays
  Clone ID: MRT4577_75081C.1.pep
VPMCRFTRRILFWMRNGEKSNLTCEFGSRARRAWCSCRLAAAPVKQCGPRIRRCSSRGSRIREAMARVRAQLGNGPVA

SEQ ID NO: 342013 - protein, 190 aa, Zea mays
  unsure (1)..(190): unsure at all Xaa locations
  Clone ID: MRT4577_75082C.1.pep
PAAAAVPVPSWGSVFCSRGGEGFQKTSVTLGKTRGLGAGRRLXKTHRRTQGGAARASKKSHWGNEGKKPFVGSSNARGMVLKKMGIEAKQPNSVFRRGARVQLVKKGKKMVAFGPKDGGWNYIEEKDEVLMVGLGRRGHAGENIPGVRLRVGKVSGGFLFALLKEKKEKPRSRIVFATKISRRGVETGGR

SEQ ID NO: 342014 - protein, 39 aa, Zea mays
  Clone ID: MRT4577_75083C.1.pep
PKWEIKNGTVFFKTANELQPWSEIPFLQLINKTLTYARE

SEQ ID NO: 342015 - protein, 60 aa, Zea mays
  Clone ID: MRT4577_75084C.1.pep
YSGLAIKVLPTTSIGMRCLHNALDHGFMQTISSPLLEIMNGIILRPTRIGYQRMTTIYRG

SEQ ID NO: 342016 - protein, 89 aa, Zea mays
  Clone ID: MRT4577_75085C.1.pep
AGSAGPLRLPMQYILESVSSPYVLRSLCRESWSVVYGRQLVKHRDFTSCIAIWFRAPKRSIPGEPPEEVPDPEPQDNPPPFACSTGASA

SEQ ID NO: 342017 - protein, 58 aa, Zea mays
  Clone ID: MRT4577_75086C.1.pep
YCLPLRTWHSYNHADVAALVLSKHTCPISRLSPYLLICCPLAILIISMHEHAPKIPNT

SEQ ID NO: 342018 - protein, 48 aa, Zea mays
  Clone ID: MRT4577_75087C.1.pep
GPSVQKKFYRGNFKGGLKTCRAGGHSFYMGKTHPPLNYPAPFFFSKGS

SEQ ID NO: 342019 - protein, 56 aa, Zea mays
  Clone ID: MRT4577_75088C.1.pep
PLVQLFSHKLSVKLKISLGEHDYLKGCRVTPKAITTIECYTKRRARKTVSQAKAEL

SEQ ID NO: 342020 - protein, 151 aa, Zea mays
  Clone ID: MRT4577_75089C.1.pep
MSFLLRTSTLVRQRLFTTSARARTAISLQDATAAHMAAAPGASVVPKLGRVARWYLPTMAMVAIGFGVTNALNDANRKVHSALELTQEQKNQMLMDAYGERSSLQDMERAIAGLEARLTTRKDRNKILEEAYGDKTSIEDLQRAMEIYEVQ

SEQ ID NO: 342021 - protein, 204 aa, Zea mays
  unsure (1)..(204): unsure at all Xaa locations
  Clone ID: MRT4577_7508C.1.pep
FSFILRLPAMTPPPPXCSPAATTVRPPRQPPPRXPSPLRAPPPPRPXPPPISPPXPPPRPSLLLPHPPVPSPAPPPPPPPXPPGAVSPPSTTPSPXPPLTPLPPPATPHARSPPPRRQQNHPKMSSRCSSPYSSPSSDVTCFPGDIRLLDLISEHSSLLVELRYLGDLLRVFLAPTCTDRNRIAAFPRSAECINCEYGKSAKNL

SEQ ID NO: 342022 - protein, 50 aa, Zea mays
  Clone ID: MRT4577_75090C.1.pep
RLNLTLSKLILDNLQRYRLRRRALYADPGYGKRRGVVLQDNNSIMLQLKL

SEQ ID NO: 342023 - protein, 58 aa, Zea mays
  Clone ID: MRT4577_75091C.1.pep
PAYTTILVRFINASFQLLQAGTFAHHTAADVIIIIAESGQISNDLKPRLKHVTCINSI

SEQ ID NO: 342024 - protein, 26 aa, Zea mays
  Clone ID: MRT4577_75092C.1.pep
TIGRSYAWLQSDCSNRLLLNSARFSL

SEQ ID NO: 342025 - protein, 66 aa, Zea mays
  Clone ID: MRT4577_75093C.1.pep
IFVSAILCLSIWSLGFLEQHAVQFPIFIFFNRRFHGRFLGTEWLRLKIRTGQGFFGSCFFSPLIIS

SEQ ID NO: 342026 - protein, 60 aa, Zea mays
  unsure (1)..(60): unsure at all Xaa locations
  Clone ID: MRT4577_75094C.1.pep
FPLGITAYKKMGGLGIGLSGVDSCPLTSQARWRVXGARSKGFTLASHSDAWAYAWAASRS

SEQ ID NO: 342027 - protein, 110 aa, Zea mays
  Clone ID: MRT4577_75095C.1.pep
FPAPVGTQNLQSPRTSSPRVRQIISNGFGEIVRHQSQAHCGRYVAILGRVSTGRGGLRRRSVRGYPWPILVLMVSLKPKPIWCRMLGLVFSYVIQVFWLYRLFVGVTVIF

SEQ ID NO: 342028 - protein, 88 aa, Zea mays
  Clone ID: MRT4577_75096C.1.pep
VSKKTLPQEVNQGFRDPAAKELPGILKVFNVPLVSVDFRGSEVSSPIDASLPMVMGAHMVKVFSWFANEWGSSQRVVALPDIWAPQWK

SEQ ID NO: 342029 - protein, 63 aa, Zea mays
  Clone ID: MRT4577_75097C.1.pep
KKKKKKKKKKKKKKKKKKKKKKKKKKKKQKKKKKKKKNFVLLAGEKPLRGKFWEKYQKTWGAV

SEQ ID NO: 342030 - protein, 48 aa, Zea mays
  Clone ID: MRT4577_75098C.1.pep
IFILRWEEGPSQCHSHSGFPWRTRSSSRALERIVCQSMDPPFLGQLTP

SEQ ID NO: 342031 - protein, 153 aa, Zea mays
  Clone ID: MRT4577_75099C.1.pep
KKKKKYMGAPLKKSNWPVGFPPNVPGEFPWGLPNLIALCGRSPSRLAWGNPWGGPARFPLSDHSPFLIGDCTHPGPADLPSEVWGVPPGESVPLSWALSPAPFVFFLPFLRRFLVFPLQPLIWGFFFGFLLRVYGFLAPNILVWVLVWLRGPS

SEQ ID NO: 342032 - protein, 76 aa, Zea mays
  unsure (1)..(76): unsure at all Xaa locations
  Clone ID: MRT4577_7509C.1.pep
XXQRRIHPVCLFPGTVGQHVSPNTEAHHIYFNLISLKIKPSKAEGSEETPPSTPADEDIDAPHQQKRPSLPXSAMR

SEQ ID NO: 342033 - protein, 52 aa, Zea mays
  Clone ID: MRT4577_750C.1.pep
WGITNFHIKAILVYRVEGEQKHLVDGVVNNGLDNYIINSEHNLWGNLPGEAN

SEQ ID NO: 342034 - protein, 271 aa, Zea mays
  Clone ID: MRT4577_75100C.1.pep
MDKGIFTNDGSFMERFKQMQQEAQEKKAAAASASSAPKHANPKQGFAVAANKRPFELKNAAPVASAGKLAFSLKKAKVAVAPVFAADEEDEDAVDVEREEPAKRQKSVQADAPAAAAPSAVEFGTRGHQREAKDEMPPPPSLQGPPKKGHHMGDFIPQEELEKFMARCNDAAAQKATKEAAEKAKIQADNIGHKLLSKMGWREGEGLGSERRGRADPVMAGDVKKDHLGVGAVQPGEVTSEDDIYEQYKKRMMLGYRYRPNPLNNPRKSYY

SEQ ID NO: 342035 - protein, 175 aa, Zea mays
  unsure (1)..(175): unsure at all Xaa locations
  Clone ID: MRT4577_75101C.1.pep
GKPEEEARGREDATAAAAAAAGAEQKAHDAAPGAGXXPXSXXXAXSXXDXNTRKGTGNXXXHXXXXNHNXRXPAXXTTXEXQXXNXAXAAAXPTXXTNXXXKESQXXGGTRXXDXDSXXXXDNEGGPXEQSTNPQDXKRXRRXGXNREXXRRARKRKQAHPXDXETQXDQXRSEN

SEQ ID NO: 342036 - protein, 214 aa, Zea mays
  Clone ID: MRT4577_75102C.1.pep
MGDFIPQEELEKFMARCNDAAAQKATKEAAEKAKIQADNIGHKLLSKMGWREGEGLGSERRGRADPVMAGDVKKDHLGVGAVQPGEVTSEDDIYEQYKKRMMLGYRYRPNPLVFCYFCLPDASAIFAEQSKEIILLMRGSSSEGRYNDVLLSWIILFSDLISVTSGSHKLFLVSSRGPNPHTGVGKVNLTWQARFGHPLYGCEVCTMYLVAIKV

SEQ ID NO: 342037 - protein, 218 aa, Zea mays
  unsure (1)..(218): unsure at all Xaa locations
  Clone ID: MRT4577_75103C.1.pep
METLRDMALPPGFGFHPKDTELVAHYLKKKILGQKIEYDIIPEVDIYKHEPWDLPAKCNVPTQDNKWHFFAARDRKYPNGARSNRATVAGYWKSTGKDRAIKVDKRTIGTKKTLVFHEGRPPTGKRTEWIMHEYYIDENECQSCPDMKDAFVLCKVTKRIDWTSENGNEVGNNNPQPQQANVAAILAVSVEQPDTAASSIYWVMNXPSDAATVDIPAH

SEQ ID NO: 342038 - protein, 248 aa, Zea mays
  unsure (1)..(248): unsure at all Xaa locations
  Clone ID: MRT4577_75104C.1.pep
GRLRYRSGIPGSTHASGLVGRVASASASGALRGLSPSAALPQAQLLLRAAPAGVHPARDYAAQASAAPKAGTATGRIVAVIGAVVDVQFDEGLPPILNALEVQGRDSRLVLEVAQHLGESTVRTIAMDGTEGLVRGQKVLDSGAPIKIPVGPETLGRIMNVIGEPIDERGPIKTKQFAPIHAEAPEFIEMSVEQEILVTGIKVVDLLAPYAKGGKIGLFGGAGVGKTVLIMELINNVAKANGXYSVFA

SEQ ID NO: 342039 - protein, 426 aa, Zea mays
  unsure (1)..(426): unsure at all Xaa locations
  Clone ID: MRT4577_75105C.1.pep
MDKGIFTNDGSFMERFKQMQQEAQEKKAAAASASSAPKHANPKQGFAVAANKRPFELKNAAPVASAGKLAFSLKKAKVAVAPVFAADEEDEDAVDVEREEPAKRQKSVQADAPAAAAPSGAVAPPPPNDMTVRQVAEXHIRSWGKLASFVAKNGRQFENITRQRNPGDTPFKFLFDKHCPDYKYYEFQLAEEERALAQSKEAEASKANSGTASFKAPGGTYRSSFEQKSNYQTPASALYGAYEGSSSQGSSSSYGDHTAPPSDPVALMEFYAKKAALEERKRPPRQSKDEMPPPPSLQGPPKKGHHMGDFIPQEELEKFMARCNDAAAQKATKEAAEKAKIQADNIGHKLLSKMGWREGEGLGSERRGRADPVMAGDVKKDHLGVGAVQPGEVTSEDDIYEQYKKRMMLGYRYRPNPLNNPRKSYY

SEQ ID NO: 342040 - protein, 44 aa, Zea mays
  Clone ID: MRT4577_75106C.1.pep
VFMFHKEILRDDLHDDGGRILSLIYFKLLWLVMENDTIKYLNLF

SEQ ID NO: 342041 - protein, 66 aa, Zea mays
  unsure (1)..(66): unsure at all Xaa locations
  Clone ID: MRT4577_75107C.1.pep
RPTRPKKTTTSLPLLPASAPAGPLGSQLXCTTRYRRTSCRMHACAEGQDGYAESVAYIIHEQRQTV

SEQ ID NO: 342042 - protein, 61 aa, Zea mays
  Clone ID: MRT4577_75108C.1.pep
FWTLFVSISLHKPHGGRKTNITNKLAQSNGCQMSHSKYNAKLIAETEQLISWAQEQNKTRS

SEQ ID NO: 342043 - protein, 46 aa, Zea mays
  Clone ID: MRT4577_75109C.1.pep
HLWIACCCMNHITGGTQLNLVSDLRGQLNNQVQFISTSLYGSLVVA

SEQ ID NO: 342044 - protein, 67 aa, Zea mays
  Clone ID: MRT4577_7510C.1.pep
LCTSVTLDAHWVREQGCSCCITVLMLVSWAILLIHISTVSLRLLYTANVGLNLHMIMDGATLVFKAV

SEQ ID NO: 342045 - protein, 308 aa, Zea mays
  Clone ID: MRT4577_75110C.1.pep
MRAGTISLAKESSTSYSSASRLPNLCKSCKLVGVEMPSGIDELTPLHTLGVVNAGIGGGKATLKELKKITQLRKLGVSGVNKKNNKEFCAAISCHVRLESLSVWLSKGNQGLNEISSQDKPLQNLQSLKLYGLGSEVPAWMKDLPKLTKLDLHMTISAEVDIIKVLGEIKELCTLRLCVKPLQDGDGKLDFCVWVNGIQQRCYLNLKILEITCSSKLNISFGSEAMQNLELLRARCCSGSTLKFMEIKNLSKQKLKEVQLIGSHDTALKDDMEKQLKEHPRKPPLKLEETRKMLISVFSNSIIGANPM

SEQ ID NO: 342046 - protein, 97 aa, Zea mays
  Clone ID: MRT4577_75111C.1.pep
GLEGGGVIGYSLIWCALRMSCQFLGITLFLFLRLLERFLLPARSKQGCGLLSPLNDLGSKFPLQFFFEGYNFCLFPKKKDPFVRGSPPLLLSETVKK

SEQ ID NO: 342047 - protein, 145 aa, Zea mays
  Clone ID: MRT4577_75112C.1.pep
NQQTAAIVVCLKMILTYFFSAASLGPSGSLPGRPYFRPLSVEHDGVQDALSVLITPNTLDDIMTKIITTLWFIWRARNELCFRLYLTVMISSGHYSCTRCAILSPCPSPYTIYQDMQLELQAHINASLEAARVQAPQKHVMIVLR

SEQ ID NO: 342048 - protein, 208 aa, Zea mays
  unsure (1)..(208): unsure at all Xaa locations
  Clone ID: MRT4577_75113C.1.pep
MGNMTRSDSPVSRRIVLSFLDFLNSVELAPGADPEALEVAKDCLESLFSINSSSTSXGYSQDFYLNSLLLCKLMNKIGQDQIPCHDQCQTNLPAXSTSSIQEEPNKCTTSNSEGQAEETFDLGDELFAKFFAALDEINFFKTSPAGAEDPDQLSKASQFFDDALLEVRKSGRKVASLVDLAEFFXSKGNDFMRSKQHLKAVELYTGGI

SEQ ID NO: 342049 - protein, 1446 aa, Zea mays
  Clone ID: MRT4577_75114C.1.pep
MDPKGKGIVINDKEKESFVNEPKDDKSNDSGSGHRRKDGKKKKTRRIKEIVYYDSDESSSSQKDDDNDYRKTVNSNFSFDYSRIPHSSNSHLLSIPLGKPPHFDGEDYGFWSHKMRSHLFSLHPSIWEIVENGMKFDSSDSPMFINEQIHKNAQATTVLLASLCRDEYNKVSGLDNAKQIWETLKISHEGNDITMLTKMELVEGELGRFAMIRGEEPSQTYNRLKTLINKIRSYGSTRWTDHDVVRLLLRSFTVLDPHLVNNIRENPRYTKMTPEEVLGKFVSGRMMIKEARYVDDALNGPINEHQPLALKATRSKEVLPSKVAQIEAAGLNDEEMALIIKRFKTVLKGHKGQPSKTKTKGKRSCFKCGKIGHFIANCPDNDSDQEQGNKREKKKNYKKAKGEAHIGKEWDSDCSSDSDNEGLAATAFNKSSLFPNEHHTCLMAREKKVSTRDSTYASSSDNESSDDDDIDYSCLFKGLDRSKIDKINELIDALNDKNVLLKKQEDLLYEEHDKFVEAQKSLALEINRNKMLSCELSTCHDSIASLKSINDDLNAKLEKSGKTTSCVEHVEICTRCKDFDVDACSDHLASISKLTEELASLNAQLKTSKNDFDKLKFARDAYTIGRHPSIKVYASGGSSWIIDSGCTNHMTGEKKMFTSYVKNKDSQDSIIFGDGNQGKDKSETQGTLKRFLRRAQNEFELKVKKIRSDNGSEFKNLQVEEFLEEEGIKHEFSAPYTPQQNGVVERKNRTLIDMARTMLGEFKTPERFWSEAVNTTCHAINRVYLHRLLKKTSYELLTGNKPNVSYFRVFGSKCYILVKKGRNSKFAPKAVEGFLLGYDSNTKAYRVFNKSSGLVEVSSDVVFDETNGSPREKVVDCDDVDEEDVPTAAIRTMAIGEVRPQEQDERHQPSSSTMVLPPTQDDEQVHQQEAYDQGGAQDDHVMEEDAQPAPPTQVRAMIQRDHLVDQILGDISKGVTTRSRLVNFCEHYSFVSSIEPFRVEEALLDPDWVLAMQEELNNFKRNEVWTLVPRPKQNVVGTKWVFRNKQDEHGVVTRNKARLVAKGYAQVAGLDFEETFAPVARLESIRILLAYAAHHSFRLFQMDVKSAFLNGPIKEEVYVEQPPGFKDERYPNHVCKLSKALYGLKQAPRAWYECLRDFLIANAFKVGKADPTLFTKTCNGDLFVCQIYVDEIIFGSTNQKSCEEFSRVMTQKFEMSMMGELNYFLGFQVKQLKDGTFISQTKYTQDLLKRFGMKDAKPAKTPMGTDGYTDLNKGDSDYAGCKVDRKSTSGTCQFLGRSLVSWNSKKQTSVALSTAEAEYVAAGQCCAQLLWMRQTLRDFGYNLSKIPLLCDNESAIRMAENPVEHNRTKHIDIRHHFLRDHQQKGDIEVFHVSTKNQLADIFTKPLDEKTFCRLRSSFCILLLIVVLKLYKHSLDLTSPLQSDAHV

SEQ ID NO: 342050 - protein, 120 aa, Zea mays
  unsure (1)..(120): unsure at all Xaa locations
  Clone ID: MRT4577_75115C.1.pep
PLELLHMDLFGPVAYLSIGXEDKTETQGTQKRFLRRAQNEFELKVKKIRSNNGSEFKNLQVEEYLEEEGIKHEFSAPCTPQQNGVVERKNRMLIDMARTMLGEFKMPERFWSEVVNTEST

SEQ ID NO: 342051 - protein, 33 aa, Zea mays
  Clone ID: MRT4577_75116C.1.pep
NSLGYPLISHSIKSITTNFIAKDKSISIVTLKN

SEQ ID NO: 342052 - protein, 1295 aa, Zea mays
  unsure (1)..(1295): unsure at all Xaa locations
  Clone ID: MRT4577_75117C.1.pep
MDPKGKGMVVNDKEESLFNEPRDDKPTDSGSSHKKRDGKKKRRIKKIIYYDSDASSSSPREDDDDDSSKKRTVNQNYSFDYSRMSYNSNAHLLSIPLGKPPHFDGEDYSFWSHKMCSHLFSLHPSIWEIVENGMHFNNTDNPVIINEQIHKNAQATTVLLASLCRDEYNKVSGLDNAKQIWDTLKISHEGNDATMITKMELVEGELGRFAMIRGEEPTQTYNRLKTLVNKIRSYGSTRWTDHDVIRLMLRSFTVIDPHLVNLIRENXVHKDDAQGDTRKIXSGRMMVKEARYVDDTLIGPLPVYEPQPVALKATSSKEALPSKVAQVEAAGLNEDEMSLIIKCFKTALKGRKKXPNKNKTKGKRSCFKCXDQGQEKSGKKEKKKSYRKAKGEAHLGKEWDSDCSSSDSDDEGLAASAFNKSSLFPNEHHTCLMAKEKKDRLLEKQEDILYEEHDKFISVQKSLALEIKRNEMLSSELSACHESVSSLKNLNDDLNAKLKKLVYASGGSSWIIDSGCTNHMTGEKKMFTSYVNNKDSQDTIIFGDGNQGKVKGLGKITITNEHSISNVFLLESLGYNLLSDKSETEGTLKRFLRRAQNEFDPMNLQVEEYLEEEGVKHEFSAPYTPQQNGVVERKNRTLIDMVRMMLGEFKTPERFWSEAVNTACHAINRLYLHRLLKKTSYELLIGNKPNVSYFRVFGSKCYILVKKGRHSKFAPRAVEGFLLRYDSNTKAYRVFNKSSGLVEVSSDVVFDDTNGSPREQVDLDDIDEDDVPTAAMCTMAIGDVRPQEQREQDQPSSSTMVHPPTQDGEQPFRVEEALQDPDWVLAMQEELNNFKRNEVWSLVPRPKQNIVGTKWVFCNKQDEHGVVTRNKARLVAKGYAQVAGLDFEETFAPVARLESIQILLAYAAHHSFRLFQMDVKSAFLNGPIKEEVYVEQPPGFEDDRXLYGLKXAPRAWLGXADPTLFTKTCDGDLFVCQIYVDDIIFGSTNQKSCEEFSRVMTQKFEMSMMGELNYFLGFQVKQLKDGTFISQMKYTQDLLKRFGMKDAKPAKTPMGTDGHVDLNKGGKSVDQKAYQSMIGSLLYLCASRPDIMLSVCMCARYQSDLKECHLVAVKRILRYLVSTPCFRIWYPKGSTFDLIGYSDSDYVGCKVDRKSTSGTCQFLGRSLVSWSSKKQTSIALSTTEAEYVAAGQCCVQLLCMRQTLQDFSYNLSKVPLLCDNESAIRMADNPVEHNRTKHIDIRHHFLRDHQKKGDIKVFHISTENQLADIFTKPLDEKTFCRLRSELNVLDSRNLD

SEQ ID NO: 342053 - protein, 69 aa, Zea mays
  Clone ID: MRT4577_75118C.1.pep
GSTTLPCCFPLPLLFYLCYGFVFFSLPPCLYTQGSCVHRLGFLSPFFCFLPHSNKIALNQRAFFGLKMV

SEQ ID NO: 342054 - protein, 1253 aa, Zea mays
  unsure (1)..(1253): unsure at all Xaa locations
  Clone ID: MRT4577_75119C.1.pep
MITKMELVEGELGRFAMIRGEEPTQTYNRLKTLVNKIRSYGSTRWMDHNVVRLMLRSFTVLDPHLVNSIRENPRYTKMTPEEILGKFVSGCMMIKEARYVDEALNGPMPIYEPQTVALKATSSREVLPSKVAQVEAAGLNEDEMALIIKRFKTALKGRKEYSNKNKAKGKRSCFKCGKTGHFIANCLDNSSDQEQGKGGKKEKQKSYRKAKGEAHIGKEWDSDCSSSDSDDEGLAAXAFNKSFLFPNERHTCLMAKEKKXDDEVDYTELFKGLDRSKVDKINELIDALNEKDRLLERQEDILYEEHDKFVSVQKSLALELKRNELLSSELSTCNETVASLKSINDDLNAKLEVVNKSSSCVEKIVICNRCKDFNVDACDEHLISISKLNDEVASLNAQLKTCKSDFDKLKFARDGYTVGRHLLIKDGLGFKKEAKNLTSQRAPIFNKEKGKAPMASCIQKNHAFIYHRKVSRNTHYNRSYGAYDSHAMIASSSTFVHGRSRPRKGNVIHHVPNKMPNESATVFHACNTDFVLSCKNKKVVARKLGAKCKGDKTCIWVPKDIVTNLVGPNKSWVYASGGSSWIIDSGCTNHMTGEKKMFSSYVKSKDSQDSIIFGDGNQGKVKGIGKIAISSEHSISNVFLVESLGYNLLSVSQLCNMGYNCLFTNIDVSAFRRSDGSLAFKGVLDDKLYLVNFSKEEADLDACLIAKTSMGWLWHHRLAHVGMKNLQKLLKGEHVLGLTNVSFEKDRPCGACQAGKQVGSTHHNKNVMTTARPLELLHMDLFGPVAYLSIGGSKYGLVIVDDFSRFTWVFLLQDKTETQGTLKRFLRRAQNEFELKVKKIRSDNGSEFKNLQVEEYLEEEGIKHEFSAPYTPQQNSVKGRNSKFTPKVVEGFLLGYDSNTKAYRVFNKSSGLVEVSSDVVFDETNGSPREQVDLDDVDEDDVPTDAIRTMAIGNPFRIEEALLDSDWVLAMQEELNNFKRNEVWTLVPCPKQNVVGTKWVFRNKQDEHGVVTRNKARLVAKGYAQLAGLDFEETFAPVARLESIRILLAYATHHSFRFQSDLRECHLVAVKRILRYLVAMPCFGIWYPKGSTFDLIGYSDSDYAGCKVDRKSTSGTCQFLGRSLVSWSSKKQTSVAISTAEAEYVAEGQCCAQLLWMRQTLRDFGYNLSKVPLLCDNESAIRMGGQSWLNTTRTKHIDIRHHFLRDHQQKGDIEVFYVSTENQLADIFTKPLDEKTFCRLRSELNVLDSCNLD

SEQ ID NO: 342055 - protein, 177 aa, Zea mays
  Clone ID: MRT4577_7511C.1.pep
LFPLNRLLGNDYRSHQHIAANSHARAASTTSPAIECRTPSLPGLQTPHPHPAVSSLRAPVCFLELQAQPITPTTLRDAPAVPSVLLPQGDIRVALQPQTLPLCKLLRESQGILVSLGHTIARSELPDLHWRMATQQDGTMLQKYDNGKRVLQKTNSTECATLPEESGMTTQPQPLQC

SEQ ID NO: 342056 - protein, 1507 aa, Zea mays
  unsure (1)..(1507): unsure at all Xaa locations
  Clone ID: MRT4577_75120C.1.pep
MDPKGKRMVVNDKEKESLFNEPRDDKPTDSGSSHKKRDEKKKRRIKKIIYYDSVASSSSQRXDDDNSSSKKKTXWEIVENGMHFDSTDNPVFINEQIYKNAQDTTVLLASLCRDEYNKGELGRFAMIRGEEPTQTYNRLKTLVNKIRSYESTRWTDHGVVRLMLKSFTVIDPHLVNLIREXQVHQDDARGVTQKIRXNGRMMAKEARYVDDALNGPLPIYEPQPVALKATSSKEALPSKGQEKHGKREKKKNYRKVKGEAHLGKEWDSDYSSSDSDDEGLAASAFDKSSLFPNESHTCLMAKEKKDRLLEKQEDILYEEHDKFVSVQKSLALEIKRNEMLSSELSACHESISSLKELNDDLNAKLEKANATSSCVEHTYKDDFDKLKFARDAYTVGRHPAIKDGLGFRKETKNLTSQRTSVLNKEKGKAPMASSSQKNHAYMYDRKFTRHAHNDRCHDHVVLPGYHTSHAMIASSSTYDYGRNRPRRNHAVSHAPRRVCNGPTTVYHTCNTSFVLLCKNAKVVARKLGSKSKGDKTCIWVPKTVVTNLAGPNKSWVYASGGSSWIINNGCTNHMTGEKKMFTSYVKNKDSQDTIIFGDGNQGKVKGLGKIAITNEHSISNVFLVESLGYNLLSVSQLCHMGYNYLFTNIVVSVFRRSDGSLAFKGVLDDKLYLVDFSKENADLDACLIAKTNMGWLWHRRLAHVGMKNLHKLLKGDHVLGLTDVCFEKDRPCATCQAGKQVGSTHHSKNVMTTSRPLELLHMDLFGPVAYLSIGGSKYGLVIVDDFPRFTWVFFLQDKSETQGTLKRFLRRAQNEFELKVKKIRSDNRSEFKNLQVEEFLEEEGIKHEFCAPYTPQQNGVVERKNMTLIDMARMMFGEYKTPEQFWSEAVNTACHAINRLYLHRLLKKTSYEILTGNKPNVSYFRVFRSKCYILVKKGRHSKFAPKVVEGFLLGYDSNTKAYKVFNKSSGLVEVSSDVVFDETNGPPREQVDLDDVDKEEVPTAAMRTMAIGDVRPQELQEQDQPSSSTMVHPPTQDDVQQNVVGTKWVFRNKQDEHEVVTINKTRLMAKGYAQIAGLDFEETFAPVARLESIRILLAYAAHHSFRMFQMNVKSAFLNGPIKEEVYMEQPPGFKDDRYPNHVYKLSKALYGLKQAPRAWYECLRDFLISNAFKVGKVDPTLFTKTCNGDIFVCQIYVDDIIFSSTNQKSCEEFSRVMTQKFEMSMMGELTYFLGFQVKQLKDGTFISQTKYTQDLLKRFGMKDAKPAIDGHFNLNKGGKSVDQKAYRSMIGPLLYLCASRPDIMLSVCMCARFQSDPKECHLVAVKQILRYLVSTPCFGIWYPKGSTFDLIGYLDSDYAGCKVDRKSTSRTCQFLGRSLVSWSSKKQTSVALSTAEAEYVAAGQCCAQLLWMRQTLRDFGYNLSKVPLVCDNESAIRLADNPVEHSRTKHIDIWHHLLRDHQQKGDIDVYHISTENQLADIFTKPLDEKRFCRLRSELNVLDSRNLD

SEQ ID NO: 342057 - protein, 1651 aa, Zea mays
  unsure (1)..(1651): unsure at all Xaa locations
  Clone ID: MRT4577_75121C.1.pep
MDPRGKGMVVNDKEKESFVNDPKDDKPTDSALAHKRKDERKKKTRRIKEIVYYNSDESSSSQKDDDIDYEKKKTFQCSFAFHSPRKTPHFDGEDXILESQNAXHLFSIHPSIWEIVENGMHFDSTDSPMFINEQIHKNAQATTVLLASLCRNEYHKVSGLDNAKQIWDTLKISHEGNDVTMLTKMELVEGELGRFAMIRGEEPTQTYNRLKTLVNKIRSYGSTRWTDHDVVRLMLRSFTVLDPHLVNNIRENXVHQDDTRGDTWKVXSGRMMIKEARYVDDALNGPIQEPQTIALKATRSKEALPSKVAQVEAAGLNNEEMALIIKRFKTALRGRKEHPNKTKTKGKRSCFKYGKIGHFIANCPDNDSDQEQGNKREKKKAYKKAKGEAHLGKECDSDCSSSDSDNEGLAATAFNKSALFPNEHHTCLMAREKKVSTRDTSTYASSSDEESSDDEIDYSCLFKGLDRTKVDKINELIDALDDKNRLLEKQEDLLYEEHDKFVEAQKSLALEIKRNEILSCELSSCHDSISSLKSINDDLNAKLEVATKSTSCVEHVAICNRCKDFNIDACSEHLVCISKLNDEVAILNAQLKTSKNDFDKLKFARDAYMIGRHPSIKDGLGFKREVKNLTSHKAPISIKEKGKAPMANSIQKNHAFLYHDRKYSTNVHHDRSCNDVVSHAYDSNAMFASSSSMMYDRSLARKNVYASRGSSWIIDSGCTNHMMGKKRMFSSYVKNKDSQDSIIFGDGNQSKVKGLGKIAISSEHSISNVFLVESLGYNLLSVSQLCNMGYNCLFTNVDVFVFRRSDGSLAFKGVLDDKLYLVDFAKEEAGLDACLIAKTSMGWLWHRRLAHVGMKNLHKLLKGEHIDLVQLVKQDKSETQGTLKRFLRRAQNEFELKVKKIRSDNGSEFKNLQVEEYLEEEGIKHEFSAPYTPQQNGVVERKNRTLLDMARTMLGEFKTPERFWTEAVSTACHAINRVYLHRLLKKTSYELLTGNKPNMSYFRVFGSKCYILVKKGRNSKFAPKAVEGFLLGYDSNTKAYRVFNKSSGLVEVSSDVVFNETNGSPREQVCDLDDADEEDVPTTAIRTMAIGDVRPQEQNERDQPSSSTMVHPPTQDDEQVHQEEACDQGGAQDDHAMEEEAQPAPPTQVRAMIQRDHPVDQILGDISKGVTTRSRLVNFCEHYSFVSSIEPFREELNNFKRNEVWTLVPRPKQNVVGTKWVFRNKQDEHGVVTRNKARLVAKGYAQVAGLDFEETFAPVARLESIRILLAYATHHSFRLFQMDVKSSFLNGPIKEEVYVEQPPGFEDERYPDHVCKLFKALYGLKQAPRAWYECLRDFLVANAFKVGKADPTLFTKTCDGDLFVCQIYVDDIIFGSTNQKSCEEFSRVMTQKFEMSMMGELSYFLGFQVKQLKDGTFISQTKYTQDLIKRFGMKDAKPAKTPMGTDGHTDLNKGGKSVDQKAYRSMIGSLLYLCASRPDIMLSVCMCARFQSDPRECHLVPVKRILRDLVATPCFGIWYPKGSTFDLIGYSDSDYAGCKVDRKSTSGQCCAQLLWMRQTLRDFGYNLSKVPLLCDNESAIRMADNPVEHSRTKHSDIRHHFLRDHQQKGDIEVFYVSTENQLADIFTKPLDESTFCTLRSELNVLDSRNLE

SEQ ID NO: 342058 - protein, 1782 aa, Zea mays
  Clone ID: MRT4577_75122C.1.pep
MDPKGKGMVVNNKTKESIVNESRDDKPSDSGLSHNKDGKKKRHIKKIVYYDSDKSSSPRDNEYEEKKKMFNSNAHLLSIPLGKPPHFDGEDYPFWSHKMRSHLFSLHPSIWEIVKNGMLFDSTDNPVFINEQIHKNAQATTVLLASLCRDEYNKMELVEGELGRFAMIRGEEPTQTYNRLKTLVNKIRSYGSTRWTNHDVVRLMLRSFTVLDPHLVNSIRENPRYTRMTPEEILGKFVSGRMMIKEARYVDEALNGPMPIYEPQTVALKATSSREALSSKVAQVEAARLNEDEMALIIKRFKTALKGRKEHPNKSKTKGKRSCFKCGKTGHFIANCLDNDSDQGQEKSEKREKKKSYKKAKGEAHLGKEWDLDCSSSDSDDEGLAASSFNKSSLFPNERHTCLMAKEKKVNARDTPMYASSSDNESSDDEVDYTGLFKGLDRTKIDKTNKLIDALNEKHRLLEKQEDILYEEHDKFISVQKSLALEVKRNEMLSFELSTCHETVSSLRSINDDLNAKLEVVNKSSSCVEHVVICNRCKDFDVDACVEHLTSITKLNGEVASLNAQLKTSKNDFDKLKFARDAYTVGKHPSIKDGLGFRKEAKNLTSQRAPISAQEKGKAPMANSAQRNHAFIYSDRKFSRNAHRSYAYDSHAMIASSSSFVHGRNMPRKNVAHVPRKVCNEPSTIYHACNTSFAICRKNKKVIARKLGAKCKGDKTCIWVPKSIITNLAGPNKSWVYASGGSSWIIDSECTNYMTGEKKMFTSYVKNKDSQDTIIFGDGDQGKVKGLGKIAITNEHSISNVFLVESLGYNLLFVSQLCHMGYNCLFTNVDVSVFRRSDGSLAFKGVLDGKLYLADFSKEDADLDTCLIAKTSMGWLWHRRLAHVGMKNLHKLLKGEHVLGLTNVFFEKDRPCAACQAGKQVGSTHHSKNVMTTSRPLELLHMDLFGPVAYLSIAGSKYGLVVVDDFSRFTWVFFLQDKSGTQGTLKRFLRRAQNEFELKVKKIRSDNGSEFKNLQVEEFLEEEGIKHEFSAPYTPQQNGVVERKNMTLIDMARTMLGEFKTPERFWSKAVNTACHATNRVYLHLLLKKTSYELLTGNKPNVSYFRVFGSKCYILVKKGRNSKFAPKAVEGFLLGYDSNTKAYRVFNKSSGLVEVSSDVVFDETNGSPREQVDLDDVPTDAIRTMAIGDVRPQEHQQQDQPSSSTMVHPPTQDDEQVPQEEACDQGGAQNVQDVEEEAPQAPPTQVRVTIQRNHAIDHILGDISKGVTTRSRLANFCDHYSFVSSIEPFRVEEALLDPDWVLAMQEELNNFKRNEVWTLVPRPKQNVVGTKWVFRNKQDEHGVVTRNKARLVTKGYAQVAGLDFEETFAPVARLESISILLAYVAHHSFRLFQMDVKSAFLNGPIKEEIYVEQPPGFEDERYPDHVCKLSKALYGLKQAPRAWYECLRDFLIANAFKVGKADPTLFTKTCDGDLFVCQIYVDDIIFGSTNQKSCEEFSRLNYFLGFQVKQLKDGTFISQTKYTQDLLKRFGMKDAKPAKTPMGTDGHVDLNKGGKSVDQKAYRSMIGSLLYLCASRPDIMLSVCMCARFQSDPRECHLVAVKRILRYLVATPCFGIWYPKGSTFDLIGYSDSDYAGCKVDRKSTSGTCQFLGKSLVSLSSKKQTSVILSTAEAEYVAAGQCCAQLLWMRQTLRDFGYNLSKVPLLGDNESAIRMADNPVEHSRTKHIGIQHHFLRDHQQKGDIEVFYVSTENQLAVIFTKPLDEKTFCRLRSELNVIDSRNLD

SEQ ID NO: 342059 - protein, 122 aa, Zea mays
  unsure (1)..(122): unsure at all Xaa locations
  Clone ID: MRT4577_75123C.1.pep
ARSGCVPPPPACGGRXCVLRGCXRRXASGPRRCAXPASSPGXPAXPCAXRGCRPCAVWPVVGRRXVRGSLPFXXXVFACGRCASLGCLAPXVSFWPPFLXLRPSSSGFSPPAELXLCLRCSX

SEQ ID NO: 342060 - protein, 1583 aa, Zea mays
  Clone ID: MRT4577_75124C.1.pep
MDPKGKGIVINDKEKESFVNKPKDDKPTDSGSGHKRRDGKKKKTRRIKEIVYYDDSDESTSSQKDNDDNDYDKRKTVNSNFSFDYSRIPQSTITHLLSIPLGKPPHFDGEDYGFWSHKMCSHLFSLHPSIWEIVESGMKFDSNDSPMFINEQIHKNAQATTVLLASLCRDEYHKVSGLDNAKQIWDTLKISHEGNDVTMLTKMELVEGELRRFAMISGEEPTQTYNRLKTLINKIRSYGSTRWMDHDVVRLMLRSFTVLDPHLVNNIRENPRYTKMTPEEILGKFVSGRMMIKEARYVDDTLNGPIHEPQPIALKATRSKEALPSKVAQVEAAGLNDEEVALIIKRFKTTLKVRKEHPNKNKTKGKRSCFKCGKIGHFIANCPDNDSDQEKKSGKWEKKKNYKKAKGEAHLGKEWDSDCSSSDSDNEGLAATAFNKSSLFPNEHHRCLMAKEKKVCTRNNTTYASSSEDESSDDDEIDYSCLFKGLDRTKIDKINELIDALNDKNRLLEKQEDLLYEEHDKFVGAQKSHALEVKRNEMLACELSTCHETISSLRSINDDLKAKSEIASKSTSCVENVVTCNRCKDFDIDACSKHLASMSKLNDEVASLNAQLKTSKSEFDKHPSIKDGLGFKREAKNLTSHKAPISAKEKGKAPMAISAKKNHAFMYHDRRYSRNAYRSYDTYDSYAMTASSSHVVHDRDIPRRNVVPRKINEPSTIYHACNDSFAICRKDKKVYASGGSSWIIDSGCTNHMTGEKKMFTSYVKNKGPQDSIIFGDGNQGKVKGLVKIAISNEHSISNVFLVDSLGYNLLSVSQLCNMGYNCLFTNVDVSVFRRSDGSLAFKGVLDGKLYLVDFAKEEVGLDACLIAKTSMGWLWHRRLAHVGMKNLHKLLKGEHVIGLTNVTFEKDRPCAACQAGKQVGSSHHAKNVMTTSRPLELLHMDLFGPVAYLSIGGSKYGLVIVDDFSRFTWVFFLQDKSETQGTLKRFLRRAQNEFELKVKKIRSDNGSEFKNLQVEEYLEEEGIKHEFSAPYTPQQNGVVERKNRTLIDMARTMLGEFKTPERFWSEAVNTACHAINRVYLHRLLKKTSYELLTGNKPNVSYFRVFGSKCYILVKKGRNSKFAPKAVEGFLLGYDSNTKAYRVFNKSSGLVEVSSDVVFDETNGSPREQVVDFDDVDEEEVPTAAIRTMAIGDVQPQEQDERDQPSSSTKVQPPTQDDEQEACDQGGAQDDHVMEEEAQPAPSTQVRAMIQRDHPVDQILGDISKGVTTRSRLVNFCEHYSFVSSIEPFRVEEALLEPDWVLVMQEELNNFKRNEVWTLVPRPKQNVVGTKLFQMDVKSAFLNGPIKEEVYVEQPPSFEDERYPDHVCKLSKALYGLKQAPRAWVMTQKFEISMMGELSYFLGFQVKQLKDGTFISQTKYTQDLIKRFGMKDAKPAKTPMGTDRHTDLNKGGKSVDQKAYQSMIGSLLYLCASRPDIMLSVCMCARFQSDPKECHLVAVKRILRYLVATPCFGIWYPKGSTFDLIGYSDSDYAGCKVDRKSTSGTCQFLGRSLVSWSSKKQTSVALSTAEAEYVAAGQCCAQLL

SEQ ID NO: 342061 - protein, 214 aa, Zea mays
  unsure (1)..(214): unsure at all Xaa locations
  Clone ID: MRT4577_75125C.1.pep
MASRLLTRSAASRLVSHLHRKTPGITPCLLTRGPALASLLGPTDGLPHAADSTLLRVPMRWLSSPSSEAVAEAPMTADGLTVDSIADKGWTILPEAESDWRSHAAAVAQSVKVIKKRLKWGWILERTKQLAVVLEKPDLWEDPVFAGRVSREQGELMGKIKSVNQFEQELIEHIEMLRLAREENDNELEMESMKALADMRRVXKEKELNAYLET

SEQ ID NO: 342062 - protein, 410 aa, Zea mays
  Clone ID: MRT4577_75126C.1.pep
MELVEGELGRFAMIRGEEPTQTYNRLKTLVNKIRSYGSTRWTDHDVVRLMLRYTKMTPEEILGKFVSGRMMIKEARYVDEALNGPMSIHEPQTVALKATSSREALPSKVAQVEAAGLNEDEMALIIKRFKTTLKGCKEHPNKSKTKGKRSCFKCGKIGHFIANCPDNDSDQEQVKNGKRENKKVYKKAKGEAHIGKEWDSDCSSSDSDDEELAATAFNKSSLFPNEHHTCLMAKEKKVYASGGSSWIIDSGCTNHMTGEKKMFTSYAKNKDSQDSIIFGDGNQGKDKSETQGTLKRFLRRAQNEFELKVKKIRSDNGSEFKNLQVEEYLEEEGVKHEFSAPYTPQQNGVEELNNFKRNEVWTLVPRPKQNVVGTKWVFRNKQDEHGVVTRNKARLVAKGYAQVAGCFKWM

SEQ ID NO: 342063 - protein, 37 aa, Zea mays
  unsure (1)..(37): unsure at all Xaa locations
  Clone ID: MRT4577_75127C.1.pep
TNKTXAVSPKRXRNISLSRWSIGPRFRHNAQAPIRQH

SEQ ID NO: 342064 - protein, 79 aa, Zea mays
  Clone ID: MRT4577_75128C.1.pep
KTFPPKSIDVKASRACCKKTKGATAGGKKEWKFSRHPSVQNPQLTPGSFVRIGLAPGPLLVVLLYWTNPPWGPWNGPFL

SEQ ID NO: 342065 - protein, 38 aa, Zea mays
  Clone ID: MRT4577_75129C.1.pep
PCFILWMTSIRSMCLNNHPGFDNGGILWFHSLTEFPHG

SEQ ID NO: 342066 - protein, 64 aa, Zea mays
  Clone ID: MRT4577_7512C.1.pep
MATIPTTGSASLLRGSAALQRDGRSTRPSSAARPLPGRRARSLSDVRASAKDIAFDQASRSVPP

SEQ ID NO: 342067 - protein, 451 aa, Zea mays
  Clone ID: MRT4577_75130C.1.pep
MAHRTVRSICRCVEINLYPPIDMGNSMRFFYRAYKYVIERSSSQSPRSQAVAGAPFLWISVMDPVKMGTGVQAYISYRVITKTNLPEFEGPEKIVIRRYSDFEWLHDRLAERYKGVFIPPLPEKNAVEKFRFSKEFIELRRQALDLFVNRIASHPELKQSDVLRTFLQADEEIMDRARSYETGIFKKPSDFLQMFKDVQSKVSDVVLGKEKPVEESTPEYEKLKSYIFELEIHLAEAQKQAYRLVKRHRELGQSLADFGKAIKLLGSCEGDLMEKVFSEVGSKSEMLSIKLQREADNLLFNFEEPLKDYVRALQSIKATMLDRANAFRQHFDLDQERKYKELNLEKLKFMNPEKYAEAESEFRGASCCNFPLRNSLHSLVDELKADSEEATKKFEHIVRLMNEELSRFQEQKTADIGLAFHEFAKGQAKLAKDIADAWRSVLPKLEACSTS

SEQ ID NO: 342068 - protein, 198 aa, Zea mays
  unsure (1)..(198): unsure at all Xaa locations
  Clone ID: MRT4577_75131C.1.pep
MAGDVATSPAPAPLSVSSSSQNHHHHGPTTARGLLCHAGAGASAGVVAATFVCPLDVIKTRFQVHGWPKLATGSVIIGSLQQIAQQEGFRGMYRGLSPTILALLPNWAVYFTVYEQLXSFLSSNDGSHQLSLGANVVAASCAGAATTIVTNPLWVVKTRFQTQGIRAGPIPYKGTLAALRRXSHEEASEXLYSGLXPA

SEQ ID NO: 342069 - protein, 379 aa, Zea mays
  unsure (1)..(379): unsure at all Xaa locations
  Clone ID: MRT4577_75132C.1.pep
MISPERSSSQSPRPHAEAGAPFLWISVMDPDKMGTGAQAYISYRVITKTNLPEFEAPQKIAIRRYSDFAWLHDRLAERYKGVFIPPLPEKNAXKFRHSKEFIELRRQAVDLFVNRIHSHPDXRQSDDEYTEEHTDEDIEAAARSYXQLNNGLSXDNRPFDSIPCLVHVVYHVSFTISXWYDQSSGYLFKTXAECTELGQSLADFGKAIKLLGACEGDLMEKVFSEVGSKSEMLSIKLQREXTRPSFYFEEPLKDYVRAVQSIKATMLDRANAFRQHFDLDQERKYKELNLEKLKFMNPEKYAEAESEFRELKADSEEATKKFEHIVRLMNEELARFQEQKTDDIGLAFHEFAKGQAKLAKDIADAWRSVLPKLEACSTS

SEQ ID NO: 342070 - protein, 64 aa, Zea mays
  Clone ID: MRT4577_75133C.1.pep
EKKNGRRYQSIDSFLRLRLKECVDYFSKMEGNIDLLGVEFEKLNIDFLVNQAWCKHNFVKASMI

SEQ ID NO: 342071 - protein, 398 aa, Zea mays
  Clone ID: MRT4577_75134C.1.pep
MISPERSSSQSQRSAAAGAPFLSISVTDPVKMGTGVQSYISYRVITKTNLPEFEGPEKIVIRRYSDFEWLHDRLAERYKGIFIPPLPEKNAVEKFRFSKEFIELRRQALDLFVNRIASHPELKQSDVLRTFLQADEEIMDRARSYETGIFKKPADFIQMFKDVQSKVSDVVLGKEKPVEESTPEYEKLKNYIFELENHLAEAQKQAYRLVKRHRELGQSLADFGKAIKHLGACEGDLMEKVFSEVGSKSEMLSIKLQREADNLLFNFEEPLKDYVRAVQSIKATMLDRANAFRQHFDLDQERKYKELNLEKLKFMNPEKYAEAESEFRELKADSEEATKKFEHIVRLMNEELARFQEQKTADIGLAFHEFAKGQAKLAKDIADAWRSVLPKLEACSTS

SEQ ID NO: 342072 - protein, 399 aa, Zea mays
  Clone ID: MRT4577_75135C.1.pep
MISPERSSSQSPRSQAVAGAPFLWISVMDPVKMGTGVQAYISYRVITKTNLPEFEGPEKIVIRRYSDFEWLHDRLAERYKGVFIPPLPEKNAVEKFRFSKEFIELRRQALDLFVNRIASHPELKQSDVLRTFLQADEEIMDRARSYETGIFKKPSDFLQMFKDVQSKVSDVVLGKEKPVEESTPEYEKLKSYIFELEIHLAEAQKQAYRLVKRHRELGQSLADFGKAIKLLGSCEGDLMEKVFSEVGSKSEMLSIKLQREADNLLFNFEEPLKDYVRALQSIKATMLDRANAFRQHFDLDQERKYKELNLEKLKFMNPEKYAEAESEFRGLKADSEEATKKFEHIVRLMNEELSRFQEQKTADIGLAFHEFAKGQAKLAKDIADAWRSVLPKLEACSTS

SEQ ID NO: 342073 - protein, 81 aa, Zea mays
  Clone ID: MRT4577_75136C.1.pep
PCESASMGDFTVTQEDNFLFVFGKLTPGIYGERNCITSDLISATSVVRTSFNALHCRPSKRSNALLIMTMNRICQKILSRL

SEQ ID NO: 342074 - protein, 58 aa, Zea mays
  Clone ID: MRT4577_75137C.1.pep
YGLVFAIFPLKQLSCFGHHLIDVSVACSLTGYNYSARHCYWKPNFATQPWNTIITVQW

SEQ ID NO: 342075 - protein, 50 aa, Zea mays
  Clone ID: MRT4577_75138C.1.pep
AGDAPVSRSSTTHRAHRAIYDVIRGGQHSASRRACALRVRRRMDGREILC

SEQ ID NO: 342076 - protein, 57 aa, Zea mays
  Clone ID: MRT4577_75139C.1.pep
PGLFLFWNQPKQPFRSGSLIPQLELARELAHEPNEPSHNTSLSSRKCRLISYSLDFS

SEQ ID NO: 342077 - protein, 88 aa, Zea mays
  Clone ID: MRT4577_7513C.1.pep
LGLVVDGLSPLHGRVAAGEGGRSEHWVRRRPEHGAVSENAEEAEEVLRHLVCRRCGGAAGGGRDGRHGRCQLRRDLRDLPQYKSRRLN

SEQ ID NO: 342078 - protein, 71 aa, Zea mays
  Clone ID: MRT4577_75140C.1.pep
ARGPIETRGREKELRDKEAAQRLYLQVKSEVEGCINYLKEKREEDPYRSILPRLLYQALHGPDAEIPTFEP

SEQ ID NO: 342079 - protein, 185 aa, Zea mays
  unsure (1)..(185): unsure at all Xaa locations
  Clone ID: MRT4577_75141C.1.pep
MAMSMAMSKVFTSRHSEHLHHRLVAASSQAAAPRLPLLPRSPGLAAVTVAYRPRLRPASPRSTSSESDLSPTPPSERTMTAWDLASLWVGLVVGVPSYYLAGSLVDLGMSALQGVATVAFANLIVLATLVLTAAPAVTHGLPFPVLARAAFGXRGAHVPAVIRAXIGCGWFGLXSWVRGRAIFLL

SEQ ID NO: 342080 - protein, 81 aa, Zea mays
  unsure (1)..(81): unsure at all Xaa locations
  Clone ID: MRT4577_75142C.1.pep
GSLQXTRAAQKGGKAGKXDAKPXXGAANRGDTTHXXXGANTAAXXEPNAGGTXGXPXXEGEPTXEDXEQAXNRAGGKXGNK

SEQ ID NO: 342081 - protein, 78 aa, Zea mays
  Clone ID: MRT4577_75143C.1.pep
LLQSGSKAEGTAIILSETCQTLLWSQDTFHGHCDTQLILFLVSFDIHFTSQVCSFHYAASQRPASRCYCVQQLQPNER

SEQ ID NO: 342082 - protein, 1754 aa, Zea mays
  Clone ID: MRT4577_75144C.1.pep
MDPKGKGIVINDKEKESFVNEPKDDKSNDSGSGHRRKDGKKKKTRRIKEIVYYDSDESSSSQNDDDNDYRKTVNSNFSFDYSRIPHSSNSHLLSIPLGKPPHFDGEDYGFWSHKMRSHLFSLHPSIWEIVENGMKFDSSDSPMFINEQIHKNAQATTVLLASLCRDEYNKVSGLDNAKQIWDTLKISHEGNDITMLTKMELVEGELGRFAMIRGEEPTQTYNRLKTLINKIRSYGSTRWTDHDVVRLMLRSFTVLDPHLVNNIRENPRYTKMTPEEVLGKFVSGRMMIKEARYVDDALNGPINEHQPLALKATSSKVAQIEAAGLNDEEMALIIKRFKTVLKGHKGQPSKTKTKRKRSCFKCGKIGHFIANCPDNDSDQEQGNKREKKKNYKKAKDEAHIGKEWDSDCSSDSDNEGLAATAFNKSSLFPNERHTCLMAREKKVSTRDSTYASSSDNESSDDDDIDYSCLFKGLDRSKIDKINELIDALNDKNVLLEKQEDLLYEEHDKFVEAQKSLALEIKRNEMLSCELSTCHDSIASLKSKNDDLNAKLEKSSKSTSCVEHVEICTRCKDFDVDACSDHLVSISKLTEELASLNAQLKTSKNEFDKLKFARDAYTIGRHPSIKDGLGFKREAKNLTSHKTPIPAKEKGKAPMATSVKKNHAFLYHDRKNSRNAFRSYDAYDSHAYDSYAMTASSSHVVHDRNVGRRNVVNIPRKVNEPSTIYHVLNASFAIYRKDRKVYASGGSSWIIDSGCTNHMTGEKKMFTSYVKNNDSQDSIIFGDGNQGKVKGLVESLGYNLLSVSQLCNMGYNCLFTNEDVSVFRRSDGSLAFKGVLDGKLYLVDFAKEEAGLDACLIAKTSMGWLWHRRLAHVGMKNLHKLLKGEHVIGLTNVQFEKDRPCAACQAGKQVGGAHHSKNVMTTSRPLELLHMDLFGPVAYLSIGGSKYGLVIVDDFSRFTWVFFLQDKSETQGTLKRFLRRAQNEFELKVKKIRSDNGSEFKNLQVEEFLEEEGIKHEFSAPYTPHQNGVVERKNRTLIDMARTMLGEFKTPERFWSEAVNTACHAINRVYLHRLLKKTSYELLTGNKPNVSYFRVFGSKCYILVKKGRNSKFAPKAVEGFLLGYDSNTKAYRVFNKSSGLVEVSSDVVFDETNGSPREQVVDCDDVDEEDVPTAPIRTMAIGEMRPQEQDERDEPSSSTMVLPPTQDDEQEACDQGGAQDDHVMEEDAQPAPPTQVRAMIQRDHPVDQILGDISKGVTTRSRLVNFCEHYSFVSSIEPFRVEEALLDPDWVLAMQEELNNFKRNEVWTLVPRPKQNVVGTKWVFRNKQDEHGVVTRNKARLVAKGYAQVAGLDFEETFAPVARLESIRILLAYAAHHSFRLYQMDVKSAFLNGPIKEEVYVEQPPGFEDERYPDHVCKLSKALYGLKQAPRAWYECLRDFLIVNAFKVGKADPTLFTKTCNGDLFVCQIYVDDIIFGSTNQESCEEFSRVMTQKFEMSMMGELNYFLGFQVKQLKDGTFISQTKYTQDLLKRFGMKDAKPAKTPMGTDRHTDLNKGGKSVDQKAYRSMIGSLLYLCASRPDIMLSVCMCARFQSNPKECHLVAVKRILRYLVATTCFGLWYPKGSTFDLVGYSDSDYAGCKVDRKSTSGTCQFLGRSLVSWNSKKQTSVALSTAEAEYVAAGQCCAQLLWMRQTLRDFGYNLSKVPLLCDNESAIRMAENPVEHSRTKHIDIRHHFLRDHQQKGDIEVFHVSTEN

SEQ ID NO: 342083 - protein, 1645 aa, Zea mays
  Clone ID: MRT4577_75145C.1.pep
MDPKGKGIMINDKEKESFVNEPKDDKPTDSGSGHRRKDGKKKKTRRIKEIIYYDDSDEFTSSQKDNNDDDYKKKKTVNSNFSFDYSRIPQSTNAHLLSIPLGKPPHFDGEDYGFWSHKMRSHLFSLHPSIWEIVESGMHFDSTDSPMFINEQIHKNAQATTVLLASLCRDEYHKVSGLDNAKQIWDTLKISHEGNDVTMLTKMELVEGELGRFAMIRGEESTQTYNQIKTLVNKIRSYGSTSFTVLDPHLVNNIRENPKYTKMTPEEILGKFVSGRMMIKEERYVDDALNGPINEPQPLALKATRSKETVPSKVAQIEAAGLNDEEMALIIKRFKTALKGCKGQPSKTKTKGKRSCFKCGKLGHFIANCPDNDSDQDQGNKREKKKNYKKAKGEAHLGKEWDSDCSSSDSDNEGLAATAFNKSSLFPNERHTCLMAREKKVCTRNSTYASSSEDESSDEDEIDYSCLFKGLDRTKVDKINELIDALNDKNRLLENQEDLLYEEHDKFVEAQKSHALEVKRNEVLSCELSSCHETISSLRSINDDLNARLEIASKSTSCVEIVETCNRCKDFDINACSKHLVSISKLSDEVASLSAQLKTSKSNFDKLKFSRDAYTVGRHPSIKDGLGFKREAKNLTSHKAPISAKEKGKAPMASSTKKNHAFMYNDRRQSYRSCNAYNAFDAHAYDSYAMFASSSSYMHGRDMPRKNIVHVARKVMDGPSTIYHTLNAFFAICKKDRKIVARKLGAKCKGDKTCIWVPKTIVTNLVGPNKSWVYASGGSSWIIDSGCTNHMTGEKKMFTSYVKNKDSQDSIIFGDGNQGKDKSETQGTLKRFLRRAQNEFELKVKKIRSDNGSEFKNLQVEEFLEEEGIKHEFSAPYTPQQNGVVERKNRTLIDMARTMLGEFKTPECFWSEAVNTACHAINRVYLHHLLKKTSYELLTGNKPNVSYFRVFGSKCYILVKKGRNSKFAPKAVEGFLLGYDSNTKAYRVFNKSSSLVEVSSDVVFDKTNGSPREQVVDCDDVDEEDVLTAAIRTMAIGDVRPQEQKKQDQPSSSTMVHPPTQDDEQVHQQEACDQGGAQDDHVMEEEAQPAPPTQVRAMIQRDHPVDQILGDISKGVTTRSRLVNFCEHYSFVSSIEPFRVEEALLDPDWVLAMQEELNNFKRNEVWTLVPRPKQNVVGTKWVFRNKQDEHGVVTRNKARLVAKGYAQVAGLDFEETFAPVARLESIRILLAYATHHSFRLFQMDVKSAFLNGPIKEEVYVEQPPGFEDERYPDHVCKLSKALYGLKQAPRAWYECLRDFLIANAFKVGKADPTLFTKTCDGDIFVCQIYVDDIIFGSTNKKSCEEFSRVMTQKFKMSMMGELNYFLGFQVKQLKDGTFISQTKYTQDLLKRFGMKDAKPAKTPMGTDGHTDLNKGGKSVDQKAYRSMIGSLLYLCASRPDIMLSVCMCARFQSDPKECHLVAVKRILRYLVATPCFGLWYPKGSTFDLIGYSDSDYAGCKVDRKSTSGTCQFLGRSLVSWNSKKQTSVALSTAEAEYVAAGQCCAQLLWMRQTLKDFGYNLSKVPLLCDNESTIRMAENPVEHSRTKHIDIRHHFLRDHQQKGDIEVFHVSTENQLADIFTKPLDETTFCRLRSELNVLDSWNLD

SEQ ID NO: 342084 - protein, 86 aa, Zea mays
  unsure (1)..(86): unsure at all Xaa locations
  Clone ID: MRT4577_75146C.1.pep
LFKIFRILGFLTNETWPGFAVVFDYKXAFPNWPPLDLATVVPTLXPAVIDLLFKMLSLDPIKRITFRAFLLHYYFMDLLHSLHYMD

SEQ ID NO: 342085 - protein, 66 aa, Zea mays
  Clone ID: MRT4577_75147C.1.pep
DAGPATSATAPCDGSGSKAPVFPSVGARWSACSSPVSSSSRIRFMPLETPNSLEAWSGSAWRPGPR

SEQ ID NO: 342086 - protein, 207 aa, Zea mays
  Clone ID: MRT4577_75148C.1.pep
MAGAMEKIKAKVENVLHKDKDTTHTGTSGTHTTGTHTTGTHNDPTGPHGSHAANQADPRVDSDRFGAAGNTAGAGGVGAGQYNGATGTHGTHGTTGSGLTGSHTTHGSDPTGPHDSHLANKADPRVDSDRVGTAGNTGSAAGIPHETHTSGQHTYRTDGSKLPEPLPEDRSHAEPHSGAGLTHSSHGHNTTGTGLTGSHTTHGSDPT

SEQ ID NO: 342087 - protein, 1616 aa, Zea mays
  unsure (1)..(1616): unsure at all Xaa locations
  Clone ID: MRT4577_75149C.1.pep
MSPEEVLGKFVSGRMMIKEARYVDDALNGPIHEPQPIALKATRSKEALPSKVAQIEAVGLNDEEMALIIKRFKTVLKGHKGQPSKTKAKGKRSCFKCGKIGHFIANCPDNDSDQEQGNKREKKKNYKKAKGEAHLGKEWDSDCSSSDSDNEGLAATAFNKSTLFPNECHTCLMAREKKVCTRNSTYASSSEDESSDEDEVDYSCLFKGLDRTKVDKINELIDALNDKNILLEKQEDLLYEEHDKFVEAQRSHALEVKRNEILSCELSSCHDTISKLRSINDDLNAKLEIASKSTSCVENVVACSRCKDINIDVYSEHLACISKLNEEVASLNAQLKTSKSDFEKLKFARDAYTVGRHPSIKDGLGFKKEAKNLTSHKAPISAKEKGKAPMASSTKRNHAFIYNDRRQTRNACRSYNAYDDFNSHAMFASSSSFMHGRNMPRKNIIHAPKKVVNEPSTIYCALNASFAICRKDKKIVARKLGAKCKGDKTCIWVPKDICTNLVGPNMSWVYASRGSSWIIDSGCTNHMTGEKKMFTSYVKNKDSQDSIIFGDGNQGKGDVGVPPKPRLSLPSVAVAEPEPRGRARRKSFGRGQGGVRALGSGEAEFRRLPGVSPSPSPGVGRSGVRRLPGXARVRALGSGGAEFAVFRVLARVRALGSGGAEFAVFRVLARVXPGVGRSGVRRLPGLSPSLXALGSGGAEFAVFRSEWRRRRCPXCQTGQWSGGVTAVTSALPRARVRIEVSGHLCVKCPCNLVSRCGDLVKVASERSQGLGRAGDVSAIKRGPRARRKSLEDKSETQGTLKRFLRRAQNEFELKVKKIRSDNGSEFKNLQVEEFLEEEGIKHEFSAPYTPQQNGVVERKNRTLIDMARTMLGEFKTPECFWTEAVNTACHAINRVYLHRLLKKTSYELLTGNKPNVSYFRVFGSKCYILVKKGRNSKFAPKAVEGFLLGYDSNTKAYRVFNKSSGLVEVSSDVVFDETNGSPREQVVDLDDVDEEDVPTAAMRTMAIGDVRPQEHLERDQPSSSTMVHPPTQDDEQVHQQEACDQGGAQVDHVMEEEAQPAPPTQVRAMIQRDHPVDQILGDISKGVTTRSRLVNFCEHYSFVSSIEPFRVEEALLDPDWVLAMHEELNNFKRNEVWTLVPRPKQNVVGTKWVFRNKQDEHGVVTRNKARLVAKGYAQVAGLDFEETFAPVARLESIRILLAYAAHHSFRLYQMDVKSAFLNGPIKEEVYVEQPPGFEDERYPDHVCKLSKALYGLKQAPRAWYECLRDFLIVNAFKVGKADPTLFTKTCDGDLFVCQIYVDDIIFGSTNQKSCEEFSRVMTQKFEMSMMGELNYFLGFQVKQLKDDTFISQTKYTQDLLKRFGMKDAKPAKTPMGTDGHTDLNKGGKSVDQKAYRSMIGSLLYLCASRPDIMLSVCMCARFQSDPKECHLVAVKRILRYLVATPCFGLWYPKGSTFDLVGYSDSDYAGCKVDRKSTSGTCQFLGRSLVSWNSKKQTSVALSTAEAEYVAAGQCCAQLLWMRQTLRDFGYNLSKVPLLCDNESAIRMAENPVEHSRTKHIDIRHHFLRDHQQKGDIEVFHVSTENQLADIFTKPLDEKTFCRLRSELNVLDSRNLD

SEQ ID NO: 342088 - protein, 238 aa, Zea mays
  unsure (1)..(238): unsure at all Xaa locations
  Clone ID: MRT4577_7514C.1.pep
MARKKIREYDSKRLLKEHLKRLAGIDLQILSAQVTQSTDFTELSNQEPWLSSMKLVVKPDMLFGKRGKSGLVALNLDRAQVRQFVKERLGVEVEMGGCKAPITTFIVEPFVPHDQEYYLSIMSDRLGCTISFSECGGIEIEENWDKVKTIFLPTEKPMTLDACAPLIATLPLEVRTKIGDFIRGSFSVFQDLDFSFMEMNPFTLVNGEPYPLDMRGELDDTAAFXNYRKWGDIEFPST

SEQ ID NO: 342089 - protein, 125 aa, Zea mays
  Clone ID: MRT4577_75150C.1.pep
VPTPMSATEKLSIHDGTPLGPEDVKTYRSIVGALQYLSHTRPDLAFAINKACQYLSAPSTVHWTAVKRILRYVKGTLRMGLKFCRSASLVVSGFSDADWAGCPDDRKSTGGYAVFLGSNLISWCA

SEQ ID NO: 342090 - protein, 264 aa, Zea mays
  unsure (1)..(264): unsure at all Xaa locations
  Clone ID: MRT4577_75151C.1.pep
AGRAAIHNQTTTTTTHNNSTTSHQHFINTPFDTALVQTTTQNGWSXWKRSRPRSRTSSTRTRTPHTQVPLAHTPLAHTTTPLALTAHTPPTRPTPALTLTVLVPQVTLLVLAASVLASTLAPQVLTVPXTTGSGLTGSHTTHGSDPTXLTTPTLPTRLTPALTLTVLALLATLAALQAFLTRLTLQVSTPTRLTAASCQSLFLKIGLMLNLTQVPAXTXTAVTDTTPAAVSPAAALTTTATLLVLTTXSLPTRPTLASTLTATL

SEQ ID NO: 342091 - protein, 1669 aa, Zea mays
  unsure (1)..(1669): unsure at all Xaa locations
  Clone ID: MRT4577_75152C.1.pep
MDPKGKGIVINDKEKESFVNEPRDDKSNDSGSGHKRRDGKKKKTRRIKEIVYYDSDESSSSQKDDDHDKQRKPVNSNFSFDYSRIPQSSNSHLLSIPLGKPPHFDGEDYGFWSHKMRSHLFSLHPSIWEIVDSGMHFNSSDSPIFINEQIHKNAQATTVLLASLCRDEYNKVSGLDNAKQIWDTLKISHEGNDATLLTKMELVEGELGRFAMIRGEEPTQTYNRLKTLINKIRSYGSTRWTDHDVVRLMLRSFTVLDPHLVNNIRENPRYTKMSPEEVLGKFVSGRMMIKEARYVDDALNGPINEPQPFALKATGNKEALPSKVAQIEAAGLNEEEMTLIIKRFKTVLKGRNGQPSKTKTKGKRSCFKCGKLGHFIANCPDNDSDQEKGNKREKKKHYKKAKGEAHLGKEWDSDCSSSDSDNEGLAATAFDKSTLFPNERHTCLMAREKKVCTRNSTYASSSEDESSDEDEVDYSCLFKGLDRSKIDKINELIDALNEKNILLEKQEDLLYEEHDKFVEAQKSYALEVKRNKMLSFELSTCHETISTLKGVNNDLNAKLEVANKSNSCVEHVEICTRCKDFDINACSEHLVSISKLNDELASLNAQLKTSKNDFDKLKFARDAYTIGRHPSIKDGLGFKREAKNLTSHKAPIPAKEKXGKAPMASNVQKNHAFMYYDRRQTRNAYRSYNAFDDFDSHAMFAPSSSYVYDRNVTRRNVVPKRNTIHHVSRKNAIHAPRKVVNEPSTIYYALNASFAICRKDKKIVARKLGAKCKGDKTCIWVPKDICTNLVGPNMSWVYASGGSSWIIDSGCTNHMTGEKKMFTSYVKNKDSQDSIIFGDGNQGKDKSETQGTLKRFLRRAQNEFELKVKKIRSDNGSEFKNLQVEEFLEEEGIKHEFSAPYTPQQNGVVERKNRTLIDMARTMLGEFKTPECFWTEAVNTACHAINRVYLHRLLKKTSYELLTGNKPNVSYFRVFGSKCYILVKKGRNSKFAPKAVEGFLLGYDSNTKAYRVFNKSSGLVEVSSDVVFDETNGSPREQVFDCDDIDEEDVPTAAIRTMAIGEVRPQEQDEQDQPSSSIMVHPSTQDDEQVHQKEACDQGGAQDDHVMEEEAQPAPPTQVRATIQRDHPVDQILGDISKGVTTRSRLVNFCEHYSFVSSIEPFRVEEALLDPDWVLAMQEELNNFKRNEVWTLVPRPKQNVVGTKWVFRNKQDEHGVVTRNKARLVAKGYAQVAGLDFEETFAPVARLESIRILLAYAAHHSFRLYQMDVKSAFLNGPIKEEVYVEQPPGFEDERYPDHVCKLSKALYGLKQAPRAWYECLRDFLLANAFRVGKADPTLFTKTCDGDLFVCQIYVDDIIFGSTNQKSCEEFSRVMTQKFEMSMMGELNYFLGFQVKQLKDGTFISQTKYTQDLLKRFGMKDAKPAKTPMGTDGHTDLNKGGKSVDQKAYRSMIGSLLYLCASRPDIMLSVCMCARFQSDPKECHLVAVKRILRYLVATPCFGLWYPKGSTFDLVGYSDSDYAGCKVDRKSTSGTCQFLGRSLVSWNSKKQTSVALSTAEAEYVAAGQCCAQLLWMRQTLRDFGYNLSKVPLLCDNESAIRMAENPVEHSRTKHIDIRHHFLRDHQQKGDIEVFHVSTENQLADIFTKPLDEKTFCRLRSELNVLDSRNLD

SEQ ID NO: 342092 - protein, 306 aa, Zea mays
  Clone ID: MRT4577_75153C.1.pep
QKSCEEFSRVMTHKFEMSMMGELTYFLGFQVKQLKDGTFISQTKYTQDLLKRFGMKDAKPAKTPMGTDGHTDLNKGGKSVDQKAYRSMIGSLLYLCASRPDIMLSVCMCARFQSDPKECHLVAVKRILRYLVATPCFGIWYPKGSNFDLIGYSDSDYAGCKVDRKSTSGTCQFLGRSLVSWSSKKQTSVALPTAEVEYVAAGQCCAQLLWMRQTLRDFGYNLSKVPLLCDNESAIRMADNPVEHSRTKHIDIRHHFLRDHQQKGDIEVFHVSTENQLADIFTKPLDESTFCRLRSELNVLDSRNLD

SEQ ID NO: 342093 - protein, 57 aa, Zea mays
  Clone ID: MRT4577_75154C.1.pep
SNLNTSHWKQLYNIATRKSLPPPQLNNIASHSPFANWPPTEIPQSDNTSQHLIRMNA

SEQ ID NO: 342094 - protein, 149 aa, Zea mays
  Clone ID: MRT4577_75155C.1.pep
MSVELILWLFSFVSVMVLIGLTAYQLICLSDLEYDYINPYDSSSRINAVVLIEYSLQGALCASFLLTLHWFPFLVMTPVTYYHVKLYLARKHLVDVTEIFRQLSDEKKYRMIKLAFYFCLFIITIYRLVMTAVMLFIDEDINLAETRSI

SEQ ID NO: 342095 - protein, 1626 aa, Zea mays
  Clone ID: MRT4577_75156C.1.pep
MDPKGKGIVINDKEKESFVNEPKDDKPTDSGSGHRRKEGKKKKTRRIKEIIYYDDSDESTSSQKDDDNDYKKTVNSNFSFDYSRIQHSSNSHLLSIPLGKPPHFDGEDYGFWSHKMRSHLFSLHPSIWEIVENGMKFDSSDSPMLINEQIHRNAQATTVLLASLCREEYNKVSGLDNAKQIWDTLKISHEGNDITMLTKMELVEGELGRFAMIRGEEPTQTYNRLKTLINKIRSYGSTRWTDHDVVRLMLRSFTVLDPHLVNNIRENPRYTMMTPEEVLGKFVSGRMMIKEARYVDDALNGPLHEPQPIALKATRSKESLPSKVAQVEAAGLNDEEMALIIKRFKTALKGRKGQPSKAKTKGKRSCFKCGKLGHFIANCPENDSDQEQGKNGKRENKKVYKKAKGEAHLGKEWDSDCSSSDSDDEGLAATAFNKSALFPNEHHTCLMAREKKVITRNANTYDSSSDDESSEDEIDYSSLFKGLDRTKIAKINELIDALNEKDRILEKQEDLLYEEHDKFVSAQNSLALEVKRNGILSCELSTCNETISSLKGEINVLTTKLEVASNSCVENITICTRCKDFDVNACSEHLVSISKLNDEMASLNAQLKTSKSEVDKIKFARDAYTIGRHPSIKDGLGFKREAKNLTSHKAPIFVKEKGKAPMANSAKRNHAFLYHDRRHARNAYNDSDSHVYDSHAMFASSSSYKHDRDMCRRNVVHMPRRNFAHVPRKVVNKPSTIYYACNAPFAICRKGKKVYASGGSSWIIDSGCTNHMTGEKKMFTSYVKNKDSQDSIIFGDGNQGKDKSETQGTLKRFLRRAQNEFELKVKKIRSDNGSEFKNLQVEEFLEEEGIKHEFSAPYTPQQNGVVERKNRTLIDMARTMLGEFKTPEYFWSEAVNTACHAINRVYLHRLLKKTSYELLTGNKPNVSYFRVFGSKCYILVKKGRNSKFAPKAVEGFLLGYDSNTKAYRVFNKSSGLVEVSSDVVFDETNGSPREQVVDCDDVDEEDVPTAAIRTMAIGEVRPQEQDERDQPSSSTMVHPPTEDDEQVPQVEALDQGGAQDDQVMEEEAQPAPPTQVRAMIQRDHPVDQILGDISKGVTTRSQLVNFCEHYSFVSSIEPFRVEEALLDPDWVLAMQEELNNFKRNEVWTLVPRPKQNVVGTKWVFRNKQDEHGVVTRNKARLVAKGYAQVAGLDFEETFAPVARLESIRILLAYAAHHSFRLFQMDVKSAFLNGPIKEEVYVEQPPGFEDERYPNHVCKLSKALYGLKQAPRAWYECLRDFLIANAFKVGKADPTLFTKTCDGDLFVCQIYVDDIIFGSTNQKSCEEFSRVMTQKFEMSMMGELNYFLGFQVKQLKDGNFISQTKYTHDLLKRFGMKDAKPAKTPMGTDGHTDLNKGGKSVDQKAYRSMIGSLLYLCASRPDIMLSVCMCARCQSDSKECHLVAVKRILRYLVATPCLGLWYPKGSTFDLVGYSDSDYAGCKVDRKSTSGTCQFLGRSLVSWNSKKQTSVALSTAEAEYVAAGQCCAQLLWMRQTLRDFGYNLSKVPLLCDNESAIRMAENPVEHSRTKHIDIRHHFLRDHQQKGDIEVFHVSTENQLADIFTKPLDEKTFCRLRSELNVLDSRNLD

SEQ ID NO: 342096 - protein, 45 aa, Zea mays
  Clone ID: MRT4577_75157C.1.pep
APPPVSSYMSSLNALGAALPGHPTDRWDSDALEQFGNTFRCCLES

SEQ ID NO: 342097 - protein, 77 aa, Zea mays
  Clone ID: MRT4577_75158C.1.pep
NQQKQSSYVMSSRSTNATEKVVGSPPPDLAAAFRCSSNRSRRASLLVHRPRALRVDSENGDLAEDAEHALLLEPELL

SEQ ID NO: 342098 - protein, 36 aa, Zea mays
  Clone ID: MRT4577_75159C.1.pep
LYKNPITQRKYTKVKRLHIPIYYSREQSSPARVSTS

SEQ ID NO: 342099 - protein, 104 aa, Zea mays
  Clone ID: MRT4577_7515C.1.pep
MSAAAGGLRRLLAAAATAGAAEVRASIFGHALNPTGRRAATKLLRKKMVGDQVAQWYPYDIKRDDPLVMAREEKERLAKLEMLKRRGKGPPKKGQGRRAVKRSK

SEQ ID NO: 342100 - protein, 36 aa, Zea mays
  Clone ID: MRT4577_75160C.1.pep
MSVELILWLFSFVSVMVLIGLTAYQVFGSETSCRCH

SEQ ID NO: 342101 - protein, 177 aa, Zea mays
  unsure (1)..(177): unsure at all Xaa locations
  Clone ID: MRT4577_75161C.1.pep
QWYQRRVLFFFFFFFFGKADPTLFTXTCDGDLFVCQIYVDDIIFGSTNQKSCEEFSRVMTQKFEMSMMGELNHFLGFQVKQLKDGTFISQTKYTQDLLKRFGMKDAKPVKTPMGTDGHTDLNKGGKSVDQKAYRSMIGSLLYLCASRSDIMLSVCMCARFQSNPKECHPAYSALLPL

SEQ ID NO: 342102 - protein, 67 aa, Zea mays
  Clone ID: MRT4577_75162C.1.pep
TFSYAFASNKTWLSTCSIPMTSWWRSLDTPSFCQIYVLINKQHHSCHYKPVKFNRKCEQLDYATYCS

SEQ ID NO: 342103 - protein, 1664 aa, Zea mays
  Clone ID: MRT4577_75163C.1.pep
MDPKGKGIVINDKEKESFVNEPKDDKTTDSGSGHKCKDGKKKKTRRIKEIVYYDDSDESTSSQKDDDNDYRKTVNSNFSFDYSRIPHSSNSHLLSIPLGKPPHFDGEDYGFWSHKMRSHLFSLHPSIWEIVENGMKFDSSDSPMLINEQIHRNAQATTVLLASLCREEYNKVSGLDNAKQIWDTLKISHEGNDITMLTKMELVEGELGRFAMIRGEEPTQTYNRLKTLINKIRSYGSTRWTDHDVVRLMLRSFTVLDPHLVNNIRENPRYTKMSPEEVLGKFVSGRMMIKEARYVDDALNGPIHEPQPIALKATRSKEALPSKVAQVEAAGLNNEEMALIIKRFKTALKGRKGQPSKTKTKEKRSCFKCGKLGHFIANCPDNESDQEQGSKREKKKAYKKAKGEAHLGKEWDSDCSSSDSDNEGLAATAFNKSSLFPNEHHTCLMAREKKVSTQDSTYASSSDNESSDDDDIDYSCLFKGLDRSKIDKINELIDALNDKNRLLEKQEDLLYEEHDKFVSAQNSLALEIKRNEVLSSELSSCHETIATLKGVNNDLNAKLEVASKSNSCVEHVMVCTRCKDFNIDACSKHLVSISKLNDEVASLNAQLKTSKSDFDKLKFARDAYTIGRHPSIKDGLGFKREVKNLTSHKAPIPTKEKGKAPMATSAKKNHAFLYHDRKNSRNAFRSYDVFNSHAYDSYAMTASSSSYMHGRNVTRRNAIHHVPRKNIIHAPRKVVNEPSTIYCALNASFAICRKDRKIVARKLGARCKGDKTCIWVPKDICANLVGPNMSWVYASGGSSWIIDSGCTNHMTGEKKMFTSYVKNKDSQDSIIFGDGNQGKDKSETQGTLKRFLRRAQNEFELKVKKIRSDNGSEFKNLQVEEFLEEEGIKHEFSAPYTPQQNGVVERKNRTLIDMARTMLGEFKTPERFWSEAVNTACHAINRVYLHRLLKKTSYELLTGNKPNVSYFRVFGSKCYILVKKGRNSKFTPKAVEGFLLGYDSNTKAYRVFNKSSGLVEVSSDVVFDETNGSPREQVVDCDDVDEEDVPTAAIRTMAIGEVRPQEHDERDQTSSSTMVLPPTQDDEQVHQQEACDQGGAQDDRVMEEDAQPAPPTQVRAMIQRDHPVDQILGDISKGVTTRSRLVNFCEHYSFVSSIEPFRVEEALLDPDWILAMQEELNNFKRNEVWTLVPRPKQNVVGTKWVFRNKQDEHGVVTRNKARLVAKGYAQVAGLDFEETFAPVARLESIRILLAYAAHHSFRLYQMDVKSAFLNGPIKEEVYVEQPPGFEDERYPDYVCKLSKALYGLKQAPRAWYECLRDFLIANAFKVGKADPTLFTKTCDGDLFVCQIYVDDIIFGSTNQKSCEEFSRVMTQKFEMSMMGELNYFLGFQVKQLKDGTFISQTKYTQDLLKRFGMKDAKPAKTPMGTDGHTDLNKGGKSVDQKAYRSMIGSLLYLCASRPDIMLSVCMCARFQSNPKECHLVAVKRILRYLVATPCFGLWYPKGSTFDLVGYSDSDYAGCKVDRKSTSGTCQFLGRSLVSWNSKKQTSVALSTAEAEYVAAGQCCAQLLWMRQTLRDFGYNLSKVPLLCDNESAIRMAENPVEHSRTKHIDIRHHFLRDHQQKGDIEVFHVSTENQLADIFTKPLDEKTFCRLRSELNVLDSRNLD

SEQ ID NO: 342104 - protein, 93 aa, Zea mays
  Clone ID: MRT4577_75164C.1.pep
MSVELILWLFSFVSVMVLIGLTAYQLICLSDLEYDYINPYDSSSRINAVVLIEYSLQGALCASFLLTLHWFPFLVMTPVTYYHVKLYVLLALG

SEQ ID NO: 342105 - protein, 1663 aa, Zea mays
  Clone ID: MRT4577_75165C.1.pep
MDPKGKGIVINDKEKESFVNEPKDDKSNDSGSGHRRKDGKKKKTRRIKEIVYYDDSDESTSSQKDDVHNDYERRKPVNSNFSFDYSRIPQSTNAHLLSIPLGKLPHFDGEDYGFWSHKMRSHLFSLHPSIWEIVENGMHFDSTDSPMFINEQIHKNAQATTVLLASLCRDEYHKVSGLDNAKQIWDTLKISHEGNDVTLLTKMELVEGELGRFAMIRGEEPTQTYNRLKTLINKIRSYGSTRWTDHDVVRLMLRSFTVLDPHLVNNIRENPRYTKMSPEEVLGKFVSGRMMIKEARYVDDALNGPIHEPQPIALKATRSKEALPSKVAQVEAAGLNNEEMALIIKRFKTALKGRKGQPSKTKTKEKRSCFKCGKIGHFIANCPDNESDQEKGNKREKKKHYKKAKGEAHIGKEWDSDCSSSDSDNEGLAATAFNKSSLFPNERHTCLMAREKKVSTHNTSTYASSSEDESSDDDEIDYSCLFKGLDRSKINKINELIDALNDKNRLLEKQEDLLYEEHDKFVSAQNSIALEIKRNEMLSGELSTCHETISTLQGVNNDLNAKLEVANKSNSCVEHVIICTRCKDFDIDACSEHLVSISKLNDELDSLNAQLKTSKNDFDKLKFARDAYTIGRHPSIKDGLGFKREAKNLTSHKAPISAKEKGKAPMASSTKRNHAFMYHDRRQTRNAYRNYNAFDSHAMFASSSSYMHGRNMSRRNAIHHVPRKNIIHAPRKVVNEPSTIYCALNASFAIYRKDRKIVARKLGAKCKGDKTCIWVPKDICTNLVGPNMSWVYASGGSSWIIDSGCTNHMTGEKKMFTSYVKNKDSQDSIIFGDGNQGKDKSETQGTLKRFLSRAQNEFELKVKKIRSDNGSEFKNLQVEEFLEEEGIKHEFSAPYTPQQNGVVERKNRTLIDMARTMLGEFKTPERFWSEAVNTACHAINRVYLHRLLKKTLYELLTGNKPNVSYFRVFGSKCYILVKKGRNSKFAPKAVEGFLLGYDSNTKAYRVFNKSSGLVEVSSDVVFDETNGSPREQVVDLDDIDEEDVPTAAIRTMTIGDVRPREQLEQDQPSSSTMVNPPTQDDEQVLQVEAHDQGGAQDVQVEEEEAPQAPPTQVRAVIQRDHPVDQILGDISKGVTTRSRLVNFCEHYSFISSIEPFRVEEALLDPDWVLAMQEELNNFKRNEVWTLVPRPKQNVVGTKWVFRNKQDEHGVVTRNKARLVAKGYAQVAGLDFEETFAPVARLESIRILLAYASHHSFRLFQMDVKSAFLNGPIKEEVYVEQPPGFEDERYPDHVCKLSKALYGLKQAPRAWYECLRDFLIANAFKVGKADPTLFTKTCDGDLFVCQIYVDDIIFGSTNKKSCEEFSRVMTQKFEMSMMGELNYFLGFQVKQLKDGTFISQTKYTQDLLKRVGMKDAKPAKTPMGTDGHTDLNKGGKSVDQKAYRSMIGSLLYLCASRPDIMLSVCMCARFQSDPKECHLVAVKRILRYLVATPCFGIWYPKGSTFDLIGYSDSDYAGCKVDRKSTSGTCQFLGRSLVSWNSKKQTSVALSTAEAEYVAAGQCCAQLLWMRQTLRDFGYNLSKVPLLCDNESAIRMAENPVEHSRTKHIDIRHHFLRDHQQKGDIEVFHVSTENQLADIFTKPLDEKTFCRLRSELNVLDSRNLD

SEQ ID NO: 342106 - protein, 1661 aa, Zea mays
  Clone ID: MRT4577_75166C.1.pep
MDPKGKGMVVDNNEKESIFNEPKNDKSTDLGSSHKRKDGKKKKTRRIKEIVYYDSDESSSSQKDDDHNDYEKRKPVNSNFSFDYSRIPQSSNSHLLPIPLGKPPHFDGEDYGFWSHKMRTHLFSLHPSIWEIVESGMQFDSSDSPMFINEQIHKNAQATTVLLASLCRDEYNKVSGLDNAKQIWDTLKISHEGNDITMLTKMELVEGELGRFAMIRGEEPTQTYNRLKTLINKIRSYGSTRWTDHDVVRLLLRSFTILDPHLVNNIRENPRYTKMSPEEVLGKFVSGRMMIKEARYVDDALNGPINEPQPFALKATRSKEALPSKVAQIEAAGLNDEEMALIIKRFKTVLKGHKGQPSKTKTKGKRSCFKCGKIGHFIANCPDNDSDQEQGNKREKKKNYKKAKGEAHLGKEWDSDCSSSDSDNEGLAATAFNKSTLFPNERHTCLMAREKKVCTRNSTYASSSEDESSDEDEVDYSCLFKGLDRTKVDKINELIDALNEKNILLEKQEDLLYEEHDKFVEAQRSHALEVKRNEMLSCELSSCHDTIFKLRSINDDLNAKLEIASKSTSCIENVVTCTRCKDINIDAYSEHLACISKLNEEVASLNAQLKTSKSDFEKLKFARDAYTVGRHPSIKDGLGFKREAKNLTSHKAPISAKEKGKAPMASSIKRNHAFIYHDRRQTRNAYRSYNAYDDFNSHAMFASSSSFMHGRNMSKKNAMPRKNVTHAPRKVVNEPSTIYCALNASFAICRKDKKIVARKLGAKCKEDKTCIWVPKDICTNLVGPNMSWVYASGGSSWIIDSGCTNHMTGEKKMFTSYVKNKDSQDSIVFDDGNQGKDKSETQGTLKRFLRRAQNEFELKVKKIRSDNGSEFKNLQVEEFLEEEGIKHEFSAPYTPQQNGVVERKNRSLIDMARTMLGEFKTPECFWTEAVNTACHAINRVYLHRLLKKTSYELLTGNKPNVSYFRVFGSKCYILVKKGRNSKFAPKAVEGFLLGYDSNTKAYRVFNKSSGLVEVSSDVVFDETNGSPREQVVDCDDVDEEDVPTAAIRTMAIGDVRPQEHLEQAQPSSSTMVHPPTQDDEQVPQVEACDQGGAQDDHVMEEEAQPAPPTQVRAMIQRDHPVDQILGDISKGVTTRSRLVNFCEHYSFVSSIEPFRVEEALLDPDWVLAMQEELNNFKRNEVWTLVPRPKQNVVGTKWVFRNKQDEHGVVTRNKARLVAKGYAQVAGLDFEETFAPVARLESIRILLAYAAHHSFRLYQMDVKSAFLNGPIKEEVYVEQPPGFEDERYPDHVCKLSKALYGLKQAPRAWYECLRDFLIVNAFKVGKADPTLFTKTCDGDLFVCQIYVDDIIFGSTNQKSCEEFSRVMTQKFEMSMMGELNYFLGFQVKQLKDGTFISQTKYTQDLLKRFGMQDAKPAKTPMGTNGHTDLNKGGKSVDQKAYRSMIGSLLYLCASRPDIMLSVCMCARFQSDPKECHLVAVKRILRYLVATPCFGLWYPKGSTFDLVGYSDSDYAGCKVDRKSTSGTCQFLGRSLVSWNSKKQTSVALSTAEAEYVAAGQCCAQLLWMRQTLRDFGYNLSKVPLLCDNESAIRMAENPVEHSRTKHIDIRHHFLRDHQQKGDIEVFHVSTENQLADIFTKPLDEKTFCRLRSELNVLDSRNLD

SEQ ID NO: 342107 - protein, 90 aa, Zea mays
  unsure (1)..(90): unsure at all Xaa locations
  Clone ID: MRT4577_75167C.1.pep
VLFCLPVAYPVAKDAFKYTPVSFDGVMVHSLVAWVLHDRIXFCGPITNVSRCLQASVVTFNAFYEVAIWFNMSFHINMNINILLSTGLVV

SEQ ID NO: 342108 - protein, 32 aa, Zea mays
  unsure (1)..(32): unsure at all Xaa locations
  Clone ID: MRT4577_75168C.1.pep
XXFELAYKAKTCXTFXAYTTVXXSVTXLSSCX

SEQ ID NO: 342109 - protein, 206 aa, Zea mays
  Clone ID: MRT4577_75169C.1.pep
MTTEFLRVKKFHQDEAARSRRLKELQPELSLGPVWPGLATGGGLAAKSSSIESHGSPRKKRKNYTAAGWDWEVHQQPPASLDLQLNHPLPLDWEQCLDLQSGRMYYLNRKTLKKSWVRPREQNVDLNISTAPDEDEPGKPAGTLFPGGNMVAVPCANCHLLVMLCMSSPSCPNCKFVQPLPPSVVPPAYPRLGAAVKPLETLSLLH

SEQ ID NO: 342110 - protein, 56 aa, Zea mays
  unsure (1)..(56): unsure at all Xaa locations
  Clone ID: MRT4577_7516C.1.pep
CWAPWXXAPWXCRCXXAXPXXXCSSXXSAXXXPWXGRPFPSPXXRCLGVASXWGGV

SEQ ID NO: 342111 - protein, 93 aa, Zea mays
  unsure (1)..(93): unsure at all Xaa locations
  Clone ID: MRT4577_75170C.1.pep
FLNKQTAFSIFLECTDRASWGMNFANVNHMVLFNYPHDPSKYVRSDWRTXRRACRNGKAFEFTVGKHVSLASSAMESNMTEHPLHDLPKRLKT

SEQ ID NO: 342112 - protein, 74 aa, Zea mays
  Clone ID: MRT4577_75171C.1.pep
RSRNTASCAPVNKKYAVFRDNEAYFLLTGAKHVGLKRDFRLVVRGAARNMAPILKGSCNAVILISSNILFVPFI

SEQ ID NO: 342113 - protein, 94 aa, Zea mays
  Clone ID: MRT4577_75172C.1.pep
LNLHENATIPADPSPDARQDREFFDTIAIGSSDSHDQYAFEADVFTHCDERFLCQESANLAALQDELMEENSLSDLLLTVADAVEAGDSSLALA

SEQ ID NO: 342114 - protein, 53 aa, Zea mays
  Clone ID: MRT4577_75173C.1.pep
YSPTYPFSQHFSILKTQSYPPFINSLNPNFLINTPIKTPTTSIPLTPSPFPFF

SEQ ID NO: 342115 - protein, 55 aa, Zea mays
  Clone ID: MRT4577_75174C.1.pep
FFPTSFNEQTGSCNCDLSVYLQQTSNIRYQLNYYWDRHSNTTAQVFSVMMSIPCF

SEQ ID NO: 342116 - protein, 150 aa, Zea mays
  unsure (1)..(150): unsure at all Xaa locations
  Clone ID: MRT4577_75175C.1.pep
MTLSSPGQRPASHMRANLPTTHALNDVHPHEFILAYSAHLKCSAKMXLPECSDIANTSSLTEIPPYDPDWNYITAVSIVRKIYLWXGIIALGFQKIYGGRQRNGSRPPLFWIISDADARYILQQLHIYAYHLCAITYGILLIINHEYVRS

SEQ ID NO: 342117 - protein, 80 aa, Zea mays
  Clone ID: MRT4577_75176C.1.pep
MILCQQTTIRNLGLVTTQGLLVENATEEQLGTARKVTIYQTTTTLIADAAIKDEIQARIAQLKKELAETDSVYEAAVQTV

SEQ ID NO: 342118 - protein, 92 aa, Zea mays
  Clone ID: MRT4577_75177C.1.pep
PTNIKRVVNKTTSHQKVCSSLFITTTYRTTKLLHYYIKLLKKYINQTNIPISYSYTVIPNKSIHKATLKDILLNLLSFLNPNTFHCTINTIN

SEQ ID NO: 342119 - protein, 81 aa, Zea mays
  unsure (1)..(81): unsure at all Xaa locations
  Clone ID: MRT4577_75178C.1.pep
PSXRPFRRPVIRFSVHEDQGMSIPHKPPRLKPTFESSWLETLRRNNVLCFFQAFSRQCCSIPIXIRCTVGAPNGCSPQALN

SEQ ID NO: 342120 - protein, 1215 aa, Zea mays
  unsure (1)..(1215): unsure at all Xaa locations
  Clone ID: MRT4577_75179C.1.pep
EGLAATAFNKSSLFPNERHTCLMAREKKXLFKGLDRTKVDKINELIDALNEKDRLLEKQEDLLYEEHDKFVEAQKSYALEVKRNEVLSSELSSCHETIATLKSVNDDLNAKLEVASKSNSCVEHVEICTRCKDFDVDACSDHLVSISKLTEELASLNAQLKTSKNEFDKLKFARDAYTIGRHPSIKDGLGFKREAKNLTSHKAPIPAKEKGKAPMASSVQKNHAFMYHDRRQTRNAYRSYNAYDDFDSHAMFASSSSYMYGRNMSRRNAFHHVPRKNIIHAPRKVVNEPSTIYCALNASFAICRKDRKIVARKLGAKCKGDKTCIWVPKDICANLVGPNMSWVYASGGSSWIIDSGCTNHMTGEKKMFTSYVKNKDSQDSIIFGDGNQGKDKSETQGTLKRFLRRAQNEFELKVKKIRSDNGSEFKNLQVEEFLEEEGIKHEFSAPYTPQQNGVVERKNRTLIDMARTMLGEFKTPECFWTEAVNTACHTINRVYLHRLLKKTSYELLTGNKPNVSYFRVFGSKCYILVKKGRNSKFAPKAVEGFLLGYDSNTKAYRVFNKSSGLVEVSSDVVFDETNGSPREQVVDCDDVDEEDVPTAAIRTMAIGEVQPQEQVERDQPSSSTMVHPPTQDDEQVHQQEACDQGGAQDDHVMEEEAQPAPPTQVRAMIQRDHPVDQILGDISKGVTTRSRLVNFCEHYSFVSSIEPFRVEEALLDPDWVLAMQEELNNFKRNEVWSLVPRPKQNVVGTKWVFRNKQDEHGVVTRNKARLVAKGYAQVAGLDFEETFAPVARLESIRILLAYAAHHSFRLYQMDVKSAFLNGPIKEEVYVEQPPGFEDERYPDHVCKLSKALYGLKQAPRAWYECLRDFLIANAFKVGKADPTLFTKTCDGDLFVCQIYVDDIIFGSTNKKSCEEFSRVMTQKFEMSMMGELNYFLGFQVKQLKDGTFISQTKYTQDLLKRFGMKDAKPAKTPMGTDGHTDLNKGGKSVDQKAYRSMIGSLLYLCASRPDIMLSVCMCARFQSDPKECHLVAVKRILRYLVATPCFGLWYPKGSTFDLIGYSDSDYAGCKIDRKSTSGTCQFLGRSLVSWSSKKQTSVALSTAEAEYIAAGQCCAQLLWMRQTLRDFGYNLSKVPLLCDNESAIRMADNPVEHSRTKHIDIRHHFLRDHQQKGDIEVFYVSTENQLADIFTKPLDEKTFCRLRSELNVLDSRNLD

SEQ ID NO: 342121 - protein, 69 aa, Zea mays
  Clone ID: MRT4577_7517C.1.pep
GKTLPIHQILIYEINNTFQHISTTKTRAKFLFVHTHLCLTCNFLLNTSSLLLTHIYSHPDYTVFCFFRN

SEQ ID NO: 342122 - protein, 38 aa, Zea mays
  Clone ID: MRT4577_75180C.1.pep
SGGVLVYPLPVMLDSGSHLAWVPCTSSYECRNCSSRSA

SEQ ID NO: 342123 - protein, 1660 aa, Zea mays
  Clone ID: MRT4577_75181C.1.pep
MDPKGKGIVINDKEKESFVNEPKDDKPTDSGSGHRRKEGKKKKTRRIKEIIYYDDSDESTSSQKDDDNDYKKTVNSNFSFDYSRIQHSSNSHLLSIPLGKPPHFDGEDYGFWSHKMRSHLFSLHPSIWEIVENGMKFDSSDSPMFINEQIHKNAQATTVLLASLCREEYNKVSGLDNAKQIWDTLKISHEGNDITMLTKMELVEGELGRFAMIRGEEPTQTYNRLKTLINKIRSYGSTRWTDHDVVRLMLRSFTVLDPHLVNNIRENPRYTMMTPEEVLGKFVSGRMMIKEARYVDDALNGPLHESQPIALKATRSKESLPSKVAQVEAAGLNDEEMALIIKRFKTVLKGHKGQPSKTKTKGKRSCFKCGKIGHFIANCPDNDSDQEQGNKREKKKNYKKAKGEAHLGKEWDSDCSSSDSDNEGLAATAFNKSSLFPNEHHTCLMAREKKVITRNASTNDSSSDESSDDDDIDYSSLFKGLDRNKIDKINELIDALNEKDKLLEKQEDLLYEEHDKFVEAQRSHALEVKRNEMLSCELSSCHETISKLKSINDDLNAKLVEANRSNSCVEHVEICTRCKDVDINACSEHLVSISKLNDELASLNTQLKTSKSEFEKLKFARDAYTIGRHPSIKDGLGFKREAKNLTSHKTPISTKEKGKAPMANSVKKNHAFMYYDRRYSRNTFRGHDVFDSHAYDSYAMTASSSHVMHGRNVLRRNVVHQMPRRNVVRKVVNEPSTIYCALNASFAICRKDKKIVARKLGAKCKGDKTCIWVPKNICANLAGPNMSWVYASGGSSWIIDSGCTNHMTGEKKMFTSYVKNKDSQDSIIFGDGNQGKDKSETQGTLKRFLRRAQNEFELKVKKIRSDNGSEFKNLQVEEFLEEEGIKHEFSAPYTPQQNGVVKRKNRTLIDMARTMLGEFKTPECFWTEAVNTACHAINMVYLHRLLKKTSYELLTGNKPNVSYFRVFGSKCYILLKKGRNSKFAPKAVEGFLLGYDSNTKAYRVFNKSSGLVEVSSDVVFDETNGSPREQVIDCDVDEEDVPTTAIRTMAIGDVRPQEQYERDQPSSSTKVHPPTQDDEQVHQQEACDQGGAQVDNVMEEEAQPAPPTQVRAMIQRDHPVDQILGDISKGVTTRSRLVNFCEHYSFVSSIEPFRVEEALLDPDWVLAMQEELNNFKRNEVWTLVPRPKQNVVGTKWVFRNKQDEHGVVTRNKARLVAKGYAQVAGLDFEETFAPVARLESIRILLAYAAHHSFRLYQMDVKSAFLNGPIKEEVYVEQPPGFEDDRYPDHVCKLSKALYGLKQAPRAWYECLRDFLIANAFKVGKADPTLFTKTCDGDLFVCQIYVDDIIFGSTNQKSCEEFSRVMTQKFEMSMMGELNYFLGFQVKQLKDGTFISQTKYTQDLLKRFGMKDAKPAKTPMGTDGHTDLNKGGKSVDKKAYRSMIGSLLYLCASRPDIMLSVCMCARFQSDPKECHLVAVKRILRYLVATPCFGLWYPKGSTFDLIGYSDSDYAGCKVDRKSTSGTCQFLGRSLVSWNSKKQTSVALSTAEAEYVAAGQCCAQLLWMRQTLRDFGYNLSKVPLLCDNESAIRMAENPVEHSRTKHIDIRHHFLRDHQQKGDIEVFHVSTENQLADIFTKPLDEKTFCRLRSELNVLDSRNLD

SEQ ID NO: 342124 - protein, 88 aa, Zea mays
  Clone ID: MRT4577_75182C.1.pep
CAGPFSLISLKRPFRFGFPPGTFKGQGATAQELPLFMVCLQLGLNGARSKRVPWAPGPQRILCSFCLLLFFSPSLPKKPYKKKKKKKK

SEQ ID NO: 342125 - protein, 243 aa, Zea mays
  Clone ID: MRT4577_75183C.1.pep
MGRGRVELKRIENKINRQVTFAKRRNGLLKKAYELSVLCDAEVALIIFSNRGKLYEFCSGQSITKTLERYEKNSYGGPDTAVQNKENELVQSSRNEYLKLKAKVDNLQRTQRNLLGEDLGSLGVKELEQLEKQLDSSLRHIRSTRTQHMLDQLTDLQRREQMLCEANKCLRRKLEETSNQVHGQVWEHGANLLGYERHSPQQQAPSHVGNGLFFHPLEAAAEPTLQIGFAPEHMNNFMPTWLP

SEQ ID NO: 342126 - protein, 1669 aa, Zea mays
  Clone ID: MRT4577_75184C.1.pep
MDPKGKGIVINDKEKESFVNEPKDDKPTDSGSGQRRKEGKKKKTRRIKEIVYYDSDESTSSQKDEDHNDYERRKPVNSNFSFDYSRIPHSSNSHLLSIPLGKPPHFDGEDYGFWSHKMRSHLFSLHPSIWEIVESGMHFDSSDSPMFINEQIHKNAQATTVLLASLCRNEYHKVSGLDNAKQIWDTLKISHEGNDVTLLTKMELVEGELGRFAMIRGEEPTQTYNRLKTLINKIRSYGSTRWTDHDVVRLMLRSFTVLDPHLVNNIRENPRYTKMSPEEVLGKFVSGRMMIKEARYVDDALNGPINEPQPLALKATRSKEALPSKVAQIEAAGLNDEEMALIIKRFKTALNGRKGQPSKTKTKGKRSCFKCGKLGHFIANCPDNESDQEKGNKREKKKQYKKAKGEAHLGKEWDSDCSSSDSDNEGLAATAFNKSALFPNERLTCLMAREKKVSTQDSTYASSSDSESSDDDIDYSCLFKGLDRSKIDKINELIDALNEKDRLLEKQEDLLYDEHDKFVEAQKSYALEVKRNEMLSYELSTCHETISTLQGVNNDLNAKLEVANKSNSCVEHVEICTRCKDFDINACSEHLVSISKLNDELASLNAQLKTSKNDFDKLKFARDAYTIGRHPSIKDGLGFKREAKNLTSHKAPIPAKEKGKAPMATSAKRNHAFLYHDRRQTRNVSHDAYDSYVYDSHTMFAPSSSYVYDRNVTRRNVVPKRNAIHHVPRRNVIHAPRKIANETSTIYYALNASFAICRKDKKIVARKLGAKCKGDKTCIWVPKDICTNLVGPNMSWVYASGGSSWIIDSRCTNHMTGEKKMFTSYVKNKDSQDSIIFGDGNQGKDKSETQGTLKRFLRRAQNEFELKVKKIRSDNGSEFKNLQVEEFLEEEGIKHEFSAPYTPQQNGVVERKNRTLIDMARTMLGEFKTPECFWTEAVNTACHAINRVYLHRLLKKTSYELLTGNKPNVSYFRVFGSKCYILVKKGRNSKFAPKAVEGFLLGYDSNTKAYRVFNKSSGLVEVSSDVVFDETNGSPIEQVVDCDDVDEEDVPTAAIRTMAIGEVRPQEQDERDQPSSSTMVQPPTKDDEQVPQVEALDQGGAQNDQVIEEEAQPAPPTQVRAMIQRDHPVDQILGDISKGVTTRSRLVNFCEHYSFVSSIEPFRVEEALLDPDWVLAMQEELNNFKRNEVWTLVPRPKQNVVGTKWVFRNKQDEHGVVTRNKARLVAKGYAQVAGLDFKETFAPVARLESIRILLAYAAHHSFRLFQMDVKSAFLNGPIKEEVYVEQPPGFEDERYPDHVCKLSKALYGLKQAPRAWYECLRDFLIANAFKVGKADPTLFTKTCNGDLFVCQIYVDDIIFGSTNQKSCEEFSRVMTQKFEMSMMGELNYFLGFQVKQLKDGTFISQTKYTQDLLKRFGMKDAKPAKTPMGTDGHTDLNKGGKSVDQKAYRSMIGSLLYLCASRPDIMLSVCMCARFQSDPKECHLVAVKRILRYLVATPCFGLWYPKGSTFDLVGYSDSDYAGCKVDRKSTSGTCQFLGRSLVSWNSKKQTSVALSTAEAEYVAAGQCCAQLLWMRQTLRDFGYNLSKVPLLCDNESAIRMAENPVEHSRTKHIDIRHHFLRDHQQKGDIEVFHVSTENQLADIFTKPLDEKTFCRLRSELNVLDSRNLD

SEQ ID NO: 342127 - protein, 105 aa, Zea mays
  Clone ID: MRT4577_75185C.1.pep
GFTVWLSVSDPSVKASSKKKAPRSVTSGSVFYTKADVVVKLGGWDPEYTRVVVQGCLVALKQLPLSDKKLAGKKSLYIRFGCKGDWPNIEPPGWGPESDAPPPKI

SEQ ID NO: 342128 - protein, 334 aa, Zea mays
  unsure (1)..(334): unsure at all Xaa locations
  Clone ID: MRT4577_75186C.1.pep
MRKKKKKKKKKKKKKKTHLLSPACARLSSFLPRPLAFAWLHRAGRAGEEKLASSYQLSAGGGSLPAAGVSCKGWELAMGRGRVELKRIENKINRQVTFAKRRNGLLKKAYELSVLCDAEVALIIFSNRGKLYEFCSGQSITKTLERYEKNSYGGPDTAVQNKENELVQSSRNEYLKLKARVDNLQRTQRQVDSTFELYLRNKRNLLGEDLGSLGVKELEQLEKQLDSSLRHIRSTRTQHMLDQLTDLQRREQMLCEXNKCLXRKLEETSNQVHGQVWEHGANLLGYERHSPQQQAPSHVGNGLFFHPLEAAAEPTLQIGFAPEHMNNFMPTWLP

SEQ ID NO: 342129 - protein, 1662 aa, Zea mays
  Clone ID: MRT4577_75187C.1.pep
MDPKGKGIVINDKEKESFVNEPKDDKPTDSGSGHKRKDGKKKKTRRIKEIVYYNDSDESTSSQKDDDNDYRKTVNSNFSFDYSRIPHSSNSHLLSIPLGKPPHFDGEDYGFWSHKMRSHLFSLHPSIWEIVENGMKFDSSDSPMLINEQIHRNAQATTVLLASLCREEYNKVSGLDNAKQIWDTLKISHEGNDITMLTKMELVEGELGRFAMMRGEEPTQTYNRLKTLINKIRSYGSTRWTDHDVVRLMLRSFTVLDPHLVNNIRENPRYTMMTPEEVYGKFVSGRMMIKEARYVVDALNGPINEPQPLALKATRSKETLPSKVAQIEAVGLNDEEMALIIKRFKTALKGRKGQPSKTKTKGKRSCFKCGKLDHFIANCPDNDSDQDQGNKREKKKNYKKAKGEAHLGKEWDSDCSSSDSDNEGLAATAFNKSSLFPNEHHTCLMAREKKVSTQDSTYASSSDNESSDDDDIDYSCLFKGLDRSKIDKINELIDALNDKNRLLEKQEDLLYEEHDKFVEAQKSLALEIKRNEMLSFELSTCHETISTLKSVNNDLNAKLEAANKSNSYVEHVVICTRCKDFDIDACSKHLVSISKLNDELASLNAQLKTSKNDFDKLKFARDAYTIGRHPSIKDGLGFKREAKNLTSHKAPISAKEKGKAPMASSTKRNHAFMYHDRRQTRNAYRSYNAYDDFDSHAMFASSSSYMHGRNMSRRNAIHHVPRKNIIHTPRKVVNEPSTIYCALNASFAICRKDRKIVARKLGAKCKGDKTCIWVPKDICTNLVGPNMSWVYASGGSSWIIDSGCTNHMTGEKKMFTSYVKNKDSQDSIIFGDGNQGKDKSETQGTLKRFLRRAQNEFELKVKKIRSDNGSEFKNLQVEEFLEEEGIKHEFSAPYTPQQNGVVERKNRTLIDMARTMLGEFKTPECFWSEAVNTACHAINRVYLHRLLKKTSYELLTGNKPNVSYFRVFGSKCYILVKKGRNSKFAPKAVEGFLLGYDSNTKAYRVFNKSSGLVEVSSDVVFDETNGSPREQVVDCDDVDEEDVPTAAIRTMAIGEVRPQEQDERDQPSSSTMVHPPTEDDEQVPQVEALDQGGAQDNQVMEEEAQPAPPTQVRAMIQRDHPVDQILGDISKGVTTRSRLANFCEHYSFVSSIEPFRVEEALLDPDWVLAMQEELNNFKRNEVWTLVPRPKQNVVGTKWVFRNKQDEHGVVTRNKARLVAKGYAQVAGLDFEETFAPVARLESIRILLAYAAHHSFRLYQMDVKSAFLNGPIKEEVYVEQPPGFEDERYPDHVCKLSKALYGLKQAPRAWYECLRDFLIANAFKVGKADPTLFTKTCDGDLFVCQIYVDDIIFGSTNQKSCEEFSRVMMQKFEMSMMGELNYFLGFQVKQLKDGTFISQTKYTQDLLKRYGMKDAKPAKTPMGTDGHTDLNKGGKSVDQKAYRSMIGSLLYLCASRPDIMLSVCTCARFQSDPKECHLVAVKRILRYLVATPCFGLWYPKGSTFDLVGYSDSDYAGCKVDRKSTSGTCQFLGRSLVSWNSKKQTSVALSTAEAEYVAAGQCCAQLLWMRQTLRDFGYNLSKVPLLCDNESAIRMAENPVEHSRTKHIDIRHHFLRDHQQKGDIEVFHVSTENQLADIFTKPLDEKTFCRLRSELNVIDSRNLD

SEQ ID NO: 342130 - protein, 73 aa, Zea mays
  Clone ID: MRT4577_75188C.1.pep
IGKIRLPPPPGFKKRKNRGHQEKICNCTYLKTQQLFNSRAGSLSKKKDKNHLALQFKGHLTKQTRSFITRETF

SEQ ID NO: 342131 - protein, 69 aa, Zea mays
  Clone ID: MRT4577_75189C.1.pep
LGVASDLCLGVIDVVEQCRSVVDFEVMEDCIIRYRVFCHVPRLSGTIYISKLWWPRDVCRFGVPLTGGF

SEQ ID NO: 342132 - protein, 127 aa, Zea mays
  unsure (1)..(127): unsure at all Xaa locations
  Clone ID: MRT4577_7518C.1.pep
PPRPAAPARHTGKAPPVPRXRPPQSGPEPXGTRQNAPRGTPSKREKNKKXKKKAPPPPPPGQAPPNPPRPTTTPQPXRPPQNPTQPKKKKTTKKKKPXPVGKDEACPPARPPPRASPRTRRPYGGSE

SEQ ID NO: 342133 - protein, 56 aa, Zea mays
  Clone ID: MRT4577_75190C.1.pep
QRLVIYKQHDSGKEVCNVMRSDPWPSMNTASAPTLFSYDIIAPIQARYPRYGHISM

SEQ ID NO: 342134 - protein, 41 aa, Zea mays
  Clone ID: MRT4577_75191C.1.pep
SLRGKLVPYPLIIKHIKATAFYGAPPHYETATTVPFKKGTP

SEQ ID NO: 342135 - protein, 101 aa, Zea mays
  Clone ID: MRT4577_75192C.1.pep
GWLMAFAKGYRVGGGPLGKGLNKGYPGGAFNPLGLADNPDTAAELKGKELKNGRLALFSMFDFFGQAIVTGKGPIENLFDHFTDPVAKNAWAYPTNFVPGT

SEQ ID NO: 342136 - protein, 579 aa, Zea mays
  Clone ID: MRT4577_75193C.1.pep
MASCSCRLRPAVVARAPRQQPRGRRALRRFDEVEGVSKKRRGIGGGGGVGAGGSQPSSSRRDRGLSVDFKEPQVAEFDDLEEDKFLNAVVKVYCTHIAPDYGLPWQKQRQHSSSGSAFMIGDGKLLTNAHCVEHDTQVKVKRRGDDKKYIAKVLARGVECDLALLSVENEEFWRGTEALHFGRLPCLQDSVTVVGYPLGGDTISVTKGVVSRIEVTPYAHGTSDLLGIQIDAAINPGNSGGPAFNDQGECIGVAFQVYRSDEAENIGYVIPTTVVSHFLNDYQKNGKYTGFPCLGVLLQKLENPALRESLKVPSSEGVLVRRVEPTAPASSVLRKGDVIVSFDGIAVGCEATVPFRSTERIAFRYLTSQKYAGDIAQLGIIRDGNSMKVQTILQPRKHLVPFHVEGGQPSYLIVAGLVFTPLTEPFIEEECEDTLGLKLLAKARYSLATFEGEEIVIVSQVLAHEVNIGYEHMGNQQVMKLNGTTIKNIHHLAHLVDTCKDKFLTFEFEDDFLVVLHREEADAASSDILKEHAIPSIRSSDLSEPYAEANNNEIQKTSEDFGESPVTNFEMGIDCLLWA

SEQ ID NO: 342137 - protein, 69 aa, Zea mays
  unsure (1)..(69): unsure at all Xaa locations
  Clone ID: MRT4577_75194C.1.pep
GSGGSSRGRRHRRGEDVVHPLKVSLEDLYNGTSKMLSLSRXVICPVHGKGSSLVPHEVLVTRLRHVVTI

SEQ ID NO: 342138 - protein, 76 aa, Zea mays
  Clone ID: MRT4577_75195C.1.pep
GPQKKKIHIKCFLLNHIFQTTYYFNPLTTQLNPQHHIPLSSARIIPKMPLPKRSSQHIRKLNRPCDPPYNPALIAV

SEQ ID NO: 342139 - protein, 109 aa, Zea mays
  unsure (1)..(109): unsure at all Xaa locations
  Clone ID: MRT4577_75196C.1.pep
VFTSQKLLQLDPPEICRLTQVNHAFRGAEGADFLWEAKLPENYNYLMXSLTERRQRQAQXQHASKKEIYARLAKPVPFGDGKNEFWSHKNKCMICMALSPKALVITEID

SEQ ID NO: 342140 - protein, 106 aa, Zea mays
  Clone ID: MRT4577_75197C.1.pep
HQNTWAPPKTRPSSSSPPQRHVPHPKPEQIIWKAQQPQEDENSTDSRHQAQTLLDSARADGTKKKPADAPNGEAANGHGKPKKNTNFLPYKGDGSKVQVPTKRNPS

SEQ ID NO: 342141 - protein, 63 aa, Zea mays
  Clone ID: MRT4577_75198C.1.pep
ILASPKLSGFLSLGVRQEQARHRKKDLTRFLLVFRFLPPFSRGFSPLITKKSPPCSNSIIKNY

SEQ ID NO: 342142 - protein, 154 aa, Zea mays
  Clone ID: MRT4577_75199C.1.pep
MASSSTLDLAMGPGALLPRSAVPYASFAPGRGRSASGTRSRNLALSASSSNGAAVPSLTTDSEKKGPVIMEIPLDQIRRPLMRTRANDPVKVQELMDSIRVIGLQVPIDVLEVDGVYYGFSGCHRYEAHQRLGLPTIRCKVRRGTKETLRHHMR

SEQ ID NO: 342143 - protein, 667 aa, Zea mays
  unsure (1)..(667): unsure at all Xaa locations
  Clone ID: MRT4577_7519C.1.pep
MATVAPPADQATDLLQKLSLDSPAKASEIPEPNKKTAVYQYGGVDVHGQVPSYDRSLTPMLPSDAADPSVCYVPNPYNPYQYYNVYGSGQEWTDYPAYTNPEGVDMNSGIYGENGTVVYPQGYGYAAYPYSPATSPAPQLGGEGQLYGAQQYQYPNYFPXSGPYASSVATPTQPDLSANKPAGVKTLPADSNNVASAAGITKGSNGSAPVKPTNQATLNTSSNLYGMGAPGGGLAAGYQDPRYAYEGYYAPVPWHDGSKYSDVQRPVSGSGVASSYSKSSTVPSSRNQNYRSNSHYTSVHQPSSVTGYGTAQGYYNRMYQNKLYGQYGSTGRSALGYGSSGYDSRTNGRGWAATDNKYRSWGRGNSYYYGNENNVDGLNELNRGPRAKGTKNQKGNLDDSLEVKEQTGESNVTEVGEADNICVVPDREQYNKEDFPVDYANAMFFIIKSYSEDDVHKSIKYNVWASTPNGNKKLAAAYQEAQQKAGGCPIFLFFSVNASGQFVGLAEMTGPVDFNTNVEYWQQDKWTGSFPLKWHIVKDVPNSLLKHITLENNENKPVTNSRDTQEVKLEQGLKIVKIFKEHSSKTCILDDFSFYEVRQKTILEKKAKQTQKQVSEEKVTDEKKESATAESASKESPAAVQTSSDVKVAENGSVAKPVTGDVVANGC

SEQ ID NO: 342144 - protein, 95 aa, Zea mays
  Clone ID: MRT4577_751C.1.pep
LNSGHCGSCRCQTTGLFNIPRSQIFLPSEKVFRICLWKSEKEEPLPLRSDVSYNGELRGVYLITHRFYGLSDRTKSSLPRWKVKSRTSRRRGGGF

SEQ ID NO: 342145 - protein, 74 aa, Zea mays
  Clone ID: MRT4577_75200C.1.pep
LHLYSLSLSIEWPYHSSARWRKTAKLSAHHTEGRGVALFLLLYCYLTLWLALDFNICICFRFKPISFEVTSASL

SEQ ID NO: 342146 - protein, 573 aa, Zea mays
  Clone ID: MRT4577_75201C.1.pep
MRLSIGQVHRNVLALASSRSCFVLGDRVSFRMLSQPRVAGFHQTAWRGSQILEDNRGGPLTLASLEVQSRVEYGKKGKMERTGGPKPSSRASSLYVKPKVSSNVKPAKSALMKPAGIKKTLKVDEALFSAKSFEELGLPPLLVDQLNKEGLTAPTEVQSAAIPIIAQKHDVVIQSYTGSGKTLAYLLPILSDIGPLKRTMEQDHSEKRSGIEAVIVAPSRELGMQIVREVEKILGPNDKRLVQQLVGGANRSRQEEALKKNKPIIVVGTPGRISEISAAGKLHTHGCRFLVLDEVDQLLSFNYREDMHRILEHVGRRPGGTSRDILGPLARRSERQTILVSATIPFSVIRAARSWGHDPVLIRAKSVVPLDSITVPRPALSQSDANPSSSSQSVNQAAVGSLPPSLEHYYCTAKAQHKVDTLRRCIHALEAQTVIAFMNNTKPLKDVVFKLEARGIKATELHGDLGKLARSTVLKKFKDGEFRVLVTNELSARGLDVPECDLVVNLDLPTDSTHYAHRAGRTGRLGRKGIVVTICEESEGFVVRKMRKQLDVAIKPCEFTEGELVVHKEEDVE

SEQ ID NO: 342147 - protein, 244 aa, Zea mays
  unsure (1)..(244): unsure at all Xaa locations
  Clone ID: MRT4577_75202C.1.pep
QAKPSGSKGRTSCGKRGLCGGAMGLDTPSCHFDSRRATIVCYLAKLLFPISGFTCLLLLVYVLFFKRKTSRRAHLPQLSFGEHFVKVTYNDLAQATGGFSESNLIGRGSYGLVYSGKLMEIKIEVAVKVFDLEMQGAETSFLAECEALRSIHHRNLVSIVTACSSIDMTGNSFKALIYELMPNGNLXKWIHPXGDETVPKRLSLTXRIAVVVNVADALDYLHHDCGRPTVHCDLKPSXILLDXI

SEQ ID NO: 342148 - protein, 142 aa, Zea mays
  Clone ID: MRT4577_75203C.1.pep
GLHFSAGNLVISLYRQPSMKFTRDRDSTSLEDRFVRISAHPKANFCVETHPASGRRATFHFSSMSRLLSPLARSRSSTPSPRFRLPEHAATRVARRCRLRRLPLLEHAPAPLAWRLESPEHVAFFGLESPSMLSPQSLRLLR

SEQ ID NO: 342149 - protein, 60 aa, Zea mays
  Clone ID: MRT4577_75204C.1.pep
VGECQEYNKTRSHLIECFKIRYSQVDAAIVLIMKTFMVLSHILVITDLYQQFMFPVKPFV

SEQ ID NO: 342150 - protein, 84 aa, Zea mays
  Clone ID: MRT4577_75205C.1.pep
EAYNQEKDLKSRKDPYISRICRKTSSRRDGDPSRLRKWRLDRWPCAHRRKAARRWRAHSLLSARTGDGPHGRWRHSAVISLSLT

SEQ ID NO: 342151 - protein, 116 aa, Zea mays
  Clone ID: MRT4577_75206C.1.pep
YACRFRSGIPGSTHASVLNSRWESIMWVPVGPGWFLSCRLGWATGFPVAKSGAWSRPSWQGPRLCVCMCACVFAVQCDSGVGVLVLGGSSFLCELGWQLLAGTGTVRVTHCLPLCN

SEQ ID NO: 342152 - protein, 106 aa, Zea mays
  unsure (1)..(106): unsure at all Xaa locations
  Clone ID: MRT4577_75207C.1.pep
AHDGDGDHHHXDPEPEHEXGTQQAXGXXSRAPPPPTTAPSHAENKPRAXGATPSSRRRPRRRRPPPLACGGETGGGGAFXSDTGPLPPNAFXRELXHKKNLTVXRG

SEQ ID NO: 342153 - protein, 91 aa, Zea mays
  Clone ID: MRT4577_75208C.1.pep
MKDGGMKGVAGAVVAVLLVLQLMAAPPTAMAARSPHGAVPDGSLATTPKVTMLSATLCYTGETCKYTPCFTPACSCSFSDRLCYVIFTPVA

SEQ ID NO: 342154 - protein, 180 aa, Zea mays
  Clone ID: MRT4577_75209C.1.pep
MKNVAKCDTWCELQNPANHRVFERKLRPKPSGGGHVCLGVTQQGRTHPSLSLSAVFLRYLPPLPEGSNPLQPAKKMHLWPSLRIRDSFKHGYLQKLELNLGNMKRAQRQRQGRQGESQEDQDGQPGGNGKAPLLEDRSPSGSVLAGALELAWDAVLLLTCCCCCFCCGACSDEEDHPTAR

SEQ ID NO: 342155 - protein, 54 aa, Zea mays
  unsure (1)..(54): unsure at all Xaa locations
  Clone ID: MRT4577_7520C.1.pep
XTXNXQXYTLXXNNIHXXAXSLFXSNXQAQLAPAFYCNYXXIXXTXKXXXXHXX

SEQ ID NO: 342156 - protein, 84 aa, Zea mays
  Clone ID: MRT4577_75210C.1.pep
LLLTCLVIASATTYLLLMLEMKTFREATTLTCMRRPTTTTLPLVSFCSSDACFKASMDALRICVLISRVREPDRRGCCFIYVFW

SEQ ID NO: 342157 - protein, 61 aa, Zea mays
  Clone ID: MRT4577_75211C.1.pep
YTCLHIGSVLWQARSTLTKRSPMHGEIQTIVIKQRVPLTARSANGHTRNSLTVAHYRPCMH

SEQ ID NO: 342158 - protein, 82 aa, Zea mays
  Clone ID: MRT4577_75212C.1.pep
MKGGKKEVAGAVVAILLVLQLMAAPPTAMAARSPRGAVPDGSLATTPKVTMLSATLCYTGETCKYTPWFTPGWSWSFNDRLW

SEQ ID NO: 342159 - protein, 38 aa, Zea mays
  Clone ID: MRT4577_75213C.1.pep
MGALVKKKKKKRKKKKKKKKKKKKKKKKKKTKKKKKKR

SEQ ID NO: 342160 - protein, 53 aa, Zea mays
  Clone ID: MRT4577_75214C.1.pep
FYCHLLDLLQALRRSDKITGLKGFFHLPNGGRRWRTGGWRRGSQKHDTPRAQH

SEQ ID NO: 342161 - protein, 90 aa, Zea mays; identical to SEQ ID NO: 286649
  Clone ID: MRT4577_75215C.1.pep

SEQ ID NO: 342162 - protein, 93 aa, Zea mays
  unsure (1)..(93): unsure at all Xaa locations
  Clone ID: MRT4577_75216C.1.pep
MEHPYITRRQVQNQQGGALKTFAGFNXLILHGTGVXRLNFNLRRKLIIATSMHWDNDVEDLXMLLAVYLMQLDGILNRIVSDREHIDDTEDYV

SEQ ID NO: 342163 - protein, 42 aa, Zea mays
  Clone ID: MRT4577_75217C.1.pep
VHSFLPNDDVQHQVTRPCWDHDLMVSACATSTMSQCRTSRSP

SEQ ID NO: 342164 - protein, 122 aa, Zea mays
  Clone ID: MRT4577_75218C.1.pep
MDPDSVAKAFVEHYYRTFDTNRAALVGLYQEGSMLSFEGEKFQGAAAIATKLTSLPFTKCAHTVVTVDCQPAGPTGGMLVFVSGSLQVDGEHHIKFSQMFHLMPIGPGNFYVHNDMFRLNYG

SEQ ID NO: 342165 - protein, 415 aa, Zea mays
  Clone ID: MRT4577_75219C.1.pep
MAFNKIKVSNPVVEMDGDEMTRVFWKSIKDKLIFPFVDLDIKYFDLGLPHRDATDDKVTVEAAEATLKYNVAIKCATITPDEARVNEFGLKAMWKSPNGTIRNILNGTVFREPIICKNIPRLVPGWTKPICIGRHAFGDQYRATDAVIKGPGKLKLVFEGKEEQVELEVFNFTGAGGVALSMYNTDESIHAFADASMATAYEKKWPLYLSTKNTILKKYDGRFKDIFQEVYEAGWKTKFEAAGIWYEHRLIDDMVAYALKSEGGYVWACKNYDGDVQSDFLAQGFGSLGLMTSVLVCPDGKTIEAEAAHGTVTRHYRVHQKGGETSTNSIASIFAWTRGLAHRAKLDDNARLLDFTQKLEAACVGAVESGKMTKDLALLVHGSSNITRSHYLNTEEFIDAVADELRSRLAANSNL

SEQ ID NO: 342166 - protein, 67 aa, Zea mays
  Clone ID: MRT4577_7521C.1.pep
NNYIPIPFTSKMRNIIKQNNYLSKVLSYCSLTYVDYTTIITKNERYYPKKHKYVLNMIAQQHMTSSA

SEQ ID NO: 342167 - protein, 375 aa, Zea mays
  Clone ID: MRT4577_75220C.1.pep
MALMQESSSQDLLQAHDELLHHSLCFAKSLALAVALDLRIPDAIHHHGAGGATLLQILAETALHPSKLRALRRLMRVLTVTGIFSVVEQPPAGGGDDSTVHTSDDEAVVVYRLTAASRFLVSDDVSTATLAPFVSLALQPIAACPHALGISAWFRQEQHEPSPYGLAFRQTPTIWEHADDVNALLNKGMAADSRFLMPIVLRECGETFRGIDSLVDVGGGHGGAAATIAAAFPHLKCSVLDLPHVVAGAPSDGNVQFVAGNMFESIPPATAVFLKKTLHDWGDDECVKILKNCKQAISPRDAGGKVIILDVVVGYKQSNIKHQETQVMFDLYMMAVNGVERDEQEWKKIFTEAGFKDYKILPVIGDVSVIIEVYP

SEQ ID NO: 342168 - protein, 76 aa, Zea mays
  Clone ID: MRT4577_75221C.1.pep
VLPRQHCASHLPAPPSFVPIPAPHIGLPHVPPPRVMGGCLLLPLLVAAYRIEHLGITYLSYPSWKVWGNKASYRSL

SEQ ID NO: 342169 - protein, 90 aa, Zea mays
  Clone ID: MRT4577_75222C.1.pep
HCNFSLMLFVLAIFSLKSSLLIVRPWRWSFWMFWCTRFQSLQSQIRKTNIGACLHSQYRVRFCCCVYILPISSPYGSIQTNLQKSRVFAS

SEQ ID NO: 342170 - protein, 80 aa, Zea mays
  Clone ID: MRT4577_75223C.1.pep
VQYSTTLVVIILKKTGRAVFLKKTKTNPEGWNLGSSQILGTWSMDHHPHPGKKAPPPFLSLGRGQKIAKYGMHPSVQFGF

SEQ ID NO: 342171 - protein, 115 aa, Zea mays
  unsure (1)..(115): unsure at all Xaa locations
  Clone ID: MRT4577_75224C.1.pep
QVTQAQKQRRGTPGAHGRINPHRPPPRPRERTRPEKEEPVKKEAANXAAARNQRSTPAGGPRPLRRKKAAPPPTHQTGKPCLARRARHRGKSGSSMLGTEPLCWTVSPARNPTAP

SEQ ID NO: 342172 - protein, 93 aa, Zea mays
  Clone ID: MRT4577_75225C.1.pep
RVTPERLDADCASRSWRCLSESNAQGEDVMEDHLIKGMGEVALSRIWLTNVKLTGGALVQADKCEAVMRSTVDGHPRARTLLTSMSWTSFFSN

SEQ ID NO: 342173 - protein, 92 aa, Zea mays
  unsure (1)..(92): unsure at all Xaa locations
  Clone ID: MRT4577_75226C.1.pep
QNPNHKRTTKRNQNRDDGDARYNGHRRRRKTDGQPRGDQQHARPGTTPTKTGHAAGREIRGEEAHPHRGTTRKGSAWXHHPAGRNERGANAG

SEQ ID NO: 342174 - protein, 84 aa, Zea mays
  Clone ID: MRT4577_75227C.1.pep
IFLFFFLQDLFYFGGRRPQSYLLTDRSSGGLQGTATKPTRWNSSNESKGSSSRHKEAREEQIEQLANYRGRNREARTRRGESCR

SEQ ID NO: 342175 - protein, 257 aa, Zea mays
  Clone ID: MRT4577_75228C.1.pep
TRRGITSPEKTAIPMDRSISPGISSRLSSPPPAAHPSPPPAAAPFAAATPSHPPSPTLDAFTRLEEKWDQFVVMFHRYKEKTEKELQAAVRLQAAARGFLARRQVQSLRGEKHLAVASRATPWPSSHEQAVVRLQAAVRGFLVRRAVRKLHLLISSSLHQLAACAPNHQVSSILFEPPAEVEIWVCSPPARPKRVVSFIRATALVLDRPNIRTSWFLLHLSSNVKAAVQLFPWDPGGHSCSSNLYFSSTIIFYFRLK

SEQ ID NO: 342176 - protein, 124 aa, Zea mays
  Clone ID: MRT4577_75229C.1.pep
MATCTRTSFCGVVVGGRTSSLSLVLLTKPSRSSSTKSASTGLHVPCVGGPCSTRPLSGERTPNSRKVWEWEMWHRGVGMGNREEATVVGPTCQTIVRPETWEWKWKWQNQEWQPTPYRLNSSKD

SEQ ID NO: 342177 - protein, 108 aa, Zea mays
  Clone ID: MRT4577_7522C.1.pep
VHHKPSCISIQGGWWPVVHIHAMPDHVALLSVPALGPGSPAGVPFHVPDEVLQPYSDAGTPPAASVHCVPRSRVLVRILAASEHWLLQPSRRARAACAEPPPLRLSSP

SEQ ID NO: 342178 - protein, 158 aa, Zea mays
  Clone ID: MRT4577_75230C.1.pep
METSLRLRSGGGLRIHAKEKLPLHTSPAGVTTPSYLALFVRHFYSQLSANLGAGVQLHNGDDLAYSFRAKKAVLFKPYNGFLGLNLKGRLLTDKELKPTKTTGSVELAWTILDLKQGQDVRLKVGYELCDKVPYFQLRENGWTLNAYMDGKWDVRFEM

SEQ ID NO: 342179 - protein, 113 aa, Zea mays
  unsure (1)..(113): unsure at all Xaa locations
  Clone ID: MRT4577_75231C.1.pep
LFQLTPNLFLLHPGPENNCLENDANVYLSFWLDHLLLSLQQASSLNPTPCFTHKTLNEIQTXAIPNPFDPSFPIXYQLGCKIVTLVTDKNIGLFFRYAFTIMFKKVLSKSHSS

SEQ ID NO: 342180 - protein, 174 aa, Zea mays
  Clone ID: MRT4577_75232C.1.pep
METSLRLRSGGGLRIHAKEKLPLGHSSLLQAHAELDLHTSPAGVTTPSYLALFVRHFYSQLSANLGAGVQLHNGDDLAYSFRAKKAVLFKPDNGFLGLNLKGRLLTDKELKPTKTTGSVELAWTILDLKQGQDVRLKVGYELCDKDRRTGAVIGTGRCRSTAPRLYILDSLRLT

SEQ ID NO: 342181 - protein, 186 aa, Zea mays
  unsure (1)..(186): unsure at all Xaa locations
  Clone ID: MRT4577_75233C.1.pep
MGESTSPQPVSVLFVYLXGNIXRSTMAEGVFQSLTRPAGKPPHPLISHIDSCGTGAYHIGSDPDSRTMATLRKNNITSYRHSARKFSPVTDFDKFDYIFAMDDDNLADLESLRQREVKKRGGEDGIGQVMLFGEFGGKRRKYRGREMGEEIADPYYGGDDGFTIAYEQAQRFSKAFLEKLEAGELS

SEQ ID NO: 342182 - protein, 47 aa, Zea mays
  Clone ID: MRT4577_75234C.1.pep
GKLLGDYPNKPKIHTKRLKAHITREPFHLTPNNHTCRRGHSKLSTSR

SEQ ID NO: 342183 - protein, 79 aa, Zea mays
  Clone ID: MRT4577_75235C.1.pep
RTRGHSPGGVLHASFSSRQAGLVRQAPHRHRMALLVLLRCAVPPGVYADPAEHLLMTLALPPRLLEEVLYCAYSEMFGE

SEQ ID NO: 342184 - protein, 247 aa, Zea mays
  Clone ID: MRT4577_75236C.1.pep
MKKRKKVEEDEDQKQPAAEESSCGVELLPEILREILSRVPYRSLCRFRCVSKAWLALCSDPAVRRRSPQTLSGFFCYSQHDVGGGQRRDALGFLNLSGRGRPLVDDPSLRFVRVRGYCDVTPLHCCGGILLCYCEKAAMSDDGNYVVCNPATKEIWAVLPVPRNKIMTRLNTARLCFDPAAPGRFVVFVFVQSFRGIQTVEGYSSDTGRWTSMRSEWTPRPSSSVRIQNASSLTALCIWATPTILMP

SEQ ID NO: 342185 - protein, 65 aa, Zea mays
  unsure (1)..(65): unsure at all Xaa locations
  Clone ID: MRT4577_75237C.1.pep
LTRSVANIPGTHQLGSSVLTGKCHSKDSGTLLDCISNFLPVLLGILSDAXPTKCDGWAEDAIASL

SEQ ID NO: 342186 - protein, 129 aa, Zea mays
  unsure (1)..(129): unsure at all Xaa locations
  Clone ID: MRT4577_75238C.1.pep
MPSVRDTLGRLATASLGGGNGYEYGYAGFELREDRKWFPRLVPTVIAAXIALFVVXRYKLNWAMNSXQIGDHCDCACLPRCAYRSLRESPMLVPASSAXHSMQDLDCDPRAHQDRSGQLIRSIWLHVGL

SEQ ID NO: 342187 - protein, 123 aa, Zea mays
  Clone ID: MRT4577_75239C.1.pep
IHSRSAADRSLLQLDHSLAALALALASSWRTRSCSHQPSDRHPWPLPRSRPPLFWTLLKLQARNPLLSPKVLLTSLSPPSVPPMRSQLPWRRPIQLPTLSPRRSPWRRRKRLQMRRSRSRLLL

SEQ ID NO: 342188 - protein, 175 aa, Zea mays
  unsure (1)..(175): unsure at all Xaa locations
  Clone ID: MRT4577_7523C.1.pep
MAGGEHGANGLQPQEQDHTGALEEGRGGANQPAGCEDSEQALSSTGNQPMIFVQFVQKVLAEILGTYLLIFAGCAAVAVNQRTAGTVTFPGVCITWGLAVMVMVYSVGHISGAHLNPAVTLAFATCGRFPWRQVPAYAAAQVTGSTAASLTLRLLFGSEPGHFXGTVPSGSDVQS

SEQ ID NO: 342189 - protein, 91 aa, Zea mays
  Clone ID: MRT4577_75240C.1.pep
RIMYADYYGAAMSFAKNPKQFGFKQGPLKTCCGGGGPYNFNPKASCGVRGSSVCADPSAYANWDGVHLTEAAYHAIADSILHGPYTSPRLL

SEQ ID NO: 342190 - protein, 106 aa, Zea mays
  Clone ID: MRT4577_75241C.1.pep
GVAPSPATYQVNFFYEKGEPQQPYSRPYKDSAPDPLLSQFICRVDAIPGDGNAQKNDQRLKFNNKGGTARDDDASSKLGLEERLQRIDFFTEKLMSPIFLCLVTAI

SEQ ID NO: 342191 - protein, 94 aa, Zea mays
  unsure (1)..(94): unsure at all Xaa locations
  Clone ID: MRT4577_75242C.1.pep
PVASPEFSGLGRAFPPVGGFPPFGFVKGASLLSQGFCVGPKKGVVPLPRSLLKQLFRLGLGGIQLRFFAPLSXFGAGGFPPPVGKPGFFGRLKG

SEQ ID NO: 342192 - protein, 137 aa, Zea mays
  Clone ID: MRT4577_75243C.1.pep
FFFFFFFFFFFFFFFFFFFFFFFFFFFFKAKIRAFPWRTPPPILVTGFYQQQLGNWGGQKPWKNQNGNWGGGTCLPLGCPPLGVPLLNFCPPFLGAFPNRVPVPVPKPPGLRGAPDFFGDWVSFVFPGGATAPTGVR

SEQ ID NO: 342193 - protein, 223 aa, Zea mays
  unsure (1)..(223): unsure at all Xaa locations
  Clone ID: MRT4577_75244C.1.pep
LIHVCFQLYILDLYKKHNSVYLQVWNVADNIILHQEVPXQHRWRLSXGSCSSKAAYNAFFFVSIKFVPWRRIWRSSATLGCKFFLCLAVKKXVWMANQXVQTILYKHSLTHPAASLLCDQAEETILHILVSCIFARQVWTLVLQKLGLVALAPDSDVTSFPSWWCGAIKKIPKDVXNDLTXIILVAWKIWKHRNACVSSNVQMVLQAVGTERILWCSPGASAL

SEQ ID NO: 342194 - protein, 43 aa, Zea mays
  Clone ID: MRT4577_75245C.1.pep
FYKSIFIMFQAFHLTKTVPSNYDSLSDFIYKIEWAVFLDVLFN

SEQ ID NO: 342195 - protein, 61 aa, Zea mays
  Clone ID: MRT4577_75246C.1.pep
PCECTCQGWKGSNVIFHVAVSQVHISLVFIGQVSRSFVSTPSDCMPGANFEHGIRARNILY

SEQ ID NO: 342196 - protein, 97 aa, Zea mays
  unsure (1)..(97): unsure at all Xaa locations
  Clone ID: MRT4577_75247C.1.pep
YLGYPLGFLGTSPSFPGISHFGGGNFGFYSFPFKQWGFLVKKTPPPPLRGCFINQFFEFGVMPPFLILXLKKKKKKKKKKKKKKKKKIFFLPPPPPP

SEQ ID NO: 342197 - protein, 47 aa, Zea mays
  Clone ID: MRT4577_75248C.1.pep
VFLIVCDSHKNKGRQIANHILFFHLNTISNIPSISFITYHSNPFLIS

SEQ ID NO: 342198 - protein, 83 aa, Zea mays
  Clone ID: MRT4577_75249C.1.pep
IKLHSRTEIYTRKQTLIVLLCASFCCPDCTDPFHIIFIRLSNLSQTKCSYIVIPRLIHNNSRIFMPRALTYTAITNGLILTKD

SEQ ID NO: 342199 - protein, 82 aa, Zea mays
  Clone ID: MRT4577_7524C.1.pep
LSNPVLYKTKQHHEVMTVHGQLLVLPEDERSWTPKNSSRAIGTVSACNNSAFAPTITINWTVDRISMKKAVIIRAQTIMVNT

SEQ ID NO: 342200 - protein, 64 aa, Zea mays
  Clone ID: MRT4577_75250C.1.pep
FLNLLHHARQVVSITHYPIHRLYTYLLDDMHAKHAYSCTNIYLSLKCLDPQSNALLSYMKISNN

SEQ ID NO: 342201 - protein, 75 aa, Zea mays
  Clone ID: MRT4577_75251C.1.pep
LFSIISCHTNDYFYSLMANANDHVKLLVIYFIAPCCSWCQMIAPVYSYCSSKYPSAVFLEVYILLTAGTLEHLLL

SEQ ID NO: 342202 - protein, 91 aa, Zea mays
  Clone ID: MRT4577_75252C.1.pep
TSSSWRGSRRGARGPRAPRSARRRTRTGSSPPRGTPSSWCGAERLPAGHQLRSRTAASRRFNILLHGSWRSAGAASTLEVSIARLSRWSPA

SEQ ID NO: 342203 - protein, 104 aa, Zea mays
  unsure (1)..(104): unsure at all Xaa locations
  Clone ID: MRT4577_75253C.1.pep
GCYRMHPAGSSLLSLGRALXXRQTCTRRRAXXHPRRDPPRDGEHXWAITXXDPXTLWADADREFPAPERGSLGSTXEFPIIGXSDLSASRRSGGGPXXSCXPGR

SEQ ID NO: 342204 - protein, 76 aa, Zea mays
  Clone ID: MRT4577_75254C.1.pep
IVLGSFLFWFEAVRRVDGLEIIDASKTPLLAAWAERFGGSVEAKEGVPVPEADLAVQYINKFRAPAIDAAKLASSE

SEQ ID NO: 342205 - protein, 299 aa, Zea mays
  unsure (1)..(299): unsure at all Xaa locations
  Clone ID: MRT4577_75255C.1.pep
MRTTTHATGATAGTKVGRGFPQHVRSPSASWIPSIGEEDDEEDEEVVVVEEDRVPREWTAQVEPGVQITFVSTAGGAGNDIKRIRFSRDMFNKWEAQRWWGENYDRVVELYNVQTFSRQQGVSTPTSSIDDATQRDSSFYSRAGSTRDSPXSCRRQPWAGSSRSPAPPRAGPRPXASTARAACNPSSSAVPDPRDHVWAHHFNLLNSAPAPAPAAPHLDPSRATTSSLDEASVSVSNASDLEATEWVEQDEPGVSITIREFGDGTRELRRVRFSRERFGEERAKVWWDQNRNRIHAQYL

SEQ ID NO: 342206 - protein, 540 aa, Zea mays
  Clone ID: MRT4577_75256C.1.pep
MAGHHHNNTHASRMDHVNRFQSEAQPFGPKLFMHSRTDAANGALPSGYVGAPIRPNGIPFSSHTGQSHIQHSDAPGTMLASYSGYPLAGSSSSTYAPHNAHHLPALSYPHRSDDNFIPSSHMDDRRVALKRRNPIIYPVDGVNNGSCYAGSSSNPQFPCYMPSNSIPAPEPCPPRITSNMGSSYWTDQPFGSNGGSQRNVRGRHDHNPIHLGHNPGVACATSSTHGPPHHANVIGPQSTAVPQNRAYFSIPPRVTAPGSDGNCSMVFREGTYYSAPQRTNINAPPVLAPPGSSDSLHFVHGGYAPRAAPPNSISTYPAPAFATPNNSVTVTHEPDIPCYRPAVPGYPPATSAAAAAASVHAEGAAASSRHLGHVALGSSGSARSRRLRDSYHAFRPLVIEENNLRGPATERFMMLNQLFIHESREDSDPHWDMRLDIDDMSYEELLALGERIGNVNTGLADEKLSSCVTEIPCCSSARTHDDNESARCVICLEDYKFEDSVGKLKCNHKYHADCIKKWLQVKNACPVCKASAADDGGGTE

SEQ ID NO: 342207 - protein, 96 aa, Zea mays
  Clone ID: MRT4577_75257C.1.pep
MPADLTGACGHIGSGHSKLYEQSKQFVHMLNSTLTATERTLCCILENFQKEDGVEVPKALQPYMGGIEFLPFKQPLDVKQASDSKSNKSKSKGNAA

SEQ ID NO: 342208 - protein, 36 aa, Zea mays
  unsure (1)..(36): unsure at all Xaa locations
  Clone ID: MRT4577_75258C.1.pep
RXPVYPPHETILSKLVNLLVKIIVRTQCMTCYKIEN

SEQ ID NO: 342209 - protein, 37 aa, Zea mays
  Clone ID: MRT4577_75259C.1.pep
QQLQRNHMTPTILLRNRHQTHHLMVITTTTTTTLLKA

SEQ ID NO: 342210 - protein, 58 aa, Zea mays
  Clone ID: MRT4577_7525C.1.pep
PCGSASLFSALRMPGVGSQYCSSPVPLEPAPKIAVARMAYCRDVMTAQDFTLPRYIDV

SEQ ID NO: 342211 - protein, 148 aa, Zea mays
  unsure (1)..(148): unsure at all Xaa locations
  Clone ID: MRT4577_75260C.1.pep
MADVINAGAATASYARDERRSHHPVLRLRVRRSTIRTTKMTTAAAAGRARLVAFSAERDVAAEGNTXYLIDVAELVALLGRAFPILFSRKDTWPQCDRAVFIRKAAWSLHPNAQRMDDTQMVWPNCNGXGKLRQINKYLNNPIHHACY

SEQ ID NO: 342212 - protein, 61 aa, Zea mays
  Clone ID: MRT4577_75261C.1.pep
KKNMMWQARGRKLGFFKTRRPLYYVIISLYDIFIYDLVFFIFTDFLFKVVMLYIFFLYTLQ

SEQ ID NO: 342213 - protein, 97 aa, Zea mays
  Clone ID: MRT4577_75262C.1.pep
IFQDHYALFLPYCDQFNERIHGDSIINSAFQRSDRHKGGVGHHYLYVQCHIFLNLATFTTALRKINPFKTFKESGSDPSIYFLDINLDREADLTSPR

SEQ ID NO: 342214 - protein, 178 aa, Zea mays
  unsure (1)..(178): unsure at all Xaa locations
  Clone ID: MRT4577_75263C.1.pep
GTAALALAAPXSAAITPAQTVSNIKMLTSKSQALQAPAQSITIINGPLIVIGQGPFPQIIAGFTDIITTVTTSIAQMDGSEPVKAGPDSDAIFDAFREFVRVHQVLLNILIGKAGLFTTVPIIGQPVAAVLRQLEGVVDTIAFMLIDSVQSRSADLIKEANNLGATLDVCINSYQGLA

SEQ ID NO: 342215 - protein, 89 aa, Zea mays
  unsure (1)..(89): unsure at all Xaa locations
  Clone ID: MRT4577_75264C.1.pep
VLATQGHTQVLIHQLSRRRSQSPFRRSHGQVQRVAFHPARPFLLVASQRSXRLYHLLRQELTKKLMPNCXWVISXAVHPCSDNVICGSY

SEQ ID NO: 342216 - protein, 71 aa, Zea mays
  Clone ID: MRT4577_75265C.1.pep
QLEVLCTDCAVRGCMDYERPNMVISAHNAAHRTHDHGPPSAHGRRTSFIVGPAPRSPVSFTVYVIHLPRAG

SEQ ID NO: 342217 - protein, 158 aa, Zea mays
  Clone ID: MRT4577_75266C.1.pep
MFFSWGSSCNWGSSCKWGKKSPPLEEKSPAAQAPLFLGFAPEKTPFSDFKAPGESGPKPSPGCSFGYSCKCTPCNFCLPAAPPWGTKPADMHAAAFFMVISFLCRRRPVFLASPLHVVLSNFVFFFDVCNLWFTNKAELAICFFFVLAPPHAFICVLF

SEQ ID NO: 342218 - protein, 131 aa, Zea mays
  Clone ID: MRT4577_75267C.1.pep
QHDSRENGEKLLVGRKQIAPSWRRIMVWNLLFLSAFTVCVKFLCRRWPQLYHTGRRRDGKARRGQALSPAHRRCGPCTTRPCAEQRASAMRGASACLHRAMRLMHREGHAGSPHEAMRPAHRTWHLPRRAL

SEQ ID NO: 342219 - protein, 136 aa, Zea mays
  Clone ID: MRT4577_75268C.1.pep
PPEFPPPYCGTNSGLLFMVPGHGVGVCVTTLVGAHHRIPGALIVVSEVLCNLACDPRRGHFELPGLIGCGIPPVPAACTSSTPGALTLDPGGGAGGRLVPGMEWLASPRGRLTCVSWFSAALIFFFFFFFLFSLFG

SEQ ID NO: 342220 - protein, 152 aa, Zea mays
  unsure (1)..(152): unsure at all Xaa locations
  Clone ID: MRT4577_75269C.1.pep
MNVWRFVQTMNQYVNISHLYTNDDYAVEKLDTELRGSYRVLNCFELIFRRYDLTEQLKLLQCRTLIFVGENSQFHAEAVHMTSKLDRRYCALVGXLNSNLVLVYLYLHILCYLFVNTKSGKMGMCXVQACGSXVTEEQPHAMLIPMEYFFMG

SEQ ID NO: 342221 - protein, 74 aa, Zea mays
  Clone ID: MRT4577_7526C.1.pep
SASDTRVVHHRANLAEANELQTEHEACAGVEPAVHPVRSLRSSLLYVLKVRQIQNSPLLLPRAPSYSRTCLGSL

SEQ ID NO: 342222 - protein, 144 aa, Zea mays
  Clone ID: MRT4577_75270C.1.pep
YNNNKIIFYLDPIFNTAMTSGDVIDPVSFIAPDGGTHSWQGVSTFEDNLQNPDLPTPDSTAPEARRTEVADGVAATYLTVSGDRARCLTASLTPAGCGALEQQGSSSSKQENCGVRSMRVERIKLSPRSFSPTFWKTGRLERRT

SEQ ID NO: 342223 - protein, 69 aa, Zea mays
  Clone ID: MRT4577_75271C.1.pep
MKRPRLRPGGAGGAQCPSCAVDGWGADLSKCRDYHRRHKVCETHSKTPIVVVTGREMRFCQQCSRVLYS

SEQ ID NO: 342224 - protein, 54 aa, Zea mays
  Clone ID: MRT4577_75272C.1.pep
GAMNDALVKNRPHEVPPGEEGVVGANCHHGHHGSWCGTVGKDGIISQWSPSAVQ

SEQ ID NO: 342225 - protein, 256 aa, Zea mays
  Clone ID: MRT4577_75273C.1.pep
MADGEDAAAARRRTAISDYRKKLLNCRELESRVGTVRENLKIARKDFAKTEDDLKSLQSVGQIIGEVLRPLDNERFIVKASSGPRYVVGCRSKVDKEKLTSGTRVVLDMTTLTIMRTLPREVDPVVYNMLHEDPGNVSYSAVGGLSDQIRELRESIELPLMNPELFLRVGIKPPKGVLLYGPPGTGKTLLARAIASNIDANFLKIVSSAIIDKYIGESARLIREMFGYARDHQPCIIFMDEIDAIGGRRFSEGTSA

SEQ ID NO: 342226 - protein, 112 aa, Zea mays
  Clone ID: MRT4577_75274C.1.pep
TWHEELLLLLLRIGTSPAAKSCVEVTSPEESCLDYYMRSTASPSTTRCAAAHSINTQASTWENRNANCYCINHNDVTDLGICMSLWPAHQTSHPSTVTPVKWRSNQPDSEPR

SEQ ID NO: 342227 - protein, 126 aa, Zea mays
  Clone ID: MRT4577_75275C.1.pep
SGRLSTVRDFLRTTNLRRRQRLRPAVIRVGPNLLLLMGPPSVYWVGLAEALLTPAALNTIVLALQTCLWQRTVYQARRGAPRLLHFSPWSGYPSVTILALSYYQPPFEISNANGGSEPILSISYLS

SEQ ID NO: 342228 - protein, 74 aa, Zea mays
  Clone ID: MRT4577_75276C.1.pep
ESMEEVSSGEMLCFIFWGLKRRNNYCVWRGLFILLAAKERNNVMVAFWIRERYVQLLPLTQRRNKEKERHNINN

SEQ ID NO: 342229 - protein, 440 aa, Zea mays
  Clone ID: MRT4577_75277C.1.pep
MDDGDTPRRKSVPDWLNSPIWSAPPPSPRHSSLPPTAPSPPQPPPSPLPSPQPRRDPTPIPPPNAPRDADVSDDEGKGAGAPSCAHLVAEFKVALDRKVVDLAELRRLACQGVPDAAGIRPIVWKLLLGYVPTDRALWPYELEKKRSQYCDFKDELLVNPSEVTRRMEEMTASEREEHNAEGTGVLPRAEIVRDEHPLSLGKTSVWNQYFQESEIVEQIDRDVKRTHPEMEFFNGDSSDSLSNQESLKRILTIFAKLNPGIRYVQGMNEVLAPLYYVFKNDPDQSQAALAEPDAFFCFVELLSGFRDNFCKQLDNSVVGIRSTITTLSQLLRRHDEELWRHLEVVTKVNPQFYAFRWITLLLTQEFQFRDCLSLWDTLLGDPEGPQATLLRVCCAMLILVRRRLLAGDFTANLKLLQNYPPTNIDHILHIANKLRGPLPF

SEQ ID NO: 342230 - protein, 44 aa, Zea mays
  Clone ID: MRT4577_75278C.1.pep
NRCLTAMLFMRSHLCDAASLIVCTGQAASCTAHLPDHPGDDWAD

SEQ ID NO: 342231 - protein, 166 aa, Zea mays
  Clone ID: MRT4577_75279C.1.pep
VRKFSMDAGAFDAVVCSHHAHSGKGAVDLGIAVEKACQNITQPLRFLYPLDIGIKDKIEAIAKSYGASGVEYSDQAEKQIEMYTQQGFSNLPICMSKTQYSFSHDASKKGAPSGFVLPIRDVRGSIGAGFIYPLVGTMSTMPGLPTRPCFYEIDIDPETGKVRGLY

SEQ ID NO: 342232 - protein, 501 aa, Zea mays
  unsure (1)..(501): unsure at all Xaa locations
  Clone ID: MRT4577_7527C.1.pep
MSPPPPPPLLRNELSRRTAVLGLRLWVLVGIAVGAAFVLLLVLISLHLAAARRRRPRKGVAHAPAHAPAGAPPLSPSTIPPVSKEIQEVXPSTSARSATTSRRGTRSSRTAAAATVSPWRTGRSXRPHRGRQGPAHGRGGFRRAVGGRGXPEVSHLGWGHWYTLRELEEATAAFAPEHVVGEGGYGIVYRGVLADGYQVAVKNLLNNRGQAEREFRVEVEAIGRVRHKNLVRLLGYCAEGAQRILVYEYVDNGNLEQWLHGDVGAVSPLTWDVRMNIVLGMAKGITYLHEGLEPKVVHRDIKSSNILLDRRWNPKVSDFGLAKLLGADSNYVTTRVMGTFGYVAPEYASTGMLNERSDVYSFGILIMEIISGRSPVDYARPAGEVNLVEWLKNKVTNRDYEAIVDPKLPEKPSSKALKKALLVALRCVDPDSQKRPKMGHVIHMLEVDDFPYREDRRTLRPGNGSPLEKARNPAAGSCDGSSCYGGDTTTASTPSRLVQDM

SEQ ID NO: 342233 - protein, 98 aa, Zea mays
  Clone ID: MRT4577_75280C.1.pep
VSILTNRPHTINHRLPTLTSSNTLLSVTQAYQNHSFFFNSHIISSIPYTISPSSLNFSLRIITIYNIPIKLHIFVHLYPIIIHIYYYVILHNIFCNHF

SEQ ID NO: 342234 - protein, 42 aa, Zea mays
  Clone ID: MRT4577_75281C.1.pep
SQNRRRPQWQKFIHGEKASMSPLRDPSPGLRSPTAPKDLSAR

SEQ ID NO: 342235 - protein, 43 aa, Zea mays
  unsure (1)..(43): unsure at all Xaa locations
  Clone ID: MRT4577_75282C.1.pep
NXTRXGGGKHPTVNPHPRNRKGRXKRETHXKAEPKPFNGIKVP

SEQ ID NO: 342236 - protein, 57 aa, Zea mays
  Clone ID: MRT4577_75283C.1.pep
LMMRARTMMAFLHLPSPVNPRGLVTMTSHSFFSIFSFDRCFRPHKTTRMNGCRATIT

SEQ ID NO: 342237 - protein, 61 aa, Zea mays
  Clone ID: MRT4577_75284C.1.pep
MFFFGGPQLNPPPLPPPIFPPSKKKKKKKKKKKKKKKKKKKKKKKKKKKKKKKKKKKKKKK

SEQ ID NO: 342238 - protein, 151 aa, Zea mays
  Clone ID: MRT4577_75285C.1.pep
MAFAVTLTPLRATAVLAGWRRRPGVTPPRFAVVLATSTGVGGERTPPTFRRLREELLQLHAEADLTQSKANSERVRLVRLTEAAENLKKRAATSVRMGKESEAVDLLVQKKKLTKALENIKERIEALDMLSGKISEVISMKQNMLIEYALA

SEQ ID NO: 342239 - protein, 63 aa, Zea mays
  Clone ID: MRT4577_75286C.1.pep
EHSSHQVYFTSNNLTTGAAFILSLLALLALFASATNAYIISQCLLVPSSIILQNLPPFNILVF

SEQ ID NO: 342240 - protein, 203 aa, Zea mays
  Clone ID: MRT4577_75287C.1.pep
SPPARPQYCCRSIEIGERQSAGEKEVLTPRFRRTHYYSPSVSDSPRGPRSVKQGRSQGREGEGSKWICASCCGILRNTLHQAQSRCAQNMQSSAMAFFPSVATAKLELNSLYRKYVDMFGVSSNNSTVGSHTIHKMSHLPVLLVDRTFFSTGTAIQSIAISYGALIRRWLLGGTSVAQHTNTMISPCCYELASLLWLPAILCQ

SEQ ID NO: 342241 - protein, 88 aa, Zea mays
  unsure (1)..(88): unsure at all Xaa locations
  Clone ID: MRT4577_75288C.1.pep
FQAGGGPRFSKVPKVYFKKVFGKRPFKGLAETTLSPNQKKSKINPLPWRVXGPLKVXPAPVKGGPVYCRAXLGVALGPLEIRPFLLKF

SEQ ID NO: 342242 - protein, 45 aa, Zea mays
  Clone ID: MRT4577_75289C.1.pep
RDLDNPGAPPLKHLAAQPPFACRRHIEKARTDRPSLQLRSLDREG

SEQ ID NO: 342243 - protein, 90 aa, Zea mays
  Clone ID: MRT4577_7528C.1.pep
KIVFASKKKNILSEHQKKKMRGKERIRCRATKKKNGTFGCELFNVAIIGGASFDSLLTFPVFHCIWRFFLYYSSGHFLAFHSLFLFGIFL

SEQ ID NO: 342244 - protein, 404 aa, Zea mays
  Clone ID: MRT4577_75290C.1.pep
MQSSAMAFFPSVATAKLELNSLYRKYVDMFGVSSNNSTVGSHTIHKMSHLPVLLVDRTFFSTGTAIQSIAISYGALIRRWLLGGTSVAQHTNTMISRAAMNSLPCCGFLPFFASVGALMTKLCGCTMIPDRFSGWQSILRQSANLRGEPVLVVDNNELGNDQILSSFLGRKRDYVGLVLRCICYSACLKVADTPQKKLSFIRQWMRSGHDTSAIWRAMARNEQYLAFVVVLAALQLFLRLARVNVTILFLPMLSQAVSSRSSPAVIGNVLLVLVTSCGVLGSAFSAKQFGREVTFAIGAIVMVICQVAIPLIMEVQIGVGGGTRMPVGYTAATFALTCVVSCGLSWSWGSFFWTFPGRKVHSAGHVLAVALNLGVCFAQMQYFLLTLCRLKNATLAYYALWIWS

SEQ ID NO: 342245 - protein, 94 aa, Zea mays
  Clone ID: MRT4577_75291C.1.pep
YTEHVHVLPVQRVQLQLRRGNAREERHRRCLHILSTPVLQFSFLFSRQSARPEYQMVRRSSAPVSLFLLFFLCTDVRGRKTSLGCSGDVGGGGG

SEQ ID NO: 342246 - protein, 139 aa, Zea mays
  Clone ID: MRT4577_75292C.1.pep
MVICQVTERSQFFCKKKTKTLKRVLEKQATDTVHGRNFVCKVAIPLIMEVQIGVGGGTRMPVGYTAATFALTCVVSCGLSWSWGSFFWTLPGRKVHSAGHVLAVALNLGVCFAQMRYFLLMLCRLKNATLAYYALWIWS

SEQ ID NO: 342247 - protein, 174 aa, Zea mays
  unsure (1)..(174): unsure at all Xaa locations
  Clone ID: MRT4577_75293C.1.pep
IRHEAKGDPGNDKTSVRVDELDGGXHCLTEYIPLFDDSSLRKVLQHCMLYDRHVLQIYLTKSAAFHADTMXHLARLHYSSRRTDXAFSLEXLTHDNRVMGCCSNGIAXIAMRSMKTIYGLKKIYKDGSQRDTTAIDPVEILHPEHTELWICYSSIDSMRSSKLYENVKRKLERK

SEQ ID NO: 342248 - protein, 79 aa, Zea mays
  unsure (1)..(79): unsure at all Xaa locations
  Clone ID: MRT4577_75294C.1.pep
GDAQEGTREEXKDKEXKPXXXDXQASQXAXQHHGPKEDQTPXNXNQIXDRGKPXKXHXEADQTAXXGKEDEDGKRTPSR

SEQ ID NO: 342249 - protein, 149 aa, Zea mays
  Clone ID: MRT4577_75295C.1.pep
VRGTWSPSVSDSPRGPRSVKQGRSQGREGEGSKWICASCCGILRNTLHQAQSRCAQNMQSSAMAFFPSVATAKLELNSLYRKYVDMFGVSSNNSTVGSHTIHKMSHLPVLLVDRTFFSTGTAIQSIAISYGALIRRWLLGGTSVAQVSC

SEQ ID NO: 342250 - protein, 78 aa, Zea mays
  unsure (1)..(78): unsure at all Xaa locations
  Clone ID: MRT4577_75296C.1.pep
MNFISVSLTMVLVVVFRGLLVDTYGFGRIIXDGLVFRXNFLIRSYXIGVDRTTSIETLMNHXPGGTISRPASRPNPRV

SEQ ID NO: 342251 - protein, 47 aa, Zea mays
  Clone ID: MRT4577_75297C.1.pep
SFSVLFMFIANKTDAKMFCYVPLKLETSLSLLSVCSRKSVWRAKRLG

SEQ ID NO: 342252 - protein, 191 aa, Zea mays
  Clone ID: MRT4577_75298C.1.pep
GRSSSKRHGRIQKKRTRSISPQGRSGSPVGANKSSPSQSSSPGKQSRPPFAKRLHSADDGNDSEGRVVQQEGLSLTSKLDSSSNDLIGKVGDAAAVGVALGQHCHSDNLISEHSQLMAAGATHKMQMPCPPSESLSDLNVSSSAGGPILTNQPAAGVPYVSVETTKSSMTSKHLQSHPQSLSPPDTCHPRI

SEQ ID NO: 342253 - protein, 138 aa, Zea mays
  Clone ID: MRT4577_75299C.1.pep
MLSGEPLALSPEAHCRDGRIQAPQGPPVPSVKAPVLAPQQPPPLPERGIPELLNLSVDPQGKGKKGSDHSATIALQSPFAIYNAHFELGLGQSMISADNSYADQHYGLLSPYPVGATPGGRLLIPLNRPTEAPIYGER

SEQ ID NO: 342254 - protein, 165 aa, Zea mays
  unsure (1)..(165): unsure at all Xaa locations
  Clone ID: MRT4577_7529C.1.pep
KKKGKKTKKTGEKGPAKKKGNLGGNNKKRRGKKAAKRGGQLQIKMGKSWKRRTGRAPLEKPQLGKKXKCRKGNKMGKPKXSKHEGGKRRPMKWKTTPQRAKWAPKKKGQTAPKGKXKLQKSPKRGERPKKKXKKIKKKKIYTKKIYKKKIKKKIKKFCTLFFFYF

SEQ ID NO: 342255 - protein, 140 aa, Zea mays
  Clone ID: MRT4577_752C.1.pep
MSTMAMSALNPDAPMFIPAAFKKVEDYSPEWWELVKTTAWFRDHWFRQHQLYEDLADDVDDVAALLPDDSVDLLDADDLFYSPPSPQPQPDFYHYKPAGFGGDMDAVLKTLSLNSPRGGGPAPAWAPMRHAEKPAQHVSP

SEQ ID NO: 342256 - protein, 104 aa, Zea mays
  Clone ID: MRT4577_75300C.1.pep
MAAGVLQIPVSVYLLCMSKRVTPSALILDISLCADVVVTVLLASGVGAGFGATNDALRYVHHVRWDDAGVKDDLVDYYNKATVPVVFLLLGTVLSMAAPVVSAR

SEQ ID NO: 342257 - protein, 61 aa, Zea mays
  unsure (1)..(61): unsure at all Xaa locations
  Clone ID: MRT4577_75301C.1.pep
GVQYSKIXKDLQVEFCCNGTVVQYAELRHVIHHQGDQRMNVSHLLVHVGIVQKQHXKLHGF

SEQ ID NO: 342258 - protein, 49 aa, Zea mays
  Clone ID: MRT4577_75302C.1.pep
VEGQELLQLSQVLYQRAGLELDPVMSSHSQLFDRDVGAQPPFACQVMRV

SEQ ID NO: 342259 - protein, 55 aa, Zea mays
  Clone ID: MRT4577_75303C.1.pep
DVSVYLLHLYNLYQNYLGTRCKPNSLSMCIIWNYPTMLPIKILLQVEIILPQELV

SEQ ID NO: 342260 - protein, 353 aa, Zea mays
  unsure (1)..(353): unsure at all Xaa locations
  Clone ID: MRT4577_75304C.1.pep
GALMHGNGDLGSEFYETLAKMAPTKEEELKLKGYNGDISKLDPAERFLKDVLDVPFAFKRVDVMLYRANFGAEVNYLKKSFGTLEAACTDLRSSKLFLKLLDAVLKTGNRMNDGTNRGEARAFKLDTLLKLADIKSTDGKTTVLHFVVQEIIRSEGLXRSSSSSSRNPGSTSKEQFKKDGLQVLAGLSSELSNVKSAAALEMDTLVGSVSRLETDLEKVKLVSRLRQTCPGHDQVSSEKFFEANDAFLXTCHAEIEAVKAXRGAALQRVKETTEYFHGDAVKEEPHPLRIFMVVRDFLATLDRVCRAVGRTPERVMMGSGKSFRVSAGXNLPAAAPERAAEGAGPSDEDSSSS

SEQ ID NO: 342261 - protein, 241 aa, Zea mays
  Clone ID: MRT4577_75305C.1.pep
MSTPSDPAASAQPPSTAATSSSGLTFKLHPLVIVNVSDHYTRVKAQASFSAEAPSPGKAQASCSAEGSSAPAEPPRVFGCVIGVQRGRTVEIFNSFELVLDPVTGTLERAFLEKKLELYKKVFPEFYVLGWYSTGSDVQDTDILIHKALMDINESPVYLLLNPAINHSQKDLPVTIYESELHVIDGGPQLIFVKSNYTIETVEAERISVDHVAHLKPSDGGSAATQLAAHLTGIHSAIKML

SEQ ID NO: 342262 - protein, 56 aa, Zea mays
  Clone ID: MRT4577_75306C.1.pep
NKRCCPSFNRLLDMYVDVYICIYYLIWGTVGSVVGNGVCVCCPQKIIDFPPVSKVW

SEQ ID NO: 342263 - protein, 320 aa, Zea mays
  unsure (1)..(320): unsure at all Xaa locations
  Clone ID: MRT4577_75307C.1.pep
METVTVVVAPAPVAVNQQPPQHKLAELKPSSFAGVAKSSPATKAKPAKTKKLAGGCGGYVLEDVPHLTDYLPELKSYPNPLQDHPAYSVVKQYFVNPDDTVAKKIVVHKSGARGTHFRRAGPRQRVYFQPDEVTAAIVTCGGLCPGLNTVIRELVCGLHDMYGVATVYGIEGGYKGFYARNTVELTPRSVNDIHKRGGTVLGTSRGGQDTAKIVDSIQDRGVNQVYIIGGDGTQKGAASIHEEVQRRGLKCAVVGVPKTIDNXDIAVIDKSFGFXTAVXXEAQRAINAAHVEAESAENGXGVXVKLMGRNSGFIXMYATL

SEQ ID NO: 342264 - protein, 57 aa, Zea mays
  unsure (1)..(57): unsure at all Xaa locations
  Clone ID: MRT4577_75308C.1.pep
LFTSLAVVVVQITQVTGETKAAXRVVEIINKLMXLASVHTTVAIISSSYIVVGRHFK

SEQ ID NO: 342265 - protein, 64 aa, Zea mays
  Clone ID: MRT4577_75309C.1.pep
PSVRPASARRVRKKKKKKKKKKKKKKKKKKKKKKKKKKKKKKKKKKKKKKKKKKKKKKKKGGRF

SEQ ID NO: 342266 - protein, 132 aa, Zea mays
  unsure (1)..(132): unsure at all Xaa locations
  Clone ID: MRT4577_7530C.1.pep
XXXPXPLFXVSAFXXXXXXLSXXFXXXLVXXVXXGXXLGXXPLXFXXXGXXXLVXPXXCXXFLXRRFXXAAWPXXXXXFXXCSLFXGPLLXFXXXXXVPXXCXXXXXSXXXLXXXXGLACFXCLLAXXXFFS

SEQ ID NO: 342267 - protein, 54 aa, Zea mays
  Clone ID: MRT4577_75310C.1.pep
PCNRKCYAMALPRPWAWLLLLLKLQMGLTRLLGDDKLNNFALQYHMITVKFLDI

SEQ ID NO: 342268 - protein, 108 aa, Zea mays
  Clone ID: MRT4577_75311C.1.pep
LTKIDDEIMEHLKEAFPDFDPPAKVDEDAMKSKDGKNRWREFMMKYEKKVDDYNFGTMVRDSPKVEYEENTTIFVPRMQFYAFEIARNRAGLNDWIYEQAQAEKAKSK

SEQ ID NO: 342269 - protein, 63 aa, Zea mays
  Clone ID: MRT4577_75312C.1.pep
FLTWNTTSMGWVISSLLALLALATTSTNCLLVPQYSLDPSYILTLIVLPVPCSSTRSLYSATL

SEQ ID NO: 342270 - protein, 52 aa, Zea mays
  Clone ID: MRT4577_75313C.1.pep
AFVICLNGPKMFAYSIRLSCALPTKINAVSKHFGWKHTTPTNSCTIMSTWIY

SEQ ID NO: 342271 - protein, 161 aa, Zea mays
  unsure (1)..(161): unsure at all Xaa locations
  Clone ID: MRT4577_75314C.1.pep
PGPKRPQPPRPPRTAASSRKTXRMKPHQTQGGKRCRGVSGFVVXRTASSRRARSXTPGMVVESSRVVFLSVGRCAMCCDCEAGSSGVGRPTGDCHYKQGDRAACGRPRVFGCGLDALPRSSEIQIRCTSSKEQGSALLLLFYVRFVLATELLSRNKVAVSS

SEQ ID NO: 342272 - protein, 143 aa, Zea mays
  Clone ID: MRT4577_75315C.1.pep
GNQTTGPIFKYPTGKGGTFGTILFRQTDEAFFLTNNLWEQTPPILLGGTDIPPKNGQIIHFKNWIPTRGGGPPQRGQKKSKPGGGEKPWAPGGPREKKKFRGGACQKKTPFWFFPGGAPPLPAKIFWAHRPPLGSQGGPPRAK

SEQ ID NO: 342273 - protein, 69 aa, Zea mays
  Clone ID: MRT4577_75316C.1.pep
PRVRFVASNFLEIQGLLNAIAQKAADVIKGKTTEQIRDAFNIVNDLTPEQEATAAELRRKYTWDYHPEA

SEQ ID NO: 342274 - protein, 77 aa, Zea mays
  Clone ID: MRT4577_75317C.1.pep
YNIFLRCFQIDPPRNENEELVDRAIAEPLAEAVKPPRGSTVDGRIQIHIPCQHGINFSETVSSLHPVAVNCCARENP

SEQ ID NO: 342275 - protein, 62 aa, Zea mays
  Clone ID: MRT4577_75318C.1.pep
LECICEHVSFSQDLISECSIMLLCRKQTSISAYEQFSQRLMLKYPGQNCNLYEYLITCLIEA

SEQ ID NO: 342276 - protein, 55 aa, Zea mays
  Clone ID: MRT4577_75319C.1.pep
MLKREPNHPFKRGKKALGGTKVDPKRRKKPFLPNQNLKPGPTGYPVLIKNPGNLE

SEQ ID NO: 342277 - protein, 58 aa, Zea mays
  Clone ID: MRT4577_7531C.1.pep
RGYKSMAGFHFKKILSEIPSVEQSSIKANLQAYVKKYLFLLYCIQIIRPSIIKQISPT

SEQ ID NO: 342278 - protein, 54 aa, Zea mays
  Clone ID: MRT4577_75320C.1.pep
PFCVWNRWVCWRKVCPAVFQVAGPLILKHLFSSSFVKHPVCGLFSILVMPIPVY

SEQ ID NO: 342279 - protein, 438 aa, Zea mays
  unsure (1)..(438): unsure at all Xaa locations
  Clone ID: MRT4577_75321C.1.pep
RDSPGPLTLAAALFPDAPSPAFHGSFTQLLVGAVGSPAVPSSPSPFAVPPRLSPATLLGSPGFFSPTASFEMSHQQALAQVTAQAVHSQYNMINHADYTIPFSSTTTPALVIAQHANFSGNLTSAQEKPALPSHTGNSNIESNEVSQGLKTSAPTFDKPADDGYNWRKYGQKAVKGGEYPRSYYKCTHTSCAVKKKVERSAEGHITQIIYRGQHNHQRPPKRXPKMVVVXLNEADDLHENEDISTRSEPGSQEHSGKHEGSNDGISGPSVSRRGGGDEQLSGSSDSDEEQDDEQRAGDEDPGYANANKRHVPTPAQRIIVQTNSEVDLLDDGYRWRKYGQKVVKGNPHPRSYYRCTYQGCDVKKHIERSSQDPKAVITTYEGKHSHDVPAARNSSHAAANANCSSSTSVPHRVQSSAXVVAEWXLTKHLFSFFYAQDK

SEQ ID NO: 342280 - protein, 52 aa, Zea mays
  Clone ID: MRT4577_75322C.1.pep
FVLSPPPPPPVFFSLAVWLRPCRLTSVLRLHLVNLLFHRRPLAGQSRAPQLR

SEQ ID NO: 342281 - protein, 121 aa, Zea mays
  Clone ID: MRT4577_75323C.1.pep
PEFPGRPTRPRKYGQKVVKGNPYPRSYYRCTYQGCDVKKHIERSSQDPKAVITTYEGKHSHDVPAVRNGSHAAANANGSSSTSLPVPHRVHSSASSSRRAAELQSASSASSMLLKEENEIT

SEQ ID NO: 342282 - protein, 119 aa, Zea mays
  unsure (1)..(119): unsure at all Xaa locations
  Clone ID: MRT4577_75324C.1.pep
RTRGRTRGQGLKTSAPTFDKPADDGYNWRKYGQKAVKGGEYPRSYYKCTHTSCPVKKKVERSAEGHITQIIYRGQHNHQRPPKRXPKMVVVXLNEADVLHENEDISTRSEPGSQDTLKT

SEQ ID NO: 342283 - protein, 75 aa, Zea mays
  Clone ID: MRT4577_75325C.1.pep
IRLWRLGHAVSGHYGIVGVPHAAAKMPGYGLERTVSDGDVPQYGDPTMRTPLIMLNAIYNTWTGMNVLAPRSGVP

SEQ ID NO: 342284 - protein, 75 aa, Zea mays
  Clone ID: MRT4577_75326C.1.pep
RRFPQKAILPPQLTRERVVIILFRGIRKPQCWFFSQRLFKGHVPQKSRFVCFFGPLFLKFFRPGPKEIQKAAFFF

SEQ ID NO: 342285 - protein, 79 aa, Zea mays
  Clone ID: MRT4577_75327C.1.pep
KQGSAGFTAQKVLRLRIPLLGLRVYFTETEGLVRKITVAKGYSLLRAAQIRSNGPNQTTNRYRITAIGSWISGHRDIHA

SEQ ID NO: 342286 - protein, 88 aa, Zea mays
  Clone ID: MRT4577_75328C.1.pep
KPRKNWNSLKPHPGCFAVKFYESPPGLAKCIIPIYFFKKKILSGAKKFVLPQTKASQYISTRGPTHFFNCMCILDPEKAKYLSPFWSP

SEQ ID NO: 342287 - protein, 83 aa, Zea mays
  Clone ID: MRT4577_75329C.1.pep
PLCFPRKEPFFKIKQGSLTPRAMSTPCATPRAPIFGPPPKPKTKWLLSFFPGKGKKWTKGFGQINFFPPPLSVAKNAPNQPGS

SEQ ID NO: 342288 - protein, 128 aa, Zea mays
  Clone ID: MRT4577_7532C.1.pep
LGELRSPLKKSLVDSCGKDWGQSLYASWRHSPMATISLCLLAQAYNHASCVIQSLGEEDINVNFLVQLDKLIRLLETPVFAYLRLQVTWSDNPFLQIYLSVSQAHLNSETWRVLPGFFNLISSATLMA

SEQ ID NO: 342289 - protein, 40 aa, Zea mays
  Clone ID: MRT4577_75330C.1.pep
LTAPLSKKSNLTTSSFHLNIFFFIPTKIKSTPPFLTTSNL

SEQ ID NO: 342290 - protein, 244 aa, Zea mays
  unsure (1)..(244): unsure at all Xaa locations
  Clone ID: MRT4577_75331C.1.pep
MSAMQSSYLPATTESIAMAQEAKDASESILILYRVLEDPSSSSDAVRTKEVAITNLTNYLTKENRAQELRNLLTQLRPFFALIPKAKTAKIVRGIIDAVSKIPGTSDLQISLCKEMVEWTRAEKRTFLRQRVEARLAALLLESQEYTEALTLLSGLIKEVRRLDDKLLLVDIDLLESKLHFSLRNLPKAKASLTAARTAANAIYVPPAQQGTIDLQSGILHAEEKDYXTAYSYFFEALKGYALG

SEQ ID NO: 342291 - protein, 98 aa, Zea mays
  unsure (1)..(98): unsure at all Xaa locations
  Clone ID: MRT4577_75332C.1.pep
ASGQGGPQGXVGGHGRRRHQLINLAFGASGRAWAVDLATSSRDPIIYDYFLKLCKFLDDFRAVFPLWILQRRQMKYQLMIANWTSIQQLIMNHLSMQK

SEQ ID NO: 342292 - protein, 144 aa, Zea mays
  Clone ID: MRT4577_75333C.1.pep
FAWVLIQNKLLTADNLARRGWPHHPSCAICNGPIESGLHLCLTCPFAYEVWNTVLAWESFFLPQHVVWSNISSISEWWEKTETLFPQDRKREFNGLVIYTMWNLWKERNRRIFEHCSLSPLQIAERVRECVLLYKSASSRLGLY

SEQ ID NO: 342293 - protein, 91 aa, Zea mays
  Clone ID: MRT4577_75334C.1.pep
MKLRSAEAKATGAEAGTTEESNLETTLEVIDNILLKMAEEETTAAAVSTATEKGKEQIDEISEEDFNFQDMHGEELTDAEKEELKKYAISW

SEQ ID NO: 342294 - protein, 100 aa, Zea mays
  Clone ID: MRT4577_75335C.1.pep
KTMDESLVHLHGSSEATTVISRIKNSHDFRETNTDRVHQSRGSPRDSSPGRQQETSAAGQYRTLVQNLPPLQVSKSTNLSRDPSAVFPEYPLGLFVSPLY

SEQ ID NO: 342295 - protein, 136 aa, Zea mays
  Clone ID: MRT4577_75336C.1.pep
EITCGRRPVVVVVVGDDESSQEESQCMLVDWVLERWASSGALLETVDARLGGDYNAAEACLALKLGLLCSHPFSKSRPTARQVMQYLDGEVPLPEMAPTDMSLHMMAIMQNEGFDDYVVTGSTASIGTTSVVSGGR

SEQ ID NO: 342296 - protein, 48 aa, Zea mays
  Clone ID: MRT4577_75337C.1.pep
TLLQSVTRVKPYICTMPLKLDDGWNNIQLNLADLTKRAYGTNYVETLR

SEQ ID NO: 342297 - protein, 34 aa, Zea mays
  Clone ID: MRT4577_75339C.1.pep
KTFLTIKSTFYIFKGPNLHTLLFHSYYLQSSYQN

SEQ ID NO: 342298 - protein, 80 aa, Zea mays
  Clone ID: MRT4577_7533C.1.pep
IGVQIRHIYNIINISYEPTGIYIATLIYWRSIDRTVVTYFYLQLLLCSFGLQLKNYRNQMSSETTKKRMTRMWQRAFSNK

SEQ ID NO: 342299 - protein, 41 aa, Zea mays
  Clone ID: MRT4577_75340C.1.pep
WLGLSQSHTQVNRTSYLQAGVRALIGSSMQALSATRVPGNR

SEQ ID NO: 342300 - protein, 85 aa, Zea mays
  Clone ID: MRT4577_75341C.1.pep
PSPIWCMSRGAAESGGTEHAEVVLQSDESRASRSRGLVFSAGSSRITLVPQRCSGAALPRLTAANPSQVYLCSLSLHFLRLVLTP

SEQ ID NO: 342301 - protein, 100 aa, Zea mays
  Clone ID: MRT4577_75342C.1.pep
IRLEIVFSVFLPMGGTSNMGGFMTPTAPLRTQSTNFLALVFWSSYTCFKCYSNTGAFSNMLTYYFSYLHFSLFFFTFFSPFFFSFLSSFFSLSSFSSLFL

SEQ ID NO: 342302 - protein, 142 aa, Zea mays
  Clone ID: MRT4577_75343C.1.pep
AGRVGSLPLSADLVRLPLSSFLPISSQFLSSVLMASNYVDTGAEEGRFHGHHHSTTPTSAAASPKTLRRSSSSAHSHGHGAPPKCVCAPATHAGSFKCRLHRSSSHGHGHGSNPASPPSPATFAAGPPPAAAASSSRTVAAQ

SEQ ID NO: 342303 - protein, 135 aa, Zea mays
  Clone ID: MRT4577_75344C.1.pep
GPSRPAGPGVCRSRQSALVRLPLFSFLPISSQFLSSVLMASNYVDTGAEEGRFHGHHHSTTPTSAAASPKTLRRSSSSAHSHGHGAAPKCVCAPATHAGSFKCRLHRSSSHGHGHGSNPASPPAAASSSRTVAAQ

SEQ ID NO: 342304 - protein, 122 aa, Zea mays
  Clone ID: MRT4577_75345C.1.pep
ELFVHWSLCCLWRGTVLMASNYVDTGAEEGRFHGHGHGHGHHHHHSTTPTSAAASPKTLRRSSSSAHSHGHGAPPKCVCAPATHAGSFKCRLHRSSSHGHGHGSNPASPPAAASSSRTVAAQ

SEQ ID NO: 342305 - protein, 144 aa, Zea mays
  Clone ID: MRT4577_75346C.1.pep
SAGPGPGRRSLPLSALVRLPLFSFRPISSQFLSSVLMASNYVDTGAEEGRFHGHHSTTPTSAAASPKTLRRSSSSAHSHGHGPKCVCAPATHAGSFKCRLHRSSSHGHGHGHGSNPASPPSPATFAAAPPPAAAASSSRTVAAQ

SEQ ID NO: 342306 - protein, 58 aa, Zea mays
  unsure (1)..(58): unsure at all Xaa locations
  Clone ID: MRT4577_75347C.1.pep
MKLVLVDLAFIGLISSGFWTQTGGCSCGQQPRHEPXLHPQQHDSRKQRHLTPSQHYLQ

SEQ ID NO: 342307 - protein, 47 aa, Zea mays
  Clone ID: MRT4577_75348C.1.pep
AHAQCFDQGHSLYCLERAVAVRPSITYTHRREAPDGSARSTSNKCWA

SEQ ID NO: 342308 - protein, 65 aa, Zea mays
  Clone ID: MRT4577_75349C.1.pep
NKERLRLDTGVQGTRFKNITFCLMHEQYPKGAHFYVHCYENPPIYPSSRTPTLPSTRTHLSDYEP

SEQ ID NO: 342309 - protein, 510 aa, Zea mays
  unsure (1)..(510): unsure at all Xaa locations
  Clone ID: MRT4577_7534C.1.pep
PDFLDGLFNMLSDSSHEIRQQADAALSEFLQEIKNSPNVDYGRMAEILVRRAGSTDEFTRLTSITWINEFVKLGGEQLVPYYADILGAVLPCISDEEEKIRVVARETNEELRAIKADPTEGFDIGAILSIAKRELNSEHEATRTEALHWFFTLLDQYRAEFLAYLNDIFDPLLNALSDPSDAVVLLVLEVHARIAEESHHFHHLVSYLICTFHNNHFLLEKRGALIVRRLCVLLGAEKVYREFSTILESEVDLDFASVMVQALNLILLTSTELGELRSLLKKSLVDSCGKDLFQSLYASWRHSPMATISLCLLAQAYSHASCVIQSLGEEDINVKFLVQLDKLIRLLETPVFAYLRLQLLEPGKHTWLLKTXYGLLMLLPQQSAAFKILRTRLKTVPFSENIKRTSSANPYSQILQVTEDGNRNQDTQNYSAINFPSLLQQFEHMQLQHRNHLKDQLQSRKSASALTLSQEIQRYEAAHSSSLSEINRPPSRPSKKKKKKKKKKVLCFVT

SEQ ID NO: 342310 - protein, 45 aa, Zea mays
  Clone ID: MRT4577_75350C.1.pep
EYFFRHASTTMSSLVSHRRRGCQMMSAYKITVTHPNSGFIHANKQ

SEQ ID NO: 342311 - protein, 89 aa, Zea mays
  Clone ID: MRT4577_75351C.1.pep
MSGGIARGRLAEERKAWRKNHPHGFVARPESLTDGSVNLMVWNCTIPGKHGVSRGNAYWIRFDLVTWLGSMVVIMIDRIFREIPLPCAE

SEQ ID NO: 342312 - protein, 170 aa, Zea mays
  unsure (1)..(170): unsure at all Xaa locations
  Clone ID: MRT4577_75352C.1.pep
AGSGTAGPAHATRFLLPYPRIHXVLFXYAPVISAEKAYHKQLSEGGSSKMGLXPASMMAERDLRHGKSMACCLMNRGEEGPKDVNAGVDTLKTKRTIHFEDWCPTGFKCGINYQPSSVSTXGDLNKVQRALCMISNYTSVVEVLFRIDHTFDLMDSKSVLYHXYNGKGME

SEQ ID NO: 342313 - protein, 249 aa, Zea mays
  Clone ID: MRT4577_75353C.1.pep
MYLLGNKSGKKKVYVDYMNVPLPYAIEENYGGRFFDDDDDLAQVLQDQEILYHLIQGSNGGGSSRTHSIPSSSYGHDRTSNAQKLSGDVNCECELQLAVDEALARELHEMESKLANTSLNDNNGRKTTSSSAFDRGNNSASRPPQVLEEDVIDPDNMTYEELQQLGEAIGTQSKGLPESVIALLPTSTYKTGIFSRKEKHDECVICCMAYKNRDRLTKLPCGHHYHQACVAKWLQINKVCPVCNKEVFS

SEQ ID NO: 342314 - protein, 90 aa, Zea mays
  unsure (1)..(90): unsure at all Xaa locations
  Clone ID: MRT4577_75354C.1.pep
RGRVXIRSSGNCVASGRTRGRGCRTXXTRRESRRXKAVGVQRPGFLSRXGDQXXRQGGTIXPKGLAAXVAXXSRXFQPXEQGAYQXEAXR

SEQ ID NO: 342315 - protein, 318 aa, Zea mays
  Clone ID: MRT4577_75355C.1.pep
MVGRMERQTASSPASCSSSSSSSSSSSVCGGKKRPDILNMIRNAACLNSSSTDTGKGRSKLSTNKVTHGFHLVEGKSGHDMEDYHVAEYKYVKNHELGLFAIFDGHLGDKVPSYLKANLFSNIMKEPLFWSSPQEAIKNAYCSTNKYILENTKQLGPGGSTAVTAIVVDGKDMWIANVGDSRAVVCERGSAKQLTVDHEPHETNERQRIEKHGGFVTTFPGDVPRVNGQLAVARAFGDQSLKAHLSSEPDISHVPINSSIEFVILASDGLWKVMKNQEAVDLVKSIKDPKAAAKRLTTEALARKSKDDISCIVIRFRC

SEQ ID NO: 342316 - protein, 44 aa, Zea mays
  Clone ID: MRT4577_75356C.1.pep
PGGLCAISLSRPIIAPRSGILQNPTRPVLPRSPKRKRSASARAE

SEQ ID NO: 342317 - protein, 200 aa, Zea mays
  Clone ID: MRT4577_75357C.1.pep
MVGRMERQTASSSASCSSSSSSSSVCGGKKRPDILNMIRNAACLNSSSTDTGKGRSKLSTNKVTHGFHLVEGKSGHGMEDYHVAEYKYVKNHELGLFAIFDGHLGDKVPSYLKANLFSNIMKEPLFWSSPEEAIKNAYCSTNKYILENGKQLGPGGSTAVTAIVVDGKDMLIANVGDSRAVVCEMGSANQLTVDHEADTT

SEQ ID NO: 342318 - protein, 255 aa, Zea mays
  Clone ID: MRT4577_75358C.1.pep
MTDNLVSSMETAALADEDASPKKTKQGGFRTMPFILANEICDRFATAGFNANMITYLTQQLHLPLVEASNLLTNFNGTAAFTPVLGAIIADSRAGRFWTIAGGGVLYQLGMLGLVVSALVPALRPASCGATGAAPPLTCQRANGGQLAMLYGSLLLTALGGGGIRPCVVAFGADQFGQRGKRPGGEQQWSYFNLYFFSMGLAVLLALTVVVYIQENVGWGWGFGIPAIAMFVSVLSFVVGYPLYVKVKPQGSPLQ

SEQ ID NO: 342319 - protein, 86 aa, Zea mays
  unsure (1)..(86): unsure at all Xaa locations
  Clone ID: MRT4577_75359C.1.pep
DPRVHPRVRPRVRPRVRPRVRGRVGGRVGFVILASDGLWKVMNKHXAVDLVNSTKDPKAAAKRLTTEALARKSKDDISCIVIRFRC

SEQ ID NO: 342320 - protein, 762 aa, Zea mays
  unsure (1)..(762): unsure at all Xaa locations
  Clone ID: MRT4577_7535C.1.pep
LSADSDANVQSAAHLLDRLVKDIVTESDQFSIEEFIPLLRERMNVLNPYVRQFLVGWITVLDSVPDIDMLGFLPDFLAGLFNMLSDSSHEIRQQADAALSEFLQEIKNSPNVDYGRMAEILVRRAGSTDEFTRLTSITWINEFVKLGGEQLVPYYADILGAILPCISDEEEKIRVVARETNEELRAIKADPTXHGRPRVRQSAAFKILRTRLKTVPFSENLKRTSSANPYSQILQVTEDGXETMLCRTTVQSNSHFFSSNLRICSLIIVTICRINCNPVNLIRLXFSQVFSAFAHIFDYXIYDLSSHCCQRSYKCCIYGMVTLDQVFSNAVCLSNIICQYKLALLLSSFSSALTWVYSNLTPESELRTIVCSFKISPKKHYDTIGFDRLNWLSIAKRELHTEHEATRTEALHWFFTLLDQYHVELVYLLFDFTERLDDGXSLLSNLKVVRILSIKSRVVLQKKKKKKKKKKKKKNYNNKNFLLEKRGALIVRRLCVLLGAEKVYREFSTILESEVDLDFASVMVQALNLILLTSTELGELRSLLKKSLVDSCGKDLFQSLYASWRHSPMATISLCLLAQAYSHASCVIQSLGEEDINVKFLVQLDKLIRLLETPVFAYLRLQLLEPGKHTWLLKTLYGLLMLLPQQSAAFKILRTRLKTVPFSENIKRTSSANPYSQILQVTEDGNRNQDTQNYSAINFPSLLQQFEHMQLQHRNHLKDQLQSRKSASALTLSQEIQRYEAAHSSSLSEINRPPSRTSKGIL

SEQ ID NO: 342321 - protein, 355 aa, Zea mays
  unsure (1)..(355): unsure at all Xaa locations
  Clone ID: MRT4577_75360C.1.pep
DAQLPSSHREFLWEMNXLMAFPMYPTAFPLRLKRPWASGLPMFNGGRSDEFARYSSLMWLRDGNRGAQSLNFQGLGASPWLQPRIDYPLLGLKLDTYQQMAAAALEEIRAGDHLKQISSLLPVQQPQNLSGGLDPLYGNPVLQQMQFQSQQSSLQVVQQGYGPNASDSGFLQNQLQLQKQQEPLPQQQQQALQQQSHQEMQHHLSASCHDIANVASGVSESGSASQTESSLLSGSSYQQIYDGNSGPGLHLHNGFHNCSSQESSNLLNLSRSGQFMASEGWPLKRLAVESLSGHELQPVQHKFEKVNHQSNVSHISSTLPPLSARDSYSAQASGTNDQSHLLSSSFAIHDGLTAV

SEQ ID NO: 342322 - protein, 101 aa, Zea mays
  unsure (1)..(101): unsure at all Xaa locations
  Clone ID: MRT4577_75361C.1.pep
PSCTHHSVHNHFHXPRYVRFMMFLVFXPNSTYLSITHPIFYINTTTITTTLFSYQTHYYYMSNVQLTSSTNTSTTTNISEKSLNLLHVNPSNYETHILNLN

SEQ ID NO: 342323 - protein, 102 aa, Zea mays
  Clone ID: MRT4577_75362C.1.pep
SSLSYQLVFDSLRWGLGVYMHRRMEWTPCTHSPTSSQVFTVLISSRSVHNYGRYSRFYQGKKIGKADDYRQIVSIDIRRRGSEIKIAVEGVSQQRKRMTMQP

SEQ ID NO: 342324 - protein, 931 aa, Zea mays
  Clone ID: MRT4577_75363C.1.pep
MATCKAPAAIAAQSFSSPHLGVLAPRSYWLVGGNMNLSPPKMSEPSPESDGEQRCLNSELWHACAGPLVSLPVVGSRVVYFPQGHSEQVAASTNKEVDAQIPNYPNLPPQLICQLHNVTMHADAETEEVYAQMTLQPLSPEEQKDPFLPIELGAGSKQPTNYFCKTLTASDTSTHGGFSVPRRAAEKVFPPLDFSQQPPVQELVARDLHDNEWKFRHIFRGQPKRHLLTTGWSVFVSAKRLVAGDSIIFIWNDNNQLLLGIRRASRPQTVMPSSVLSSDSMHIGLLAAAAHAAATNSRFTIFYNPRASPSEFVIPLAKYVKAVYHTRVSVGMRFRMLFETEESSVRRYMGTITGISDLDSERWPNSHWRSVKVGWDESTAGDKQPRVSLWEIEPLTTFPMYPTAFPLRLKRPWASGLPMFNGGRSDEFARYSSLMWLRDGNRGAQSLNFQGLGASPWLQPRIDYPLLSLKPDTYQQMAAAALEEIRAGDHLKQASSLLPVQQTQTLNGGLDHLYGNPVLQQMQFQSQQSTLQAVQQGYGQNANDSGYVQNQLQQLQLQKQQEPPPPQQQQQTQVLQRQAHQEMQQHLSASCHDIANVASGVSMSGSACQSQSSLLSGSSFYQQNIFDGNGGPDLHLHNSFHNFSSQESSNLLNLPRSGQLMASEGWPSKRLAVESLAGHEIQPLQHKLEKVSHQSTVSHCSGTLPPLSARDGSSAQACGTNVQSHLLPSSFAIHDGLSTIRSGGVGSGTDAITIASLRYSDANLLPENSIATSSCLGESGTFNSLDDVCGVNPSQGGTFVKVYKSGSLGRSLDITRFGSYYELRVELERLFGLEGQLEDPARSGWQLVFVDRENDVLLLGDDPWQEFVNSVGCIKILSPQDLQQMARGGGGDLLSAPGARMLQGSVCDDYSAGHDVQNLTGSIAPVVPLDY

SEQ ID NO: 342325 - protein, 92 aa, Zea mays
  Clone ID: MRT4577_75364C.1.pep
PSIIKDIHHTVARRHEDRHQPLCGTSSRSSSLYKDQLMHEEYCISNTITFICNLFWRSRTASGSSLDPIINGHLKWKYLLKLHLLADSTRSN

SEQ ID NO: 342326 - protein, 52 aa, Zea mays
  Clone ID: MRT4577_75365C.1.pep
LQRVHKPFFLIPMTGDHTSSVFWRGINQMHNRVSYPNRSFIPTPLDGGGTLI

SEQ ID NO: 342327 - protein, 318 aa, Zea mays
  Clone ID: MRT4577_75366C.1.pep
MVGRMERQTASSSASCSPAAAATTSSSSCGGKKRPDILNMIRNASCLNSSSADTGKGRSKLSTNKVTHGFHLVEGKSGHDMEDYHVAEYKYVKNHELGLFAIFDGHLGDKVPSYLKANLFSNIMKEPLFWSSPQEAIKNAYCSTNKYILENTKQLGPGGSTAVTAIVVDGKDMWIANVGDSRAVVCERGSAKQLTVDHEPHETNERQRIEKHGGFVTTFPGDVPRVNGQLAVARAFGDQSLKAHLSSEPDISHVPINSSIEFVILASDGLWKVMKNQEAVDLVKSIKDPQAAAKRLTTEALARKSKDDISCIVIRFRC

SEQ ID NO: 342328 - protein, 73 aa, Zea mays
  unsure (1)..(73): unsure at all Xaa locations
  Clone ID: MRT4577_75367C.1.pep
SKXXXLXXQWCAPHHSFPSSPFSSSRFLPARSSSTCLCPYVSAHRIAMPHPPPAASVSEIMTSSCFESFPLLF

SEQ ID NO: 342329 - protein, 89 aa, Zea mays
  Clone ID: MRT4577_75368C.1.pep
FVVFGFFFFLFLVYFHRPLICVNWHAVTNLKNKNPPCCAAHQPGRDTTWTKEKSIGGPISHKKNLRQGLTPYAASPNRIVVDTAAATDL

SEQ ID NO: 342330 - protein, 67 aa, Zea mays
  Clone ID: MRT4577_75369C.1.pep
SLPTPSFAPFQGTESSTTGHRQSQRTSLKLEQRTWRPPRPRATSISRPCRRRCRLARRILGRLFIFF

SEQ ID NO: 342331 - protein, 54 aa, Zea mays
  Clone ID: MRT4577_7536C.1.pep
QLRKDFNKVCTVHANCLVGLKSKQEKLTQVLDEWKEFKKKAALLGSNTTTALTH

SEQ ID NO: 342332 - protein, 66 aa, Zea mays
  Clone ID: MRT4577_75370C.1.pep
NPQWVACTKVKDHKRTLQLRSLKCTIAQYLTKQWLRITLYSILGYLACFDHLGISAYPGNIHQTKL

SEQ ID NO: 342333 - protein, 233 aa, Zea mays
  Clone ID: MRT4577_75371C.1.pep
MAGNEGLKVLGLQVSPFVLRVCMALNTKGVSYEYVEEDLSNKSELLLKSNPVHKKVPVLIHNGKPICESLVIMQYVDELFAGRSILPTDPYERATARFWAAYADDKLLPAWYGMVKAQSAEERAEKVEETLSAIQHMEVAFAKCSGGNAAFFGGDSIGYVDIVLGSFLFWFEAVRRVYDLEIINASNTPLLAAWAERFVGTVEAKEVVPVPDVDMAVQCINKLHAPAAAISSQ

SEQ ID NO: 342334 - protein, 67 aa, Zea mays
  Clone ID: MRT4577_75372C.1.pep
VMVSRPAYLRDGPCFACLEMVQDFLSSELGSEHYQLTKVSDPFCNKETDDPHTERGLMSFDVIYDRI

SEQ ID NO: 342335 - protein, 205 aa, Zea mays
  unsure (1)..(205): unsure at all Xaa locations
  Clone ID: MRT4577_75373C.1.pep
MAGEEGEGLKVLGLQVSPFVLRVCLALNMKGVSYEYVEEDVSNKSELLLKSNPVHKKVPVLIHNVVQVLIEWAAPCSQLFPAWYGMVKAQAEEERAEKAKETLAAIEHMEVAFAKCSGGNAFFGGDSIGYVDIVLGSFLFWFGAVRRVFDLEIINASKTPLLAAWAERFVGTVEAKEVLPLPTADMAVQYINKLHAPXAAAMSSQ

SEQ ID NO: 342336 - protein, 255 aa, Zea mays
  unsure (1)..(255): unsure at all Xaa locations
  Clone ID: MRT4577_75374C.1.pep
MAGEDGLKVLGLQVSPFVLRVCLALNMKGVSYEYVKEDISNKSELLLKSNPVHKKVPVLIHNGKPICESLVIMQYVDELFAGRPILPTDPYERATARFWAAYADDKXYELARTRVYVPDSLVPIEWAAPCSQLFPAWYGMVKAQAEEERAEKAKETLAAIEHMEVAFGKCSGGNAFFGGDSIGYVDIVLGSFLFWFEAVRRVFDLEIINASKTPLLAAWAERFVGTVEAKEVVPLPTADMAVQYINKLHAPLPPP

SEQ ID NO: 342337 - protein, 156 aa, Zea mays
  unsure (1)..(156): unsure at all Xaa locations
  Clone ID: MRT4577_75375C.1.pep
DADVDNVGRVNLLDLAHGGHLVRFVIWAQDAFNKLDXSLGAYDAPSAEQDGFELPHXKMCNADLGMIINFDEVHTAEKPLNRGSEAVGEKRXNPLXNMAAALKLKPYLATAXXMATFAEAARLMATMAKLDSKTTKLTPDTAKVKAAVNAWDKTIG

SEQ ID NO: 342338 - protein, 66 aa, Zea mays
  Clone ID: MRT4577_75376C.1.pep
TFGLIYVLVYVLGPSPLYLSYAEETKGSRVFLLRGEESFPLVPRRISASDREVPRSTDTDVEVRPT

SEQ ID NO: 342339 - protein, 53 aa, Zea mays
  Clone ID: MRT4577_75377C.1.pep
FTYKTIYHVHFLGPHPYTYARICKKKRETHHHSGKFFSYAEKFLFPRGKMRLN

SEQ ID NO: 342340 - protein, 118 aa, Zea mays
  unsure (1)..(118): unsure at all Xaa locations
  Clone ID: MRT4577_75378C.1.pep
RSKASVAPFHXESAKEPPFNTYKPIXPFTXXILXVATLLXPKPPGETRHIFLDHGGNVPHFEGHLFFVPPPPDNPKKPGXPQTVRLYFIALTLFXDHPEGLTGSPPPXXAVYYDPPTW

SEQ ID NO: 342341 - protein, 88 aa, Zea mays
  Clone ID: MRT4577_75379C.1.pep
PSRESKSRRESVDVSEAGIAAASSNIFVSCAVPQLCHLGCWARVCCNGPKGSLPGSDRLPDFASQFSTRRIRRSQPGKITSLQQTNNE

SEQ ID NO: 342342 - protein, 88 aa, Zea mays
  Clone ID: MRT4577_7537C.1.pep
LPIADDLAARVQHNQDSAGISNRYSVNGIPGFKEQENRMQLESKQGTCKTRRLDPADYRACDGAGQRQNTYDVIALEKRRLLYQTPLT

SEQ ID NO: 342343 - protein, 65 aa, Zea mays
  unsure (1)..(65): unsure at all Xaa locations
  Clone ID: MRT4577_75380C.1.pep
SMATAAAAATAMCSXLGPSGRIWRRGCPKWRRAYSTRLCVCSKCQLSRCRGALPVVVSSAVSVCS

SEQ ID NO: 342344 - protein, 81 aa, Zea mays
  unsure (1)..(81): unsure at all Xaa locations
  Clone ID: MRT4577_75381C.1.pep
GYPRVSPGIQHVSSPALHKKKLLGMXSCSAAPASCVAVLAVLGCSDWAQAKRARILRWSRRWSLRGPGLGRRAMATGGGGG

SEQ ID NO: 342345 - protein, 150 aa, Zea mays
  Clone ID: MRT4577_75382C.1.pep
RASECEGRCPDKVSNDDMTTRSKGAVVAMTDGEGHCGAGRHGLHGDREGVADPNDMWRTSSRSCCCSLGEHHGGPSTTSRAAARWCLGAQPIQERSWEAWPTWVSPVGKARSTLMPSRERCGHEEVRRAEAGGEASYIGLGAATMRRHVR

SEQ ID NO: 342346 - protein, 61 aa, Zea mays
  Clone ID: MRT4577_75383C.1.pep
EAAPFGVGLATKRRSWLAIPWTYFCKLPHKSSSLQPLCVCFKKNVLQNKQLVRAKGRAPAN

SEQ ID NO: 342347 - protein, 460 aa, Zea mays
  unsure (1)..(460): unsure at all Xaa locations
  Clone ID: MRT4577_75384C.1.pep
MEEDSSAMEPNRLREAEAAAGELKRLREAGQSQYMYRSIADARVVGGRVCLFAVVSEIGATVHSRGTDFTVTLRVIDESYKSGISVTFFADSTALLPCVKSCGDVISLHNVXGKTYTECSPYQTSIRYHDSEHDKDFLNQMRTWLPQGLKDFTSNNSELYLMNLKSDSTFDLVCKVFHVHVENNNSIFYVWDGTDTPAAEFPAILDAEAAKSLSLHEGPPLSREILCTMPDFGTVLRIFSDRFVNKVSYMQKNIYWARFWNITCKQNFGIWKGTFSDSGGVRLLSNKDDSVVDRLKMYDSRIANRVRRRPMASIPSSVTDVEYEDAGYASLMKSLTHHDVTHKLRTLVRVVAAHPCEASLLSTGNCHLRLTLEDPTARIHAYVHKNDLVGFFGGGFLTTDVIVKKMNMVLGIPEPQDSVEVAPSTRNPPWIWCCLMSYYMDKNDPWVSRKYRIYSTAIRD

SEQ ID NO: 342348 - protein, 87 aa, Zea mays
  Clone ID: MRT4577_75385C.1.pep
KKSYGCLKVLLISWQVGFFGGGFLTAEVIVKKMNMVLGIPEPQGSVEVAPSTRNPPWIWCCLMSYYMDKNDPWVSRKYRIYSTAIRD

SEQ ID NO: 342349 - protein, 202 aa, Zea mays
  unsure (1)..(202): unsure at all Xaa locations
  Clone ID: MRT4577_75386C.1.pep
MEEDSSAMERNRLREAEAAAGELKRLREAGQSQYMYRSIADARVVGGRVCLFAVVSEIGATVHSRGTDFTVTLRVIDESYKSGISVTFFADSTALLPCVKSCGDVISLHNVVIXNIEISLCNLTKSXSSFALFEGKTYTECSPYQTSIRYHDSEHDKDFLNQMRTWLPQGLKDFTSNNSELYLMNLKSDSTFDLVCKVFHVH

SEQ ID NO: 342350 - protein, 76 aa, Zea mays
  Clone ID: MRT4577_75387C.1.pep
MTVGVRAMNAPILEIVMSFDLVYTENATERDPKKGDSGIIKPIAIGFIVNANMLSQSAFKRASMNPGVSFGPDRVT

SEQ ID NO: 342351 - protein, 143 aa, Zea mays
  Clone ID: MRT4577_75388C.1.pep
MTAASPTEFVVGRWQASPPVLLVTHKLRTLVRVVAAHPCEASLLLTGNCHLRLTLEDPTARIHAYVHKNDLVGFFGGGFLTTEVIVKKMNMVLGIPEPQDSVEVAPSTRNPPWIWCCLMSYYMDKNDPWVSRKYRIYSTAIRD

SEQ ID NO: 342352 - protein, 90 aa, Zea mays
  unsure (1)..(90): unsure at all Xaa locations
  Clone ID: MRT4577_75389C.1.pep
RVVMARLLSEGEQGIPTACAAFAQSXGGRPRRGLAGVGEGGPQCSWXNYRCTLEFLVSLLGTDLARGRGNSASGPTAPADSKQLSCKTFI

SEQ ID NO: 342353 - protein, 145 aa, Zea mays
  Clone ID: MRT4577_7538C.1.pep
SSLLSLLKHSHFNRSSSWRWLTRWCVVATLRWWSSTVTPTKSKRNRVFLLLRLGVLSPSEDEALAVWKGEDPRCPCNLGAKGVKRLAPLVPVEAPSSLYTLLARRRMELLTTRSNLRHPTLPSSSDSTCIRRLCPMGRMNLQSTS

SEQ ID NO: 342354 - protein, 148 aa, Zea mays
  unsure (1)..(148): unsure at all Xaa locations
  Clone ID: MRT4577_75390C.1.pep
VVATHGQPTSNNNKRVLSVCVRGCRSGYFRLGIPHPYPCAEVKRSSGREDKLILFLSVRARVGRFGHTRRSASRRRRPAKATGTVRLARQEQRTPTGYRRLLSTSTGLCSRPGSASAEEGKLRHQSAGRGPVPKESLAMRRRTLXRPG

SEQ ID NO: 342355 - protein, 65 aa, Zea mays
  Clone ID: MRT4577_75391C.1.pep
LTSVSSVSIDAGWVSGIFSRSRPCPLITSKLTPVLPTAAADRAAGSAISDEVHLNQLPVPNESRV

SEQ ID NO: 342356 - protein, 77 aa, Zea mays
  Clone ID: MRT4577_75392C.1.pep
TNIKKKKKKKIKRLCPLFFLTSYFFFFFFFFFCGKGNSFFWGGPDTTPKTFFFTSKLRLTPKMSPPATVAALKANLL

SEQ ID NO: 342357 - protein, 78 aa, Zea mays
  Clone ID: MRT4577_75393C.1.pep
YRCQFVEEHITHGKTVLVIDGASHFFQYSEELHQLLQHDVSFLMISRMKYQEILISRITRFLKFEPYRCPILWKKKNI

SEQ ID NO: 342358 - protein, 601 aa, Zea mays
  unsure (1)..(601): unsure at all Xaa locations
  Clone ID: MRT4577_75394C.1.pep
MQRLLALVAALLVLLASRPALATDPYAFFDWDVSYVTAAPLGVKQQVIGINGKFPGPVVNVSTNWNVVVNVLNDLDEPLLITWNGIQHRKNCWQDGVLGTNCPIPPGWNWTYEFQVKDQIGSFFYFPSTGLQRAAGGFGGIVVNNRDVIAVPFARPDGDITIFIGDWYNKNHTDLRKMLDKGKDLGIPDGVLINGKGPYRYNDSLVPPGIEYETFNVHPGRTYRIRVHNVGTSTSLNFRIQGHSMVLVETEGSYTSQQNYTNLDVHVGQSYSFLVATDQNASSDYYVVASARQVNESQPLWRRVTGVAVLRYSTSGGPASGALPDPPQDQNDRAFSMNQARSVRWNLSAGAARPNPQGSFRYSAISVTQAYLLRGAGPVWIGGRRRAALNGLSYAPPETPLRLADAYGVEGVYTLDFPERPXSGPPPXIARSVINGTYRGFMELIFQNNDTRMQSYHMDGYAFFVVGMDYGEWTEDSRGTYNKGDGVARSTIQVYPGAWAAVLVSLDNVGVWNVRSQNLDSWYLGQEVYVRVVNPEDTGNKTEMAIPANALYCGQLHKYQKEQTPHHKMGASAAAPRSLVSLARRLLATALLLAGSFVLAP

SEQ ID NO: 342359 - protein, 35 aa, Zea mays
  Clone ID: MRT4577_75395C.1.pep
DQLNHVFISNEHFHYDKEKMFLYQTMRINHVLIRR

SEQ ID NO: 342360 - protein, 230 aa, Zea mays
  unsure (1)..(230): unsure at all Xaa locations
  Clone ID: MRT4577_75396C.1.pep
MAGADVDVGTELRLGLPGGGAAAAKKDTIDLKLKLPTAGMEXEAAAAARPEPAAEKAKXRPAEAPAADAEKPPAPKAQAVGWPPVRSYRRNAMTVVQAVRSKKEEEPEKQQQPAAANAFVKVSMDGAPYLRKVDLKTYSSYKDLSAALKKMFGTFVTATGNSMNEGRLVDPAGDADDVVTTYEDKDGDWMLVGDVPWEMFVDSCKRLRIMKSSEAIGLAPRTKDKCKNKS

SEQ ID NO: 342361 - protein, 54 aa, Zea mays
  Clone ID: MRT4577_75397C.1.pep
LIHALTSRVRHFKHLTHNFTIDNQHQYSNISLHLYASYLSNCRHSINFLPEPYH

SEQ ID NO: 342362 - protein, 54 aa, Zea mays
  Clone ID: MRT4577_75398C.1.pep
QDTLLETPLQLRITCILTQRMQVHVGYDLMPHQDSTLINTNVFVYSYYISYIYI

SEQ ID NO: 342363 - protein, 88 aa, Zea mays
  Clone ID: MRT4577_75399C.1.pep
SYVARAVPMCPVTMSCSPNDLWRSISSSLTSPGLLSPCLVTLMLSFVHIHVISPSPPSLGNSRSIPTLPVVIGSPPGVHKRCQPLEPN

SEQ ID NO: 342364 - protein, 35 aa, Zea mays
  Clone ID: MRT4577_7539C.1.pep
ARVRKHGSYRKEAPFFLFFFLFFMSVFFFGFFLPV

SEQ ID NO: 342365 - protein, 94 aa, Zea mays
  Clone ID: MRT4577_753C.1.pep
KHLLTIHWPVCRVSRYVVLAPETEESTWHISMAYSGIWSKQQTALYSRLRHGRLSASLYASAPVFHQCIGEQVRFLRTISLSVVHHVPIDEPCV

SEQ ID NO: 342366 - protein, 197 aa, Zea mays
  Clone ID: MRT4577_75400C.1.pep
MTSSSAARNQHLDELRALMASHSPPIHALLIPSEDAHQSEYVSERDKRRQFISGFTGSAGLALITTKEALLWTDGRYFLQATNQLSDRWRLMRMGEDPPVEVWIADNLSDEAVIGIDSWCISVDSAQRYEQAFLKKNQMLFQLSSDLVDEVWKDRPPNDATPVIVHPVEFAGCSVAQKMKQLREKLQHEKASGIIIT

SEQ ID NO: 342367 - protein, 83 aa, Zea mays
  unsure (1)..(83): unsure at all Xaa locations
  Clone ID: MRT4577_75401C.1.pep
QPGQGEGRRQTPSRRQRTNSRRPPADRNNPPSQNEQARTRRSHPDARTPRRGHTRSPXANQPRTTSTPATARHRETXXCTAHA

SEQ ID NO: 342368 - protein, 108 aa, Zea mays
  unsure (1)..(108): unsure at all Xaa locations
  Clone ID: MRT4577_75402C.1.pep
PTRRGAAVNTNRVQVHNTKKTLFFYLLLAEKYMRXETXVELCALAMAIGSGVIXHKSLWSYECAVEKSITISTVEINDXSLCCPFQYANIEIILRKSDKFDELMVAAA

SEQ ID NO: 342369 - protein, 171 aa, Zea mays
  Clone ID: MRT4577_75403C.1.pep
MAAEALGFMARGANGGRAAELVTRDFLGGCAAPDDARDASARNGTVPGRVAQQKHACPGTPMDLNLFPIAAATKPCAVTTAPSPEPAPASAGGAGATTTYRSVCTIEKVKTALERFERGRQHQPSHPHHNHPQQQQQQQHSGAGASPSSSTVTTSSVKRRGGRGAGRRLRL

SEQ ID NO: 342370 - protein, 100 aa, Zea mays
  unsure (1)..(100): unsure at all Xaa locations
  Clone ID: MRT4577_75404C.1.pep
METEVAPGMTDYWXRADFAFQMLLMLAHLGIASFNTNDNGCNALIITTMAITNAEIATHHPSLSTFLSTHSVXASLTIASCASEAQKQKCMPFLTQMMTI

SEQ ID NO: 342371 - protein, 57 aa, Zea mays
  Clone ID: MRT4577_75405C.1.pep
YIESNIKLNIATKHLRPCSSQVKPTIRILLLRLQIVRRHTLLLVSLHTLQYVTYFIG

SEQ ID NO: 342372 - protein, 256 aa, Zea mays
  unsure (1)..(256): unsure at all Xaa locations
  Clone ID: MRT4577_75406C.1.pep
MAAEALGFMARGANGGRAAELVTRDFLGGCTATGDARDASARNGTVPGRVPQQKHACPATPMDLNLFPIAAATKPCAVTTAPSPEPAPASAGGAGATTTYRSVCTIEKVKTALERXSAAGSTSPTIRTTTTPSSSSSSSXGAGASPSSSTVTTSSVKRRGGGVEQGDDCDSPSGGGMVAAACPRCFLYVLISRSDPRCPRCESHVPAXAGAGREQEAAARPQRRLPRHLISSLPWRSLDGSAAVSSRTVRTYVRKL

SEQ ID NO: 342373 - protein, 77 aa, Zea mays
  Clone ID: MRT4577_75407C.1.pep
MAAEALGFMARGANGGRAAELVTRDFLGGCAATGDARDASARNGTVPGRVAQQKHACPATPMDLNLLTIKLFHTSLH

SEQ ID NO: 342374 - protein, 188 aa, Zea mays
  unsure (1)..(188): unsure at all Xaa locations
  Clone ID: MRT4577_75408C.1.pep
MTSPCDDVTRHEQALAAARQCLQSADTTTHGEIEDTVDVDTPAGRTRDDPMAALHTQALGILHIRSLVPVVLDLATPSFSKWHRLILLVLSKYALADHVLCDATFPDVAHCVQMELHVLSWLYGSISPELFDIVTIVEPTVRGTXLALEEQFVGNRETRIVLVDTEFRTITCNNDTHAICHACQLGRH

SEQ ID NO: 342375 - protein, 63 aa, Zea mays
  Clone ID: MRT4577_75409C.1.pep
VSICHISQFLFVSYVYQDSGSLSTIRNLLRFLRLSHSSGSFTSWLELISFYGAASKSALAPQS

SEQ ID NO: 342376 - protein, 114 aa, Zea mays
  Clone ID: MRT4577_7540C.1.pep
AGNARRPNASEKKKKKKKKRGKGKKKKKKKKKREKKKKKKKKKKKKKKTRTKKKESKNRGEPKGKTTEFTQRDSWGRKNPFKPATKINSRPSPIGLQNKYATGTAKGTCPKNAH

SEQ ID NO: 342377 - protein, 173 aa, Zea mays
  unsure (1)..(173): unsure at all Xaa locations
  Clone ID: MRT4577_75410C.1.pep
MAEQAVRITRELLPVFERATLYVWRRHLAVEAGRALLPATDPVIKKDELAAVGFIDIDGFTRLSRALNTDELAAVLEQFETVVLDTALAHGGRVIKSLGDEVMFFAGDAASAAQIAVTAVDQIATDDRAPSVHAGLAWGPXLNRGGDMFGDVVNIASRVTXLADSGTIRVEQA

SEQ ID NO: 342378 - protein, 704 aa, Zea mays
  unsure (1)..(704): unsure at all Xaa locations
  Clone ID: MRT4577_75411C.1.pep
MDPAPATPRWNLERPYLTGRFHQEAKAAAAAQGLGSKPFSLDSFSRGAGAGSVIGSYAVSVQELLVIDDLLSALVGIEGRYVSIKRVRGKEGYVVFQIDSSMDLALQELTRRIFPLCEDYVLVSQFVESRSHFKNGLVNHALAAALRAFLLDYQAMVAQLEHQFRLGRLSVQGLWFFCXRMMSSLNALAVLVEKATSNNTNGSATLNLLQSQAKAMGGDSAVRSLLEKMTEYASAAYLRMLERWVYEGVIDDPYGEFFIAENKSLQKESLTQDYDAKYWQQRYSLKEGIPSFLTNVAATILTTGKYLNVMRECGHNVQVSLSDNSKLMSFGSNHQYLECIKSAYDFASGELLTLMKDKYDLIGKLRSLKRYLLLDQGDFLVHFMDIAREELTKKPEEISAEKLQSLLDIALRSTAAASDPSHEELICCVERSSLLKKLATLKDLDPADKLAAADVDRSMQLSITGLETFCLSNKVQWPLSLVISRKALTKYQLIFRLLFHCKHVSRQLCAAWQIQQAFRSVKILGTPILRSSILCRSMLKFVNSLLHYLTFEVLEPNWHLMHDRLQTARSIDEVIQIHDFFLQKCLKECLLLSPELLVKVEKLKGLCLQYATSIQILMPSIDVANSENTSKSRKSRSRIDKSQDRDQQLKLASENVVMSESILKFEAAFNSELQSLAPTLSNSSQAEPYVTHLAQCILGVRIGQ

SEQ ID NO: 342379 - protein, 121 aa, Zea mays
  Clone ID: MRT4577_75412C.1.pep
GAISEDLDGPLDLPKLPSPQHSLFAGPLEPGGDYGELVPSGQPDSKTSALQNGTLGSTRPPLPQHVSFAGPLEMAKLSSPHQDTLIEDPRHFGPLGSTRPPSPQLISFDGPLEMARLSSPH

SEQ ID NO: 342380 - protein, 105 aa, Zea mays
  Clone ID: MRT4577_75413C.1.pep
PLLSITPPMSARLRSISLTIARSMFTVNALTDTSSPRSHVTHPASEGESSSSANAIEPRSMAVLIRLGAGNNAAVVTASWTAHNAGSRIRISSASSNVWHRNPDC

SEQ ID NO: 342381 - protein, 83 aa, Zea mays
  unsure (1)..(83): unsure at all Xaa locations
  Clone ID: MRT4577_75414C.1.pep
MSYYSAHLDNRSKPTLFSKVRLHRVKNITGLVETFAKCAKLMELVNLVIVAGXNDVNMSNDREEISEIEKXHELINTHDLLRQ

SEQ ID NO: 342382 - protein, 149 aa, Zea mays
  unsure (1)..(149): unsure at all Xaa locations
  Clone ID: MRT4577_75415C.1.pep
MLGRFTHTFKTLVPVLRASYHENVINRFENPKNVGSLDAKKKNVGTGLAGHPACGDIMKLQIEVGEDGKTIEKAVFKTYGCGSAIASSDYATELLQGMTVEDALNIKNGEIAGYLKLPPVNXHWQXLLAEDAIKKAIHNFKEKNPEQKE

SEQ ID NO: 342383 - protein, 65 aa, Zea mays
  Clone ID: MRT4577_75416C.1.pep
DWSYLRNPDIISLAFWIGQIRDQMIPIQHIHKKTSLYLGNVEIEFPRGFRSLFLWLQDRPNKTPR

SEQ ID NO: 342384 - protein, 91 aa, Zea mays
  Clone ID: MRT4577_75417C.1.pep
QAKATYLCNRHLMKASKNLALRSSSSFLYQADGTGGITLPAKTNRDYELRSRGSATLGTNALDNLVSRSRRSSSTHSNHSSTAATPNPSPP

SEQ ID NO: 342385 - protein, 77 aa, Zea mays
  Clone ID: MRT4577_75418C.1.pep
CTGGALRSGCAVNRRSSWFLGATVQGQLRRCNLRASLPTAYMILSEQCSTHCTYADECFNLHLIFLMIVEYFITLGS

SEQ ID NO: 342386 - protein, 172 aa, Zea mays
  Clone ID: MRT4577_75419C.1.pep
SFLCHPLSLCSPLYTARPPLPSPFLSASSFAFPCARPAPPFQKGKQVVLEGMGDERPGCLPGDAILTVSEKRHPAFKRVGDDLVLKAEVPLVGALTGWSFSFRLLGGRKVSCSFQDEVVRPGYEKVIAGEGMPVPGQKGARGDMRVKFDVVFPKELTAEQRAGLAEILRGSC

SEQ ID NO: 342387 - protein, 44 aa, Zea mays
  Clone ID: MRT4577_7541C.1.pep
KNTTLTSTETGSTVICLISLNPTTLMNSTLHIILNTQTSLHNSL

SEQ ID NO: 342388 - protein, 176 aa, Zea mays
  unsure (1)..(176): unsure at all Xaa locations
  Clone ID: MRT4577_75420C.1.pep
PLSLPLPLFATLYRPPTTPLPVSLCFILRFPLRQARPAPPLQNDILLPRPLRWGTRRSCTTRSSTSPRTPRRDVVTKNGSTVKKEVTQTVVVKPGWRKGKQVVLEGMGDERTGCLPGDAILTESEKRHPAFKRVGDDLVLKAEVPLVGALTGWSFSFRLIXGRKVSCSIQDKVVRP

SEQ ID NO: 342389 - protein, 216 aa, Zea mays
  Clone ID: MRT4577_75421C.1.pep
MGNPPELYHKILNIPKDTSPQELRAAYKSLVKKWHPDKHPPSSRPEAEARFKAISEAYEALLDQQENRAVFGPCNGDRAGGGAGARVERTRSDGFCARSAPGTPAGELKKVYSAGNPGGRRAFAEFSSSIVRKAPPLERRLECTLEELCRGCSKEVTFTRDVVTRNGSIVKKEVTQTVQVKPGWRKGKQVVLEGMGDERAGCLPGDAVLTVSERRH

SEQ ID NO: 342390 - protein, 101 aa, Zea mays
  Clone ID: MRT4577_75422C.1.pep
MNGTTGMATAKAWGTAAALGRGDLGAPHGAGARDRTQSRQPGVAPGHAEKGPGTAPEVLEGKAKGKKKKGPSTGNRPAALDGEIREAQERPDSDQQEPVTE

SEQ ID NO: 342391 - protein, 272 aa, Zea mays
  unsure (1)..(272): unsure at all Xaa locations
  Clone ID: MRT4577_75423C.1.pep
MMHKKCTYYRNCSMTIHKLSLPLRQKKKKKKRKKKKKKKKKKKSSLSSLFSLLFSALAFSLLCSPLYTARPPAHQNDIHPPPPSPPMGNPPELYHKILNIPKDTSPQELRAAYKSLVKKWHPDKHPPSSRPEAEARFKAISEAYEALLDQQENRAVFGPCNGGRAGERRQGGXGARVERTRSDGFCARSAPGTPARELKKVYSAGDPGGRRAFAEFSSSIVRKAPPLERKLECTLEELCRGCKKEVTFTRDVVTKNGYLLICAVLLCLTEQG

SEQ ID NO: 342392 - protein, 35 aa, Zea mays
  Clone ID: MRT4577_75424C.1.pep
IMLQQKKLNAPKLDPRNRTTPSSLLRLLWCNYSRS

SEQ ID NO: 342393 - protein, 125 aa, Zea mays
  Clone ID: MRT4577_75425C.1.pep
GTSQPAGTIFSTGGAAVICCCEEYEWLLLSSACGTGFLLDPPLLLRPPGRRCMLELLHGAEPSAESCASAAAVQDIVITVANIYDAKAHGLASLPNAGIKAMVMMPNQNLAYAVRDPAYSPQRAQ

SEQ ID NO: 342394 - protein, 162 aa, Zea mays
  unsure (1)..(162): unsure at all Xaa locations
  Clone ID: MRT4577_75426C.1.pep
ETGGGEGAQKTRQAGGPSRTETPAKPTPTPADPAQPPSPRTAARTNGPHRERKAAKGXGTDGXTXGNQXAXNQPPXATKNTXGSQTNXQDGKGSGTRDQXKSTGHEAXXGSPETXXNTDXSPDATXQXEPGHXDRSGTAGXAKAKPGQADKHRNAGRQQEQN

SEQ ID NO: 342395 - protein, 141 aa, Zea mays
  Clone ID: MRT4577_75427C.1.pep
LQAQKFITAYSAFLKRQGKLPIPGWVDTVKTGPAKELPPQDIDWFYVRAASIARHVYLRKTVGVGRLRKVHGTAKNRGSRPSKHVDASGSVDRKVMQSLEKIGVLEQDEEKGGRRITQAGQRDLDRIAQTTAEAEEEEDDE

SEQ ID NO: 342396 - protein, 148 aa, Zea mays
  unsure (1)..(148): unsure at all Xaa locations
  Clone ID: MRT4577_75428C.1.pep
MLYGTIFPQAQTPILXLLPXYLSPLVVCXGPNLQPXXIQQKKKMXLPYTLVLHNKXPIQQLPLVHXLGQNXRXQQLQQLVLANLAVYXKXQQVITLNQLSRLNCGCYLQQQQLPLKQVPSRIPGTISYIEPTEENRNILVNDRRNNYY

SEQ ID NO: 342397 - protein, 102 aa, Zea mays
  Clone ID: MRT4577_75429C.1.pep
TPSPPRRRRTPAPPTSPRPPRPTATALPAVAAGSAPGSSASSTAPRACRPRTPAGPRTPAATRARSPPPRPPSRREAAVAKKATALALALAPIPARLTASPP

SEQ ID NO: 342398 - protein, 78 aa, Zea mays
  unsure (1)..(78): unsure at all Xaa locations
  Clone ID: MRT4577_7542C.1.pep
MYAEWMPRQARPDQVEGSSSGEFGFYPMGLPTVTEKFNRFXDSHVYQWKRDIFAFPGYLVAEAMRLRRWVHAEHHPPL

SEQ ID NO: 342399 - protein, 243 aa, Zea mays
  unsure (1)..(243): unsure at all Xaa locations
  Clone ID: MRT4577_75430C.1.pep
FGTRHYYASHFCLPSPTTTRTASPLPRPAEPPLSRVQPGEGGRAHLLLGDHVRWSCTSTGAWGAGGAAAARGPRRRCTAARALVDPSSARRATPGPRTRAWATSACGCARSASFELDFTRPKPQAYMPYTGTPQSHSVPSADVEVVPERGDLAAVRPVPLMGESREARLMRYREKRKNRRFEKTIRYASRKAYAETRPRIKGRFAKRADHDXDADADDAEAEAEAXVPMSYVLDFGYGVVPSF

SEQ ID NO: 342400 - protein, 68 aa, Zea mays
  Clone ID: MRT4577_75431C.1.pep
CLLVLPSLSSFEELYLFMHNFSSHKSVWSSYHMRIVRILEHVTVLHPLQLVPCASINQDPSFSCMRSY

SEQ ID NO: 342401 - protein, 174 aa, Zea mays
  Clone ID: MRT4577_75432C.1.pep
PGVELHKYWGVGGRRCGSCEGAPAAVHCRTCVGGSFLCTTCDARPAHARLGHERVWMCEVCELAPAAVTCKADAAVVPEAFGGSGSGGGSFELDFTRPKPQAYMPYTGTPQSHSVPSADVEVVPERGDLAAVRPVPLMGESREARLMRYREKRKNRRFEKTIRYASRKAYAETR

SEQ ID NO: 342402 - protein, 134 aa, Zea mays
  Clone ID: MRT4577_75433C.1.pep
MELHKYWGVGGRRCGSCEGAPAAVHCRTCVGGSFLCTTCDARPAHARLGHERVWMCEVCELAPAAVTCKADAAVLCAACDSDIHDANPLARRHARVPVAPIGSEAAAAAVEAMLFGGWRGARGLRRQRQRRREL

SEQ ID NO: 342403 - protein, 364 aa, Zea mays
  Clone ID: MRT4577_75434C.1.pep
MELHKYWGVGGRRCGSCEGAPAAVHCRTCVGGSFLCTTCDARPAHARLGHERVWMCEVCELAPAAVTCKADAAVLCAACDSDIHDANPLARRHARVPVAPIGSEAAAAAVEAMLFGTGEAAASEADEQHAAAEHAHAHAHALNLNVEAKDMKLDYLFSELDPYLSVEIPRFQHADSVVPNGAGAAVELDFTCGIGVKHSSYSSYTATSLAHSGSSSEVGVVPEAFGGSGSGGGSFELDFTRPKPQAYMPYTGTPQSHSVPSADVEVVPERGDLAAVRPVPLMGESREARLMRYREKRKNRRFEKTIRYASRKAYAETRPRIKGRFAKRADHDGDADADDAEAEAEAAVPMSYVLDFGYGVVPSF

SEQ ID NO: 342404 - protein, 77 aa, Zea mays
  Clone ID: MRT4577_75435C.1.pep
VSCVTRMHKLRPPVESRRLGGRSESNDLSLPYVFVIWIHLALLLFCSLWCFSIRSPVLRLLTFHADSLWILQWFLRY

SEQ ID NO: 342405 - protein, 111 aa, Zea mays
  Clone ID: MRT4577_75436C.1.pep
MVLTEAISEFFPGDGVGVGMGGEASEDEVVVAAATATEWRLEFDRWLELPESALGTSARWSSGAVVEVAIAGVPHPAELAAPAEHAFLLCACFLTSAECNHTSELILQLAA

SEQ ID NO: 342406 - protein, 60 aa, Zea mays
  Clone ID: MRT4577_75437C.1.pep
FIFELKHVIYKAQAVVVELQCPPYPCPNNATCRYRADIYLSSRPTHIILYHKQKAFSVCL

SEQ ID NO: 342407 - protein, 41 aa, Zea mays
  Clone ID: MRT4577_75438C.1.pep
SFLCNLHTTKLPKVMIFFFKKIRDVLHYLFYQHIKYSSFKL

SEQ ID NO: 342408 - protein, 92 aa, Zea mays
  Clone ID: MRT4577_75439C.1.pep
LLLLEFTSSSRTGPQATTEGSLTACGYAGPIRLPIPHTNWEEFHKLASNAGFVRRVTLAPARQCASYTGLQVSDDLLSRLSYGSGSAIKSRP

SEQ ID NO: 342409 - protein, 66 aa, Zea mays
  Clone ID: MRT4577_7543C.1.pep
FFLGGKKTLNVHTLPMGMKIFKAPQVFFFPFILQSYKSTLNFACPFPWATNNAGEKDGKHNRRGET

SEQ ID NO: 342410 - protein, 114 aa, Zea mays
  Clone ID: MRT4577_75440C.1.pep
MAACRGFFECLLRLLNFFLTVAGLAVVGYGIYLLVEWMRISGGGGGAPPSPAPPAELLTFGRPMLTVVALGEGGSFFDKLPKAWFIYLFIGVGAVIFIVSLYGCIGAGTKNTSC

SEQ ID NO: 342411 - protein, 73 aa, Zea mays
  Clone ID: MRT4577_75441C.1.pep
REHDWGPNYKKGGGPFTALIKNLIFSPRIDPQGPRCNQTCGAKSGKKTQTLPLGGINKAPLNGGGPDLGGAFI

SEQ ID NO: 342412 - protein, 177 aa, Zea mays
  Clone ID: MRT4577_75442C.1.pep
VITHVLHNKHEFPFVRGVEDLLVLSIGGCSGGGSGAAGEAELRRMRRWGPKEWARPIARIAADGAADLVDHAVARAFGQCRASNYLRIQAKRESMPPCGPDGEYDPTPGNVRALLAAADEMLKQRNVESVLFEGRRVGEQTNAEKLDWFAAELVAEHRSRASRIAPTVAFKQAPQKP

SEQ ID NO: 342413 - protein, 53 aa, Zea mays
  Clone ID: MRT4577_75443C.1.pep
PNNIHLILKDIHLILKRFYPYPNRSNWPQKILSLWIHLVLISILIHPSLTIMI

SEQ ID NO: 342414 - protein, 101 aa, Zea mays
  Clone ID: MRT4577_75444C.1.pep
PETTPGPPSLAGRHRPLCNDPTGGWRTGCNPRAGGAQRGDSFNQGRNSPPRGIEPVTSWYSKALTITLEALSHIICYILYTIVIYSIHIWSQWRTQDLKTA

SEQ ID NO: 342415 - protein, 211 aa, Zea mays
  unsure (1)..(211): unsure at all Xaa locations
  Clone ID: MRT4577_75445C.1.pep
TTREKTEHTEEESDHERDVYNNVYENVMXAWRTVCCIEYYVEHRENYQHNKHNVNFIKEYGAKMNAKLNNIWDRIDNQLESHLTASYTDAESQVMNVNINGDYDKYNTESKTDAYRKNTVESSMAAYNVAQDIVVPNHATTHAIRLKLALNYXEIYNETDNSPHKANHLSNEAIYESNCHLDSLCEDVYMDMPLLMHLLTDNXTLLTYDLT

SEQ ID NO: 342416 - protein, 84 aa, Zea mays
  Clone ID: MRT4577_75446C.1.pep
RRVDAPPLTPARNERVGLLSRSTPGVSGAIQQSRLAGFISYGRAASALDRSAGLLTASYLTTRLEPQAFRGEVERKSVKRRLRC

SEQ ID NO: 342417 - protein, 156 aa, Zea mays
  Clone ID: MRT4577_75447C.1.pep
MDIVTSAAAHATEKVSKCLMEVTSSIEGARVENNKFCVSVHYRNVAEKDWKVVAGLVKQVLEAFPRLKVTNGRMVLEVRPVIDWDKGKAVEFLLRSLGLSDSEDVVPIYIGDDRTDEDAFKVLRERSCGYGILVSQVPKDTEAFYSLRDPSEVMGF

SEQ ID NO: 342418 - protein, 86 aa, Zea mays
  unsure (1)..(86): unsure at all Xaa locations
  Clone ID: MRT4577_75448C.1.pep
CVTRLLYASLLPPYLPSMIASVCENPALQPYRLQQXAIAEGTIPLSPLFKXSPALSLVHTLVQTIRAQKLXNFVLPVINQEALGKP

SEQ ID NO: 342419 - protein, 369 aa, Zea mays
  Clone ID: MRT4577_75449C.1.pep
MDMGSGSSPVITDPISISPPLLGGLTSNLMPFSVMSGGCSSSPSMSASSRRKIEEVLVNGLLDAMKSSSPRKKHNLAFGQDNSPDEDPAYTAWLSKCPSALASFKQIVANAQGRRIAVFLDYDGTLSPIVDDPDKAFMSPVMRAAVRNVAKYFPTAIVSGRSRKKVFEFVKLTELYYAGSHGMDIVTSAAAHATEKCKEANLFQPACEFLPMINEVSKCLVEVTSSIEGARVENNKFCVSVHYRNVAEKDWKVVAGLVKQVLEAFPRLKVTNGRMVLEVRPVIDWDKGKAVEFLLRSLGLSDSEDVVPIYIGDDRTDEDAFKVLRERSCGYGILVSQVPKDTEAFYSLRDPSEVMGFLNSLVRWKKHPL

SEQ ID NO: 342420 - protein, 89 aa, Zea mays
  Clone ID: MRT4577_7544C.1.pep
VLLLLYRLHTLLPLPLLRTSDLLLCGPWSSRKTDSSELNPKSLATPPPSVINATPFETTFLSSLIEMKFLITTSIQECDIESALRGPQL

SEQ ID NO: 342421 - protein, 91 aa, Zea mays
  Clone ID: MRT4577_75450C.1.pep
KNRGSFFKKRASQKTQRKLVLKRTLKIWGAPKKGKNGSMVGALKKSRDFYFYKKPMKKIFWLCGEKVGVFKRGLLNFKVSPQSKLRRGTRY

SEQ ID NO: 342422 - protein, 85 aa, Zea mays
  unsure (1)..(85): unsure at all Xaa locations
  Clone ID: MRT4577_75451C.1.pep
RKKKKGPNQGKKRGPPCLKKKFFLGGGRGVXVKKRPQKIFWPMSGAQKHLGGLGPPKFELVGGFHLAFGNGFSFGGGVXKGRVGG

SEQ ID NO: 342423 - protein, 130 aa, Zea mays
  Clone ID: MRT4577_75452C.1.pep
KPPPPLKVFGSPFYMFGWGFLIANSAFFWLLLRRLFCSPSCKSCQWPSWAFFFRFSPPKPWVGLCEFGFGIKFGRGRFLSPWSRPPFARGFAVPFVGGLCPCLLGAPCHFKCRGLRKFAPVPPFVLGLLV

SEQ ID NO: 342424 - protein, 104 aa, Zea mays
  Clone ID: MRT4577_75453C.1.pep
GKKPGPSFFPTTPGLPPSAFKIIFRFPPGIILVSIKLSLFGTNLELLGPPFPLAKKETRGGIFAPPSLFFAPPSGFPGWPLPVFIGVSGWFGLNPFFKSGPGFS

SEQ ID NO: 342425 - protein, 50 aa, Zea mays
  Clone ID: MRT4577_75454C.1.pep
TFSEMATGQTVLYTVLISMVISRVSSSTFTRSLITTMLMNLGVDSRSEIR

SEQ ID NO: 342426 - protein, 85 aa, Zea mays
  Clone ID: MRT4577_75456C.1.pep
MGSWVRTITSPFRKMLNPQRDGKTKTPRHHHHHQSPSPSSSAMEQSGEMDRSQLYGEVMACTYEDVQVMWTMLDKARTCAAAAAS

SEQ ID NO: 342427 - protein, 51 aa, Zea mays
  Clone ID: MRT4577_75457C.1.pep
MNFAATTAMEQSGEMDRSQLYGEVMACTYEDVQVMWTMLDKARTCAAAAAS

SEQ ID NO: 342428 - protein, 38 aa, Zea mays
  Clone ID: MRT4577_75458C.1.pep
GDDVLGQEKRCHYNILYRGRANLFSIIVKKVSTRCPFH

SEQ ID NO: 342429 - protein, 74 aa, Zea mays
  unsure (1)..(74): unsure at all Xaa locations
  Clone ID: MRT4577_75459C.1.pep
TPFRLGLGGTYPSNLGGGGGILVGLCSGEALFQPHETWGLLPLMERVXGPLQMLMLASPDRVPEMTLRPGLGLT

SEQ ID NO: 342430 - protein, 144 aa, Zea mays
  Clone ID: MRT4577_7545C.1.pep
AQESQTRSLLSELDKRLQAIDSKWESRVGLLEQRAAESARSMSDFSTALRADVEAHLTAADSETDSKLLQIDAAANSRMAALESSMRSVETWRPRVDSTLDALRSSLDSVATEVSKMEIQWSPGRTRRWLTQAGACSGHLDRCR

SEQ ID NO: 342431 - protein, 74 aa, Zea mays
  unsure (1)..(74): unsure at all Xaa locations
  Clone ID: MRT4577_75460C.1.pep
DSYPPGGGDDYQELRHKGPDAASKYSVLCSADTRHGISDLXKQXCTGMQDTTRIPTRTHGLVAGRIPVXLFPSS

SEQ ID NO: 342432 - protein, 59 aa, Zea mays
  Clone ID: MRT4577_75461C.1.pep
RKMNSSIAQSSIPYLFVKLNSYAMQRLFFVSCYRTLVPDHLENFKFSTQESSDCLIGYY

SEQ ID NO: 342433 - protein, 59 aa, Zea mays
  Clone ID: MRT4577_75462C.1.pep
WRLPHHYRHRPIGPPSCALRRMGPETNPCERFRKSIIWHQGALLSETNAPLMHLEESTI

SEQ ID NO: 342434 - protein, 364 aa, Zea mays
  unsure (1)..(364): unsure at all Xaa locations
  Clone ID: MRT4577_75463C.1.pep
MDNVGSCSPLPQSEPAVSVSEHEQSLTECVDVRSPGVVGGTNETISSKVTHSQPRLQHQEAAQNFKAYEPDSGYGMSFITKVDGEAAQGIAYSSEAMVLHSVNGYQLPASTATQQPVPQMFSQQFQAPQYPNFLPYRHVFSPQFGSLMVVPNYSSNHAXFLKLPHASSYLVMPNGASQLAANGMKYGSNHQYKQVFQGAPAGYGYGNHNGYPNGVIGGTGAIEDMNMSKYKDNCLYAPNPQVETADVWIQSQKESPNMPSAPFYNMVGQPVSPHAAYLPPQSGHTAFSPAPSHPGHLQYPGFVHALQPTSMTMVQNPQTMIHQPAAPPLAGNLGLDMSAMVPGNQVGAFQHNQLAHLGWTTQSF

SEQ ID NO: 342435 - protein, 243 aa, Zea mays
  Clone ID: MRT4577_75464C.1.pep
MEQYEGTQASLVGSHAVLGKGNQNTVDTAASGKNNFGGEPCCSSSDPIHVPSPGSKSAGTFGAIKREVGVVGARQRPADSAAIYTSTSNGLVKVVSAPKVSPHLEWKPKSVSPSTAAPPGAPSPVDDGSKTEVSALSKKLSHANVSHEHVIIPEHIRIPDSERTHFIFGSFESEIYPKASLAAYYDAVAKEDLNDHSPSSVAALGFTSTDGTLNDRMDNGGSCSPLPQSEPAVSVSEHEQSLT

SEQ ID NO: 342436 - protein, 57 aa, Zea mays
  Clone ID: MRT4577_75465C.1.pep
THSYIVLVPHGGGGGGRFHLCGSACKPITHLRRPPVTGLIQGGWSGHPCLMLSFLFG

SEQ ID NO: 342437 - protein, 126 aa, Zea mays
  Clone ID: MRT4577_75466C.1.pep
RSNLSPLRSSISKRWRRPRFRSDEKQRPESQGIWGNTAPRSVTIREQHPDRSHVRPSCFRRPCSPDHGERWKLSEAANGIRHGHEPGSIRERFGGEPPAMAWRWIDLGKWKGTEEREPLVTQSLTT

SEQ ID NO: 342438 - protein, 317 aa, Zea mays
  Clone ID: MRT4577_75467C.1.pep
RLQHQEAAQNFKAYEPDSGYGMSFITKVDGEAAQGIAYSSEAMVLHSVNGYQLPASTATQQPVPQMFSQQFQAPQYPNFLPYRHVFSPQFGSLMVVPNYSSNHAFPQLPHASSYLVMPNGASQLAANGMKYGSNHQYKQVFQGAPAGYGYGNHNGYPNGVIGGTGAIEDMNMSKYKDNCLYAPNPQPFIFRDCQVETADVWIQSQKESPNMPSAPFYNMVGQPVSPHAAYLPPQSGHTAFSPAPSHPGHLQYPGFVHALQPTSMTMVQNPQTMIHQPAAPPLAGNLGLDMSAMVPGNQVGAFQHNQLAHLGWTTQSF

SEQ ID NO: 342439 - protein, 99 aa, Zea mays
  Clone ID: MRT4577_75468C.1.pep
AVIKMASKQNGEWKIVSATDVPCRCNSHTALRVSKPEQHGHWVPQGFQTMVVLHNHGRDHRLGPCWTPSDDPLTTHCRTDSYRFPRAQTRHDRILRRLR

SEQ ID NO: 342440 - protein, 382 aa, Zea mays
  unsure (1)..(382): unsure at all Xaa locations
  Clone ID: MRT4577_75469C.1.pep
LGTSRPAGSVSRCCASSLRALTVLFVLAALVSDVGGRHHHHVCRPYFSCGGFSNISYPFRRQGDPSGCGVQSYELVCTDTDATIRIGSGTYTVLSINSTYSYFWVVDANLDIQSSCPLPWWDXMILEPSCGYLAMIYLGGPGIPVPKNTSYPDVVKLMRNGFGLRFPSSIGDRGIRECFAESVRNVRKEPEXSDCGHSYGREIWVCVINQLGSTIHDISCGIIYIIWLLKSRYVFCRLVLMPLAVFVFLAHKYWKARITIDAVEKFLRMQQMLVPMRYAYTNIIAITSHFREKLGQGGYGSVYKGVLQPGEVHVAVKMLGNSNCDGEEFISEVATIGKIHHFNVVRLIGFCSEENSRALIYEFMPHGSLDXYIFSSEXSFSW

SEQ ID NO: 342441 - protein, 101 aa, Zea mays
  Clone ID: MRT4577_7546C.1.pep
FFFFFFFFFFFFFFFFFIFFHIIWDFHFHHFSRFTGPRPQVERFFGFKQPTKSPKRQYRLPRRAPPPGDHSQLIPQNQSPQKNEKRPRQRHPTPGFHFLIY

SEQ ID NO: 342442 - protein, 443 aa, Zea mays
  unsure (1)..(443): unsure at all Xaa locations
  Clone ID: MRT4577_75470C.1.pep
MPMSDSSLRALTVLFVLAALVSDVEGRHDRPVNCPHFSCGGFSNISYPFRRQGDPSGCGVQSYELLCTDTDATIRIGSGTYKVLSINSTYSHFWVVDANLDIQSSCPLPRWDXMLVGSISTHIVGGLSSAMIISILLLXIYSGWAIFVNCSQPIENNDTDIFQIYEPVSCLSNSSFIYLVTDYWYDGHVPAGTLEPSCGYLAMTPLGGPGMPVPRNTSYPRVXTRPKFMRSGFALRFPFSYGDNIRECLANNMHYLQXFVLMPLAVFVFLAYKYWKTRITIDAVEKFLRMHHMLVPMRYAYTNIIAITAHFRDKLGQGGYGTVYKGVLQPGEVHVAVKMLGNSNCNGEEFISEVATIGKIHHVNVVRLIGFCSEENIRALIYEFMPRGSLDKYIFSSEKTFSWDKLNEIALGIARGLNYLHHGCDMQIVHFDIKPHNXLLDSN

SEQ ID NO: 342443 - protein, 225 aa, Zea mays
  unsure (1)..(225): unsure at all Xaa locations
  Clone ID: MRT4577_75471C.1.pep
MSAASHLCASSSLRALTVLFVLAALVSDVEGRHHRHVCPHFSCGGLSNISYPFRRQGDPSGCGVQSYELVCTDTDATIRIGSGTYKVLSINSTYSYFWVVDADLDIQSSCPLPQWDYXLLVGSIATHIVGGLSSAMIISILLLXIYSGWAIFVNCSQPIENNDADIYEPVSCLSNSSFIYLVTDYWYVFAGNLEPSCGYLAMTPLXGPGMPVPMNTSYPDCXKFM

SEQ ID NO: 342444 - protein, 214 aa, Zea mays
  unsure (1)..(214): unsure at all Xaa locations
  Clone ID: MRT4577_75472C.1.pep
MGMSAASHLCASSSLRALTVLFVLAALVSDVEGRHHRHVCPHFSCGGLSNISYPFRRQGDPSGCGVQSYELVCTDTDATIRIGSGTYKPSCGYLAMTPLGGPGMPVPMNTSYPDVVKFMRSGFALRFPFSYGDNIRECLANNMHTFHKEPRNSTGIRQQILDILTFETLWXCVIEQLGSTNNGVKSVLIDIIQQIPYVLSSLKSAHVICRFVLM

SEQ ID NO: 342445 - protein, 105 aa, Zea mays
  Clone ID: MRT4577_75473C.1.pep
AVAFFFLVFFFFFFKKRSPGLGVFWFQNIFWGAHFILGPANAMGSTNMGGDPRPFLGPKTGPKLGGGDSKPENFVFFFFTRPTQFLCLGARSGSFFFGQPPPPAW

SEQ ID NO: 342446 - protein, 62 aa, Zea mays
  Clone ID: MRT4577_75474C.1.pep
WSGTTKGSINILFDHKTPTWSLNSHDQEPHHIPLRQSNSNSASTLTTATKSTTSYTMTNPAN

SEQ ID NO: 342447 - protein, 173 aa, Zea mays
  unsure (1)..(173): unsure at all Xaa locations
  Clone ID: MRT4577_75475C.1.pep
MATMSAASHRCCASSLRALTVLFVLAALVSDVGGRHHHHVCPHYFSCGGLSNISYPFRRQGDPSGCGVQSYELVCTDTDATIRIGSGTYKVLSINSTYSHFWVVDADLDIQSSCPLPRWDXMLVGSISTYIVGGLCRANIISIXSFYMDSWRWAIFVNCSQPIENNDTDKYHI

SEQ ID NO: 342448 - protein, 683 aa, Zea mays
  unsure (1)..(683): unsure at all Xaa locations
  Clone ID: MRT4577_75476C.1.pep
MGMSAASHLCASSSLRALTVLFVLAAFVSDVEGRHHRHVCPPYFSCGGLSNISYPFRRQGDPSGCGVQSYELVCTDTDATIRIGSGTYKVLSINSTYSYFWVVDADLDIQSSCPLPQWDYPARINRNSYRWRIEFSXIISILLLILFSRWAIFVNCSQPIENNDICINIYDDDVYGPVSCLSNSSFIYLLXLTTGMYISAGALEPSCGYLAKTPLGGPGMTVPSNTSYPDVVKFMRNGFALGFPFSIRSYPTIRECLAENMRTFHKEPRNSTGIRQQILDILTFETLWFCVIEQLGSTNNGVKSVLIDIIQQIPYVLSSLKSAHVICRFVLMPLAVFVFLAYKYWKTQITIDAVEKFLRMQNMLVPMRYAYTNIIAITGHFRDKLGQGGYGTVYKGVLLPGEVHVAVKMLGNSXNCNGEEFISEVATIGKIHHVNVVRLIGFCSEENIRALIYEFMPRGSLDKYIFSSEKTFSWDKLNEIALGIARGLNYLHHGCDMQIVHFDIKPHNILLDSNFVPKVADFGLAKLFPRDDSFVPLSAMRGTIGYIAPEMVSRSFGVISSKSDVYSFGMLLLEMTGGRRNADPHAGSSSQAYYPSLVYRQLSQGDANRISEGVDMHELEKKLCIIGLWCIQMKPQDRPTMSEVIEMLEAGVDGIQMPPRPYFCDEEGDSSYSTISELDTIEE

SEQ ID NO: 342449 - protein, 695 aa, Zea mays
  Clone ID: MRT4577_75477C.1.pep
MNLLAMATMSAACFLPWRRSHRCCASSLRASTVLFVLAVLVSDVGGRHHRHICPPYFSCGGLSDISYPFRRQGDPSGCGVESYELVCTDTDATIRIGSGTYTVLSINSTYSYFWVVDADLDIQSSCPLPRWDYHLFPFILRIDNSHRRRIEFSHDTPFSSYMDSVWAIFVNCSQPLENNDTDKYHRYEPVSCLSNSSFIYLATGYRYDGYVSAGDLKPSCGYLAMTPLGGPGMPVPWNTSYPDVVKFMRSGFALRFPFSYGDNIRECLAKDMRTFLKDPRSSTGIKELIVDILTVVDIFWACVIYQLQSTNNNGVTTVLIGIIETIQYVSGVLKYTAVVCRFVLMPLAVFVFLVYKYWKTRITVDAVEKFLRMQQMLVPMRYAYTNIIAITGHFRDKLGQGGYGSVYKGVLQPGEVHVAIKMLGNSNCNGDEFISEVATIGKIHHVNIVRLIGFCSEENSRALIYEFMPHGSLDKYIFSSEKSLSWDKLNEIALGIARGLNYLHHGCDMQIVHFDIKPHNILLDNNFVPKVADFGLAKLFPKDDNFVPLSAMRGTIGYIAPEMVSRSFGVISSKSDVYSFGMLLLEMTGGRRNADPHAGSSSQAYYPSLVYSQLSQGDAGEISDGVDMHELEKKLCIIGLWCIQMKPQDRPTMSDVIEMLEVGVDGIQMPPRPFFCDDEGDSSYSAISEPDTIEE

SEQ ID NO: 342450 - protein, 626 aa, Zea mays
  unsure (1)..(626): unsure at all Xaa locations
  Clone ID: MRT4577_75478C.1.pep
MGMSAASHLCASSSLRALTVLFVLAALVSDVEGRHHRHVCPPYFSCGGLSNISYPFRRQGDPSGCGVQSYELVCTDTDATIRIGSGTYKVLSINSTYSYFWVVDADLDIQSSCPLPRWDXMLGGPVVIVTYIGGLSSAMIFPILIRRCGFTLTLTLIGPVETHIVRGLSSAMIPLFLLXMDYSGWAIFVNCSQPIENGVYRPVSCLSNSSFIYLVTGYWYEYDGYVFALGLEPSCGYLAMTPLGGPGMPVPMNTSYPDVVKFMRSGFALRFPLSYGDNIRECLAENTRAFHEEPRNSTGIREQILDILTFETLWFCFLDQLGSTNNDVTSVLIDIIVETIPFGLWLLKSTHVFCRLVLMPLAVFVFLAHKYWKARITIDAVEKFLRMQQMLVPMRYAYTNIIAITGHFREKLGQGGYGSVYKGVLQPGEVHVAVKMLGNSNCNGEEFISEVATIGKIHHVNVVRLIGFCSEENIRALIYEFMPRGSLDKYIFSSEKTFSWDKLNEIALGIARGLNYLHHGCDMQIVHFDIKPHNILLDSNFVPKVADFGLAKLFPKDDNFVPLSAMRGTIGYIAPEMVSRSFGVISSKSDVYSFGMLLLEMTGGRRNADPHAGSSSQAYYPSLVYK

SEQ ID NO: 342451 - protein, 61 aa, Zea mays
  Clone ID: MRT4577_75479C.1.pep
VENRAHCDCVKLMTMLARTHMQDLKDVTRVTHYENYRGQLLQNLIRLSLKLPNRNILTREI

SEQ ID NO: 342452 - protein, 160 aa, Zea mays
  Clone ID: MRT4577_7547C.1.pep
RSFGDVVCFDTTYALNIYGRPFALFVGVDNHKQLLVFGAALLYDESIQSLKWVFEVFADAMHARHPQTILIDERPECAIAAAEVWPGTNHCTGVWHIYHNSKRHLKQVFESSKSFSNALNHCLFECEDEIEFLSAWEKLVEKHDIGESEWLSRLYLDDSN

SEQ ID NO: 342453 - protein, 54 aa, Zea mays
  Clone ID: MRT4577_75480C.1.pep
VIRQLAKRACDTMQLRSSEPCFFLVAFLSLARQSIRSRWHYILATTSDRLVPKH

SEQ ID NO: 342454 - protein, 213 aa, Zea mays
  unsure (1)..(213): unsure at all Xaa locations
  Clone ID: MRT4577_75481C.1.pep
MATMSAASHRCCASSLRALTVLFVLAALVSDVGGRHHHHVCPPYFSCGGFSNISYPFRRQGDPSGCGVESYELVCTDTDATIRIGSGTYTVLSINSTYSYFWVVDADLDIQSSCPLPRWDXMLGPVMGGLSGRSTIFXYPSSMWTIFVNCSQPIENNDTYEPVVSCFSNSSFIYLVTGSNYWNYGYAPAEFLEPSCGYLAMIXLGGPGMPVPK

SEQ ID NO: 342455 - protein, 118 aa, Zea mays
  unsure (1)..(118): unsure at all Xaa locations
  Clone ID: MRT4577_75482C.1.pep
IYVSTSTRGNHYYFWRHTHWPQTTFTYYNXSAQDLLXSRLTNEISNAAYRTLFLTDACTHNATTFDCTAEHSTDRSHDTNANAPCQFFDMLSRGSARLYLYRDATALRILLDHGHLIS

SEQ ID NO: 342456 - protein, 99 aa, Zea mays
  Clone ID: MRT4577_75483C.1.pep
RSGQCLCHTSDVPGKLIYGQYCECDTINSERYNSQVCGGPGPGLCFCGKCRCHRGFEGSACQCDRTTEGCLNPRRVECSGRGRCRCNVCECHSGYQLPL

SEQ ID NO: 342457 - protein, 95 aa, Zea mays
  Clone ID: MRT4577_75484C.1.pep
CGEHFMAYRQEMFQHLLDAEGSRKGSEKNADGKGSDPLSFSEHRTGRLEILYTLGKEEHRLPCPLAVVVSAQARKHTRELFLQPHVSRKCHKYVI

SEQ ID NO: 342458 - protein, 78 aa, Zea mays
  Clone ID: MRT4577_75485C.1.pep
WRGRPPSWRTAGGSPSASGPPRAGGLPPVSGPAPAPHAAPSRPLLSRPDPAPLVCSSCSAAAPGARRPPWKLSCRGER

SEQ ID NO: 342459 - protein, 174 aa, Zea mays
  unsure (1)..(174): unsure at all Xaa locations
  Clone ID: MRT4577_75486C.1.pep
MVARQRHGHNEQVPPPPPLAPTVQEQMAQKNEILRQLLQRQPHPQQHGXPASATFGSGNYQEFLSTQPPLFTKAEDPLDADVWLCVVESKFPLLTGDYPDETKARFATQXLRGPARTWWDHFHAMLPADHEVSWEEFKTAFRGHHIPAGILDRKLNEFLALNQGTRFFPASPRV

SEQ ID NO: 342460 - protein, 200 aa, Zea mays
  unsure (1)..(200): unsure at all Xaa locations
  Clone ID: MRT4577_75487C.1.pep
MVGLGWRVGSKVQRWGRSCLRGFSSAAVPSQLENVGFIGLGNMGSHMARNLITAGYKVTVHDINENSMKKFSEDGIPTKQSPLEVSESSDVIITMLPSSTHVLEVYNGPNGLLCRGERLGPWLYIDSSTVDPQTSRKISTAISRCLLKEKXSYAESPKILDAPVSGGVLXCRAGSXTFMVGVLRSVLAASPTFSMGKTST

SEQ ID NO: 342461 - protein, 85 aa, Zea mays
  unsure (1)..(85): unsure at all Xaa locations
  Clone ID: MRT4577_75488C.1.pep
SRPNMAGTNIRSVCPXSGMLSIWALRKRVTXKVFQYAGTKVIKGYQQFSATRKYMVSQPSRGVLMGSVVSTNYGPFLWLDQHEIC

SEQ ID NO: 342462 - protein, 342 aa, Zea mays
  Clone ID: MRT4577_75489C.1.pep
MVGLGWRVGSKVQRWVRSCLRGFSSAAVPSQLENVGFIGLGNMGSHMARNLITAGYKVTVHDINENSMKKFSEDGIPTKQSPLEVSESSDVIITMLPSSTHVLEVYNGPNGLLCRGERLGPWLYIDSSTVDPQTSRKISTAISRCLLKEKKGYAESPKILDAPVSGGVPAAEAGKLTFMVGGLEEAYLAAKPLLQAMGEKTIYCGGAGNGSAAKICNNMAMAISMLGVSEAFVLGQNLGIKATTLTDIFNCSSARCWSSDTYNPVPGVMEGVPSSRNYSGGFTSKLMAKDLDLAMASASGVGFKCPMGSNALEIYRKLCEDGCELKDFSCAFRHYYSGKNEE

SEQ ID NO: 342463 - protein, 81 aa, Zea mays
  Clone ID: MRT4577_7548C.1.pep
DLSRKKKKKKKKKKKKKKKKKKKKKKKKKKKKKTKKKKKKGPARGARKGGIPKNGGPVIGGPNLGPNLGEKRAKVVPGGKW

SEQ ID NO: 342464 - protein, 161 aa, Zea mays
  Clone ID: MRT4577_75490C.1.pep
MVGLGWRVGSKVQRWGRSCLRGFSSAAVPSQLENVGFIGLGNMGSHMARNLITAGYKVTVHDINENSMKKFSEDGIPTKQSPLEVSESSDVIITMLPSSTHVLEVYNGPNGLLCRGERLGPWLYIDSSTVDPQTSRKISTAISRCLLKEKKGKFHHITVKT

SEQ ID NO: 342465 - protein, 82 aa, Zea mays
  Clone ID: MRT4577_75491C.1.pep
KVCFLVSLLDYFLIGLNSWNRTGPWKVYSVSCVALYQRHGGCLLTSGADLIKKKKKKKKKKKKKKKKKKKKKKKKKKRGGPF

SEQ ID NO: 342466 - protein, 71 aa, Zea mays
  unsure (1)..(71): unsure at all Xaa locations
  Clone ID: MRT4577_75492C.1.pep
RDHAEPLHRXQATYXXXXQXXLQQQPQGEXAALXAAQXAQQXTAXXGLQLQQPXPGXXNAXAGGGDGNGAD

SEQ ID NO: 342467 - protein, 56 aa, Zea mays
  Clone ID: MRT4577_75493C.1.pep
IEVDASTRNRAGRQGRARGDAEPTTSAPGLGHHSSATESTARRETWPCAMRNWKQR

SEQ ID NO: 342468 - protein, 57 aa, Zea mays
  Clone ID: MRT4577_75494C.1.pep
VHHLFFLYHILPSRKDIHTTNDYHLDLKPKNIFAYANCTLMIFYFVLPNLYLITFTP

SEQ ID NO: 342469 - protein, 118 aa, Zea mays
  unsure (1)..(118): unsure at all Xaa locations
  Clone ID: MRT4577_75496C.1.pep
DYDHFFLHRWRVEDVSAGEYGYSETEVIFVTGLGELEWDMKDEKEKIDKQELGEVVGICDGAFVLYEYDQEKKDPEHAHWHKIAEXVAAVQVCLVICYVFHESSQNRKEHKDSAEANV

SEQ ID NO: 342470 - protein, 76 aa, Zea mays
  Clone ID: MRT4577_75497C.1.pep
FYKLRKGNIQDMNGQQYLSLEYHSFCVKRKLQEVTCTIRCSSCLILAPLSTGFSRQQDNNQGFARQQSMTATNGKN

SEQ ID NO: 342471 - protein, 80 aa, Zea mays
  Clone ID: MRT4577_75498C.1.pep
PDGHSPVQTLLVLPLVEAGNWTLLPSSRIFRFSFESMIQYLIQIPICIYMFICIFLWHCFINTCVQTILIRSILITKPTH

SEQ ID NO: 342472 - protein, 83 aa, Zea mays
  Clone ID: MRT4577_75499C.1.pep
GGFFKIMLPFSRKATKYLTPRQQRKKTPYARGGLDPPVLETKDIPIILFKKDYPYYTTNTRRLHTRRKAKKHYAKHRAPEGPL

SEQ ID NO: 342473 - protein, 425 aa, Zea mays
  Clone ID: MRT4577_7549C.1.pep
MQAAAVTVNGAGDVQKPQQQPMVVGAPPPPAMVPPHWVAIPMPPHPMAPPQFAAAHFVPFHAVVQSPPRAAPVPAVVLGSPAPHQAGQEENKTIWVGDLHFWMEENYLHNCFGYTGEVVAIKVIRNKQTGQSEGYGFVEFYSHAAAERVLEGFSGHIMPNTDQPFRLNWASFSMGDRRSDVASSDHSIFVGDLASDVNDATLLEAFSSRYSSVKGAKVVIDANTGRSKGYGFVRFGDDSEKTHAMTEMNGVYCSSRPMRIGPATPRKSSGTSGSNGSSARPDGGDLTNTTVFVGGLDPDVSEEDLRQAFSQYGEISTVKIPVGKQCGFVQFAQRKNAEDALQGLNGSTIGKQAVRLSWGRNPANKQFRGDNGNMQWKNGGVYYAAPPFYNGGYGYPAAAPFPDPGMYAAPAYGAYPFYGNQQQVS

SEQ ID NO: 342474 - protein, 107 aa, Zea mays
  unsure (1)..(107): unsure at all Xaa locations
  Clone ID: MRT4577_754C.1.pep
PTRPRTRGRTRGWHRSYLIXIDEPTNYLDRDSLGALSKAIXAXKGGDIIITHSAEFTKDLTDEDWAGLDGRMTPSGHNWVQGQGAGPRLTDKXDRRRRSFYALGYMI

SEQ ID NO: 342475 - protein, 100 aa, Zea mays
  unsure (1)..(100): unsure at all Xaa locations
  Clone ID: MRT4577_75500C.1.pep
TPAGARAGGDKXTXKAPGNSPNTDGRHTGDTSNGTSSGTTNADGDDRDPNGPGSKTTRXKGAKRGPGHGTTDSSPGRHKDEKDAEDEKGTGSTXAGTTNG

SEQ ID NO: 342476 - protein, 102 aa, Zea mays
  Clone ID: MRT4577_75501C.1.pep
EGKCTQLTHSKSATDKLAKGKLPPIAATCNQRSLSQAIGFFNGCLGFSPCSPPMGLTGTGSHTLCRKAFYPCTSASWQLQMLGTQQRVHRELFHLSGSQMNI

SEQ ID NO: 342477 - protein, 58 aa, Zea mays
  Clone ID: MRT4577_75502C.1.pep
RQPYDSFWFATFATPAIYKYKDFVCLNFVHKYKNFLVSNQELDSLVALTRSIKLFPPH

SEQ ID NO: 342478 - protein, 96 aa, Zea mays
  Clone ID: MRT4577_75503C.1.pep
LMQSRHNNGGESTFLSLPPQAPMRCTRNGTGSCSCKRGAPAFRAPWGILPVIPTGRTSAAEVNNDGSGFKLNPPPLSLYSICSRLWIPPTSPSCRI

SEQ ID NO: 342479 - protein, 144 aa, Zea mays
  Clone ID: MRT4577_75504C.1.pep
RPKFPYLGFSPLQSPVGCRDGSRPGLPPSTEPGVLGLFLPACVLGPCSVPAFSFILPVRGDLLSVVPGPRGVAARGPSSVWYPGDWPPCPVSSCFFVFCVLPCSVFGSPAPRYEASRFFSLVGVACALFPHLPWACFLWSPVCS

SEQ ID NO: 342480 - protein, 415 aa, Zea mays
  Clone ID: MRT4577_75505C.1.pep
MYNCTSSGRMSSDEDHGSGTVNGDLFILKRIMVERGNAAYLSGLREKYFGELFSNASRTLEGLSRIESSTISVDMLYDPDIHLEKNLSATEEPLKHVARFIESFESESREIWLVYHNEGHSLSKLIYTAEETKLVTGNNNERVRHIQVLHPSKWWHWLRTTKAGLKQMQNLLWQLLMGLKACHDRNITHRDIKPENMIICFEDMETGKCLREVPSEANQNKLNMRLIDFGSAIDDDTLKNLYGPGPTRSEQTFEYTPPEALLNSNWFQGSRSARLKYDIWSVGVVMLELMMGSPHVFQISDRTRILMDQHLGGWSEQTKELAYKLRSYMELCILVPGISSQHHGSGSPEQGQFGLASWKCSEESFAHQVKIRDPLKIGFPNLWALRLARQLLVWHPEDRLSVDEALNHPYFQEPM

SEQ ID NO: 342481 - protein, 93 aa, Zea mays
  Clone ID: MRT4577_75506C.1.pep
EDVSSACAYAAASSQQQNGSSIARRRRTSEQGVKRMRPFKPRLPNFLPSEKVDLKHQSVGDPRAAEEWMLDYALRKEVKSWPVLRRGKLRCLS

SEQ ID NO: 342482 - protein, 183 aa, Zea mays
  Clone ID: MRT4577_75507C.1.pep
QTERTTKRQTSSSPSSSSWATTTTTTITEIQAAQARAETRSLSTVSNQPNQAGKAAMTFDKVEELRPGTYGHNLQLRVLSAKPVVLHRPQGGRAGGNMRIAECIVGDDTGVVVFTARNEQVDIMKPGAVVEARKARVDMYKGSMRLAVDKWGTLKAAESPADFKVKEDNNVSLVEFELITVMQ

SEQ ID NO: 342483 - protein, 186 aa, Zea mays
  Clone ID: MRT4577_75508C.1.pep
MSVDTERSSTESSAASGLGYEDTALALTLRLPGSDPGRSSPLAAPSDAAPSPKARVVGWPPVRSYRKNALADSSKASRAANFVKVAVDGAAYLRKVDLQAYGGYDQLLRALQDKFFSHFTIRKFADDERKLVDAVNGTEYVPTYEDKDGDWMLVGDVPWKMFVETCRRLRLMKDSEAVNLAPRAAR

SEQ ID NO: 342484 - protein, 96 aa, Zea mays
  Clone ID: MRT4577_75509C.1.pep
MTFDKVEELRPGTYGHNLQLRVLSAKPVVLHRPQGGRAGGNMRIAECIVGDDTGVVVFTARNEQVDIMKPGAVVEARKARVDMYKGSMRLAVDKWG

SEQ ID NO: 342485 - protein, 228 aa, Zea mays
  unsure (1)..(228): unsure at all Xaa locations
  Clone ID: MRT4577_7550C.1.pep
MAATMTADTRLRHGAPVLAPLSSPSDEGPGASAAAGVALAGLSSVSGSLLTAADPSGESTTTSSSNTPXSSESGAAAVSEDGLSASASASASSSGAPAGASDSSGDSLIPKGANAGAMVGASSSGGAAIEAPSNSGAPAGVSSGDSLATGERSGAIVGNSSSGASLAEGERSGAIVGASSSGASLAEGERSGAIVGASSGDSLAEGDRSGAIVGASTSGEAAAGPLAS

SEQ ID NO: 342486 - protein, 78 aa, Zea mays
  Clone ID: MRT4577_75510C.1.pep
RGAFMRWRAFCSSCPHGCMLYCYEPHHSKTEDIAPMHGFSSAVVWSSYAHPGHRRERSMRSRLHSTALRLWFHAFPES

SEQ ID NO: 342487 - protein, 146 aa, Zea mays
  unsure (1)..(146): unsure at all Xaa locations
  Clone ID: MRT4577_75512C.1.pep
CIGQNFRAQQLQQLVLASLNAFSQQQQFLPFTQLGSLTSASYLQQQQLPFSQLPAAYPQQFLPFNQLAALNSPAYXQQQQLLPFSQLDGVNXGTFLSQATVXPFSQHVARCYGTLLHVQLMWPYNRHCFTYTAVFXXQPIIGGVLS

SEQ ID NO: 342488 - protein, 173 aa, Zea mays
  unsure (1)..(173): unsure at all Xaa locations
  Clone ID: MRT4577_75513C.1.pep
AAVSSPLLSPASTARRPAGSHFDDHSRLSPPRSCRLRCRLPVRLGGCKVTGRVAGADDEVSQGAECDLNDSRQGQRDLHEVIHGRTKKYYPSMQRLTLPLQXPGKGGKAVVLSPRGLLLKXWEKGSGSLTVVFKXKDTGPXYRTLFFFQELGSLILYPMVXYLAGYQYFRLTR

SEQ ID NO: 342489 - protein, 66 aa, Zea mays
  Clone ID: MRT4577_75514C.1.pep
KLLCSWITLHNLFCSWPSRHLALARYGVAVVTGAAANRALRRRRRRRRRSSLRCCPWPVRRRLVSR

SEQ ID NO: 342490 - protein, 47 aa, Zea mays
  Clone ID: MRT4577_75515C.1.pep
WITKANEYFHTHHVQHLLAVRAKNNISPTLVLELPTNDFDFPRDFGG

SEQ ID NO: 342491 - protein, 204 aa, Zea mays
  unsure (1)..(204): unsure at all Xaa locations
  Clone ID: MRT4577_75516C.1.pep
MPRGLKNHLTRLNAPNYWTLDKLGAAFAPEPSSGPHQTKERLPLILFIRNMLNYALTYREVISIXLMQRHGLVDVKLKTDNTYPAGFMDVLSIPTTCAYYMLLNNSQGRFRLHPIRDEDAKINLCKDNSDQSGQNGIPYLDTDDGRPMRYPDPLIKVNDTVKIDLEXNKIVDFIKVDVGNDVMVTGGRNTGRXVGVIKNREKHK

SEQ ID NO: 342492 - protein, 102 aa, Zea mays
  unsure (1)..(102): unsure at all Xaa locations
  Clone ID: MRT4577_75517C.1.pep
MATKILSLLALLALFASTTYVNIITQCSLASSAIIPHLLRPDTSMAFEHIAVQAYRLQQALAESVLQQPNNQLHQQWLGTLXTIQTMRTQQQQQFLPALSQL

SEQ ID NO: 342493 - protein, 59 aa, Zea mays
  Clone ID: MRT4577_75518C.1.pep
LNFALLTRCIGGCHPVFWLTGISGKDCLLGGLILVRFMAVHFSPLSTLLFSVGKSYALT

SEQ ID NO: 342494 - protein, 258 aa, Zea mays
  unsure (1)..(258): unsure at all Xaa locations
  Clone ID: MRT4577_75519C.1.pep
TPAGSGPEFPGRPTRPVVVCTDAAAQLWSCVVWELHSGANLLTYRGGQAGPRGLALLNGEYLLAAQQGKNYICAWELQRKDQLQQKIMCPGPVTCLTTAPNGLYVLAGIAESIYLWEVCTGNLLVILSRHYQDVSCLKFTGDGSHFVSAGKDCLALAWSLCSVLQADPSRILAPRHVWSQHTLPITDLHCGFGGPMARVATASLDQTVKLWAISSEDLLLSVLVDMGITSVTMDLAEXHIFCGGSDGSIFXVDLCSWP

SEQ ID NO: 342495 - protein, 98 aa, Zea mays
  unsure (1)..(98): unsure at all Xaa locations
  Clone ID: MRT4577_7551C.1.pep
PQPRRRPPSRRPPSRRPPRRRHRWPLLRPRPPRAPPPLRRPRRLPTSSRSPPTPAGDXPPXSRPPGQAXXPPSAQPPALGLSFAVRRRGVRKPPVIGF

SEQ ID NO: 342496 - protein, 143 aa, Zea mays
  Clone ID: MRT4577_75520C.1.pep
RIDLLPNSARGDDRLGFIPISTGGSLGLHPPPPSPCHVDLNQPTPKSPIHSPAFPRAQFTTFARGSDQCRLLLVFLAAAQIGDQVEFFSMVGEGQVGGLAPHIGMDVEPVLEDLTNVDFCSRSSQALRLEIKWNFSEWAERVK

SEQ ID NO: 342497 - protein, 41 aa, Zea mays
  Clone ID: MRT4577_75521C.1.pep
QPSGVNMLREVVVNLLNRIKDPQGHMPLHTKPPYVVAATVR

SEQ ID NO: 342498 - protein, 73 aa, Zea mays
  Clone ID: MRT4577_75522C.1.pep
AAVTWVYLYWVYSWILLYLIILFCAKAAKPPITTNCRLMFPALACCSWFHTCNQLQIHHVLYYPLPQLNFIIK

SEQ ID NO: 342499 - protein, 52 aa, Zea mays
  Clone ID: MRT4577_75523C.1.pep
MTRGNQRDRDRERAAARKPNGKGPQDGLTPQQAAAGGTGTSTDNKNKAGGKK

SEQ ID NO: 342500 - protein, 98 aa, Zea mays
  Clone ID: MRT4577_75524C.1.pep
SILCLYTISICFVVSILLLPCSSFLNSRARGNQRDRDRERAAARKPNGKGPQDGLTPEQRRERDKKALEEKAAKKAQQAAAGGTGTSTDNKNKAGGKK

SEQ ID NO: 342501 - protein, 82 aa, Zea mays
  Clone ID: MRT4577_75525C.1.pep
CGCLQNQSDSSIRSVITAITLSGPKTMNRENGRHWQEVFCLSGTRMPALTIHLISGISLQLDQWKILKDNIKAINEAIEENT

SEQ ID NO: 342502 - protein, 581 aa, Zea mays
  unsure (1)..(581): unsure at all Xaa locations
  Clone ID: MRT4577_75527C.1.pep
MSSSDPDDAPDGGEDSPLFRRSGGPSSGGTVGDVPVSQSLIKAASNVCFSLFVLAVLVVTVVAVTYQPPDPWLQSSAAITTSLSRVLPNSTFLVPDDSLLPTGEDFNSSTAVPAPVRDDDDAAAAVSAASAAAAGNRTCDPDAPLNCSDPRVLAAVKAFNARAFFRKSIVFLSYEXPVSGPKPGQCDVAWRFRNRRXMSWRRYRDYRRFSLASGDGXALDIVSVGKFRSGTNAARRPYPKGSKSKRPRVSPPPVDAEINDTIPVVGSEAEFKKGKYLYYMRGGDHCKSMNQFVWSFLCGLGEAKFLNRTFVMDLNICLSGAHTVDGKDVDGKDFRYYFDFEHLKESVPVVEEGDFLKDWKRWDKKKGPGRITVRKVPSYKVTPMQLKRDKSNIIWRQFNGHEPENYWYRVCEGRAAKVIQRPWYAIWKSKRLMNIVTEIAGRMDWDYDGLHVVRGWKAQNKQMYPNLDSDTSPDALVDKVTKLVKPMRDLYIATNEPFYNYFDKLRSHFHVHLLDDYKELWSNTSEWYNETTTLSRGKPVPFDAYMRVIVDTEVFYRSKTQVETFNNLTRDCKDGINTCNL

SEQ ID NO: 342503 - protein, 134 aa, Zea mays
  Clone ID: MRT4577_75528C.1.pep
QREYADIVSAIRSAMPGAVVFGDYAIEGGEMFSHDRETSGPSEPSGSLLTTFFLFHMLSSSPIRSGDEPGGTSRGLRRHRRRYLWGENLLSLQYNDDDDDDDEGEEGEGDAVDEEVQRPRSRRRFIRSRSEERV

SEQ ID NO: 342504 - protein, 71 aa, Zea mays
  Clone ID: MRT4577_75529C.1.pep
RKVRSRISGATQAFRGKHKEPGKASLSGPGPAGTPANLQPPEGCGLPPNLEPLGRAKVPVGPFFSGGLHLL

SEQ ID NO: 342505 - protein, 86 aa, Zea mays
  Clone ID: MRT4577_7552C.1.pep
EMPLRSNRTPHCAAPLEPPVLLRGSLGGGELDHVRMELCYNASEELTPDVPDFAPNTVKNLFCALQRTPLTGHEVAITTAMTSPAL

SEQ ID NO: 342506 - protein, 57 aa, Zea mays
  Clone ID: MRT4577_75530C.1.pep
ARCSCYSCCLDWYDPASCNTMPGTCSATSLATAMFMASEVRRLKVVLPVALYSLMDK

SEQ ID NO: 342507 - protein, 68 aa, Zea mays
  Clone ID: MRT4577_75531C.1.pep
AAARFPEPTKSPAPPLQIGGVPRPKALNFDHPKTTGVSGSSLVVATGRLNQLFAHGTLVRYDAKKTFG

SEQ ID NO: 342508 - protein, 116 aa, Zea mays
  Clone ID: MRT4577_75532C.1.pep
GWVLGLPFGVVAVLVSFVGAVIWIIGLPILFKPLLPLGDGAAGSGRGTCQRAAPSQDLVYLQNPLLTVPCFLLWGLNKHFALTGKGAGLDWTGVLVCRRLGRLSQGHFGVLRLIFP

SEQ ID NO: 342509 - protein, 48 aa, Zea mays
  Clone ID: MRT4577_75533C.1.pep
HVRIFCQPSIRIILWYAQEFSCSMYKYKNNPMYSSTACAEEQTAACQI

SEQ ID NO: 342510 - protein, 48 aa, Zea mays
  Clone ID: MRT4577_75534C.1.pep
VAALLRPKLNVVLLSVTKFATLTLSGILMLLDVRFMLCIMITYLIKNK

SEQ ID NO: 342511 - protein, 86 aa, Zea mays
  unsure (1)..(86): unsure at all Xaa locations
  Clone ID: MRT4577_75535C.1.pep
MVNTTVNEELADKIALVNKKPKAEKRVYAGKYATNECGXGQEGLXKGKKSVETYXIYIFKVLKQVYPDIGISFKVMFIMNSFINDI

SEQ ID NO: 342512 - protein, 29 aa, Zea mays
  Clone ID: MRT4577_75537C.1.pep
SLNDPVKSIATGCSHVCARPFAPLLGRLR

SEQ ID NO: 342513 - protein, 97 aa, Zea mays
  Clone ID: MRT4577_75538C.1.pep
AQSLPRVHMLCKLKNLHGPIKQYGLVWCARIESWLNKNNTGVHIPTITSETVIFTKAGGVHTGGMGDYLHIVGCLRMVVVEFHHPSWQSSTKGTTGG

SEQ ID NO: 342514 - protein, 115 aa, Zea mays
  Clone ID: MRT4577_75539C.1.pep
RSPGVRVKFDAASHERCRAVRKRTSTKIGLSGLLGHPRLHLYTTTETINKAVESRVSRTVVVCKRTKTQFWFSLKTCASQTVRYHNRSVVDKRIGFSGVVLYCSVKRLLHNYYSY

SEQ ID NO: 342515 - protein, 134 aa, Zea mays
  Clone ID: MRT4577_7553C.1.pep
LYVQKDSKVYRFIRSKEESLHLHRKNPRKLSWTVVFRRVRRKGITEEVAKKRSKKSIKAQRGIVGADLATILARRNQKPEVRTAQREEAIRKAKEEKKKKAEAAKKSAVKPPMGKSTAPKVSKQQAKGAKPANR

SEQ ID NO: 342516 - protein, 74 aa, Zea mays
  Clone ID: MRT4577_75540C.1.pep
RPGPGLQRGRRRRRRPTAVRPRSLCAAFASIASAVCTGIYGFPKSRIFAAVNVAFALALLLNPDERKSVHVGSE

SEQ ID NO: 342517 - protein, 76 aa, Zea mays
  unsure (1)..(76): unsure at all Xaa locations
  Clone ID: MRT4577_75541C.1.pep
MVMPGPRESNLQKELNRYIPPGGAFGGVSIGALPVLAYFMGGIGSGTGILPPVPIINQYFEPFXKERGTELGFFGF

SEQ ID NO: 342518 - protein, 645 aa, Zea mays
  Clone ID: MRT4577_75542C.1.pep
MDDLKQILARPIQLAEQVIKWSDEAYTFRQECMELKAKVERLAVLLRQAARADLYERPARRIFDDTEKALDKALALVDKCRAHGLVRRVFTIIPAGSFKKMTNQLDNSVGDLSWLLRVSSSAGDDDDDLDAHIGLPPIAQNEPILFLIWEQIAVLYTGNLEARADAAASLVSLARDNDRYCKLIIEEDGVPPLLKLVKEPHLEGQENCALAIGLLGRDPECVEQMVQAGVCLAFAKVLKEGPMKVQAMLAWAVSELAANHPKCQDAFAQHNVIRLLVGHLAFETVQEHSKYAVTSKMSIHSVLMDRKNNAASAVQPDLLDAGEHAGMRYPTGHVPQGKNEIHSLVQSTMAAKPNGGSGKHSNISSTSNAGVAATKQHNASLSGTSTRGREFEDPETKAYMKANAAKALWQLAKGNAAICKNITESRALLCFAVLLEKGEGDVQYNSAMALMEICCVAEQNSDLRRSAFKPTSPAARAVVDQFLRVVEKAEYDDLLIPCIISLGCLSRTFRATETRIIGPLVKLLDEREADVSREAAIALTKFACTDNYLHVDHTKAIISAGGAKHLVQLVYFSEQVVQIASLTLACYIAHNVPDSEELAQAEILTVLEWASKQAYMVQDPVIDNLLPEAKIRLELYQSRGAKGYY

SEQ ID NO: 342519 - protein, 104 aa, Zea mays
  Clone ID: MRT4577_75543C.1.pep
AQCNGGGGGVFYLGFPGGGLYCWGFKGGGAIVYASFFFYLGAGGYFFYWGLPRLGFFDLALFKIQLGGVFFLLTRGVIIFFCLGPLLKTSGGKPPFIKRAGGAF

SEQ ID NO: 342520 - protein, 80 aa, Zea mays
  unsure (1)..(80): unsure at all Xaa locations
  Clone ID: MRT4577_75544C.1.pep
IKCMYPKYTEFKLPQMKAHPYHKALHKMITTENIDLVKLLLHAMTNIMRTAIXDLNHPLYKRTXKSNNQISKTRFLTPLF

SEQ ID NO: 342521 - protein, 223 aa, Zea mays
  unsure (1)..(223): unsure at all Xaa locations
  Clone ID: MRT4577_75545C.1.pep
MASSASRFIKCVTVGDGAVGKTCMLICYTSNKFPTDYIPTVFDNFSANVVADGTTVNLGLWDTAGQEDYNRLRPLSYRGADVFVLAFSLVSRASYENIMKKWIPELQHYAPGVPVVLVGTKLDLREDKHYLLDHPGMIPVTTAQGEELRKQVGALYYIECSSKTQQNVKAVFDAAIKVVIQPPTKQREKKKKKQRRGCSMMNFGGREMLCFXSWMIKEKVSLG

SEQ ID NO: 342522 - protein, 133 aa, Zea mays
  unsure (1)..(133): unsure at all Xaa locations
  Clone ID: MRT4577_75546C.1.pep
MTFMRRNSMRHNDDSGXEQHSGDANCDKCCXKXKAIDRPRERNIXNTHPSRHRHQPCPYDAYVLQKLXADEHHCVSRATHAHILRGLSHQNTMDHIPSHRFTRREYRPAGGHRRPHPAPGDAAPAPAPDADRP

SEQ ID NO: 342523 - protein, 148 aa, Zea mays
  unsure (1)..(148): unsure at all Xaa locations
  Clone ID: MRT4577_75547C.1.pep
PPGASEKEILDVXGPYRIDYMAPSKLVQAATAAKXSLFWGVLFWKRRAEEALIASGIPYTIIRPGGMERPTDAYKETPNLVLAPEDTYVGGQVSNLQVAELIGCMAPNRSAAYCKTVEAVAEIPAPLLPMEQLLSAIPSKREQRPADR

SEQ ID NO: 342524 - protein, 351 aa, Zea mays
  unsure (1)..(351): unsure at all Xaa locations
  Clone ID: MRT4577_75548C.1.pep
MDTIVSLSPQMLRQRQGHQSTASSSSSAWAITTARIGRHLSTASSCSSPRLLIKQRATAASAPAQKEKEVVFVAGATGRVGSRAVRELMKLGFRVRAAVRNAQRATSLVQKEKEQQLLELVECDLEKEPQEGIVSAIGNASLVVCSIGASEKEILDVTGPYRIDYMATSKLVQAATAAKQVEHFILVTSLGTNKIGFPAFLLXNLNAYCAPIRSCSLNIYRFYLFIYLLVINNXEMQSLFWGVLFWKRRAEEALIASGIPYTIIRPGGMERPTDAYKETHNLVLAPEDTYVGGQVSNLQVAELIGCMATNRSAAYCKTVEAVAEITAPLLPMEQLLSAIPSKREQRPAADR

SEQ ID NO: 342525 - protein, 351 aa, Zea mays
  unsure (1)..(351): unsure at all Xaa locations
  Clone ID: MRT4577_75549C.1.pep
MDTIVSLSPQMLRQRQGHQSTASSSSSAWAITTARIGRHLSTASSCSSPRLLIKQRATAASAPAQKEKEVVFVAGATGRVGSRAVRELMKLGFRVRAAVRNAQRATSLVQKEKEXKMYPDMAEQVTTTTTQALIMGVAPSKGHAEGGFEAAAGXRTAGASAAATASATPATAASELGAXLQAGRRKLANYKAXKYSGVAVCVSSQSVSQLRAMACSESETMMMPDGGMLHSLGPIYSFYAMQICNAMQCNXALISLHFYLXIIRPGGMERPTDAYKETHNLVLAPEDTYVGGQVSNLQVAELIGCMATNRSAAYCKTVEAVAEITAPXLLPMEQLLSAIPSKREQRPAADR

SEQ ID NO: 342526 - protein, 376 aa, Zea mays
  Clone ID: MRT4577_7554C.1.pep
MRIIIIISCRQCHLLLAGLSWLLALTCRLWSPAASGGGGPTSGGTAIRPGSMTERAKLAKIPQPEPGLKCPRCESTNTKFCYFNNYSLSQPRHFCKTCRRYWTRGGALRNVPVGGGCRRNKRTKSSKSNSSSAAASASGGAGGTSSSTSSTATGGSSSAGAIMPSHQGQLQPFLASLHHPLAGGGGGGDHYSTGASRLGFPGLSSLDPMDYHQFGAGAGAGASSAAIGLEQWRLPHIQQFPFLSGRPDPVQPTMSSIYPFDLEGHGGDAPGFPGGHMLGASKVPGSAGLITQLASVKMEDNPASAAMASSSPREFLSLPGNLQFWGGGGNNNGGASGNNGGGAGNGGGGGGGGAVAPGSSWVDLSGFNSSSSGNVL

SEQ ID NO: 342527 - protein, 321 aa, Zea mays
  Clone ID: MRT4577_75550C.1.pep
MDTIVSLSPQMLRQRQGHQSTASSSSSAWAITTARIGRHLSTASSCSSPRLLIKQRATAASAPAPAPAPAQKEKEVVFVAGATGRVGSRAVRELMKLGFRVRAAVRNAQRATSLVQKEKEQQLLELVECDLEKEPQEGIVSAIGNASLVVCSIGASEKEILDVTGPYRIDYMATSKLVQAATAAKQVEHFILVTSLGTNKIGFPAFLLNLFWGVLFWKRRAEEALIASGIPYTIIRPGGMERPTDAYKETHNLVLAPEDTYVGGQVSNLQVAELIGCMATNRSAAYCKTVEAVAEITAPLLPMEQLLSAIPSKREQRPADR

SEQ ID NO: 342528 - protein, 128 aa, Zea mays
  unsure (1)..(128): unsure at all Xaa locations
  Clone ID: MRT4577_75551C.1.pep
GLFLGISFTLGPGPPLGGMPPIPPTGGGVXPPSGGXFALLGGTPXIPPACSFXGFPGNPGGFPNLGPLAGPPLLPWGGLWGRGPPPCPSLYAPPVWGFGPPLPLPFKPPGAALFPXCPFFWPGPGAPP

SEQ ID NO: 342529 - protein, 52 aa, Zea mays
  unsure (1)..(52): unsure at all Xaa locations
  Clone ID: MRT4577_75552C.1.pep
SLFDCDEKKNNKKKKKKKKKKKKKKXKKKKKKIYKKKKKKKKKGGAFLGVQI

SEQ ID NO: 342530 - protein, 85 aa, Zea mays
  unsure (1)..(85): unsure at all Xaa locations
  Clone ID: MRT4577_75553C.1.pep
PREAGEGGRRGVVGSERSVDYASSVVAYEEMHTLAIDHKKPDQRRKLGEETXCRKIXXXASYVPCLSLQEVCPGGIRSTQSPIGV

SEQ ID NO: 342531 - protein, 76 aa, Zea mays
  unsure (1)..(76): unsure at all Xaa locations
  Clone ID: MRT4577_75554C.1.pep
KVISESLLAKVSPVGPQLTKFFHKVKEPYXSEKTIKARQQSIITATQVSDNSLPRASAQITRATPQGTPIFSTRTS

SEQ ID NO: 342532 - protein, 116 aa, Zea mays
  unsure (1)..(116): unsure at all Xaa locations
  Clone ID: MRT4577_75555C.1.pep
KXKGEILWVGGKKNKAGMSLFVFAPXNKFVSPGFSKEISRVAPGKNYYPPKASEAVIFVAPKTPLQNFKSSLFCSTGPPFLFLFIGGGNLPSSRSFCVGLSKDRGEQTPAWPCLKC

SEQ ID NO: 342533 - protein, 95 aa, Zea mays
  Clone ID: MRT4577_75556C.1.pep
AVGGNPDLLLRKSPRNHNRRDFAVLINTWTYEQTTTTLQGIQLVTVAKCHIHVDDSPGASSTPALEFCGYFCRMNFSTAGTSEGANIFSCKFPNP

SEQ ID NO: 342534 - protein, 371 aa, Zea mays
  Clone ID: MRT4577_75557C.1.pep
YLVSFKKKKKKKKKKKKKKKKKKKKKKKKKKKKTKKKKKKKKKADENITRTDMTMLMSPATKTLRNKEVDWGPSNDISNISNKASTSSNLKIYLGEEHTLESRTTLLQEGEDDEDITAINTPHQRPPSPFNHGTVKRVRARKFNYQVNSFLVVEANHSLNEVHQESMTETKRGIQKLPREFRSPLELLSIPLFKQLAATKELGFLFDVQGCSWHGKSDNNRSRCWVYQARPQRRAWAVRGGTVLTGGTHGSAGTNERMGFCADEQGPRQLTNGLDLKYYPRRSTDSAGGVIVLPVGEGNSRLSSMVNLVVVLNTELNHALDELGKAWAEIMELCAEHAARHHQEDGSPAPVGIQHPYRSPPRGAPLTAGPR

SEQ ID NO: 342535 - protein, 81 aa, Zea mays
  Clone ID: MRT4577_75558C.1.pep
SSLPQSLPSSLLRRSPRITRSFLLRLRLFLTSSIYQLWFDDEDERFYLKLSFLDKVDISEPFGDEGPPPTIPAGLEGPNRP

SEQ ID NO: 342536 - protein, 118 aa, Zea mays
  unsure (1)..(118): unsure at all Xaa locations
  Clone ID: MRT4577_75559C.1.pep
ARNSARENRKLKPLNFLVREDXHRRVSYLHPPTCSAARPTMITTSNPEEEPXALRKRMQSYSLDPEHAEPSCINQPVGAAQTNWYGPRTVYYKSKSKRDPXPKPEGATTISPRTEIIA

SEQ ID NO: 342537 - protein, 110 aa, Zea mays
  Clone ID: MRT4577_7555C.1.pep
FLTIYTCNDVSFNLGLNDLAYRVNWFCSTFSSALNSNRFTGTISSSLGLLSNLFWLDLVDNRLTGPILVSTAMIPGLDQLTHKKHFVHFFFFENGEWTWTMDMDSASLIK

SEQ ID NO: 342538 - protein, 52 aa, Zea mays
  Clone ID: MRT4577_75560C.1.pep
GAVLAGVAVEAADIGGGIEAVGAGIGGRRGEDSGLDDAGEGGFHVRVNTVAV

SEQ ID NO: 342539 - protein, 60 aa, Zea mays
  Clone ID: MRT4577_75561C.1.pep
KTLGGYENISLVNGLFEHRFCTVIATKPESPRIRYDIAHWELESLILLTRFYLLRGGNSG

SEQ ID NO: 342540 - protein, 52 aa, Zea mays
  Clone ID: MRT4577_75562C.1.pep
HVTDLYRRQFQQLSRILAIAWWKEQERHTQIVSHATSVFINSLCMHLHSHLS

SEQ ID NO: 342541 - protein, 149 aa, Zea mays
  unsure (1)..(149): unsure at all Xaa locations
  Clone ID: MRT4577_75563C.1.pep
XLSXLLMVGAETDAINSIHIHADKRXAQASVGGSSVGLRLGQGRGPGQRSRGRLASWCGCTSGCRSVEHGLGRRRGCAVRRVGVRGTRGGLALGQRAGARVRAACAGGSSTGARPVGTGRAGRLGATVESSWRAGSSRVGAVESSWRQL

SEQ ID NO: 342542 - protein, 144 aa, Zea mays
  Clone ID: MRT4577_75565C.1.pep
SSPLGRRGLFFPGGVQGPGQNDRHAPVAVRFCWTWAPGPHQQPSHRPNPGGGAPLWGPFSVHLPPFLLGGSQRMAPARCGTRGSSGPFARGRKLFNRGGPFLTRGGQDPPSERGGVPQKGALLTFVSLVGGPFVVAPRGEHYNA

SEQ ID NO: 342543 - protein, 112 aa, Zea mays
  unsure (1)..(112): unsure at all Xaa locations
  Clone ID: MRT4577_75566C.1.pep
GGGGVQKTFGVASRPTLDFLPRFFPFFFSGGTTSRXTHGFFLNSKSFFFWSXGVHXCWANNVPFFTKIYPLLLVKFLKLFFFSVPLFFAFLSFPSPGFEICFSSAPGSSLFS

SEQ ID NO: 342544 - protein, 240 aa, Zea mays
  unsure (1)..(240): unsure at all Xaa locations
  Clone ID: MRT4577_75567C.1.pep
MNPDWSEEVCANGVNSTTRKQHEKEEFCGRPLGLRFHGETGELYVADAYYGLMVVGQSGGVASSVAREADGDPIRFANDLDVHRNGXSVFFTDTSMRYSRKDHLNILLEGEGTGXAGQVXVFANLPGFPDNVRSNGRGQFWVAIDCCRTPAQEVFAKRPWLRTLYFKFPLSLKVLTWKAVRRMHTVLALLDGEGRVVEVLKDRGHEVMKLVSEVREVGSKLWIGTVAHNHIATIPYPLED

SEQ ID NO: 342545 - protein, 87 aa, Zea mays
  Clone ID: MRT4577_75568C.1.pep
LVLQTLTLTRQQTSLRSYSLHPKIITQNIYQIKIKLSPNVLPKTTQNFKQFYTLNHKNNNKPSSYKKNQFHHVINYFIIHIKYFIKI

SEQ ID NO: 342546 - protein, 101 aa, Zea mays
  Clone ID: MRT4577_75569C.1.pep
MGSFYTFCCGLPGGEGTTLAKTSWGQSVLGFKSSQHLPFVGGPTCLEKEPPTQVSSGAHGPQIKGGPQFKKNPRVGTPGNQTKEGAHDLGGFYFAMKYTGG

SEQ ID NO: 342547 - protein, 86 aa, Zea mays
  Clone ID: MRT4577_7556C.1.pep
FPSLTSRNPDMMPACSGGLAGCARLFQNRQSMLNGIDDHLLHLRDLSSSPLGPVLFFTGNGELRASGSYTDGEPGGNLASNSREQI

SEQ ID NO: 342548 - protein, 119 aa, Zea mays
  unsure (1)..(119): unsure at all Xaa locations
  Clone ID: MRT4577_75570C.1.pep
PSAGWXPXRSPXRXXSXPXXXXWXAFXXXXSPXCXRARVPPWXAPAAWXXPLRLXAVALAPXSXXWXXRFVSVSCVCCRGWLAPSLLXXSSSSRCXRVXPFCWXPXXSWPAFXXXRFLV

SEQ ID NO: 342549 - protein, 34 aa, Zea mays
  Clone ID: MRT4577_75571C.1.pep
ESHGCVPHGVSVDPAEVAPSASCRAPESCLPLYS

SEQ ID NO: 342550 - protein, 151 aa, Zea mays
  Clone ID: MRT4577_75572C.1.pep
RTRGAPSPRPASPRFVSPPVLQDVGHGPHPGSPLFSPPSTALWDNARAATPSEEMAAPDEPKEEGIELEPARKSTSSSSSASSSSSASSADIPCHIDVVELVNPLAAALPEDEHGAVVKTAHSATLEDERAAPAVHSAEAKPADGAMTKDV

SEQ ID NO: 342551 - protein, 210 aa, Zea mays
  Clone ID: MRT4577_75573C.1.pep
MDSPSCRLFGAQRSPHDLLGGGAVADVVLWRKKEVATGTLAAVVASWALFYCVPGYTLLSFLAQVLMILLTVLFVWAKAAQLLNRAPPPIPLMKISDESMSEAAEMVGSFINKVLKDFENIALGKDNSLFYKVAFVLLLASIVGRLTDLITLVYTSAIIALTVPALLEKSEEHIARFFKKTSIYVQAFGRACKEYKCKMTNMISETKKLR

SEQ ID NO: 342552 - protein, 35 aa, Zea mays
  Clone ID: MRT4577_75574C.1.pep
FVKKGLKREIMLLYSYMCYPHLSFHENITWEPINK

SEQ ID NO: 342553 - protein, 70 aa, Zea mays
  Clone ID: MRT4577_75575C.1.pep
SILDLQPGIALRGSAYRPGRRWSLRVSCGLPLADDIVSAMEMLYLCSLLTTSSAACTYLARLFEACGLVA

SEQ ID NO: 342554 - protein, 142 aa, Zea mays
  Clone ID: MRT4577_75576C.1.pep
MSRTGPIAQDWEPVVVRKKLPNAAAKKDEKAVNAARRAGVDIDIAKKHNAGTNKAAHSTTSLNTKRLDDDTENLAHERVPSDLKKSIMQARTDKKLTQAQLAQLINEKPQVIQEYESGKAIPNQQIIGKLERALGTKLRGKK

SEQ ID NO: 342555 - protein, 225 aa, Zea mays
  Clone ID: MRT4577_75577C.1.pep
VAACTIGGAPERYRGVRLRKWGKWAAEIRNPFTGKRQWLGTFDTAGAASAAYLSASRSFADEKRRRRGLPVAASTPDTPASGSTPTASSSSSASTAPFAHPSPSSVLEPSKEARNTQSPEATPAPPSAESAQLPEDPEFYQDLLRGLQLPDIDPLDFRAGLDALDLSDADFGLDDEHDLLLGDFGDEEMEIDLDLDDINDVFPEMPGCDLGRGMDDFLQTVDFCV

SEQ ID NO: 342556 - protein, 225 aa, Zea mays
  Clone ID: MRT4577_75578C.1.pep
VAACTSGGAPERYRGVRLRKWGKWAAEIRNPFTGKRQWLGTFDTAGAASAAYLSASRSFADEKRRRRGLPVAASSADTPASGSTPTASSSSSASTAPFAHPSPSSVLEPSKEARNTQSPEATPARPSTDSAQLPEDPEFYQDLLRGLQLPDIDPLDFRAGLDALDLSDADFGLDDEHDLLLGDFGDEEMEIDLDLDDINDVFPEMPGCDLGRGMDDFLQTVDFCV

SEQ ID NO: 342557 - protein, 217 aa, Zea mays
  unsure (1)..(217): unsure at all Xaa locations
  Clone ID: MRT4577_75579C.1.pep
MIGSGRRRMTGGRAVLLLVVSALFAQIYASDPLFHESFDEGFQGSWIVSGKEEYSGVWKHEKSDGHEDYGLLVSEPARKYAIVKELDSPVTLKDGTVVLQFEVRLQNGLECGGAYLKYIRPQEAGWDAKEFDNDTPYTIMFGPDKCGSTNKVHFILKHKNPKTGKYVEHHLKSPPSVPYDKLSHVYTAILKPDNEVRILVDGXEKSQINFLXSADDF

SEQ ID NO: 342558 - protein, 47 aa, Zea mays
  Clone ID: MRT4577_7557C.1.pep
KLETYVFMLPSRDTYIHKILVMKPELIDLCKETRTWLLHDTPKFSCL

SEQ ID NO: 342559 - protein, 95 aa, Zea mays
  Clone ID: MRT4577_75580C.1.pep
RTPQVLRSSVTRGGRRGRDHRRRRWASASASPRNAAVLPPQRRKKGGNGRGGTRRRARGGAETTGRMTMTDTRRRGNTSTGTKEKREIRRIGIPR

SEQ ID NO: 342560 - protein, 261 aa, Zea mays
  Clone ID: MRT4577_75581C.1.pep
MTTGGRAVLLLPLLVASALFAQIRASDPLFHESFDEGFEGSWVVSGKEEYSGVWKHEKSDGHEDYGLLVSEPARKYAIVKELDSPVTLKDGTVVLQFEVRLQNGLECGGAYLKYIRPQEAGWDAKEFDNDTPYTIMFGPDKCGSTNKVHFILKHKNPKTGKYVEHHLKSPPSVPYDKLSHVYSAILKPDNEVRILVDGEEKSKANFLSADDFEPALIPSKTIPDPDDKKPEDWDERAKIPDPAAVKPDDWDEDAPTEILDE

SEQ ID NO: 342561 - protein, 74 aa, Zea mays
  Clone ID: MRT4577_75582C.1.pep
PMKYTMILYIGLTTICIPLNCLYIYSVFHFKRLNNHSIYNHNKCLHYLQKFLLVYMVSLITSIPSLQKWIIENI

SEQ ID NO: 342562 - protein, 257 aa, Zea mays
  unsure (1)..(257): unsure at all Xaa locations
  Clone ID: MRT4577_75583C.1.pep
QYXPRTIITLTHSGAAPPEGPNGLEVNYDMVVSRRTHAIQQSIRQITNDPQIQNPVALVENHHLCRRNAEGEKMLPDGLIWRRLLLLLCFSLKMIAEIDSLSTRRASSASFLGRLLQVPPIPYFLSSLLKSREHPKRSNDHNVVSVDSDFYLDELLNGDQEDEDDYDQLPPFKPLSKSQVAKLSKEQQNLYFDESDYRTKLLQKKQLKEQLKGFKEMKKKEGDDNDILSDDDHPNDGYDTDRYPMPEWTLPSSFDSD

SEQ ID NO: 342563 - protein, 79 aa, Zea mays
  Clone ID: MRT4577_75584C.1.pep
HHCDPTVGDYMLRLHAQRALCVRADPDTILSLFTRSYIAPDFSHTHHTSCVQGVRTHICYTVGDTTRSQSSAHIYNTRV

SEQ ID NO: 342564 - protein, 111 aa, Zea mays
  Clone ID: MRT4577_75585C.1.pep
AAAATTIRHEVSFVMLVAPALSCNAMLPPHHHLRFRLSSALQSASRFTLIFFCWTELFCIVSICTVLFPLLFITAATQILACCAAHARRDKSTRQEIVSVAMTPVGNMIVA

SEQ ID NO: 342565 - protein, 66 aa, Zea mays
  unsure (1)..(66): unsure at all Xaa locations
  Clone ID: MRT4577_75586C.1.pep
MAQGRSVIQAYQXTLSINDTVRTFDEALHPESHFMPXCIGTQLDRYLPLHVQQLDVPCQTDTKDDD

SEQ ID NO: 342566 - protein, 103 aa, Zea mays
  Clone ID: MRT4577_75587C.1.pep
IDLGGGGRAPSAQWRTAAKRKAAEEATRAAANGADAPAAAETGLGAGASAAEATERTTAARTATTARAFDPSPAIGGVVAAGLEGSPETNDSGERGSSAGPGR

SEQ ID NO: 342567 - protein, 109 aa, Zea mays
  Clone ID: MRT4577_75588C.1.pep
IDLGGGGGGGRAPSAQWRTAAKRKAAEEATRAAANGADAPAAAETGLGAGASAAEATERTTAARTATTARAFDPIPAIGGGGVVAAGLEGCPETNDSGERRSSAGGPGR

SEQ ID NO: 342568 - protein, 159 aa, Zea mays
  unsure (1)..(159): unsure at all Xaa locations
  Clone ID: MRT4577_75589C.1.pep
AVGFWGSLAVSSVPCPRGPNCLAPRVVWSPSPVWAPVCXRRHGVSVPLRLFPFRLLQRWSGGSWGSCSGVRCPLGRCGRCGCNSYMXXALPPRPRXRFXVLRCLFSLHGPGXXGGGACAGLSLVGFCSGWGVSLVLVVCWVLRPPVCSPAESXARPGRV

SEQ ID NO: 342569 - protein, 68 aa, Zea mays
  unsure (1)..(68): unsure at all Xaa locations
  Clone ID: MRT4577_7558C.1.pep
GPEQYLYSKYIKNAASSTGNITLSVIKTNPDPXXVIDVSDSENPSVGDLGVKASKYVKIQRVWFAQLE

SEQ ID NO: 342570 - protein, 89 aa, Zea mays
  unsure (1)..(89): unsure at all Xaa locations
  Clone ID: MRT4577_75590C.1.pep
PRALXAASRCVPFALLGVHVFVRALGVPPLPKKTAGAVCVSRRCVAPRRAPXRRCRGAPRPPRQRRRHGFLFLFCFSLTHAVRVGERVG

SEQ ID NO: 342571 - protein, 164 aa, Zea mays
  Clone ID: MRT4577_75591C.1.pep
MAAEAGPISKVLIVIAMQKEATPLVHKFNLVEAPAHQSTFPKGAPWVWYHGSYKGLHIDLVLPGMDAVLGVDSVGTVPVAVVTSFSIQTLKPDLIINAGTAGGFKAKGASITDVFLASDVAFHDRRIPIPVSIVSHFSYMCCPGVISILSLEMSKSCMCQTIHN

SEQ ID NO: 342572 - protein, 152 aa, Zea mays
  unsure (1)..(152): unsure at all Xaa locations
  Clone ID: MRT4577_75592C.1.pep
MPHGFGTAMEEQLILRVPTSAEERIERLMNESXASTTXDEAYLDLCFXKDGRNGTXCIGNESCPASLLDLPDAVESYKTYEDPVLIKTGDVGQMIMVREENDPAPEXLEYKHXLLPPMXDARRRKLRRQPDLNAQLSNQAEKHVISIMHASM

SEQ ID NO: 342573 - protein, 100 aa, Zea mays
  Clone ID: MRT4577_75593C.1.pep
RVHACMRSYSRYRAQGLGEKTSAGAGSGVTLGARTAPNMQLLHEAGGNGGTVPATTRYCTRPADVSSALLLNPTSALPPPNATPLCVLLLLTMIPRNPND

SEQ ID NO: 342574 - protein, 74 aa, Zea mays
  Clone ID: MRT4577_75594C.1.pep
LAPAEVGPPSGRATSWRTDRCRVCHSPCHSRLAPSRLSSQTAAPKIFGLVGRSSPPPGPPVRLRPASETGSYSS

SEQ ID NO: 342575 - protein, 57 aa, Zea mays
  Clone ID: MRT4577_75595C.1.pep
IPLFRPAYGRIRPPSSKKCVAPPISAVSSPCGGLAFRMLSRILVAATMRHQLCIYHI

SEQ ID NO: 342576 - protein, 41 aa, Zea mays
  Clone ID: MRT4577_75596C.1.pep
MGFFWLSPPQKKKKKKKKKKKKKKKKKKKKKKKKKKKKKKK

SEQ ID NO: 342577 - protein, 85 aa, Zea mays
  unsure (1)..(85): unsure at all Xaa locations
  Clone ID: MRT4577_75597C.1.pep
MGQGKERPPPQSSVSPAATTTTATXVSILPQERLLLVALRSTSKGGLLLHQRRAIYRSIAEADGSCYFYQPGETATHISSTKLCH

SEQ ID NO: 342578 - protein, 146 aa, Zea mays
  Clone ID: MRT4577_75598C.1.pep
MPRSGFSGSFRSPKIDVVIDMGNPFLNRTVDGFLKIGAVGACKVAAEETFECLHRGDVSKHKVEHALRKMCKEGAYWGTVAGVYVGMVYGVERVRGRSDWKNAMIGGALSGALISGASNSDRGKVVKDAITAGAVATAVEFINCIT

SEQ ID NO: 342579 - protein, 64 aa, Zea mays
  Clone ID: MRT4577_75599C.1.pep
WSNSEFVDLMATLLFTYLLCFFVTSVIAPRVTFDSRLKCSPSSKVKPMKHRWLVFRVQPPNRRR

SEQ ID NO: 342580 - protein, 64 aa, Zea mays
  Clone ID: MRT4577_7559C.1.pep
DVYKIRVTNYQPFKHVWLDRKEDRTRLIHPEENLPDKQFADRDVPDNQPRQPTDLEDTPFTLVI

SEQ ID NO: 342581 - protein, 1112 aa, Zea mays
  unsure (1)..(1112): unsure at all Xaa locations
  Clone ID: MRT4577_755C.1.pep
TLHKRELAEVXENVPIPVKSILEEPSAKINVLLQAYNFRLRLEELSLSSIEVYIDQAAMAVDETRVLFVLKRGWAQLAEKALNLCKMVDKQMWSVQTPLRQFTGIPKEILMKLEKKELAWERYYDLSSQEIGELIRYPKMGRPLHKCIHQLPKLNLSAHVQPITRTVLGFELTITPDFQWDDKVHGYVEPFWVIVEDNDGEYILHHEYFMLKKQYVDEDHTLNFTVPIYEPLPPQYFIRVVSDKWLGSHAILPVCFRHLILPEKYAPPTELLDLQPLPVSALRNARYEGLYSAFKHFNPIQTQVFTVLYNSDDSVLVAAPTGSGKTICAEFAILRNHQKALSGESNMRVVYIAPIEALAKERYRDWERKFGEFAKVVELTGETAADLKFLDKGEIIISTPEKWDALSRRWKQRKHIQQVSLFIVDELHLLGSDKGHVLEVIVSRMRRISSHIGSNIRIVALSASLANAKDLGEWIGATSHGLFNFPPAVRPVPLEIHIQGVDIANFEARMQAMTKPTYTAITQHAKNNKPALVYVPTRKHARLTALDLCAYSSVEGAGTPFLLGSGDEMDTFTRGVEEETLKNTLKCGVGYLHEGLSELDQELVTQLFLGGRIQVCVASSTMCWGRPLPAHLVVVMGTQYYDGRENAHTDYPITDLLQMMGHASRPLQDNSGKCVILCHAPRKEYYKKFLFEAFPVESNLHHFLHDHMNAEVVVGVVENKQDAVDYLTWTFMYRRLAKNPNFYNLQGVSHRHLSDHLSELVETILNDLESSKCVAIEEDMYLKPLNLGLIASYYYISYTTIERFSSMLTQKTKVKGLLEILASASEYAELPGRPGEEEFIERLVRHQRFSIEKPKYGDPHVKANALLQAHFSRHTVVGNLAADQREILLSAHRLLQAMVDVISSNGWLSLALSTMELSQMVTQGMWDRDSVLLQVPHFTKDLARRCQENEGKPIESIFDLAEMAVDEMRDLLQLSNSQLQDIIEFIKRFPNVDMTYEVREGDDISAGDNVTVQVTLERDMTNVSSEVGPVHAPRFPKPKEEGWWLVIGDSSTNQLLAIKRVALQKRARVKLEFSAPAEAGRKDYMIYLMSDSYLGCDQEYEFTVDVKDAGGD

SEQ ID NO: 342582 - protein, 146 aa, Zea mays; identical to SEQ ID NO: 342578
  Clone ID: MRT4577_75600C.1.pep

SEQ ID NO: 342583 - protein, 64 aa, Zea mays
  Clone ID: MRT4577_75601C.1.pep
SLRAPSPTQTRSVIFSTLYAGLFSVAPASLWGMFRQTTDLCRLGFVAVVTLLPCAQYIHIRCQY

SEQ ID NO: 342584 - protein, 100 aa, Zea mays
  Clone ID: MRT4577_75602C.1.pep
CTVRGSMSAFICTRCKLNTFTFFFFFSLLCSYSSSILSGGGTASSVGFTSHGLQRNRVKYCYQSENQFVRTASRCHFYPSAELTLVFHDVYLVGLVPFRC

SEQ ID NO: 342585 - protein, 88 aa, Zea mays
  Clone ID: MRT4577_75603C.1.pep
CYLMHACMPTSILCFGLVLINRHIKPSLYREIEIHRQKQFLSIACVSSNRVIPRPTGYEDPNTLTTETKFSVNKIKALYQLYNRLTYS

SEQ ID NO: 342586 - protein, 58 aa, Zea mays
  Clone ID: MRT4577_75604C.1.pep
RRPQHRGGCDEFRLMTCGLYQDMDTSYVSRYLMISAVDGTYSERFADERQDSRVRERS

SEQ ID NO: 342587 - protein, 71 aa, Zea mays
  Clone ID: MRT4577_75605C.1.pep
LDRHILLPVPSTDSGLPLNHPPPDRSAEPPNTALAVTDLSKENTRILVHHPINAMHAPDRTNIGHVPALPG

SEQ ID NO: 342588 - protein, 95 aa, Zea mays
  unsure (1)..(95): unsure at all Xaa locations
  Clone ID: MRT4577_75606C.1.pep
NHRFTWCSGIQHQRLGKRTKGAKFKHXPNTIWGKDRGVSTSTNLFLEKQHLLSLLNTTLFLSGGGMCPSGVGGFWAWAGPGPGRFGGGFLGGGGW

SEQ ID NO: 342589 - protein, 214 aa, Zea mays
  unsure (1)..(214): unsure at all Xaa locations
  Clone ID: MRT4577_75607C.1.pep
MMASPLKPPLSPLQAVALALLVLLLAGAAPARPQQEYEANKQNACYATNASSVLGYTCNATTASTPACDSYLIFRSSPTYYNTPVSISYLLNSSVSATAAANAVPSVSPLAPSSLVLVPVPCACTPGGYYQHNSSYTIQFRGETYFIIANITYQGLTTCQALIAHNPLHDSRGLVAGNNLTVPLRCACPSPAQAAKGVXKYLLSYLIXWGGDDV

SEQ ID NO: 342590 - protein, 91 aa, Zea mays
  Clone ID: MRT4577_75608C.1.pep
VATRTTSPCHNTTTVRFAPAVAEPREQGEALEFEAERAETTEQVLTSWETTTRAGNRPWSLESCAQRRTERWRARRVAGARFGEGAWLGER

SEQ ID NO: 342591 - protein, 66 aa, Zea mays
  Clone ID: MRT4577_75609C.1.pep
RTQIHKKYGILFLNLFCIIIARPFYITLAKLKSFDSPKSDNRSFLWMERVIIDTLLYINFKIQVPN

SEQ ID NO: 342592 - protein, 69 aa, Zea mays
  Clone ID: MRT4577_7560C.1.pep
MPKQIHEIKDFLLTARRKDARSVRIKRAKDAVKFKVRCSRYLYTLCVHDSDKANKLKQSLPPGLTVQEI

SEQ ID NO: 342593 - protein, 777 aa, Zea mays
  Clone ID: MRT4577_75610C.1.pep
MATATAAPASVARRRIWGHARDGGSLRRDGGSGDTLAMADSCGATANLGTRCGIGSRGHARGGGPMRRPLVHVLPRPRFAPLSPAAISASPQPPFMAPSNLASRNPARQSRGALARSLRGPPKLAIPRASRPRRSTFHRVLGSRGNLPPPERCHPEPAPAAIVASGRRADPLSIEFQKPRPPIPSRVEAERFLRAVDDLCRLAPASPASVGSPRRASSAGGACTVVEVAMTRLEDEFCHVLSARALDLEIEALSSLSSLSMASDWSNSDATEAAAGEEDDGSVSSSVGRRSSYRSLQSIREIDLFPVDAISDLHTKVRSARACHPSPIMRTDIILFLKEGSQLKAWWLHHCIHERMAPGPCHAFKRPSDCHCRLFHSTSGGTISQKANKDIIHHTSYMLWSLITPVNPANTWGPLIFIFAVSATKEAWDDYNRYISDKQVNAKEVWIVKNGTRKHIQAQDIRVGNIVWIRENEEVPCDLVLLGTSEPQGICHVEGGLPPEAVYNIIIDPKNKRVFMISKFPSEKEEMASKYCSTEQVPDEWVFALYLCASTNILSEDSIHTTWTFAASTAPPPSHDHHSSAIPGRDDCGIELTPDGAQSPKVPHGCPPQASDQVVFLPVGCRMPSCDGEAKHRTEGRERAPRHRNRYLPRCALGSTSHATPLIDKHVVRPHRLPDRQARHGSRHLQPPRFFGQRARDHASHCSVVVAPGASCLCVSLTGKCLRQKLMVVGKTFLFCNPQASKFHLNKGSGFRCLQDDTMTCLFSCCCYRVGWRRRKQ

SEQ ID NO: 342594 - protein, 70 aa, Zea mays
  Clone ID: MRT4577_75611C.1.pep
TNGTICINNINYISGNSIGLLTIYLIHGNSWLDLEFFLFHRQDWTRLVAIFSLFIIFCRARIIPPIHCFD

SEQ ID NO: 342595 - protein, 300 aa, Zea mays
  Clone ID: MRT4577_75612C.1.pep
PSTATDSLSCHRGNLDLGAHATTALPRPRLALGSGDADAHRDHDLLPRVLGLFLHSHPPSSPRPRLFSSPPPRVPLSPQPLSATSSSAVVGASLHARPRPTTLAAPLPVLDNFPSGPVLAGIGACSLRHGGGESEGGRRAKRLSQLGRSPPTKIPRDIIDEEMEMESSPAAPRHHNRCLPCCALGSTSRATPLIDKHVVRPHRLPDRQACHGSRHLQPPRFFGQQARDHASHYSVVVVPGASCLRVSLTSDYVRRDLPCPGSKQNQGIRSASHGCCHVGDLIVHKNLRFDTKSLTKGRSR

SEQ ID NO: 342596 - protein, 215 aa, Zea mays
  Clone ID: MRT4577_75613C.1.pep
LHRAIGFLEAGRECMGSGLVHRSLLSPSWGRGKQRRNKSQAVKLARSLAFHQDPPRPHRRGDGDGVQPRRIALFVEPSPCAYAFAAPRHRNRYLPRCALGSTSHATPLIDKHVVRPHRLPDRQARHGSRHLQPPRFFDQRARDHASHCSVVVAPGASCLCVSLTGKCVRRDLPCPSSKQNQGIRSTSHGCCRVGDLIVHKNLRFGTKSLTEGRSR

SEQ ID NO: 342597 - protein, 101 aa, Zea mays
  Clone ID: MRT4577_75614C.1.pep
MDRRHRAVPYSARQQQQRFLRPGALARLRDSRIVARSVRSSACLLLPRSAPPSPSPAPPVVAADELAAAPRFLGTTSGSGRYPLRRRVAAARGVAFPPSSP

SEQ ID NO: 342598 - protein, 44 aa, Zea mays
  Clone ID: MRT4577_75615C.1.pep
HRFFSTLRIPTTRGFNIFAVTYNTTTHLLDSNKSTAAPLNIEIP

SEQ ID NO: 342599 - protein, 238 aa, Zea mays
  unsure (1)..(238): unsure at all Xaa locations
  Clone ID: MRT4577_75616C.1.pep
DACGSGPEFPGRPTRPRTSPLAIKEELADISLXQDGVLEDPLKKENTAFSDWSDEDVPDRTEGLEAEHTAATATPGSTPSPLSSLLPPPPPVAAASTAATALASSAVSATTSDTSSSSAATSNTNGSEYSHRKCHRARGENVEVSHVTLEDTPHRKLEDQKRSSSLGSNRSHRSHTSGRLRSPYNDSAHRSADDQRSQKRVLHSGSRDREXTDSLDVSGEEKSXIDQVKRGEPXRSTS

SEQ ID NO: 342600 - protein, 79 aa, Zea mays
  Clone ID: MRT4577_75617C.1.pep
GKDTGGKKKSYHPPKGLDTQRGGPKITPRGGPPLGDKTLRRAGHPFGGALKGNSGQCMEGLLPPLQGASATAGSLHIPR

SEQ ID NO: 342601 - protein, 38 aa, Zea mays
  Clone ID: MRT4577_75618C.1.pep
SNYCQASNMQHTNGVISLYLIRHSPIWHHLLSSVWLTA

SEQ ID NO: 342602 - protein, 179 aa, Zea mays
  Clone ID: MRT4577_75619C.1.pep
MAERDRVLERERRQMEQILELDMEELQVEEVDDDGSSSSSDVDTFLRNTHGDGGINTYEELSIDTSTVSLQDHTYLGAKVDGARGKFAFLHGDRVLNLPMFYLQGVGLVPEASLHLRVFQPRLVEAIDKAINHVDAPCLIGVGYVYRHTNDGHYTIASVGTMAEIPEIQQLYDGSSCIF

SEQ ID NO: 342603 - protein, 58 aa, Zea mays
  Clone ID: MRT4577_7561C.1.pep
TRLTTLAAQPLPRFISNSFSGNDPIHTQRRPHEWKSILSHLDERGPLRYLREPQAGLT

SEQ ID NO: 342604 - protein, 238 aa, Zea mays
  Clone ID: MRT4577_75620C.1.pep
VPYTLLLRLCRAARRLRRRPWGSRMQQPTGEMEMKKAPLPAPAFHKEYTLPRARHYLDQHYSLRPPLSKDDYSKKDPTSEMEKKKKAPLPTPHFHKERPLPRAERSPDRRYSPYPPPSMDGCSGKNAGSWPLPPIYYGPPSEAFHVDWRNKDGVVDMEHYSTELFAAMDKHSILSVHRCTRPQFGPNVSAEYVLDPIFEDTFLANPRFSYLLPLIGHKVSSAAEAPNSTTQVGTTTGY

SEQ ID NO: 342605 - protein, 184 aa, Zea mays
  Clone ID: MRT4577_75621C.1.pep
GGVWEALTGAPHRLRMHDAKSGPSLLPQLPHPYRLRPSQISRREPPWGRLPPPPTRTIPRGWPTIVKHPGWSRATTEADRDTSWRDNPTEHHQFLADVQTPSRVPELQWAEDCANRISMSNPLRIPRFSSWRLLSRSSLKLSERSWRLMEARSASLRQVVELEASSASSPSPSPDKHDKLTGSL

SEQ ID NO: 342606 - protein, 126 aa, Zea mays
  Clone ID: MRT4577_75622C.1.pep
MSWQSYVDTNLVSTGKVSKASIFGLDGSLWATSPDFKIGGEEVKKLIAAFTDISDIAANGLYLEGAKYVFLRNPDNSIYARNGATGVCCTKTSQAIIVGYYSENMQGGDCNQVVETLAQYLVGAGY

SEQ ID NO: 342607 - protein, 134 aa, Zea mays
  Clone ID: MRT4577_75623C.1.pep
DAVVSGASFHSRQPASGVPSVRWGKRLHRATTAIGGKVSVGVLRSWACADACRMVRVQTRYVSMRRTRASWHREVGKMTSAERESSVSTMETCGCGSAEGHCTLAAWVSDRLSGYGDERALCIAAVLLLPDPAG

SEQ ID NO: 342608 - protein, 75 aa, Zea mays
  unsure (1)..(75): unsure at all Xaa locations
  Clone ID: MRT4577_75624C.1.pep
HEHERLARWARRMEAAGMERVGLSYDGMMEARKLLQSCXVRRRGXSAYQVAHDASGKAFFFCWHRKPLYSVSAWR

SEQ ID NO: 342609 - protein, 84 aa, Zea mays
  unsure (1)..(84): unsure at all Xaa locations
  Clone ID: MRT4577_75625C.1.pep
RRTIFWENWHLKFYPIVSLNLKGFWEFXFCMRMCVLGVYSSFKXEGNSPFFTTSVMMVNLMPYRAFVFHFLSWFFCLSVFCFSF

SEQ ID NO: 342610 - protein, 88 aa, Zea mays
  Clone ID: MRT4577_75626C.1.pep
PPPPSQLITGADFQHILRLLNTNVDRMHTLIVAMTSINGVRRRFSNIVCMPAVIDMNKTVGELTPVELERLMTVVANPMQFKVPYWFL

SEQ ID NO: 342611 - protein, 105 aa, Zea mays
  Clone ID: MRT4577_75627C.1.pep
PAPLRPRASHLLPPPIAAKVPIRGSTRFCPVCASPAKALKSTLLCGFRLIFSEYNLHYCCIVSYFLGRVVGQCDRNWWCYNNIVGQSIRQMGTKSLTNGMEHQLY

SEQ ID NO: 342612 - protein, 338 aa, Zea mays
  Clone ID: MRT4577_75628C.1.pep
MAIATNNFDLSAQVGQGGYGKVYKGILGDGAFVAIKRAHEDSLQGSREFCTEIELLSRLHHRNLVSLVGYCDEEDEQMLVYEFMSNGTLRDHLSAKSKRPLSFGLRLKIALGAAKGILYLHTEADPPIFHRDVKASNILLDSKFVAKVADFGLSRLAPVPDVEGTLPAHVSTVVKGTPGYLDPEYFLTHKLTDKSDVYSLGVVFLEMLTGMKPIEHGKNIVREVNSACQSGAVSGIIDGRMGLYPPECIKRFLSLATKCCQDETDDRPSMWEIVRELELILRMMPEEDLILLETSETDSTDVSKSLSSSATRTLFVSSQASGSLDASSGMISGRVTPR

SEQ ID NO: 342613 - protein, 99 aa, Zea mays
  Clone ID: MRT4577_75629C.1.pep
IDQDISDEPSFLIPKTNFDIPPILESTDSPTSSLSARLIEAERAANFFGHVAPPVAFLIPICHNIPASLSGLRESASSIRSWHQPSLTFMPPHKDHKRK

SEQ ID NO: 342614 - protein, 69 aa, Zea mays
  Clone ID: MRT4577_7562C.1.pep
MPKQIHEIKDFLLTARRKDARSVRIKRAKDAVKFKVRCSRYLYTLCVHDADKANKLKQSLPPGLTVQEI

SEQ ID NO: 342615 - protein, 285 aa, Zea mays
  Clone ID: MRT4577_75630C.1.pep
RNEGILRERNLNLPSVQEISAFRVNLFSGIRRESAIADYDAFWRSLLEEIHTPQGRSCFGQRIQDLHARMSAEGNWDYLIAQQGRGYFGNLPNLNSPLDQYQFGIHPILDLNIGEYYVSFTNLSLSMSMLLTLGLVLLLTKVFMESSGQKRGRAHAVVEASSSASATPNSEDDDKRKKVSRQDANGKESEPPINGAQPEVPSIAFLKKRIKTVLRSCRDRNPRESTLRSTYEDLHLETASAEKRVKIAQALENLYRRSQYFRSNKRQQPHTDLIIQICDWERTKR

SEQ ID NO: 342616 - protein, 79 aa, Zea mays
  unsure (1)..(79): unsure at all Xaa locations
  Clone ID: MRT4577_75631C.1.pep
TFCFSFFTLPEDFRQIATATTKGTLVRIYIAPEGILLHKVRRGATRATTFSLPIAYIVLYLAASIDEXTIHVFNLKINV

SEQ ID NO: 342617 - protein, 71 aa, Zea mays
  Clone ID: MRT4577_75632C.1.pep
AAFFFFVFFFFFFFFFFFFLMNYLITPIIVSKERPREMTSQTLYLLRQYATLQTPAHTNNHGGRVNLAFAT

SEQ ID NO: 342618 - protein, 101 aa, Zea mays
  Clone ID: MRT4577_75633C.1.pep
MSQVASQNRFAYLGNDSDGEEKPVVPVKTVDKATARTTKRNVEPQAPAAPVRTGGNRRGNLGGNEGAFRDRAAGRERNQGRSTEETPRDGPRGGQGARVRG

SEQ ID NO: 342619 - protein, 45 aa, Zea mays
  Clone ID: MRT4577_75634C.1.pep
KKKSRFSFFFVSNHIIGGQLIFGYRRCNRINPHAGRPPSLPEPKD

SEQ ID NO: 342620 - protein, 102 aa, Zea mays
  Clone ID: MRT4577_75635C.1.pep
EGLPPEQKGFFFFRQTVGEWPPLSRFNFSKEKPPPPWAPFPWWSINHGSFNPPMCLRRLVPSLQMKVVKKFPFRFINRVSFGLKINRFFFFCVLPKILPNHK

SEQ ID NO: 342621 - protein, 39 aa, Zea mays
  Clone ID: MRT4577_75636C.1.pep
PHVRSDVPDGRGLVRRLVHQGVITVRTRDDKSVLQATEG

SEQ ID NO: 342622 - protein, 118 aa, Zea mays
  Clone ID: MRT4577_75637C.1.pep
LKLPTLGDFQSLLKASNAAPTYLVRLAGETLETNNDPRWHLPNLGHLPSITALASCNLPNLGLEEMKDQDYSRVQRTRVSQPLLRFSSVRYPHGPLIDPLQTRRQHEARRVGYATRGL

SEQ ID NO: 342623 - protein, 186 aa, Zea mays
  Clone ID: MRT4577_75638C.1.pep
MALGKRSTWTSRKPEELVPTDYEKIRAMNMMKNNQLFQRLGLGQLKSLVTATAANNKEDCPQQSESLYDGENTDNSNEEESQCTNGGCANISNDGDQISTKVTRGNKIIVAPTEERTIRVTRQRIAKVNQENSHNLSIHKQLSSCPATNHDSIETLVVPTQPSSNATINNNTTHSVDNAIEPNSLI

SEQ ID NO: 342624 - protein, 100 aa, Zea mays
  Clone ID: MRT4577_75639C.1.pep
SSDFILFHVYIMLVILHDGLLFSTICSCFIVFNKTGLLFWLLNCEGTGRLLEPFIVLLFDYMSTSIIEMHTMHCWEGSELTESECKHKLKSKYKCFKCRS

SEQ ID NO: 342625 - protein, 128 aa, Zea mays
  Clone ID: MRT4577_7563C.1.pep
MKNVAKCDTWCELQNPANHRVFERKLRPKPSGGGHVCLGVTHLNSHLRVRVAASSARATTMPKQIHEIKDFLLTARRKDARSVRIKRAKDAVKFKVRCSRYLYTLCVHDSDKANKLKQSLPPGPCSIV

SEQ ID NO: 342626 - protein, 61 aa, Zea mays
  unsure (1)..(61): unsure at all Xaa locations
  Clone ID: MRT4577_75640C.1.pep
YQQXTPCAGCPDDCDKGLCTNSCQYQDLLSNCDSLKNTAGCEHELLKEKCKATCLCENKIY

SEQ ID NO: 342627 - protein, 48 aa, Zea mays
  Clone ID: MRT4577_75641C.1.pep
TESILETYFGNTYSFTKCGCSSLKKNSNLTMYHAYKSTMYKIRQYHFN

SEQ ID NO: 342628 - protein, 125 aa, Zea mays
  Clone ID: MRT4577_75642C.1.pep
PLFFFFFWGFFFFFFFFFFFFFFFFFFFFGKHKASLFLRNRKNPYFKSPSVGISAGGKYLAFGTPPPKGNPTLTERNGETQTTRGTTERPHVKQTKLKWKRLREGPWRKTRRARPLRQRGWGTSS

SEQ ID NO: 342629 - protein, 95 aa, Zea mays
  Clone ID: MRT4577_75643C.1.pep
PFKQGLNQKKASKPPFHFVVPRTLFYNPENPHPHLFDGPKPVVRVHVFNTPPQVRNMPPGKRPMNKTFMSATRFKFFLNNSFPQSLVGFTRMVKG

SEQ ID NO: 342630 - protein, 66 aa, Zea mays
  Clone ID: MRT4577_75644C.1.pep
ARKERKKAEGAGFRGVAIVMVLMSVTSTLNALDAGVYRSSSLAIQVVEWLGRAVLCGPFRYYPKWG

SEQ ID NO: 342631 - protein, 104 aa, Zea mays
  Clone ID: MRT4577_75645C.1.pep
EINNPSCSKNKGKSISLAVQAKNNVQKREGVTGSGRNSGVQKEHDEQRANQPFRTQSNLQRKKPSSSGTSSPVLRQNNQKQDSLVTKGKVPANKTGLTQQGRKL

SEQ ID NO: 342632 - protein, 252 aa, Zea mays
  Clone ID: MRT4577_75646C.1.pep
TCIVVHLPRSIFPYLPVTSLNSGGGREFPKRRRREGLPQTAASRLQGDTTCTGDFTCTGDFTCTGASFSRSEDTMPPGRKGIRSTREPPPEITSTEYEKQRAANVMRNNQMFQRLGINQLRTMMTATRVKSKYDGPEESGSLFDGEDSEGSEPEEDSHVAQGVRSHNPTHVADKPTQQTRGSKRVVAPDVHGQQIRFTRQRSAAINQQSSLSLTTTTQAGSRATTNQESTQNLAAATQFTSSVATEQDYTAA

SEQ ID NO: 342633 - protein, 117 aa, Zea mays
  unsure (1)..(117): unsure at all Xaa locations
  Clone ID: MRT4577_75647C.1.pep
IPHRFDSPDTSCQPTAAFXKRSADQSTSLFSLTPFHAFFIQSLIKVLNLPFPQIFIYFIVFTILSYYFSAITINIVIIPLLNILYHILIHFNTIPFFIYITSNPYYSTFINISTYSF

SEQ ID NO: 342634 - protein, 70 aa, Zea mays
  Clone ID: MRT4577_75648C.1.pep
QLKMLLRLITFKTDDTCKDIVVDQVRDRATSYDDLTNSLPENDCRYAIYDFDFVTAKDVQKSRIFYILWS

SEQ ID NO: 342635 - protein, 55 aa, Zea mays
  Clone ID: MRT4577_75649C.1.pep
ALVTPLHRWPPVLIPSDPQSMEMVIPLPCMEEVPKAMSHVVVASSRQGRASDIIP

SEQ ID NO: 342636 - protein, 69 aa, Zea mays
  Clone ID: MRT4577_7564C.1.pep
MPKQIHEIKDFLLTARRKDARSVRIKRAKDAVKFKVRCSKYLYTLCVHDADKANKLKQSLPPGLTVQEI

SEQ ID NO: 342637 - protein, 35 aa, Zea mays
  Clone ID: MRT4577_75650C.1.pep
WRVSRTCGWMRELENNAPAVCLCVRLSPITAGVII

SEQ ID NO: 342638 - protein, 70 aa, Zea mays
  Clone ID: MRT4577_75651C.1.pep
VGGYSVSSGGASSISISPPWRRPLAAIAGSAKLKPSTAMPASLLPNAADFMGVAGCTARFSQTMLKRTRG

SEQ ID NO: 342639 - protein, 286 aa, Zea mays
  Clone ID: MRT4577_75652C.1.pep
ICTHRLPILSYCSPFFLLIPACADVRQRASPGLRFLPSFRRRCRLSSPLPERGNPEEAETAGQMDFGAEQHGCEHYTRRCRIRAPCCGEVFGCRHCHNQAKNSLEVDLLDRHEIPRHEISKVICSLCNKEQDVQQNCSGCGACMGKYFCEKCNFFDDDISKKQYHCDGCGICRTGGIDNFFHCEKCGCCYSNVLKDSHHCVERAMHHNCPVCFEYLFDSTMDISVLHCGHTIHLECLNEMRVHHHFSCPVCSRSACDMTDAWQKLDQEVAATPMPEFYQKKMVWIL

SEQ ID NO: 342640 - protein, 47 aa, Zea mays
  Clone ID: MRT4577_75653C.1.pep
EWNRIDSLNDIIWIRRNNSGCNGKKKRKVYKRIDFGGFMEKKGKFLV

SEQ ID NO: 342641 - protein, 66 aa, Zea mays
  Clone ID: MRT4577_75654C.1.pep
HITYYFMLKFSLSKGYEPRHQHAYTQDHFQYHKKPFFLQILSLTILAYNALTFNSSAYLRFSSYWN

SEQ ID NO: 342642 - protein, 115 aa, Zea mays
  Clone ID: MRT4577_75655C.1.pep
PPRLQLRCHLQMHPLQGLFPSMGAPGYDYFLSSLGWRLNKKKQARVGCPPKESFGVCKKKKNKVLRLETPPRMFGASFCAHEGRGVPPHVGLSHGISGTHILFGPPKNDFILYIY

SEQ ID NO: 342643 - protein, 68 aa, Zea mays
  Clone ID: MRT4577_75656C.1.pep
TLFTSNLIIRNTSPPPKTNSAGVYFAFLEQGLIPYSKLAPALDRIISRAKKKYYRENGDKIITFPSFP

SEQ ID NO: 342644 - protein, 227 aa, Zea mays
  unsure (1)..(227): unsure at all Xaa locations
  Clone ID: MRT4577_75657C.1.pep
SQVPAFHRRRGRERRPPSGLVPFGGAAFFPGRLIHTNELLVLLGEGYYAERSAKQTTNILHRRGQELEAQVEAMKATIADLEAEAKFFEFTATEASEGLVEIREEYDEDLETNSSRSEASVATVVMSDKDREHARIMARLDELEREEKDAGSACEDDNDGDDDDGDAGTSDDGEENKESGNAXSDVNEDYSSGXGASXSGSGXHDRSHGNIKSALKKPGGDEMLIGI

SEQ ID NO: 342645 - protein, 400 aa, Zea mays
  Clone ID: MRT4577_75658C.1.pep
MAAPRKGTATPLGTVFSPEETKRAVARVAESVAGRRAELARLQGFAADNAALVSLVNRLPDELSHDIMVPFGGAAFFPGRLIHTNELLVLLGEGYYAERSAKQTTNILHRRGQELEAQVEAMKATIADLEAEAKFFEFTATEASEGLVEIREEYDEDLETNSSRSEASVATVVMSDKDREHARIMARLDELEREEKDAGSACEDDNDGDDDDGDAGTSDDGEENKESGNALSDVNEDYSSGFGASFSGSGGNDRSHGNIKSALKKPGGDEMLIGISHKPSSHTSHLAFPGQTSATNSDVRVHTKAVTFEDDKYVVSSSKSPPLLLDSIQSDPVLKNSSDPALSRDRKIISSGRKAFTGSIIEHDDNVSTIEPSVASSLAKPGTCASSRPVSRFKMQKGGR

SEQ ID NO: 342646 - protein, 80 aa, Zea mays
  Clone ID: MRT4577_75659C.1.pep
HASVSTTWYMYNKAGVHTPRARISKYNTGLAVYTRDNKPWQSSTEERLLHIASPYHTAIYIRDLQVFQRARLADTKCQDA

SEQ ID NO: 342647 - protein, 54 aa, Zea mays
  Clone ID: MRT4577_7565C.1.pep
ISLYYWCKGQVSFKRINFVPDGVHCFGIQVDRMVQGLSPGKNRSVALASHHSQH

SEQ ID NO: 342648 - protein, 71 aa, Zea mays
  Clone ID: MRT4577_75660C.1.pep
HILYQLIPNLNLLRMFLLTCISHFNNLFLSQRSSLNMIPGQPIIGLKKFIIVPKETTTIFLDHWQALNTFY

SEQ ID NO: 342649 - protein, 139 aa, Zea mays
  Clone ID: MRT4577_75662C.1.pep
IRHEGFFTQRRHCISHLRLPRSAGAPSPAGDGGGAQARALSRGGGAQARARRGGVSVFPSRLSSVTSRLRLRSSAHRPVFCVRASLSPPASGGSSTAPDPSGCAARGLRAAGASSRCSNKGVAPLWERLCPKAKRYTSS

SEQ ID NO: 342650 - protein, 126 aa, Zea mays
  Clone ID: MRT4577_75663C.1.pep
RTLVPFSRLALQVQRNKQLIADCGSNPDSVYTSFCWDPPRYANSLQTGGSLRSSTMPVLGSCIRHNWHGFHPIHHRHNKQHHLTYHVHINYQHFLKDRAGRGRSENSSRCLTMRRCSTRCYGSTTG

SEQ ID NO: 342651 - protein, 118 aa, Zea mays
  Clone ID: MRT4577_75664C.1.pep
MMDPHSLLDRRFSVCDRSSFWSRPSDVDTSMRCGGSSDDENIDEESPSGIFFPPMPCAYGAPLCTGSRYCLVASKQMVGIFLMVWVRSDIREHVKNLKVSCVGRGLMGYLGNKGSISI

SEQ ID NO: 342652 - protein, 40 aa, Zea mays
  Clone ID: MRT4577_75665C.1.pep
ETSISTFSLSLTTQTLNTIPHMLYHIYLTNYTYHINLNSF

SEQ ID NO: 342653 - protein, 108 aa, Zea mays
  Clone ID: MRT4577_75666C.1.pep
WGAEKPLFLGGTNFGPWAKRGRPFQVQELAQIGPGPGGGPFQGGTLPYKIGVQGPPPLGREMGGIFFGEGPLLFGWVPPHGSGPGGFGPGGWKFKTLSEPVPVFFGGG

SEQ ID NO: 342654 - protein, 116 aa, Zea mays
  unsure (1)..(116): unsure at all Xaa locations
  Clone ID: MRT4577_75667C.1.pep
SASVSVKTIDLREAGDRGNSGRRRFSISSDTSDESLRSSTSSMKFYKVNDLWREVTXMVRVRDGTSGLSYPRSSKRSGLSDTGSAHSLESSGIVSHPVTKATDKVLSVGWKKSSWV

SEQ ID NO: 342655 - protein, 84 aa, Zea mays
  Clone ID: MRT4577_75668C.1.pep
SCRSLYGSHVCHLSLSVSVGLVVLPRVIIASSTDSVIGISLITAPVILALDSMSSASIAHPPIVHEAAIVSNLTLAFDLSFPSR

SEQ ID NO: 342656 - protein, 85 aa, Zea mays
  Clone ID: MRT4577_75669C.1.pep
IDPNHKISKNTEAGHLLVCIVRIHYLLKYRNCKVAGNKNLPQTRLQANNYSQEIGLTRAPLCTKPKLDLLYTTTVPEKEFVDGCQ

SEQ ID NO: 342657 - protein, 228 aa, Zea mays
  Clone ID: MRT4577_7566C.1.pep
MPQQEVPDQIAVGWFAVEAPERTGSLQRSGSNSRLNAQAPEFVPRVAAVVPPPQPPPAVIRVFAVPSPPPRAAFFAAPLPPSSFEFFAPVRVGGAFVAEEPEPEMERATPPVAEPAVDGLTDEVVQKITKQVEYYFSDINLATTEHLMRFISKDPQGYVPISVIAGFKKIKALVHNNPMLAAALRTSSKLVVSGDGKRVKRRHPFTESDMQEFQSPIVVAENLPGDPS

SEQ ID NO: 342658 - protein, 56 aa, Zea mays
  Clone ID: MRT4577_75670C.1.pep
EKTSIGWVNGFINLQRKLCQCGARDTGTYDCPMCILYDVVKGKQKSNGLDCSIMWT

SEQ ID NO: 342659 - protein, 37 aa, Zea mays
  Clone ID: MRT4577_75671C.1.pep
IPRQSNTTRQKQLCACQVRCTYRYTVHMSSQITILVD

SEQ ID NO: 342660 - protein, 50 aa, Zea mays
  unsure (1)..(50): unsure at all Xaa locations
  Clone ID: MRT4577_75672C.1.pep
YLFQCVRKFLKYKSTKVRAKTDILQSFGVTILFXAAVLNGGSRGIDIECV

SEQ ID NO: 342661 - protein, 78 aa, Zea mays
  unsure (1)..(78): unsure at all Xaa locations
  Clone ID: MRT4577_75673C.1.pep
RVTNVTEYIAGAKVRLECKRCGTGKLERSIDWVTDANGTYTIELKDSHEEDICEVVXVDSPDKDCYXVHADRDRAGVL

SEQ ID NO: 342662 - protein, 36 aa, Zea mays
  unsure (1)..(36): unsure at all Xaa locations
  Clone ID: MRT4577_75674C.1.pep
TGPYRLSYASGRTKGRILXCXFFILVQTSGRLSSGY

SEQ ID NO: 342663 - protein, 73 aa, Zea mays
  Clone ID: MRT4577_75675C.1.pep
NNIGFFGPKSRKWKKNFRVTKRKLFLGRWPDPWGIPETDPFFLPIFGPKKGTLKRLFYVPRGESLGGVKKKFV

SEQ ID NO: 342664 - protein, 98 aa, Zea mays
  unsure (1)..(98): unsure at all Xaa locations
  Clone ID: MRT4577_75676C.1.pep
SKQSKEIVYRFFARSSSMVGGGDYXTDQKKQAAAGGVFHYSQLVMVCIGGDVRPTALWLPLRGGAWGLSIFLRVRRAVVGCFLPRGFLSFLWGGPRVR

SEQ ID NO: 342665 - protein, 51 aa, Zea mays
  unsure (1)..(51): unsure at all Xaa locations
  Clone ID: MRT4577_75677C.1.pep
PIAVVLNNGHNVTYDVSKSRHSRCRGRLMDHSKFVRHMIRXVCGFAPYERR

SEQ ID NO: 342666 - protein, 145 aa, Zea mays
  Clone ID: MRT4577_75678C.1.pep
MSPASSMLTAVSLSSPLPAPRLRAAAAASSFAPPRRAAVALVVRAASASSKSPATAEAAPKKKRATGITQPKSVSPALQAIVGDPVIPRTEVLKRLWAYIKEHNLQDPSDKKVVVCDEKLKVLFAGRERVGFLEIAKLLNPHFVK

SEQ ID NO: 342667 - protein, 53 aa, Zea mays
  Clone ID: MRT4577_75679C.1.pep
WAFIHVQKKHPHVNYREKRTKAFDSSQFAIYAAQAIAYGLAVSSSFSIPFPTF

SEQ ID NO: 342668 - protein, 69 aa, Zea mays; identical to SEQ ID NO: 342614
  Clone ID: MRT4577_7567C.1.pep

SEQ ID NO: 342669 - protein, 55 aa, Zea mays
  Clone ID: MRT4577_75680C.1.pep
TRPSTPPSTLPLSFIPHEISLLVELIGGHLRYLLTNFPPQSNSPPYNFFSPDLPI

SEQ ID NO: 342670 - protein, 69 aa, Zea mays
  Clone ID: MRT4577_75681C.1.pep
MARIGSLIGLNYLKEFSVVVVIRDPNFDGELGSTYSVIFNTFLDKALMHYQKVIWTSRFYAFERISTIL

SEQ ID NO: 342671 - protein, 97 aa, Zea mays
  Clone ID: MRT4577_75682C.1.pep
AHFPGGFKGVLNTQKPKKFFPKKTDNLNFPPNTFYKTRLNGSCVFFPPPKGIPFLEKTQKQASFICFKKINDPPPPQLGPKIKKSNTGIRKNLTFFF

SEQ ID NO: 342672 - protein, 67 aa, Zea mays
  Clone ID: MRT4577_75683C.1.pep
SKVAPPPLGHPPLKNFLPKIFSIYFAPKPPVLEFKVEKNFPPTPFPWGVWEIPHTSPFNENLGGKCA

SEQ ID NO: 342673 - protein, 60 aa, Zea mays
  Clone ID: MRT4577_75684C.1.pep
KQLFFSSSLTLLDVCLWFMLLDGMVIPKSYIHVPNSLMKASQTHSGFYECMHKCFFHSLL

SEQ ID NO: 342674 - protein, 76 aa, Zea mays
  unsure (1)..(76): unsure at all Xaa locations
  Clone ID: MRT4577_75685C.1.pep
TNHILNIYALLYDSFLTKSDIYLNNAILTDXKHLPMYDXSPSMIKVEYIARRATQNSITVAQWMLQTPGATSYMRC

SEQ ID NO: 342675 - protein, 87 aa, Zea mays
  Clone ID: MRT4577_75686C.1.pep
VPPIEGLNPAQEDHLPHLQSAIADALTSIPEPIPDALAKLSHEILDATPPPLAELMKPLAQLMPPNNNRNAPSDVHADGSSSSPTSQ

SEQ ID NO: 342676 - protein, 109 aa, Zea mays
  Clone ID: MRT4577_75687C.1.pep
MATFELYRRSTIGTCLTETLDELVSSGAVSPELAIQVLVQFDKSMTEALEMQVKSKVSVKGHLHTYRFCDNVWTFILTDATFKSEEIQETLGRVKIVACDSKLLQPQHP

SEQ ID NO: 342677 - protein, 140 aa, Zea mays
  Clone ID: MRT4577_75688C.1.pep
QGWNLSSMCALKDRHKWMSIPSLDERNHQVGQGLVIVLHVMMFENSPHVQYTPCVWTSAVPLSGWIGGDGTGYGLDQLPRQRRREHPESHRDCVDDWRHSASAHQQECHRVSVWCFPHYTGLQAYTECWCDASGRARKKR

SEQ ID NO: 342678 - protein, 181 aa, Zea mays
  Clone ID: MRT4577_75689C.1.pep
NLKEPECCWDVFCFVQPNFQVWDASIIQTAEDDFYGDSGAVYIDPLKKNITQGEWSEQVSSWEACGKNQTACPDIYASESVAAACDWAYKGVEEDSTLEDPYFSSRLPVVSLRLAQGGVRLAATLNRTSGCGAAACAWPGTGVEVDATPDDPWFPSRLPVVSLRLAQGGVRLAATLNRIFG

SEQ ID NO: 342679 - protein, 139 aa, Zea mays
  unsure (1)..(139): unsure at all Xaa locations
  Clone ID: MRT4577_7568C.1.pep
MSGGGGGAGAGSSSGGGGGGGGGGREGDWDCGSCGNRNYAFRSLCNRCKQPRLLVDPNTPRDSKWLPRAGDWICTEXCKKCGLSKEEAAMPALQMAGMAMPAYATYIARLQSLAASASAYKMNFGMAANSPLQQQLLAN

SEQ ID NO: 342680 - protein, 100 aa, Zea mays
  unsure (1)..(100): unsure at all Xaa locations
  Clone ID: MRT4577_75690C.1.pep
GGKNSGVXRTVVKEKLRSFNVLFKEIYPKQWGWSVQNNELGEXIRLGVVEILLHAYRXLIKGFGPFIENSKALGKYVKHTPEQLKLLLGNLFKGKKEGVL

SEQ ID NO: 342681 - protein, 101 aa, Zea mays
  Clone ID: MRT4577_75691C.1.pep
GDHKRSQYPNTTSQHYPSTNTSLASSLRTASSIVYSPVQFSLPHCTFKILLFSGHRQIAGPHAVVKHRLLFTKAFTYGVVCSNSGILSYEPKHSAKVVEAL

SEQ ID NO: 342682 - protein, 91 aa, Zea mays
  Clone ID: MRT4577_75692C.1.pep
PRPSSPWKASTCPRPRSPTHARAHVAGQLPHPSLCLRHALAHANPCLSPAASAFRICRLPPRPASLSQPCQQDHRRRCLPPVAPYLLIPTS

SEQ ID NO: 342683 - protein, 116 aa, Zea mays
  unsure (1)..(116): unsure at all Xaa locations
  Clone ID: MRT4577_75693C.1.pep
CQLISSTVVDPNNGNLGKLGTEASLEQWLLNPPPLLSSENQFRVTFDWEVYKQGIPGAIIVKNNHASEFFLKTITLINVPGPGTIVXFVANSWIYPQSKYRYSRITAKGIPNSISI

SEQ ID NO: 342684 - protein, 156 aa, Zea mays
  unsure (1)..(156): unsure at all Xaa locations
  Clone ID: MRT4577_75694C.1.pep
RPPLTGPSPRPETQTGQKGGAPKWEEPXGVVGPVPPRGAPGPRLGGPXSPPDPPMGPGAQAPPPVCGPXPPPERGPPGPPLFSSPGPPPCETPPWFPGGAEVGPPPPALGAGGGGGPAGAGGGGPAAXRPPPPPAAARAAAPPRRPSPPPPPPPPP

SEQ ID NO: 342685 - protein, 197 aa, Zea mays
  unsure (1)..(197): unsure at all Xaa locations
  Clone ID: MRT4577_75695C.1.pep
MFGNIGKIPIIGDLTGSNKNAHLKGNVVLVRKTVLGLDVTSIAGSLLDGVGEFLGRGVTCQLISSTVVXPYRDDELRNLRGDDQQGPYQEHDRVYRYDVYNDLGLPDSGNPRPVLGGTKELPYPRRCRTGRKPTKSDPNSESRLTLVDGDVYVPRDERFGHIKKSDFYGYAIKALVNAVIPAIRTYVDLSPGEFDSF

SEQ ID NO: 342686 - protein, 71 aa, Zea mays
  Clone ID: MRT4577_75696C.1.pep
TEYSTTTTTAARTSPALPCRKSRQTATATGCHCMSELRLHMLLATPAARLMLPCFPIRRTLMHLVRKAGHP

SEQ ID NO: 342687 - protein, 172 aa, Zea mays
  unsure (1)..(172): unsure at all Xaa locations
  Clone ID: MRT4577_75697C.1.pep
MKSDVNMLLLFSGDETVPXFFGCLSAGADLCFXCLLCAHGTANSXVCVSSYGXVMRAELSMNTIVPRWLVXGVLXIYRVIITVIIISGINRKAKCYYLFDGCAHLSSEIDCALAGLAAAMSFGIVXDAGLMANASHAELSXVRWILILIFAXAVALYALDGEIILSSRADPS

SEQ ID NO: 342688 - protein, 255 aa, Zea mays
  unsure (1)..(255): unsure at all Xaa locations
  Clone ID: MRT4577_75698C.1.pep
MFGNIGKIPIIGDLTGSNKNAHLKGNLVLMRKTVLGFDVTSIAGSLMDGLGEFLGRGVTCQLVSSTVVDPXRETDKNKTSRTTATGADPETTIATKTMTHRDNERIXRVWTNXTDNYFYLHXCTVCSSRYXSKEYILHAALNDDIDADPDVDRRRRVXNGNRGKVGQEASLEQWLLHPPPLLAGEDQFRVTFDWEVEKHGVPGAIIVKXNHASEFFLKTITIDDVPGHXPIVFVANSWVYPQYKYRYNRVFFSTT

SEQ ID NO: 342689 - protein, 237 aa, Zea mays
  unsure (1)..(237): unsure at all Xaa locations
  Clone ID: MRT4577_75699C.1.pep
MFGNIGKIPIIGDLTGSNKNAHLKGNLVLMRKTVLGFDVTSIAGSLMDGLGEFLGRGVTCQLVSSTVVDPNNGNRGKVGQEASLEQWLLHPPPLLAGEDQFRVTFDWEVEKHGVPGAIIVKNNHASEFFLKTITIDDVPGHGPIVFVANSWXVYPQYKYRYNRVFFSNDTYLPSQMPAALKPYRDDELRNLRGDDQQGPYQEHDRVYRYDVYNDLGNPDAKNPRPVLGGSKHHPYPR

SEQ ID NO: 342690 - protein, 56 aa, Zea mays
  Clone ID: MRT4577_7569C.1.pep
MSLPSGQGMSGLIVKGAKWRDGDWLCNNCNNHNYASRAFCNRCKTQKESAVHPGVL

SEQ ID NO: 342691 - protein, 70 aa, Zea mays
  Clone ID: MRT4577_756C.1.pep
CVAVSIFFVTFSADYRLPWPHPRFAVGNPRFCMYRCTLHRLPHDYCPAPTIFFNVICINKKTTGPMLGDR

SEQ ID NO: 342692 - protein, 63 aa, Zea mays
  Clone ID: MRT4577_75700C.1.pep
LSFPAVRIIIRRYGLGKREVLDVMAIMVSGKSTVLKIISELLPYPLFDIDKSVVTATHMHLSR

SEQ ID NO: 342693 - protein, 59 aa, Zea mays
  Clone ID: MRT4577_75701C.1.pep
PPTQAGWIIVITTAPDKGAHQMKGGHLQHAPQLKSRGGPRDSPGGCTNPGAGLLSGGTP

SEQ ID NO: 342694 - protein, 46 aa, Zea mays
  Clone ID: MRT4577_75702C.1.pep
LFTPLLQKLRLQRPKKKKKKRKKKKKKKKKKKKKKKKIKKKKKKGA

SEQ ID NO: 342695 - protein, 977 aa, Zea mays
  unsure (1)..(977): unsure at all Xaa locations
  Clone ID: MRT4577_75703C.1.pep
MFGNIGKIPIIGDLTGSNKNAHLKGNVVLVRKTVLGLDVTSIAGSLLDGVGEFLGRGVTCQLISSTVVDPSEQSTLPSCLLLALSALLHASVMKRGKMSFSRKEKYRKRQNXLSTDGCLRRTMTKTTADESTLNLLAQXPDPDKERTVLFSIAVVHFTRWSSDGDADRRTRAPCXNGNRGKLGAEASLEQWLLNPPPLLSSENQFRVTFDWEVEKQGIPGAIIVKNNHASEFFLKTITLNDVPGHGTIVFVANSWIYPQSKYRYNRVFFSNDTYLPSQMPAALKPYRDDELRNLRGDDQQGPYQEHDRVYRYDVYNDLGLPDSGNPRPVLGGTKELPYPRRCRTGRKPTKSDPNSESRLTLVDGDVYVPRDERFGHIKKSDFYGYAIKALVNAVIPAIRTYVDLSPGEFDSFKDIMKLYEGGIQLPKIPALEDLRKQFPLELVKDVLPVGGDYLLKLPMPQIIKEDKTGWMTDEEFGREILAGVNPLLVKRLTEFPPRSSLDPSKYGDHTSTIREADLENKLEGLTVQQALHGNRLYILDHHDNFMPFLVRVNSLEGNFIYATRTVLFLRGDGTLVPVAIELSLPELRDGLITAKSSVYTPKSTTGAEAWVWHLAKAYANVNDYCWHQLISHWLNTHAVMEPFVIATNRQLSVTHPVHKLLLPHYRDTMNINSNARQMLVNAGGIFETTVFPRQYAFEMSSVIYKDWNFTEQALPDDLIKRGMAVADPSSPYKVRLLVEDYPYASDGLAIWHAIEQWVTEYLAVYYPNDGVLRADVELQAWWKEAREVGHADLKDAPWWPKMQTVAELVKACTTIIWIASALHAAVNFGQYPYAGYLPNRPSVSRKPMPAPGSDEYAELERKPEKVFVRTITSQFQALVGISLLEILSSHSSDEVYLGQRDTKEWTSDAKAQEAFKRFGARLTEIEKRVVTMNADPRLKNRNGPAEFPYTLLYPNTSDTKGDAAGITAKGIPNSISI

SEQ ID NO: 342696 - protein, 208 aa, Zea mays
  Clone ID: MRT4577_75704C.1.pep
DTLQWFADLAVLNINDLAEQAELQACTNDSSNYESDSFESLTLKLEETKIDDLWSRPLEPETATDEQTVSAAHLLTKPRRGQQRRRRQKRDFQRDVLPGLSSLSRPEITEDVQLLEGLVQASGGSWESSLTRRGRCGGRARGRKPRKTVVTVIVEEEEEEEVEVSPPPKPAGTGELEADGRGMIGWGRTTRRCRRARCPSGNSMATAS

SEQ ID NO: 342697 - protein, 873 aa, Zea mays
  Clone ID: MRT4577_75705C.1.pep
MFGNIGKIPIIGDLTGSNKNAHLKGNVVLVRKTVLGLDVTSIAGSLLDGIGEFLGRGVTCQLISSTVVDPNNGNRGKLGAEASLEQWLLNPPPLLSSENQFRVTFDWEVEKQGIPGAIIVKNNHASEFFLKAITLNDVPGHGTIVFVANSWIYPQSKYRYNRVFFSNDTYLPSQMPAALKPYRDDELRNLRGDDQQGPYQEHDRVYRYDVYNDLGLPDSGNPRPVLGGTKELPYPRRCRTGRKPTKSDPNSESRLTLVDGDVYVPRDERFGHIKKSDFYGYAIKALVNAVIPAIRTYVDLSPGEFDSFKDIMKLYEGGIQLPKIPALEDLRKQFPLELVKDVLPVGGDYLLKLPMPQIIKEDKTGWMTDEEFGREILAGVNPMLVKRLTEFPPRSSLDPSKYGDHTSTIREADLENKLEGLTVQQALHGNRLYILDHHDNFMPFLVRVNSLEGNFIYATRTVLFLRGDGTLVPVAIELSLPELRDGLTTAKSTVYTPKSTTGAEAWVWHLAKAYANVNDYCWHQLISHWLNTHAVMEPFVIATNRQLSVTHPVHKLLLPHYRDTMNINSNARQMLVNAGGIFETTVFPRQYAFEMSSVIYKDWNFTEQALPDDLIKRGMAVADPSSPYKVRLLVEDYPYASDGLAIWHAIEQWVTEYLAVYYPNDGVLRADVELQAWWKEAREVGHADLKDAPWWPKMQTVAELVKACTTIIWIASALHAAVNFGQYPYAGYLPNRPSVSRKPMPAPGSDEYAELERKPEKVFVRTITSQFQALVGISLLEILSSHSSDEVYLGQRDTKEWTSDAKAQEAFKRFGARLTEIEKRVVTMNADPRLKNRNGPAEFPYTLLYPNTSDTKGDAAGITAKGIPNSISI

SEQ ID NO: 342698 - protein, 38 aa, Zea mays
  Clone ID: MRT4577_75706C.1.pep
SARGQFHLPVLTHTPWIRCREGFMPQRELKTKRTTVAI

SEQ ID NO: 342699 - protein, 127 aa, Zea mays
  unsure (1)..(127): unsure at all Xaa locations
  Clone ID: MRT4577_75707C.1.pep
RVIGPLVQFLDDXDVPVIKEAVVALTKFACPENPLPVNPSRAIVDAGGARPLVQLVSLGDQLQIEALILLCYIPLHVPENKELAQAGVLPVFLWGSKQAPMGQDLRVXALLPETKARLDLFQSRAFR

SEQ ID NO: 342700 - protein, 101 aa, Zea mays
  Clone ID: MRT4577_75708C.1.pep
FGSRSKAAFAGAVGSLRWRGYVLRGHLSKKLSLDLRLMNLMVPKEEAVVIYVRLLQILCDHGPLTDVTTYYHANDAGIPGLNTMTHMKILLKWMTARNVQK

SEQ ID NO: 342701 - protein, 79 aa, Zea mays
  Clone ID: MRT4577_75709C.1.pep
AVVNNADNPGPTRAVFSYPPSGTSPSLPLCLPRCCQMVCWREDLSPTPSRLRRVLWIQMAARQSPSLTVPCNSLGRHHA

SEQ ID NO: 342702 - protein, 157 aa, Zea mays
  Clone ID: MRT4577_7570C.1.pep
MASLSSKHHVLIQVLLARGPLSERDFHAFIDGAFGKNTALGTKRLASEDLANDWDNKRLNPGNDNYPLSTGAANNLFLGIEQGAGSSNGQSAFPKFDNGSSMALPSGQGMSGLMGKGAKWRDGDWLCNNCNNHNYASRAFCNRCKTQKESAVHPGVL

SEQ ID NO: 342703 - protein, 63 aa, Zea mays
  unsure (1)..(63): unsure at all Xaa locations
  Clone ID: MRT4577_75710C.1.pep
AGFSNLLTYIPSQMATSDNIITVTVMLFLGSIYCSTPHVSIWXKLFEASGFPYNTGPILPLSL

SEQ ID NO: 342704 - protein, 75 aa, Zea mays
  Clone ID: MRT4577_75711C.1.pep
KKKNTKNKNINKNNKKKGLPFYSFQVYDWKNPGVTYFIGHPKKNPFASFLKNSKGQNLWLFQIIRYSEYSFLPPF

SEQ ID NO: 342705 - protein, 105 aa, Zea mays
  Clone ID: MRT4577_75712C.1.pep
TSLWATCTYSLLVGSGEGVVEQPIIVPMHFFFHVHHLKPPFSQIQMLHSPELTVCVCVCMWEGGVHFNLRCPHVGSFFYLFFTTMMAWESMCFLFYIFQPSVCQN

SEQ ID NO: 342706 - protein, 50 aa, Zea mays
  Clone ID: MRT4577_75713C.1.pep
MVRAEKRAGDGCSGGGEGQVEVEVGMGMDGKGVTECRICQEEGQEAAMDS

SEQ ID NO: 342707 - protein, 116 aa, Zea mays
  Clone ID: MRT4577_75714C.1.pep
PRVRPRVRRRVLSIRKRMVGVLLSNTAPVRINSFSTGQRNAVPRSIGAKASDAAIYIYIYIYLCMYMYIGDSCSELLTRWVYPSSTTAFALAATLNWRHARSALGTSLHGKPPRSF

SEQ ID NO: 342708 - protein, 156 aa, Zea mays
  Clone ID: MRT4577_75715C.1.pep
MERCGSWDCDAAAAQKAVPAPFLTKTYQLVDDPATDHIVSWGDDRVSTFVVWRPPEFARDILPNYFKHNNFSSFVRQLNTYGFRKVVPERWEFGNEFFRKGEKQLLCEIHRRKTSTSAAPPSPPPFFAAPHFPLFHPDAPHHHHHHQFVGGGDDGA

SEQ ID NO: 342709 - protein, 75 aa, Zea mays
  unsure (1)..(75): unsure at all Xaa locations
  Clone ID: MRT4577_75716C.1.pep
MARTAATKLVLVALVAAMLLVASDAAISCGQVNSALASCVSYAKGXGASPPGACCSGVRRLAGLARSTADKQAAC

SEQ ID NO: 342710 - protein, 195 aa, Zea mays
  unsure (1)..(195): unsure at all Xaa locations
  Clone ID: MRT4577_75717C.1.pep
MERCGSWDCDAAAAQKAVPAPFLTKTYQLVDDPATDHIVSWGDDRVSTFVVWRPPEFARDILPNYFKHNNFSSFVRQLNTYXVAFALGLGLAKPWRPRGARTDGDRRXAMLQRAIMQGFRKVVPERWEFGNEFFRKGEKQLLCEIHRRKTSTSAAPPSPPPFFAAPHFPLFHPDAPHHHHHHQFVGGGDDGAVAA

SEQ ID NO: 342711 - protein, 81 aa, Zea mays
  unsure (1)..(81): unsure at all Xaa locations
  Clone ID: MRT4577_75718C.1.pep
GGKRPPPGGGTFWALPGPGGTQTQREPAXGLNKGPPKLGXPRPPPGNNWPGPPLGGGPPWFSPPGPPRGPPPPPGPPGGWG

SEQ ID NO: 342712 - protein, 400 aa, Zea mays
  Clone ID: MRT4577_75719C.1.pep
MTAYLPIVIEQDALQWLRHLPRHCIDDWGDFSRRFTANFQSLSDKPAQPWDLKSIKRRGDETLRSYLKRFQTMRNRIPEGGPRGGERTLDDILDAQCPYHKDMCHTLRNCRDFKHSVGHGRPFQPLPPPPRGGPEEPRQPQQQEEGGGGAFPRVDREILVATTGPPAPYRWSEHPITFTRADQWLNFDHPGKYPLLVDPVIRESRVKKVLVDGGSSINVTFPWTLQGLGVHLKELHESDTPFFGIVPTEGEYPLGHIYMPVTFGTPDNYRTEFLRFEVANFDCGYNAIIGRPGLAKFMAIPHYTYMILKMPGPQGIITVRADLQGAAECFRVAIQAALTTKPSTTSSTQVNSKPEEDLAAPANEAQATTSMRPTEETKRINLGFADERKTAIISSSLDDK

SEQ ID NO: 342713 - protein, 99 aa, Zea mays
  Clone ID: MRT4577_7571C.1.pep
MSGGGGGAGAGSSSGGGGGGGGGGREGDWDCGSCGNRNYAFRSLCNRCKQPRLLVDPNTPRDSKWLPRAGDWICTGNTFSAALPFIITPALNHLHSSCF

SEQ ID NO: 342714 - protein, 619 aa, Zea mays
  Clone ID: MRT4577_75720C.1.pep
MAVTFHRKITLRPGSVFCFGTISSVADEEGTQHRIADPPRKKSPPTTSENVGAGERDPEQPVSRDEVSEIGETPEERVFREQRNSRQRDRRRAQEQAKQEARQRRENPLFGRNLNPDFARAMNTPSEVGGDPEGWLAVYTTAARAAGASEDVMTAYLPIVLGQDALQWLRHLPRHCIDDWSDFSRCFTANFQSLSDKPAQPWDLKSIKRWRDETLQSYLKRFQTMRNRIPEVTEAAVIEDFYRGSNDSAFVRAILQKTSTTSEQLFREANLYITADERAQDLIEGAKPVPAAPRRDTNQQPDKRWEKRPREEVHAAGPPASRARGGPRGGERTLDDILDAQCPYHKDMRHTLRNCRDFKHFVGHGRPFQPLHPPPPRGGLGEPRQPQQQEEGGGGAFPRVDREVNVIFGGKYPLLVDPVIRESTVKKVLVDGGSSINVTFPRTLQGLGVHLKELHGSDTLFFAIVPTEGEYPLGHIYMPVTFRTPENYRTEFLRFEVANFDCGYNAIIRRLGLAKFMAIPHYTYMILKMPGPQGIITVRADFQGTAECFRVAIQAALSTKPSTTSSVQANSKPEEDLAAPANEAQVATSMRPTEETKRINLGFADERKTAIISSSLDDK

SEQ ID NO: 342715 - protein, 430 aa, Zea mays
  unsure (1)..(430): unsure at all Xaa locations
  Clone ID: MRT4577_75721C.1.pep
MDSLGLPTPRAIDDCSLRQPTIFYHSLTRRTIYDTLSTAVGTHEAPSMLRVNDGTRTRFAAGRSTTGIMASQLGARPPELXVATASTGGPRGGERTLDDILDTQCPYHKDMRHTLRNCRDFKHSVGHGRPFQPLPPPPPRGGPEEPRQPHQQEEGGAFPLVDREVNVIFGRHGSQENKRQQKLNDRQILVATTGPPAPYRWSEHPITFTRANQWLNFDHPGKYPLLVDPVIRESRVKKVLVDGGSSINVTFPRTLQGLGVHLKELHESDTPFFGIVPTEGEYPLGHIYMPVTFGTPENYRTEFLRFEVANFDCGYNAIIRRPGLAKFMAIPHYTYMILKMPGPQGIITVRADFQGAVECFRVAIQAALTTKPSTISSTQANSKPEEDLAVPANEAQAATSMRPTEETKRINLGFADERKTAIISSSLDDK

SEQ ID NO: 342716 - protein, 880 aa, Zea mays
  unsure (1)..(880): unsure at all Xaa locations
  Clone ID: MRT4577_75722C.1.pep
MVVTFYSKITMRPGSVFCFGTISSVADEEGILHRIADPPEKKSPPTNSENVGEAQPPALRKKIFSGKSGAEGSLTRKTPLSISPTKEWTRIARKKETREKQVVLSVPLASKENGKKVATTAAPFYPDVLFIGRVESPTVSDDEPTAPGEEPPQRESRRRRNRRRNVRRHHAAGERDPEQPVSRDEVSEIGETLEERVFRERRNSRRRDRRRAQEQAEQDARQRRENPLFGRNLNPDFARAMNTPSEVGGVLARIADGLPRTPDAEGYRRLFTQAANHLLPLAHPPNDLRHAINSRRDARSSINASRERRHENEIRRREEYDRDHGIPTQSQATRTESATASTGGTTRGRSRNHHHNSPPRDRHRPRRQEDTCGVSALTPRLRAIQWPPNFKWLRHLPRHGIDDWGDFSRRFTTNFQSLSDKPAQPWDLKSIKRRGDETLRSYLKRFQTMRNRIPEVTEAAVIEDFYRGSNDSAFVRAILQKAPTTSEELFWEADLYITADEXSGPHRRSKACAGSTTTRREPATRQTLGEEASRRRGPRGGERTLDDILDAQCPYHKDMRHTLHNCRDFKHSVGHGRPFQPLPPPPPRGGPDEPRQPHQPEEGGGGAFPRVDGEVNVIFGGHGSQENKRQQKLNDRQILVAXPVLPCPYRWSEHPITFTRDDQWLNFDHPGKYPLLVDPVIRESRVKKVLVDGGSSINVTFPRTLQGLGAHLKELHKSDTPFFGIVPMEGEYPLGHIYMPVTFGTPENYRTEFLRFEGANFDCGYNAIIGRPGLAKFMAIPHYTYMILKMPGPRGIITVRADFQGAAECFRVAIQAALTTKPSTVPSTLANSKPEEDLAVPANEARAATSMWPTEETKRINLGFADERKTAIISSSLDDK

SEQ ID NO: 342717 - protein, 882 aa, Zea mays
  unsure (1)..(882): unsure at all Xaa locations
  Clone ID: MRT4577_75723C.1.pep
MAVTYYSKITLRPGSIFCFGTISSVADEEGTLHRIADPPEKKSPPTNSENAGETQPLALRRKIVSGKSGAEGPLTRRTPLSTSPTREWTQIARKKETKGKQVVLSIPPPSKENRKKVATTAVPFYPDVLFIGRAESPTVSDDEPTAPGEEPPQRESRRRRNRRRNVRRHHAAGERDPKQPVSRDEVSEIGETPEERVFRERRNSRRRDRRRAQEQAEQDARQRRENPFFGRNLNPDFARAMNTPSEVRGVLARIADGLPRTPDAEGYRRLFTQAANHLLPLAHPPNDLRHAINSRRDARSSINASRERRHENKICRREEYDRDHGIPAQSQATRTESATASTGDPGGWLAVYTTAARAAGASEDVMTAYLPIVLGQDALQWLRHLPRHCIDNWGDFSRRFTANFQSLSDKLAQPWDLKSIKRRGDETLRSYLKRFQTMRNRIPEVTEAAVIEDFYRGSNDSAFVRAILQKAPTTSEELFREADLYITADERXGPHRKXAKPAPAAPRRDANQQPDKRWEKRPREEVHAAGPPASRARGGPHGGERTLDDILDAQCPYHKDMCHTLRNCRDFKHSVGHGRPFQPLPPPPPRGGPDEPRQPHQQEEGGGGAFPRVDREVNVIFGGHESQENKRQQKLNDRQILVATTGPPAPYRWSEHPITFTREDQWLNFDHPGKYPLLVDPVIRESRVKKVLVDGGSSINVTFPRTLQGLGVHLKELHESDTPFFGIMPTEGEYPLGHIYMPVTFGTPENYRTEFLRFEVANFDYGYNAIIGRPGLAKFMVIPHYTYMILKMPGPQGIITVCADFQGAAECFRVAIQAALTTKSSTVSSAQANSKPEEDLAVPANEAQATTSMRPTEETKRINLGFADERKTAVISSSLDDK

SEQ ID NO: 342718 - protein, 67 aa, Zea mays
  Clone ID: MRT4577_75724C.1.pep
FLGVQTLVLRVSIHCEGCKKKVKKVLQGVDGVSSVLQHFHSAVFTCPSILLAPVKGIFLSFHRFAFF

SEQ ID NO: 342719 - protein, 74 aa, Zea mays
  Clone ID: MRT4577_75725C.1.pep
NKQGIRLSFTYISRSCYNTLPETQDIRTTTARGSKKMLAVNHASVQARLGSGSSFASTLVAHPATTTEVSSACA

SEQ ID NO: 342720 - protein, 851 aa, Zea mays
  unsure (1)..(851): unsure at all Xaa locations
  Clone ID: MRT4577_75726C.1.pep
MAVTFNSKITMRPGSVFCFGTISSIADEEGTLHRIADPLKKKSPPTNPKNAGEAQPPALRKKIVFGKPGAESSLTRKTPLSTSPTKEWTRIARKKETREKQVVLSVPPASKESGKKVATTAAPFYPDVLFIGRVESPAVSDDEPTAPGEEPPQRESRRRRNRRRNVRRHHAAGERDPEQPVSRDEVSEIGETPEERVFREQRNSRRRDRRRAQEQAEQDARQRRENPLFGRNLNPNFARAMNTPSEVGGSQATRTESATASTGGTTRGQSRNHNHNSPPRDRHRPRRQEDTCGVSALTPRLRAIQWPPNFKVSNVDKYEPKQDPWGWLAVYTTAARAAGASEDVMTAYLPIVLGQDALQWLRHLPRHCIDDWGDFSRRFTANFQSLSDKPAQPWDLKSIKRRGDETLRSYLKRFQTMRNRIPEVTEATVIEDFYRGSNDSAFVRAILQKAPTTSEELFREADLYITADEXSGPHRRSKXPVPAAPRRDANQPPDKRWEKRPREEVHAAGPPASRARGGPRGGERTLDDILDAQCPYHKDMRHTLRNCRDFKHSVGHXADPSNLYLLLRREEDRMNRDNLISRRREEEELSHASTGXENKRQQKLNDRQILVATTGPPTPYRWSEHPITFTREDQWLNFDHPGKYPLLVDPVIRESRVKKVLVDGGSSINVTFPRTLQGLGVHLKELHESDTPFFGIVPTEGEYPLGHIYMPVTFGTPENYRTEFLRFEVANFDCGYNAIIGRPGLAKFMAIPHYTYMVLKMPGPQGIIIVRADFQGAAECFRVAIQAALNTKPSTVSSIPANSKPGESLVVPANEAQAATSMRPTEDTKRINLGFADERKTAIISSSLSDK

SEQ ID NO: 342721 - protein, 79 aa, Zea mays
  Clone ID: MRT4577_75727C.1.pep
PQCGSHRGMWQGPLEGAATSVGGQANKSLDGRGANQHRTLDHAHYTDCQKFLCRSRHHKGNFNEHWRRHLTHGDWLRTL

SEQ ID NO: 342722 - protein, 789 aa, Zea mays
  unsure (1)..(789): unsure at all Xaa locations
  Clone ID: MRT4577_75728C.1.pep
MAVTINSRITFRPGSMFCFGTISSIADEKGILHRVADPPGRKPPPTNSENTGEALPSALRKKIATTATPFYPDVLFIGRVESPPVFDDEPTAPGEEPPQRESRRRRNRRRNIRRHHQAGERDPEQPVSRDEVSEMGETPEERVFRERRNSRRRDRRRAQEQAEQDARQRRENPLFGHNLNPDFARAMNTPSEVGGVLARIADGLPRTPDAEGYRRLLTQAANHLLPLAHPPNDLRHAINSRRDARSSINASRERRHENEIHRREEYDRDHGIPTRSQDTRAESTTASTGETARGRSRNHNNYSPPRDRHHPRRQEDTCGVSALTPRHRAIQWPPNFKVSNVDKYEPKQDPGGWLAVYTTAARAAGASEDVMTAYLPIVLGQDALQWLRHLPRHCIDDWGNFSRRFTANFQSLSDKPAQPWDLKSIKRRGDETLRSYLKRFQTMRNRIPEVTEAAVIEDFYRGSNDSAFVRAILQKAPTTSEELFREADLYITADERAXTSSEERSPHWQRHDATXPATXNAGRRDRAKRCTPPDHLXSRARGGPRGGERTLDGILDAQCPYHKDMRHTLRNCRDFKXRWARPTLPTSTPSSXRGGPEEPRQPQQQEEGGGGAFPRVDREVNVIFGGHGLQENKRQQKLNDRQILVATTGPPAPYRWSEHPITFTRADQWLNFDHPGKYPLLVDPVIRESRVKKVLVDRGSSINVTFPRTLRGLGVHLKELHESDTPFFGIVPTEGEYPLGHIYMPVTFGTPENYRTEFLRFEVANFDCGYNAIIGRPGLAKFMAIPHYT

SEQ ID NO: 342723 - protein, 692 aa, Zea mays
  unsure (1)..(692): unsure at all Xaa locations
  Clone ID: MRT4577_75729C.1.pep
MFFSSGEWSRPPSPTTRRPRPEKNHLSGTGFEIFGDITRPENGIRSNLFRGTRLPTPRAIDDCSPRQPTIFYRSLTRRTIYDTPSTVVGTHEAPSTLRVNDGMRTRSATGRSTTGIMASQLGVRQPEPSQQRPRLAWPXNFKVSNVDKYEPKQDPGGWLAVYTTAARAAGASEDVMTAYLPIVLGQDALQWLRHLPRHCIDDWSDFSRRFTANFQSLSDKPAQPWDLKSIKRRGDETLRSYLKRFQTMRNRIPKVTEAAVIEDFYRGSNDSAFVRAILQKAPTTSEQLFREANPYITADERAQDLIGGAKPTPTAPRRDTNQQPDKRWEKRPREEVHAAGPPASRARGGPRGGERTLDDILDAQCPYHKDMRHTLWNCRDFKHSIGHGRPFQPLPPPPPRGGPEEPRQPQQQEEGEGGAFPRVDREVNVIFDGHGSQENRRQQKLNDHQILVATTGPPAPYRWSEHPITFTRADQWLNFDHPGKYPLLVDPVIRESRVKKVLVDEGSSINVTFPRTLQGLGVHLKELRESDTPFFGIVPTEGEYPLGHIYMPVTFGTPENYRTKFLRFEVANFDCGYNAIIGRPGLAKFMDIPHYTYMILKMPGPQGIITVRADFQGAAECFRVAIQAALTIKLSATSSAQVNSKPEEDLTAPANEAQAATSMRPTEETKRINLGFADERKTAIISSSLDDK

SEQ ID NO: 342724 - protein, 91 aa, Zea mays
  unsure (1)..(91): unsure at all Xaa locations
  Clone ID: MRT4577_7572C.1.pep
MSFPIKRQAMDLMKLMMSYFMVSMVYDRMHVSFAEIRVPNEDFYQGTLIRRHKXIADTYSYXSTSIRYISTIYYPNITEKIXEXCLDVINQ

SEQ ID NO: 342725 - protein, 839 aa, Zea mays
  unsure (1)..(839): unsure at all Xaa locations
  Clone ID: MRT4577_75730C.1.pep
MVVTFHSKITMRPGSIFCFGTISSVADEEGILHRLADLPERKSPPTNSENAGKTIPPALRKKIVSGEAGARSSLTRKTPLSTSPTKEWTRVVRKKEIRGRPVVLPVPPTSKENGKKVVAAAIPFYPDVLFIGRAESPAVSDDEPTAPGEEPPQRESRRRRNRRRNVRRHHAAGERDPEQPVSRDEVSEIGETPEERVFRERRNSRRRDRRRTQEQAEQDARQRRENPLFGRNLNPDFARAMNTPSEVGGVLARIADGLPRTPDAEGYRRLFTQAANHLLPLAHPPNDLRHAINSRRDARSSINASRERRHENEIRHREEYDRDHGFPTQSQATRTESTTASTGGTTRGRSRNHHRHSPPRDRRHPRRQEDTCGVSALTPRLRAIQWPPNFKVSNVDKYEPKQDPGGWLAVYTTAARAAGASEDVMTAYLPIVLGQDALQWLRHLPRHCIDDWGDFSRRFTANFQSLSDKPAQPWDLKSIKRRGDETLRSYLKRFQTMRNRIPEVTEAAVIEDFYRGSNDSAFVRAILQKAPTTSEEXSGKPTSTSPLTSGPRTSSEEQSPHRRHHDAARTSRPTSAXEKRPREEENKRQQKLNDRQILVATTGPPAPYRWSEHPITFTREDQWLNFDHPGKYPLLVDPVIRESRVKKVLVDGGSSINVTFPRTLQGLGVHLKELHELDTPFFGIVPTEGEYPLGHIYMPVTFGTPDNYRTEFLRFEVANFDCGYNAIIGRPGLAKFMAIPHYTYMILKMPGPQGIITVRADFQGAAECFRVAIQAALTTKPSTVPSTPANSKPEEDLAVPANEAQAATSMRPTEDTKRINLGFADERKTAIISSSLSDK

SEQ ID NO: 342726 - protein, 120 aa, Zea mays
  unsure (1)..(120): unsure at all Xaa locations
  Clone ID: MRT4577_75731C.1.pep
GRSSLCLACSLDSSVRTANCTHTGGTCGCQPPAARDLPPPAHLPPAEHLPPTRHVPPPVHLPPSGHLXPARHATSHAIILPSSPCRYPTEAARAQDHAQAHRRARQQSDASPCHVAGTCG

SEQ ID NO: 342727 - protein, 880 aa, Zea mays
  Clone ID: MRT4577_75732C.1.pep
MAVTFHSKITMRPGSIFCFGTISSVADEEGILHRLADLPKQKSPPTNSENAGKTLPPALRNKIVSGEAGARSSPTRKTPLSTSPTKEWTQVMRRKEIRERPVVLPVPPTSKENGKKVAAAAIPFYPDVLFIGRAESPAVSDDEPTAPGEEPPQRESRRRRNRHRNVRRHHAAGERDPEQPVSRDEVGGVLARIADGLPRTPDAEGYRRLFTQAANHLLPLAHPPNDLRHAINSRRDARSSINASRERRHENEIRRREEYDRDHGFPTQSQATRTESATASTGGTTRGRSRNHHRHSPPRDRRHPRRQEDTCGVSALTPRLRAIQWPPNFKVSNVDKYEPKQDPGGWLAVYTTAARAAGASEDVMTAYLPIVLGQDALQWLRHLPRHCIDDWGDFSRRFTANFQSLFDKPAQPWDLKSIKRRGDETLRSYLKRFQTMRNRIPEVTEAAVIEDFYRGSNDSAFVRAILQKAPTTSEELFREADLYITADERAQDLIGGAKSAPAAPRRDANQPPDKRWEKRPREEVHAAGPPASRARGGPHGGERTLDDILDAQCPYHKDMRHTLRNCRDFKHSVGHGRPFQPLPPPPPRGGPDEPRQPHQPEEGGGGAFPRVDREVNVIFGGHGSQENKRQQKLNDRQILVATTGPPAPYRWSEHPITFTREDQWLNFDHPGKYPLLVDPVIRESRVKKVLVDGGSSINVTFPRTLQGLGVHLKELRESDTPFFGIVPTEGEYPLGHIYMPVTFGTPDNYRTEFLRFEVANFDCGYNAIIGRPGLAKFMAIPHYTYMILKMPGPQGIITVRADLQGAAECFRVAIQAALTTKPSAVPSTPANSKPEEDLAVPTNEAQAATSMRPTEDTKRINLGFADERKAAIISSSLNDK

SEQ ID NO: 342728 - protein, 82 aa, Zea mays
  Clone ID: MRT4577_75733C.1.pep
YAICWRSCSCRTFILRQTTPYRLLRHLLRERSSITNVMTNENLMPSTFLTSGASPDFDNRLRILLSIRSLLTDPNPYKPLGH

SEQ ID NO: 342729 - protein, 107 aa, Zea mays
  unsure (1)..(107): unsure at all Xaa locations
  Clone ID: MRT4577_75734C.1.pep
MSGSECLHFKKKKKKKKKKGNRSTGLKLTYSRTRPCNSIIVPPRHIXLTDCPQRYNWENPKTTQLQNLTAHPHIPIWPASEXAQTDRPIEHSNRSAWLNGQRHVALH

SEQ ID NO: 342730 - protein, 191 aa, Zea mays
  unsure (1)..(191): unsure at all Xaa locations
  Clone ID: MRT4577_75735C.1.pep
MGSKKMYLEYCNNYNHYLRRRRVLVFTTIRIVLLWYKLQLNRLNKKHTKYGSLLQRDLERERRLDRLYHGTEANCISELRMRKFVFHRLCGHLRTXGLLVDSINVSIEEQVAMFMKFVGHRWTNKIWVGFEFLRSGETVSRYFNAVLDALCVLSRDLITMRTTETHPKISXXPGRFHPYFEKCIGALDGTH

SEQ ID NO: 342731 - protein, 91 aa, Zea mays
  Clone ID: MRT4577_75736C.1.pep
SWPSPLVSGQGGSTSNHQVRRMAPTFMERALEQAMLGLDNLEVPVGSVLVEDGKVLPSGSYKTCATGNATRHAQREAIGFQVQEKLGLALS

SEQ ID NO: 342732 - protein, 102 aa, Zea mays
  Clone ID: MRT4577_75737C.1.pep
MGSKKMYLEYCNNYNHYLRRRRVLVFTTIRIVLLWYKLQLNRLNKKHTKYGSLLQRDLERERRLDRLYHGTEANCISELRMRKFVFHRLCGHLRTHGLLVDS

SEQ ID NO: 342733 - protein, 117 aa, Zea mays
  Clone ID: MRT4577_75738C.1.pep
LEHHTPSSTIRAAVVDQRSWLRSTPEEDGRAARRSPARASRRRPSLVTLAEISPRSACRRSGHEVLVRARPRRARPRRARKRRARLRRVAPGRAHPHQDCLRRAAFGCVDAAANSRS

SEQ ID NO: 342734 - protein, 66 aa, Zea mays
  Clone ID: MRT4577_75739C.1.pep
AFPSFDHRSSGRPPCDPVSASCAGTRQILPKTLSRKKLRRAARTFSRLTPLSKPLLILIAGPQPYL

SEQ ID NO: 342735 - protein, 110 aa, Zea mays
  unsure (1)..(110): unsure at all Xaa locations
  Clone ID: MRT4577_7573C.1.pep
GRWWATCALLALAESTTFTHTSGECGXQPPPWGHLPPTAHMTPPVHLPPSEHIGPPGHLSPTVHLPPPVHVPAPDHLTTPRCHYATEPRRPHTXPQPHPCPCQQPHSSPC

SEQ ID NO: 342736 - protein, 88 aa, Zea mays
  Clone ID: MRT4577_75740C.1.pep
FLCYQAFQRHRLAAVLIQRVVRGWLARKRLLGSSSLRTYTRLCVVDQSQKRKCYQSLELNIVLDSVIRLQRCWRKFLLRQSVKTYVIS

SEQ ID NO: 342737 - protein, 194 aa, Zea mays
  Clone ID: MRT4577_75741C.1.pep
LHGTLYDLLHREQNGSLSPLSWEERLRISTEIAGALTYLHSAASVSILHRDVKCMSVLLTDSYTAKVSDFGASRLIPIDQTHLVTAVQGTFGYLDPEYYHTGQLNEKSDVYSFGVILVELLTRRKPIIQNEHGEKQNLSNYFLWAMRERPLEETVDPQILEEANEEGVLCMAQLAEECLCLTRVQRPTMKDVEM

SEQ ID NO: 342738 - protein, 355 aa, Zea mays
  Clone ID: MRT4577_75742C.1.pep
MKCKMASSSRVVAAAAVLVAFCAAALSSATVTVNEPIVNGLSWSFYDASCPSVEGIVRWHVADALRRDIGIAAGLIRIFFHDCFPQGCDASVLLSGSNSEQKQGPNQTLRPEALKLIDDIRAAVHAACGPKVSCADITTLATRDAVVASGGPFFEVPLGRRDGLSPASSDQVFTLPGPDFDVPTLLAAFKNRSLDTADLVALSGAHTVGRGHCSSFTSRLPPNADDGTMDPAFRRTLAAKCAKDASAAQVLDVRTPNAFDNKYYFDLIAKQGLFKSDQGLINDQTTKRAATRFALNQAAFFDQFARSMVKMSQMDVLTGNAGEVRLNCAVRNAARVVSADQLETAAGDEGLAADA

SEQ ID NO: 342739 - protein, 65 aa, Zea mays
  Clone ID: MRT4577_75743C.1.pep
CSALGLDVVAAVDHKPRASHSMFDVNSSGWELALGTAPSTQIIQAVETRLAGGFDELLINRIYKD

SEQ ID NO: 342740 - protein, 133 aa, Zea mays
  unsure (1)..(133): unsure at all Xaa locations
  Clone ID: MRT4577_75744C.1.pep
GCDASVLLSGSNSEQKQGPNQTLRPEALKLIDDIRAGVHAACGPKVSCADITTLATRDAVVAVSTRRPCIAAGTYTYIRPTYYNIINQLTTQQNNAYXSGGPFFEVPLGRRDGLSPAXSDQVFTLPGPDFDVP

SEQ ID NO: 342741 - protein, 232 aa, Zea mays
  unsure (1)..(232): unsure at all Xaa locations
  Clone ID: MRT4577_75745C.1.pep
IHRGRTGRPRLPLFLCSPVRPLPPLVGVVAAARIIVRASLPRPPTAPPQERATQRFDSGRREWRRRRPSPPPTSPASPLPHRPRSTTTRTTSSASAAPAAAXQRLVAMAGSGKFFVGGNWKCNGTKESISKLVSDLNAATLESDVDVVVAPPFIYIDQVKSSLTGRIEVSAQNTWIGKGGAFTGEISAEQLVDIGCQWVILGHSERRHVIGEDDEFIGKKAAYALEPNLKVM

SEQ ID NO: 342742 - protein, 269 aa, Zea mays
  unsure (1)..(269): unsure at all Xaa locations
  Clone ID: MRT4577_75746C.1.pep
MVPSQVTREAKDMKPSTMVGSTSSSSCNHSRKRRLASRSGTAKSAVRTPSSRYASTNCACVRSTSERVEASALSTQLRNALNLASTSSVRWLARLLSARATLASARAACALAMAWFASLLSSASWRRRSAFSASMAATFSASLWFLLSAADFSRTASACCARRLSTLAATSAVRTPDATRSAKSAAXASVAASAAATAAATPPSADGTWSPPRPWRRQLTESRRSRRRRPTGLARHPSPQPPLLATWLPPKAGQQPIAPHPTQQNNPRH

SEQ ID NO: 342743 - protein, 95 aa, Zea mays
  unsure (1)..(95): unsure at all Xaa locations
  Clone ID: MRT4577_75747C.1.pep
GELSWKXIVAIFLDDPKAFFFNHVDNFXKHFPGTLTPIKDWFKDSKIPDGKPANKFGFGNKPPNKENPLKVIQKPTESWEKLVKKNIPPGKLSLA

SEQ ID NO: 342744 - protein, 69 aa, Zea mays
  unsure (1)..(69): unsure at all Xaa locations
  Clone ID: MRT4577_75748C.1.pep
RLSSLSVFLSFGRFCPRAPLALRHRLVFXXQAFSPPPVLLAQRRIPLCSCACPLRPVCSPVFYLRLLLA

SEQ ID NO: 342745 - protein, 934 aa, Zea mays
  Clone ID: MRT4577_75749C.1.pep
MSGELAKKEMETGNKPATSHGKASSGESRNKEKKREKKKEKKTSSHKSHRSGDKIKKMRKVVYYETDTSSPSTFGSDAPSITSKRHERKKFSKIPLHYPHTSRHTPLLSVPLGKPPTFDGEDYARWSDLMKFHLTSLHKSIWNVVEFGAQEPSVGDEDYDEDEVAQIEHFNSQATTILLASLSREEYNKVQGLKNAKEVWDVLKTAHEGDELTKITKRETIEGELGRFRLRQGEEPQDMYNRLKTLVNQVRNLGSKKWDDHEVVKVILRSLIFLNPTQVQLIRGNPRYTLMTPEEVIENFVSFEFMIKGSRKINELDGPSMSEAQPVAFKATEEKKEESTSSRTPIDASKLDNEEMVLVIKSFHQILKQRRGKDYKPRSKKVCYKCGKPGHFIAKCPISSDSDRGDDKKGRRKEKKRYYKKKGGDTHVCREWDSDESSSDSSSDEDAANIAVTKGLLFPNVGHKCLMAKDGKKKKVKSKSSTRYESSSDENASDEEDNLRTLFANLNMQQKEKLNELISAIHEKDDLLDSQEDFLIKENKKHVKVKNTYALEVEKCEKLSSELSTCHETIDNLRNENSNLLAKVDSIACNVSIPNLRNDNDDLLAKIEELNISFVSLRKENEKLIAKAKDFDVCNVTISDLRDKNDILRAKIVELNSCKPSTSIVEHTTICTTCRDVNIDAIHDHMALIKQQNDHIAKLDAKIAEHDLENEKFKFARSMLYRGRRPGIKDGIGFQQGGNVKLNAPPKKLSNFVKGKAPMPQDNEGYILYPVGYPEDKIRKIHSRKSHSGPNHAFMYKGETSSSRQPTRAKLPKKKIPNASNEHSFSFKTFDASYVLTNKSGKVYASGGSSWIIDSGCTNHMIGEKKMFSSYEKNQDPQRAITFGDGNQGLVKGLGKIAISPGHWMLPNTLPTKLMQHKKWNRERKYCKIWQHLP

SEQ ID NO: 342746 - protein, 56 aa, Zea mays
  Clone ID: MRT4577_7574C.1.pep
FLFFFFFFFFLWVFFFFFAFSSETPPRGQIPIAPQWDEFSYPYDDDGETPNWGPRP

SEQ ID NO: 342747 - protein, 603 aa, Zea mays
  Clone ID: MRT4577_75750C.1.pep
MSGEFAKKEMETGDKPTTSHGKASSEESRNKEKKREKKKEKKTSSHKSHRSGDKIKKMRKVVYYETDTSSPSTSGSDAPSITSKRHERKKFSKIPLRYLRITKHTPLLSVPLGKPPTFDGEDYARWSDLMRFHLTSLHKSIWDVVEFGAQHFNSQATTILLASLSREEYNKVEGLKGAKEVWDVLKTAHEGDELTKITKRETIEGELGRFRLRQGEEPQDMYNRLKTLVNQVRNLGSKKWDDHEVVKVILRSLIFLNPTQVQLIRGNPRYTLMTSEEVIGNFVSFEFMIKGSRKINELDGPSTSEAQPVAFKATKDKKEEYTPSRTPIDASKLDNEEMALVIKSFRQILKQRRGKDYKPRSKKVCYKCGKPGHFIAKCPISSDSDKGDDKKGRRKEKKRYYKKKGGDTHVCREWDSDESSSDSSDDEDAANIAVTKGLFFPNVGHKCVMAKDGKKKKVKSKSSTRYESSSDENASDEEDNLRTLFANLNMQQKEKLNELISAIHEKDDLLDSQEDFLIKKNKKHVKVKNAYALEVEKCEKLSSELSTCHETIDNLRNENVSLNAKVVSHVCDVLIPNPRNNDDDLLARIKELNTSLASLRSEK

SEQ ID NO: 342748 - protein, 94 aa, Zea mays
  unsure (1)..(94): unsure at all Xaa locations
  Clone ID: MRT4577_75751C.1.pep
MCLLPIHFTQCSQYNIAVFLAPTSHHSCTSLREIPHLQPYRIQQAFATGISPLSPLLLQQPXSLLQQLSSVHLIIQIIYSQQLQQLLLRNTAIY

SEQ ID NO: 342749 - protein, 1018 aa, Zea mays
  Clone ID: MRT4577_75752C.1.pep
MSGDHAKKDMETGEKPTTSNEKALSGESRNKEKRKEKKKEKKTSSHKSHRSGDKIKKMRKVVYYETDNSSPSTSGSDAPSITSKRHERKKFSKIPLHYPCTSRHTPLLSVPLGKPPTLTVRLARWSDLMKFHLTSLHKSIWNVVEFGAQVPSVGDEDYDEDEVAQIEHFNSQATSILLASLSREEYNKVQGLKSAKEVWDMLKTAHEGDELTKITKRETIEGELGRFRLRQGEEPQDMYNRLKTLVNQVRNLGSKKWDDHEVVKVILRSLIFLNPTQVQLIRGNPRYTLMTLEEVIGNFMSFEFMIKGSRKINELDSPSTSEAQSVAFKATEEKKEESTPSRQPIDASKLDNEEMALVIKSFRQILKQRKGKDYKPRSKKVCYKCGKPGHFIAKCPISSDSDRGDDKKGRRKEKKRYCKKKSGDAHVCREWDSDESSSDSSFDEDAANIAVTKGLLFPNVGHKCLMAKDDKKKKVKSKSSTRYESSSDDNTSDEEDNLRTLFANLNMQQKEKLNELISAIHEKDNLLDSQEDFLIKENKKHVKVKNAYALEVEKCEKLSSELSTCHETIDNLRNVNSNLLAKVDSNICNVSIPNLRNNNDDLLAKIEELNISLASLRDENEKLLAKAKDFDVCNTTISDLRSRNDILHAKVVELKSCKPSTSTIEHTSICTRCRDVNIDAIHDHMALIKQQNDHIAQLNAKINEHDLENEKFKFARSMLYSGRHPGIKDGIGFQKGDNVKLNAPPKKLSNFVKGKAPMPQDNEGYILYPAGYPESKIRRIHSRKSHSGPNHAFMYKGETSSSKQPTRAKLPKRKTPSASNEHSFSFKTFDAPYVLTNKSSKVVAKYVGGKHKGSKTCVWVPKVLVSNAKGPKTIWVYASGGSSWIIDSGCTNHMTGEKKMFSSYEKNQDPHEPLHSGMEIKTNMGWLWHRRLAHVGMKNLHKLLKGEHILGLTNVHFEKDRICSACQAGKQVGVHHPHKNIMTTDRPLELLHMDLFGPIAYISEREMCPWVISKYFGD

SEQ ID NO: 342750 - protein, 106 aa, Zea mays
  unsure (1)..(106): unsure at all Xaa locations
  Clone ID: MRT4577_75753C.1.pep
RTWTIREQSWXPVRSLKRRDSPXRDHXSAVRQGGVGLGNAXLGAXRPLLDXSPELTPQAAGRTPDAYRGGTRGHAPRQQATGSSQATYESPXNAXXTCALDXRKQS

SEQ ID NO: 342751 - protein, 93 aa, Zea mays
  Clone ID: MRT4577_75754C.1.pep
QNAQVGINRAKELLAADINVGLNDITVVSVTEGNWANSSLGNPEPGKFYMQMLMPGCVILLKANGQEYQYNTTNGATAILRSSQIGQTGFWPN

SEQ ID NO: 342752 - protein, 173 aa, Zea mays
  unsure (1)..(173): unsure at all Xaa locations
  Clone ID: MRT4577_75755C.1.pep
HVVTACSAANYYSPPEKFTLAPRVRRLLNLDMASISSVARTSQSFSHHXVXPHDARRTGVAASAVSRGRTLIAALALSYAXHSDSDCXLIHSGVPYAENALLRIRRAWTASXNTASSCYVTQPRXYKHDTNTFDEVEVCQQYTHVVWXDSTATXCARVHGIHDAVRPDHRSTY

SEQ ID NO: 342753 - protein, 41 aa, Zea mays
  Clone ID: MRT4577_75756C.1.pep
SETGTFLHSPRGLSRRYPNMAQNKNLLKEKETQGKNLASLG

SEQ ID NO: 342754 - protein, 38 aa, Zea mays
  Clone ID: MRT4577_75757C.1.pep
EGSVPAVTGGLLGNQRIGVIWWGSDGPALPRNLVHSLV

SEQ ID NO: 342755 - protein, 98 aa, Zea mays
  unsure (1)..(98): unsure at all Xaa locations
  Clone ID: MRT4577_75758C.1.pep
VVDIVYPFRLDEDPPVYKNSFVYLHQIIRLDFGCCVVARXRMSSQRSVEGATKFVLSELKFLQFFVGESMKHNASVVFAYSKDGAXTGSFVHFSHGHK

SEQ ID NO: 342756 - protein, 149 aa, Zea mays
  Clone ID: MRT4577_75759C.1.pep
LTVLVTLTGSPSRHRPDRTVHTKCEGRPSPSEWRRRPSFPSPSPPPSCPSSSCRSASSSSTGHSPASSSRPRLPPSSVFFLSTTAVPVPMSLPVLVAYSLGVFLFFFFLVTLFFGLLVFYFFFLYFFILFVLFFIFLYFLFILFLSFFF

SEQ ID NO: 342757 - protein, 299 aa, Zea mays
  unsure (1)..(299): unsure at all Xaa locations
  Clone ID: MRT4577_7575C.1.pep
MVVVGVGVLRCVLLPTVLVGLCGKWMXIGCSNNNYASRKNCKKCGLPKEEAAMPALQMAGMAMPAYATYIARLQSLAASASAYKMNFGMAANSPLQQQLLANANWSYGMAGRCNLLVGHLPTAARMGFQVVPKDWRNGDWLCSCGFHNYSSRTQCKECGAPIPSGIPSTTMKATTSDASSTLGTKRLASEELANDCDNKRLNPGNDNYPLSTAGANNLFLGIEQGAGSSNGQAAFSKFDYGSSMSLPSGQGMSGLIVKGAKWRDGDWLCNNCNNHNYASRAFCNRCKTQKESAVHPGVL

SEQ ID NO: 342758 - protein, 253 aa, Zea mays
  Clone ID: MRT4577_75760C.1.pep
QNIELDEVSGSSESTTLLAGAEESDNLNEDQGSDFGGIKSVGKLLAPKLIRATLLLWMAFFGNAFAYYGIVLLTSELSNGNRICAKEDVESVHSTNASLYKNVFISSFAEIPGSFLSAMIVDRFGRKRSMASMLFTSCVFLLPLVFSRTDILTRISLFGARLCISASFTIVYIYAPEIYPTAVRTTGIGIASSVGRIGGILCPLVAVALVHSCQQTTAILLFELVIFLSGLAVSFFPFETKGCRLNDTDVDMN

SEQ ID NO: 342759 - protein, 810 aa, Zea mays
  unsure (1)..(810): unsure at all Xaa locations
  Clone ID: MRT4577_75761C.1.pep
MAVTFHSKITLRPGSIFCFGTISSVADEEGTLHRIADPPEKKSPPTNSENVGEAQPPALRKKIVSGKSGAEGPLTRRTPLSTSPTREWTQIARKKETKGKQVVLSVPPPSKENGKKVATAAVPFYPDFLFIGRAESPTVSDDEPTAPGEEPPQRESRRWRNRRRNVRRHHAAGERDPEQPVSRDEVSEIGETPEERVFRERRNSRRRDRRRAQEQAEQDARQRRENPFFGRNLNPDFARAMNTPSEVGGAANHLLSLAHPPNDLRHAINSRRDARSSIIASRERRHENEIRRREEYDRDHGIPARSQATRTESATTSTSGTTRGRSRNHNNYSPPRDRHHPRRQEDTCGVSALTPCLRAIQWPPNFKVSNVDKYEPKQDPRGWLAVYTTAARAAGASEDVMTAYLPIVLGQDALQWLRHLPRHCIDDWGDFSRRFTANFQSLSDKPAQPWDLKSIKHRGXETLRSYLKSHTXQKAPTTSEELFREANLYITADERAQDLIGGAKPAXRQHHDAPRTSNLTNDGRRGLAKKRREEEXAFPRVDREVNVIFGGHGSQENKRQQKLNDRQILVATTGPPAPYRWSEHPITFTREDQWLNFDHPGKYPLLVDPVIRESRVKKVLVDRGSSINVTFPRTLQGLGVHLKELHESDTPFFGIVPTEGEYPLGHIYMPVTFGTPENYRTEFLRFEVANFDCGYNAIIGRPGLAKFMAIPHYTYMILKMPGPQGIITVRADFQGAAECFRVAIQAALTTKPSAVSSTLANSKPKEDLAVPANEAQAATSMRPTEETKRINLGFADERKTAIISSSLDDK

SEQ ID NO: 342760 - protein, 76 aa, Zea mays
  Clone ID: MRT4577_75762C.1.pep
MMRNGWIPSRGLDADGIRRTQRPAPRPGYYHVRYWTMLKLPMYPCNDTTKVKKELIEDMKSYKDAFHRGVDFNMMK

SEQ ID NO: 342761 - protein, 828 aa, Zea mays
  unsure (1)..(828): unsure at all Xaa locations
  Clone ID: MRT4577_75763C.1.pep
MAVTFHSKITLRPGSVFCFRTISSVAHEEGTLHRIADPPKKKSPPTNSENVGEAQPPALRKKIVPRKSGAESPLTRRTPLSTSPTKEWTQIARKKETKGKQVVLSVPPPSKENGKKVATTAAPFYPDVLFIGRVESPPVSDDESTAPGEEPPQRESRRRRNRRRNVRRHHAAGERDPEQPVSRDEVSEIGETPEERVFRERRNSRRRDRRRAQEQAEQDGRQPTIFYRLLTRRTIYDTPSTVAETREAPSMLRVNDGMRTRSATGRSTTGIMASQLGARPPELSRQRPQLAAIQWPPNFKVSNVDKYEPKQDPGGWLAVYTTAARAAGASEDVMTAYLPIVLGQDALQWLRHLPRHCIDDWGDFSRRFTANFQSLSDKPAQPWDLKSIKRRRXETLLSYLKRGSNDSAFVQAILQKAPTTSEELFREADLYITADERAQDLIGGAKPAPAAPRRDANQQPDKRWEKRPREEVHAAGPPASRARGGPRGGERMLDDILDAQCPYHKDMRHTLRNCRDFKHSVGHGRPFQPLPPPPPRGGPEEPRPPHQQEEGGGGAFPRVDREVNVIFGGHGSQENKRQQKLNDRQILVAXPVLPRPYRWSEHPITFTRADQWLNFDHPGKYPLLVDPVIRESRVKKVLVDGGSSINVTFPRTLQGLGVHLKELHESDTPFFGIVPTEGEYPLGHIYMPVTFGTPENYRTEFLRFEVANFDCGYNAIIGRPGLAKFMAIPHYTYMILKMPGPQGIITVHADFQGAAECFRVAIQAALTTKPSMISSTQANSKPEEDLAVPANEAQAATSMRPTEETKRINLGFADERKTAIISSSLDDK

SEQ ID NO: 342762 - protein, 68 aa, Zea mays
  Clone ID: MRT4577_75764C.1.pep
KIPCANIDDIKPMLSRIPCRHHHLLLQTVSSTKFLITMPFTNPLLIICPLATILEILHYEITLLVLFI

SEQ ID NO: 342763 - protein, 58 aa, Zea mays
  Clone ID: MRT4577_75765C.1.pep
KKNSPRAPQFLLQAANLPLIFKKKFRVFPFAERTGPKKFLMGEDCIYQGGMKGALLSF

SEQ ID NO: 342764 - protein, 1083 aa, Zea mays
  unsure (1)..(1083): unsure at all Xaa locations
  Clone ID: MRT4577_75766C.1.pep
MAVTFHRKITLHPGSVFCFGTISSIADEEGTLHRIADPPKKKSTPTRSENIGVRKEKAQPPALRKKIDVGKPEAKSPLTQKTPLSTSSTKEWTQVARKKETGRKQVVLSVPPPSKENGKKIATTAAPFYPDVLFIGRVESPPVSDDEPTAPGEEPPQRESRWRRYRRRNIRRHHEAGERDPEQPVSRDEVSEIGETSEERIFRERRNSRRPMNTLSEVGGVLARIADGLPRTPDAEGYRRLFTQAANHLLPLAHPPNDLRHAINSHRDTRSSINASCERRHENEIRCREEYDRDHGILARSQATRTESATASTGGTTQGRSRNHNNYSSPRDRHHPRRQEDTCGVTALTPCLRAIQWPPNFKVSNVDKYEPKQDPGGWLAVYTTAARAARASEDMMTAYLPIVLGQDALQWLRHLTRHCIDDWSDFSRRFTANFQSLSDKPAQPWDLKSIKRRGDETLRSYLKRFQTMRNRIPEVTEAVVIEDFYRGSNDSAFVRAILQKAPTTSEQLFREADLYITADERAXTSSGERSPHRQRHDATXPATRQTLGEKTSRRGARRRTTCLSCPGRTSRRRXRTLDDILDAQCPYHKDMRHTLRNCRDFKHSVGHDRPFQPLPPPPPRGGPEEPRQPQQQEEGEGGAFPRVDREVNVIFDGHGSQENRRQQKLNDRQILVATTGPPAPYRWSEHPITFTRADQWLNFDHPGKYPLLVDPVIRESRVKKVLVDRGSSINVTFPRTLQGLGVHLKELRESDTPFFGIVPTEGEYPLGHIYMPVTFGTPENYRTKFLRFEVANFDCGYNAIIGRPGLAKFMAIPHYTYMILKMPGPQGIINVRADFQGAAECFRVVIQAALTXNHQRLLLRRRIQSLRKTSXSANEAQVVTSMRPTKETKRINLGFTDERKTAXSVPAWMTXEGALVRFLQDNRDVFAWQPADMLGVPRELAKHKLKVYPQARPIRQKLRRCTPDKREAIRAELARLVAARFIREVLHPEWLANHVLVLKNNKVGWRMCVDYPDLNKHCPKDPFGLPRIDQVVDSTAGCSMLSFLDCYSRYHQISLAKEDEEKTAFITPFGAFCYTSMPFSLLF

SEQ ID NO: 342765 - protein, 879 aa, Zea mays
  Clone ID: MRT4577_75767C.1.pep
MAVTFHSKITVRPGSVFCFGTISSVADEEGILHRLADLPEKKSPPTNSENAGKTLPPALRKKIISGKAGAGSSLTRKTPLSTSPTKEWTRIARKKETRERQVVLPVPLTSKENGKKVATTAVPFYPDILFIGRVESPAISDDEPTVPGEEPPQRESRRRRNRRRNVRRHHAAGERDPEQPVSRDEVSEIGETPEERIFRERRNSRRRDRRRTQEQAKQDARQRRENPLFGRNLNPDFARAMNTPSEVGGVLARIADGLPTPRDIDACSLRRPTIFYRSLTRRTICDTPSTVAETREAPSMLCANGGMGTKFAVGRSMTEITASRLKARPPGLSRQQLQLAVPPGDGRGTTTTTPLPGTDVIPDDRRTRAEYPLLLHALGPSNGLPTSRYPMSTNMNLSRIQGSLSDKPAQPWDLKSIKRRGDETLRSYLKRFQTMKNRIPEVTEAAVIEDFYRGSNDSAFVRAILQKAPTTSEELFREADLYITADERAQDLIGGAKPAPTAPRRDANQPSDKRWEKRPREEVHAAGPPASRARGGPRGGERTLDDILDAQCPYHKDMRHTLRNCRDFKHSVGHGRPFQPLPPPPPRGGPDEPRQPHRQEEGGGGAFPRVDREVNIIFGGHGSQENKRQQKLNDRQILVATTGPPAPYRWSEHPITFTREDQWLNFDHPGKYPLLVDPVIRESRVKKVLVDGGSSINVTFPRTLQGLGVHLKELHESDTPFFGIVPTEGEYPLGHIYMPVTFGTPENYRTEFLRFEVANFDCGYNAIIGRPGLAKFMAIPHYTYMILKMPGPQGIITVRADFQGAAECFRVAIQAALTTKPSTVPSTPANSKPEEDLAVPANEAQAATSMRPTEETKRINLGFADERKTAIISSSLNDK

SEQ ID NO: 342766 - protein, 912 aa, Zea mays
  unsure (1)..(912): unsure at all Xaa locations
  Clone ID: MRT4577_75768C.1.pep
MAVTFHSKIAVRPGSVFCFGTISSVADEEGILHRLADLPKQRSPPTNSENAGKTLPPALRKKIVSGEAGARSSLTRKTPLSTSPTKEWTRVVRKKETRARQVVLPVPPASKENGKKIAATAVPFYPDVLFIGRAESPAVSDDEPTAPGEEPPQRESRRRRNRRRNVRRHHAAGERDPEQPVSRDEVSEIGETPEERVFRERRNSRRRDRRRTQEQAEQDARQRRENPLFGRNLNPDFARAMNTPSEVGGVLARIADGLPRTPDAEGYRRLFTQAANHLLPLAHPPNDLRHAINSRRDARSSINASRERRHENEIRRREEYDRDHGFPTQSQATRTESATASTGGTTRGRSRNHHRHSPPRDRRHPRRQEDTCGVSALTPRLRAIQWPPNFKVSNVDKYEPKQDPGGWLAVYTTAARAAGASEDVMTAYLPIVLGQDVLQWLRHLPRHCIDDWGDFSRRFTANFQSLSDKPAQPWDLKSIKRRGXETLRSYLKSHTXQKAPTTSEELFREADLYITADERAQDLIGGAKPAPAAPRRDANQPSDKRWEKRPREEVHAAGPPASRARGGPRGGERTLDDILDAQCPYHKDMRHTLRNCRDFKHSVGHGRPFQPLPPPPRRGGPGEPRQPHQPEEGGGGGGAFPRVDREVNVIFGGHGSQENKRQQKLNDRRILVATTGPPAPYRWSEHPITFTREDQWLNFDHPGKYPLLVDPVIRESRVKKVLVDGGSSINVTFPRTLQGLGVHLKELHESDTPFFGIVPTEGEYPLGHIYMPVTFGTPDNYRTEFLRFEVANFDCGYNAIIGRPGLAKFMAIPHYTYMILKMSGPQGIITVRADFQGAAECFRVAIQAALTTKPSTVPSTPANSKPEEDLAVPANEAQAATSMRPTEETKRINLGFADERKTAIISSSLNDK

SEQ ID NO: 342767 - protein, 788 aa, Zea mays
  Clone ID: MRT4577_75769C.1.pep
MSGEHAKKEMEISDKPTTSHGKASSEESRNKKKGKEKKAVGDRYPPGPPEGSTEKEISSNKPRKYRRSATSSSPKKIAFRKSGAKGPLARRTPLSTSPTKEWTQVARKKEARRKQVVLSVPPPSKENGKKIVTTAVPFYPDVLFIGRVESPPVSDDEPIAPGEEPPQRESRRRRNRRRNIRRHHEAGERDPEQPVSWDEVSEIGETPEERVFKERRNSRRRDRRRAQEQAEQDARQRRENPLFGRNLNPDFARAMNTPSEVGGVLARIADGLPRTSDAEGYRRLFTQAANHLLPLAHPPNDLRHAINRRRDARSSINASRERRHENEIRRREEAIQCPPNFKVSNVDKYEPKQDPGGWLAVYTTAARAARASEDVMTAYLPIVLGQDALQWLRHLPRHCIDDWGDFSRRFTANFQSLSDKPAQPWDLKSIKRRGDETLRSYLKRFQTMRNRIPEVTEATVIEDFYRGSNDSAFVRAILQKAPTTSEELFREADLYITADERAQDLIGGAKPALAAPRCDANQQPDKRWEKRPREEVHAAGPPASRARGGPRGGERTLDDILDAQCPYHKDMHHTLRNCRDFKHSVGHGRPFQPLPPPPPRGGPEEPRQPQQQEEGGGGAFPRVDRELNFDHPGKYPLLIDPVIRESRVKKVLVDGGSSINVTFPWTLQGLGVHLKELHESDTPFFGILPTEGEYPLGHIYMPVTFGTPDNYRTEFLRFEVANFDCGYNAIIGRPGLAKFMAIPHYTYMILKMPGPQGIITVRADLQGAAECFRVAIQAALTTKPSTTS

SEQ ID NO: 342768 - protein, 83 aa, Zea mays
  Clone ID: MRT4577_7576C.1.pep
ETGTQFLQVPAHLVRRSSQVHTPAQLVHSPHQQCFLRPCRSPWPQPQRAEGPGEHRITIRVLLLLLIPYVPLVAAPGPVLVWG

SEQ ID NO: 342769 - protein, 255 aa, Zea mays
  unsure (1)..(255): unsure at all Xaa locations
  Clone ID: MRT4577_75770C.1.pep
MLCRRPCPGVFLRLFATSCRRSSLHPSQPHLRTATALPTLPVAKKVPFNVSAHGRSWSDPYHWMRDTSDPDLAVLLAAENAYADAFVGSAGGGGLRARLAAEMRARLPASTATPPQLWGPWLYYQYVPEGKEYPVLSRKLRPSSGLVGTLLDYLSGSEKEQVLLDWNEVAEXNGYVHXIGSCRISPDHRFLAYTVDXSGGELFSLEVKDLLSEHVIFSSQTXGVVSLAWSXQTVXLFYTVCDEXSRPKQVFCKKC

SEQ ID NO: 342770 - protein, 868 aa, Zea mays
  Clone ID: MRT4577_75771C.1.pep
MAVTFRSKITLRPGSVFCFGTISSVADEEGTLHRIADPPEKKSPPTNSENAGEALPPALRKKIVSGEAGAGGSLTRRTPLSTSPTKEWTRVARKKETRERQVVLPVPPPSKENGKKVATTAAPFYPDVLFIGRVESPAVSDDEPTAPGEEPPQRESRRRRNRRRNVRRHHAAGERDPEQPVSRDEVSEIGETPEERVFRERRNSRRRDRRRAQEQAEQDARQRRENPLFGRNLNPDFARAMNTPSEVGGVLARIADGLPRTPDAEGYRRLFTQAANHLLPLAHPPNDLRHAINSRRDARSSINASRERRHENEIRRREEYDRDHGFPAQSQATRTESATASTGGTTRGRSRNHHHHSPPRDRHRPRRQEDTCGVSALTPRLRAIQWPPNFKSLSDKPAQPWDLKSIKRRGDETLRSYLKRFQTMRNRIPEVTEAAVIEDFYRGSNDSAFVRAILQKASTTSEELFREADLYITADERAQDLIGGAKPAPAAPRRDANQPPDKRWEKRPREEVHAAGPPASRARGGPRGGERTLDDILDAQCPYHKDMRHTLRNCRDFKHSVGHGRPFQPLPPPPPRGGPDEPRQPHQQEEGGGGAFPRVDREVNVIFGGHGSQENKRQQKLNDRQILVAATGPPAPYRWSEHPITFTREDQWLNFDHPGKYPLLVDPVIRESRVKKVLVDGGSSINVTFPRTLQGLGVHLKELHESDTPFFGIVPTEGEYPLGHIYMPVTFGTPENYRTEFLRFEVANFDCGYNAIIGRPGLAKFMAIPHYTYMILKMPGPQGIITVRADFQGAAECFRVAIQAALTTKPSAVPPTPANSKPEEDLAVPANEAQAATSMRPTEETKRINLGFTNERKTAIISSSLDDK

SEQ ID NO: 342771 - protein, 922 aa, Zea mays
  unsure (1)..(922): unsure at all Xaa locations
  Clone ID: MRT4577_75772C.1.pep
MVVTFHSKIAVRPGSVFCFGTISSVADEEGILHRLADLPEQKSPPTNSENAGKTLPPALRKKIVSGEAGARSSLTRKTPLSTSPTKEWTRVVRKKETRERQVVLPVPPASKENGKKVATTAVPFYPDVLFIGRAESPAVSDDEPTAPGEEPPQRESRRRRNRRRNVRRHHAAGERDPEQPVSRDEVSEIGETPEERVFRERRNSRRRDHRRTQEQAEQDARQRRENPLFGRNLNPDFARAMNTPSEVGGVLARIADGLPRTPDAEGYRRLFTQAANHLLPLAHPPNDLRHAINSRRDARSSINASRERRHENEIRRREEYDQDHGFPTQSQATRTESATASTSGTTRGRSRNHHRHSPPRDRRHPRRQEDTCGVSALTPRLRAIQWPPNFKVSNVDKYEPKQDPGGWLAVYTTAARAAGASEDVMTAYLPIVLGQDALQWLRHLPRHCIDDWGDFSRCFTANFQSLSDKPAQPWDLKSIKRRGDETLRSYLKRFQTMRNRIPEVTEAAVIEDFYRGSNDLAFVRAILQKAPTTSEELFREADLYITADERAQDLIGGAKPAPAAPRRDANQPPDKRWEKRPREEVHAAGPPASRARGGPRGGERTLDDILDAQCPYHKDMRLTLRNCQDFKHXLDMVDPSNPYRLLRRGEDQVXTTTAPSAGGGGGGAFPRVDREVNVIFGGHGSQENKRQQKLNDRQILVATTGPPAPYRWXKYPLLVDPVIRESRVKKVLVDGGSSINVTFPRTLQGLGVHLKELHESDTPFFGIVPTEGEYPLGHIYMPVTFGTPDNYRTEFLRFEVANFDCGYNAIIGRPGLAKFMAIPHYTYMILKMPGPQGIITVRADFQGAAECFRVAIQAALTTKPSTVPSTPANSKPEEDLAVPANEAQAATSMRSTEETKRINLGFADERKAAIISSSLNDK

SEQ ID NO: 342772 - protein, 855 aa, Zea mays
  Clone ID: MRT4577_75773C.1.pep
MAVTFHSKITLRPGSVFCFGTISSVADEEGTLHRIADPPKKKSPPTNSGNVREAQPPALRKKIAFRKSGAESPLTRRTPLSTSPTKEWTQITRKKETKGKQVVLSVPPPSKENGKKVTTTAAPFYPDVLFIGRAESPPVSDDEPTVPGEEPPQRESRRRRNRRRNVRRHHEAGERDPEQPVSRDEEQAQQDARQHRENPLFGRNLNPDFARAMNTPSEVGGVLARIADGLPRTPDAEGYRRLFTQAANHLLPLAHPPNDLRHAINNRRDARSSINASRERRHENEIRRREEYDRDHGIPARSQATRTESAMASTGGTTRGRAIQWPPNFKVSNVDKYEPKQDPGGWLAVYTTAARAAGASEDVMTVYLPIVLGQDALQWLRHLPRHCIDDWGDFSRRFTANFQSLSDKPAQPWDLKSIKRRGDETLRSYLKRFQTMRNRIPEKAPTTSEELFREADLYITADEQAQDLIGGAKPAPAAPRRDANQQPDKRWEKRPREEVHAAGPPASRARGGPRGGERTLDDILDAQCPYHKDMRHTLRNCRDFKHSVGHGRPFQPLPPPPSRGGPEEPRPPHQQEEGGGGAFPRVDREVNVIFGGHVLQENKRQQKLNDRQILVATTGPPAPYRWSEHPITFTRADQWLNFDHPGKYPLLVDPVIRESRVKKVLVDGGSSINVTFPRTLQGLGVHLKELHESDTPFFGIVPTEGEYPLGHIYMPVTFGTPENYRTEFLRFEVANFDSGYNAIIGRPGLAKFMAIPHYTYMILKMPGPQGIITVCADFQGAAECFRVAIQAALTTKPSTISSTQANSKPEEDLAVPANEAQAATSMRPTEETKRINLGFADERKTAIISSSLDDK

SEQ ID NO: 342773 - protein, 475 aa, Zea mays
  unsure (1)..(475): unsure at all Xaa locations
  Clone ID: MRT4577_75774C.1.pep
SLSDKPAQPWDLKSIKRRGXETLRSYLKRFQTMRNRIPEVTEAAVIEDFYRGSNDSAFVRAILQKAPTTSEELFREADLYITADERAQDLIGGAKPASVAPRRDANQQPDKRWEKRPREEVHAAGPLASRARGGPRGGERTLDDILDAQCPYHKDMRHTLRNCRDFKHSVXRPTLPTSTSSSXGEDQXTTTTPSTGGGRRRSFPTHRXEVNVIFGGHGSQENKRQQKLNDRQILVATTGPPAPYRWSEHPITFTREDQWLNFDHPGKYPLLVDPVIRESRVKKVLVDGGSSINVTFPQTLQGLGVHLKELHESDTPFFGIVPTEGEYPLGHIYMPVTFGTPENYRTEFLRFEVANFDCGYNAIIGRPGLAKFMAIPHYTYMILKMPGPQGIITVRADFQGAAECFRVAIQAALTTKSSAVPSTLANSKPEEDLAAPANQAQAATSMWPTEETKRINLGFADERKTAIISSSLDDK

SEQ ID NO: 342774 - protein, 91 aa, Zea mays
  Clone ID: MRT4577_75775C.1.pep
PAGPGMSLEKLAGQPEDHAPDLKKGLEPIHEVLKSYPFVTGNQAGWADVVLAAHLNFLEKLKPELFQAYVLDVFDDDILLNWWKRVEYIRK

SEQ ID NO: 342775 - protein, 73 aa, Zea mays
  Clone ID: MRT4577_75776C.1.pep
EKKKGPSVTQKQMPSYLEQHGGSVHLFLGPGSPPYKFASGPFTLGDNSIAIFGGLKGLSIFKGAPFFGNMPKL

SEQ ID NO: 342776 - protein, 152 aa, Zea mays
  Clone ID: MRT4577_75777C.1.pep
MCRGLPTPAPAPALQFQSQDCSRQQRGTTQAPPGRASESVRACMAAERKAASRPAACGRMRGAEGAKPRGRQAKAARAPPGQGYFTAGLAALFLCLTTLLVFLPLVLPPLPPPPLLLLLVPVGLMAVLLALALVPSDGRAAAAAVASSSCVC

SEQ ID NO: 342777 - protein, 80 aa, Zea mays
  Clone ID: MRT4577_75778C.1.pep
MAGNGAIVESDPLNWGAGAAEVSGSHMDYYAEPGEPGGGGGFMMYDDTDKTMEKGKHNIDMMYLLLYVHSGTRDIWGEAI

SEQ ID NO: 342778 - protein, 150 aa, Zea mays
  unsure (1)..(150): unsure at all Xaa locations
  Clone ID: MRT4577_75779C.1.pep
YIPLLASQLGXGFFDDKLGALCMQXLEDKXFSIRDAAANNLKRLAEEFGPEWAMQHIIPQAISLLAPVMGAEITCQKLLPVVINSWKDRVPNIKFNVAKVLQSLVPILDQSAPQKTVKPCLVELSEAPEVDVRYYANQALQACDQMMVSS

SEQ ID NO: 342779 - protein, 132 aa, Zea mays
  unsure (1)..(132): unsure at all Xaa locations
  Clone ID: MRT4577_7577C.1.pep
SVLRVGRVGGRVXKKKKKKKRKKKKKKKKKKKKKKKKKKKKKKKKKKKKKKKKKGGLFLKEPNLWGGGFDNLYIFFFLCPKFNLIGRAFKNLGFGKKLVLPNLFFLKKIPFFQVGLLKKRPDRFPFSKIFEP

SEQ ID NO: 342780 - protein, 214 aa, Zea mays
  Clone ID: MRT4577_75780C.1.pep
MAMIDEPLYPIAVLIDELKNEDIQLRLNSIRRLSTIARALGEERTRKELIPFLSENNDDEDEVLLAMAEELGVFIPYVGGVEHAHVLLPPLETLCTVEETCVRDKAVESLCRIGAQMKETDIVDWFIPVVKRLAAGEWFTARVSSCGLFHIAYPSALDQLKTELRTIYGQLCQDDMPMVRRAAASNLGKVAATVEQNHLKTEIMSIFDDLTPDD

SEQ ID NO: 342781 - protein, 587 aa, Zea mays
  Clone ID: MRT4577_75781C.1.pep
MAMIDEPLYPIAVLIDELKNEDIQLRLNSIRRLSTIARALGEERTRKELIPFLSENNDDEDEVLLAMAEELGVFIPYVGGVEHAHVLLPPLETLCTVEETCVRDKAVESLCRIGAQMKETDIVDWFIPVVKRLAAGEWFTARVSSCGLFHIAYPSASDQLKTELRTIYGQLCQDDMPMVRRAAASNLGKFAATVEQNHLKTEIMSIFDDLTQDDQDSVRLLAVEGCAALGKLLEPQDCVAHILPVIVNFSQDKSWRVRYMVANQLYELCEAVGPEPTRADLVPAYVRLLRDNEAEVRIAAAGKVTKFCRILNPQLSVQHILPCVKELSSDSSQHVRSALASVIMGMAPVLGKDATIEQLVPIFLSLLKDEFPDVRLNIISKLDQVNQVIGIDLLSQSLLPAIVELAEDRHWRVRLAIIEYIPLLASQLGVGFFDDKLGALCMQWLEDKVFSIRDAAANNLKRLAEEFGPEWAMQHIIPQVLEKINNPHYLYRMTILQAISLLAPVMGAEITCQKLLPVVINSSKDRVPNIKFNVAKVLQSLVPILDQSVVEKTVKPCLVELSEDPDVDVRYYANQALQACDQMMVSS

SEQ ID NO: 342782 - protein, 238 aa, Zea mays
  Clone ID: MRT4577_75782C.1.pep
MRGPKMLTSMLSKSTASPSPARLYHLLPVSSLQTTSDLHPAPNGASPPPPPPAQIPAFLSPCPSPYNHNNYATILRSCVLSRAVRPGRQLHARLLVSGSGLDAVLATRLVDLYASCGHVSLARRLFDEMPNQGNVFLWNVLIRAYARDGPCEAAIELYRAMLAYGSMKPDNFTYPPVLKACAALLDLGAGREVHDRVMRTSWATDVFVCAGLIDMYAKCGCVDELWAVFNGHTIRDAA

SEQ ID NO: 342783 - protein, 231 aa, Zea mays
  unsure (1)..(231): unsure at all Xaa locations
  Clone ID: MRT4577_75783C.1.pep
GIDFLSQTLLPAIVELAEDRHWRVRLAIIEYIPLLASQLGVGFFDDKLGALCMQWLEDKVFSIRDAAANNLKRLAEEFGPEWAMQHIIPQVLEKINNPHYLYRMTILQAISLLAPVMGAEITCQKLLPVVINSSKDRVPNIKFNVAKVLKSLVPILDQSVSSSGYFASCYRFEKRCVCISALLGNIVNAYFAXVEKTVKPCLVELSEDPDVDVRYYANQALQACDQMMVSS

SEQ ID NO: 342784 - protein, 65 aa, Zea mays
  Clone ID: MRT4577_75784C.1.pep
IIETSLIPSLDSKHMGASRQHSICLESREGINNRDKSYPCIFVERYLKQEVHQIQGENVMATNML

SEQ ID NO: 342785 - protein, 352 aa, Zea mays
  Clone ID: MRT4577_75785C.1.pep
ISAFGIRADLVPAYVRLLRDNEAEVRIAAAGKVTKFCRILNPQLSVQHILPCVKELSSDSSQHVRSALASVIMGMAPVLGKDATIEQLVPIFLSLLKDEFPDVRLNIISKLDQVNQVIGIDLLSQSLLPAIVELAEDRHWRVRLAIIEYIPLLASQLGVGFFDDKLGALCMQWLEDKVFSIRDAAANNLKRLAEEFGPEWAMQHIIPQVLEKINNPHYLYRMTILQAISLLAPVMGAEITCQKLLPVVINSSKDRVPNIKFNVAKVLQSLVPILDQSVSSSSYSAHMLPTFSKKAVHLYFSWYWGISSVLTPQVVEKTVKPCLVELSEDPDVDVRYYANQALQACDQMMVSS

SEQ ID NO: 342786 - protein, 587 aa, Zea mays
  Clone ID: MRT4577_75786C.1.pep
MAMIDEPLYPIAVLIDELKNEDIQLRLNSIRRLSTIARALGEERTRKELIPFLSENNDDEDEVLLAMAEELGVFIPYVGGVEHAHVLLPPLETLCTVEETCVRDKAVESLCRIGAQMKETDIVDWFIPVVKRLAAGEWFTARVSSCGLFHIAYPSALDQLKTELRTIYGQLCQDDMPMVRRAAASNLGKFAATVEQNHLKTEIMSIFDDLTQDDQDSVRLLAVEGCAALGKLLEPQDCVAHILPVIVNFSQDKSWRVRYMVANQLYELCEAVGPEPTRADLVPAYVRLLRDNEAEVRIAAAGKVTKFCRILNPQLSIQHILPCVKELSSDSSQHVRSALASVIMGMAPVLGKDATMEQLLPIFLSLLKDEFPDVRLNIISKLDQVNQVIGIDFLSQTLLPAIVELAEDRHWRVRLAIIEYIPLLASQLGVGFFDDKLGALCMQWLEDKVFSIRDAAANNLKRLAEEFGPEWAMQHIIPQVLEKINNPHYLYRMTILQAISLLAPVMGAEITCQKLLPVVINSSKDRVPNIKFNVAKVLKSLVPILDQSVVEKTVKPCLVELSEDPDVDVRYYANQALQACDQMMVSS

SEQ ID NO: 342787 - protein, 117 aa, Zea mays
  Clone ID: MRT4577_75787C.1.pep
RIYKGGESRPQKEKKGGACGGMLLIGGASWVGAIFHLNTQGLILKTTCTKTTRGGESTPGGGRPIKKTKQARTPEGLYTERKKDAPPGKGPPFWGPSSALGGDKKRPLKIFFKTPHP

SEQ ID NO: 342788 - protein, 261 aa, Zea mays
  unsure (1)..(261): unsure at all Xaa locations
  Clone ID: MRT4577_75788C.1.pep
RRPFLAGXFFDPALXTSSRLFELVFKRLALGDNALPEDGIGAIADQLAARLPAGSVRLNTRAVGIDQSGVTLDTGETVAGGLGVIVAVEQPQAEKLLPQLPAQGKDKKSERSTVCLYFSTDRAPVQDPILLLNGSGKGIVNNMFFVTNVAPSYAPAGKVLVSVSLVGSFADREDADLADEVVRELGGWFGVGEVASWTHLSTYRIGFAQPDQTPPTTPAGRDPRVGDGLYVCGDHWCSATFDGALVSGRRAAEALAKDRGL

SEQ ID NO: 342789 - protein, 83 aa, Zea mays
  Clone ID: MRT4577_75789C.1.pep
MRGDYTTWEAGGASRQVGRGPGVYSPRPPFLSNGGRVGLCSAASLLWKRRWRKWSAGGGGSGAGPGPLATRARGERARSRGGI

SEQ ID NO: 342790 - protein, 76 aa, Zea mays
  Clone ID: MRT4577_7578C.1.pep
RLQGIKREPYFGAGVNRAAILSAGLNGQWGKPFPREEQEGFTCQGFALNINYSGRHFPLVQNYRDYFLKPAYGTTF

SEQ ID NO: 342791 - protein, 120 aa, Zea mays
  Clone ID: MRT4577_75790C.1.pep
FKGINWGVRLTIHCFQKNHESFFCPHFHLSNFRIVKKCCTWPERTTGFSPGRFKGWACSAAGSSQTCSLPPPFGSEWPGPTRRTPKSCIFPGGAPFWPPQKGSVMLGTPAGGPHFGAGSP

SEQ ID NO: 342792 - protein, 92 aa, Zea mays
  Clone ID: MRT4577_75791C.1.pep
PRGTPYCLLKCQLFGQKFFQQFRQVEPQPRYQGFFGLVFQSILKKKPKKGQVSGFLGGQKGQQLRGILGFKKPIPCPYVVAGGVPPLKNFFF

SEQ ID NO: 342793 - protein, 638 aa, Zea mays
  unsure (1)..(638): unsure at all Xaa locations
  Clone ID: MRT4577_75792C.1.pep
MLRANGGMRTRFAVERSTTGIMASRLRARPPGRSRPXDSTGGTTRGRSRNHNHNSPPRDRHRPRRQEDTCGVSALTPRLRAIQWPPNFKVSNVDKYEPKQDPGGWLAVYTTAARAAGASEDVMTAYLPIVLGQDALQWLRHLPRHCIDVWGDFSRRFTTNFQSLSDKPAQPWDLKSIKRRGDETLRSYLKRFQTMRNRIPEVTEAAVIEDFYRGSNDLAFVRAILQKAQTTSEELFREADLYITADERAXTSSEEQSPHXAPRRDTNQPPDKRWEKRPREEVHAAGPPASRARGGPRGGERTLDDILDAQCPYHKDMCHTLRNCRDFKHSVGHGRPFQPLPPPPPRGGPDEPQRPHRQEEGGGGAFPRVDREVNVIFGGHGSQESKRQQKLNDRQILVATTGPPAPYRWSEHPITFTRDDQWLNFDHPVKYPLLVDPVIREGRVKKVLVDGGSSINITFPRTLQGLGAHLKELHKSDTPFFGIVPTEGEYPLGHIYKPVTFGTPENYRTEFLRFEVANFDCGYNAIIGRPGLAKFMAIPHYTYMILKMPGPQGIITVHADFQGAAECFRVAIQAALTSKPSTVPSTLANSKPGEDLAVLANETQAATSMRPTEETKRINLGFTDERKTAIISSSLDDK

SEQ ID NO: 342794 - protein, 362 aa, Zea mays
  Clone ID: MRT4577_75793C.1.pep
MDSAFRRALNEPMCLEETVVQQGIERCPFLRNINEPTSFSFSSVNFPIPARGAKGPIFEDGPNFDMAFRVFHGRDGVVPLSEGSLAQIEKPLPKPNPEFNPLAAKAATISLSAFGGFFSFGDFSNKRNKKNSNKKNPNNLPQNKGQPNNNNHEALSNEWLEMGQCPLAKSYRALSGIVPLVAKMMTPPAGMKLKCPPAVVAARAALSRTAFAKGLRPQPLPTKILVIALLGMAANVPLGIWREHTQKFSLQWFAAVHAAVPFIGMLRKSVLMPKTAMALTIAASILGQTIGSRAERIRLKRAAAAKLARESHGDAADYIKAPMSLKTGNHTVQFWDPLSLRAESTVAAGTTAVLVPAISAFN

SEQ ID NO: 342795 - protein, 934 aa, Zea mays
  unsure (1)..(934): unsure at all Xaa locations
  Clone ID: MRT4577_75794C.1.pep
MKRNLRPSHTNNFSRKPLLPTRPSATKHSPNNVLFIGRAESPTVSDDEPTAPGEEPPQRESCRRRNRRRNIRRHHAAGERDPEQPVSRDEVSEIGETPEEHVFRERRNSRRRDRRRAQEQAEQDARQRRENPFFGRNLNPDFARAMNTPSEVGGVLARIADGLPRTPDAEGYRRLFTQAANHLLPLAHPPNDLRHAINSRRDARSSINASREQRHENEIRRREEYDRDHGIPARSQATRTESATTSTGGTTRGQSRNHNNYSPPRDRHHPRRQEDTCGVSALTPRLRAIQWPPNFKVSNVDKYEPKQDPGGWLAVYTIAARAAGASEDVMTAYLPIVLGQDALQWLRHLPRHCIDNWGDFSRRFTANFQSLSDKPAQPWDLKSIKRRGDETLRSYLKRFQTMRNRISEVTEAAVIEDFYRGSNDSAFVRAILQKAPTTSEELFREADLYITADERAQDLVGGSKPAPAAPRRDANQQPDKRWEKRPCEEVHAAGPPASRARGGPRGGERTLDDILDAQCPYHKDMCHTLRNCRDFKHSVGHGRPFQPLPPPPPRGGPDEPRQPHQQEEGGGGAFPRVDREVNVIFGGHGSQENKRQQKLNDRQILVATTGPPAPYRWSEHPITFTREDQWLNFDHPDKYPLLVDPVIRESRVKKVLVDGGSSINVTFPRTLQGLGVHLKELHVSDTPFFGIVPTEGEYPLGHIYMPVTFGTPENYRTEFLRFEVANFDCGYNAIIGRPGLAKFMAIPHSTYMILKMPGPQGIITVRAVTXPGVTIXRVAIQAALTTKLSATSSAQANSKPEEDLTTPANEAQAATSMRPTEETKGSTWGLLMNARLPSSALAWTINRKAXVRFLQDNRDVFAWQPADMPGVPRELAEHKLKVYPQARPIRQKXLRRFMPDKREAIRAELARLVTAGFIREVLHPAHASASSRSR

SEQ ID NO: 342796 - protein, 181 aa, Zea mays
  unsure (1)..(181): unsure at all Xaa locations
  Clone ID: MRT4577_75795C.1.pep
MDSAFRRALNEPMCLEETVVQQGIERCPFLRNINEPTSFSFSSVNFPIPXALYFLFLFTLSHHPFLKITGVLERSLNSIVCCLXARGAKGPIFEDGPNFDMAFRVFHGRDGXVVPLSEGSLAQIEKPLPKPNPEFNPLAAKAATISLSAFGGVFXSFGDFSNKRNKKNSNKKNPNNLPQVN

SEQ ID NO: 342797 - protein, 917 aa, Zea mays
  unsure (1)..(917): unsure at all Xaa locations
  Clone ID: MRT4577_75796C.1.pep
MAVTFYSKITMRPGSVFCFGTISSVADEEGTLHRIADPPEKKSPPTNSENVGEAPPPALRKKIISEKSGAEGSLTRKTRLSTSPTKEWTRIARKKETGEKQVVLSVPPASKENGKKVATTAAPFYPDVLFIGRVESPTVSDDEPTAPGEEPPQRESRRRRNRRRNVRRHHVAGERDPEQPVSRDEVSEIGETPEERAYRERRNSRRRDRWRAQEQAEQDARQRRENPFFGRNLNPDFARAMNTPSEVGGVLARIADGLPRTPDAEGYRRLFTQAANHLLPLAHPPNDLRHAINSRRDARSSINASRERRHENEIRRWEEYDRDHGIPTQSQATRTESATASTGGTTRGRSRNHNHNSPPWDRHRPRRQEDTCGVSALTPRLRAIQWPPNFKVSNVDKYEPKQDPGGWLAVYTTAARAAGASEDVMTAYLPIVLGQDALQWLRHLPRHCIDDWEDFSRRFTANFQSLSDKPAQPWDLKSIKRRGDEALRSYLKRFQTMRNRIPECPYHKDMRHTXFVTAGTSSTPSGTADPSNLXPPPPRGGPDEPRQPHXSRRREEEELSRAXDREVNVIFGGHGSQENKRQQKLNDRQILVATTGPPAPYRWSKHPITFTREDQWLNFDHPGKYPLLVDPVIRESRVKKVLVDGGSSINVTFPRTLQGLGAHLKELHKSDTPFFGIMPTEGEYPLGHIYMLVTFGTPENYRTEFLRFEVANFDCGYNAIIGRPGLAKFMAIPHYTYMILKMPGPQGIITVRAHFQGAAECFRVAIQAALTTKPSAVSSTLANSKPEEDLAVPANEAQVATSXGRLKKPRESTWGSLMNARLPSSAPAWTTXESALVQFLQDNRDIFAWQPADMPGVPRELAEHKLKVYPQARPIRQKLRRFTPDKREAIRAELARLVAAGFIREVLHPEWLANPVL

SEQ ID NO: 342798 - protein, 504 aa, Zea mays
  Clone ID: MRT4577_75797C.1.pep
MQWLRHLPRHCIDDWGDFSRRFTANFQSLSDKPAQPWDLKSIKRRGDETLRSYLKRFQTMRNRIPEVTEAAVIEDFYRGSNDSAFVRAILQKAPTTSEELFREADLYITADERAQDLIGGAKPVPAAPRRDANQQPDKRWEKRPREEVHAAGPPASRARGGPRGGERTLDDILDAQCPYHKDMRHTLRNCRDFKHSVGHGRPFQPLPPPPPRGGPEEPRQPQQQEEGGGGAFPRVDREVNVIFDGHGSQENRRQQKLNDHQILVATIGPPAPYRWSEHPITFTRADQWLNFDHPGKYPLLVDPVIRESRVKKVLVDGGSSINVTFPRTLQGLGVHLKELHESDTPFFGIMPTEGEYPLGHIYMPVTFGTPDNYRTEFLRFEVANFDCGYNAIIGRPGLAKFMAIPHYMYMILKMPGPQGIITVRTDFQGTAECFRVAIQAALTTKPSTTSPTQANSKPEEDLAVPANEAQAATSMRPTEETKRINLGFADERKTAIISSSLGNK

SEQ ID NO: 342799 - protein, 71 aa, Zea mays
  Clone ID: MRT4577_75798C.1.pep
PEPWSSHGLRTDPRGLSLEAAHGGSTSRRTQVAHRRTSLVATRVHGRHHALPFDRRLQFCLRLHQGAGVGA

SEQ ID NO: 342800 - protein, 860 aa, Zea mays
  unsure (1)..(860): unsure at all Xaa locations
  Clone ID: MRT4577_75799C.1.pep
MAVTFYSKITLRPGSVFCFGTISSIADEKGTLHRIADPPEKKSPPTNSENAGEAQPPALRKEVVSRKSEAEGPLTRRTPLSTSPTREWTQITRKKETKEKQVVLFVPPPSKENGKKVAMTAALFYPDVLFIERAESHTVSDDEPTAPGEEPPQRESRRRRNRRRNVRRHHAARERDLEQPVSRDENPFFRRNLNPDFARAMNMPSEVGGVLARIVDGLPRTPDAEGYRRLFTQAANHLLPLAHPPNDLRHAINSRRDARSSINASRERRHENEIRRREEYDRDHGIPAQSQATRTESATASTGGTTRGRSRNHNHYSPPRDRHHPRRQEDTCGVSALTPRLRAIQWPPNFKVSNVDKYEPKQDPGGWLAVYTTAARAAGASEDVMTAYLPIVLGQDALQWLRHLPRHCIDDWGDFSRCFTANFQSLSDKPAQPWDLKSIKRRGDETLRSYLKRGSNDSAFVRAILQKAPTTSEELFREADLYITADERAQDLNGGAKPAPAAPRRDANQQPDKRWEKRPREEVHAAGPPASRARGGPRGGERTLDDILDAQCPYHKDMRHTLRNCRDFKHSVGHGRPFQPLPPPPPRGGPDEPRQPHQQEEGGGGAFPRVDREVNVIFGGHGTQENKRQQKLNDRQILVATTGPPAPYRWXKYPLLVDPVIRESRVKKVLVDGGSSINVTFXRTLQDLGVHLKELHESDTPFFGIMPMEGEYLLGHIYMPVTFGTPENYRTEFLRFEVANFDCGYNAIIGRPGLAKFMAIPHYTYMILKMPGPQGIITVRADFQGAAEWFRVAIQAALTTKPSAVSSTLANSKPEEDLAVPANEAQAATSMRPTEETKRINLGFADERKTAIISSSLGDK

SEQ ID NO: 342801 - protein, 98 aa, Zea mays
  Clone ID: MRT4577_7579C.1.pep
LFGCDNAHIRPLINQQDIYLSNGNGMQYLTKQGIDPPYNRNHDDTDRCYQLIVKNIKLTSRFATTPPFSHMTIVSILHTIIRQQPKRCVTQYIHLSSS

SEQ ID NO: 342802 - protein, 209 aa, Zea mays
  Clone ID: MRT4577_757C.1.pep
MATAAPHVMVLPLAAQGHVTPFMELSHRLVEHGLEVTFVCTEPTHALVLGVLRLRQATVDGIHLVSMPDSLADGDDRRDLGKVLDALARCMPGYVEELIREKKVTWLVADANLGSLCFEAAKKLGVRVASFFPASAACLGTLSRIPQLIEDGFFDDKGVPKRREAVELAPEMPPVYTSHMLWSADGGPEVQHVVFQLMRRNTEAASLAD

SEQ ID NO: 342803 - protein, 223 aa, Zea mays
  Clone ID: MRT4577_75800C.1.pep
MEAWVRAVVEAIHSSRAQAVIYLAGGASQALGWLLSVPGASGSVLEVVVPYSRASMAQLLGKLPLQFTSKQAAEDMALAAFNRALKLSGPGLQVMGVGFTGSLASSRPKHGDHRFYVSTRTQNCLRTSHVTLSKGLRSREEEDKVSSCFVLKAIADACRVSATIQSDVQEPEIPKESVEQFDEDQELQQVIDGQVCMKVYHFADPHGKNFDRKLILPGSFIPC

SEQ ID NO: 342804 - protein, 97 aa, Zea mays
  Clone ID: MRT4577_75801C.1.pep
YMHAQDRSSGSGNSPWYRNSCGVGPLITPPVKPSSQAGVWTIGVPSARSLKAEALRLALPRGLHNRRHALGSGVTTEQQEVHAKPAVESAQSSILEI

SEQ ID NO: 342805 - protein, 167 aa, Zea mays
  unsure (1)..(167): unsure at all Xaa locations
  Clone ID: MRT4577_75802C.1.pep
MGKIKIGINGFGRIGRLMARVSLQSEDVELVFXNDPFITTDYMTYMFKYYTVHGHWKHSDITLKDSKTLFFYDKPVTVFGIXNPEEILWGEAGAEYVVXXTCVFTDKDKAVAHXKGVAKKVVIFVLIKDSPMFVCCVNEDKYTXDVNIFFNASXXTTNCLASLCKGI

SEQ ID NO: 342806 - protein, 872 aa, Zea mays
  unsure (1)..(872): unsure at all Xaa locations
  Clone ID: MRT4577_75803C.1.pep
MAITFHSKITLRLESVFCFGTISSIADEDGTLHRIADPPKKKSPPTNSENTGEAQPPALRKKIAFGKSRAESPLTRRTPLSTSPTKEWTQIARKKEARRKQVVLSVPPPSKENGKEIFTTAVPFYPDVLFIGRVESPPVSDDEPTAHGEEPPQRESRRRRNRRRNIQRHHEAGERDLEQPVSRDEVSEIGETPEERVFRERRNSRRRDRRRAQEQAEQDARQRWENPLFGRNLNPDFARAMNTPSEVGGVLARIANGLPRTPDTEGYRRLFIQAANHLLPLAHPPNDLRYAINSRRDARSSINASLSALTPRLRAIQWPPNFKVSNVDKYEPKQDPGGWLAVYTTAAQAAGASEDVMTAYLPIVLGQDALQWLQHLPRHCIDDWGDFSRCFTANFQSLSDKPAQPWDLKSIKRRGDETLRSYLKRFQTMRNRIPEVTEAAVIEDFYRGSNDSAFVRAILQKAPTTSEELFREADLYIIADERAQDLIGGAKSAPTAPRRDANQQPDKRWEKRPREEVHAAGPPASRARGGPRGGERTLDDILDAQCPYHKDMRHTLRNCRDFKHSIGHXYPSNXPPPPPRGGPEEPRQPQQQEEGGGGAFPRVDREVNVIFGGHGSQENRRQQKLNDCRILVATTSPPAPYRWSEHPITFTRADQWLNFDHLGKYPLLVDPVIRESRVKKVLVDGGSSINVTFPRTLQGLGVHLKELHESDTPFFGIVLTEGEYPLGHIYMPVTFGTPDNYRTEFLRFEVANFDCGYNAIIGRPGLAKFMAIPHYTYMILKMPGPQGIITVRADFQGAAECFRVAIQAALTTKSSTSSSTQANSKPEEDLAAPANEAQVATSMRPTEETKRINLGFADERKTAIISSSLDDK

SEQ ID NO: 342807 - protein, 373 aa, Zea mays
  unsure (1)..(373): unsure at all Xaa locations
  Clone ID: MRT4577_75804C.1.pep
MGSPHQGHGVDGGGRSSDEEGDAGSWRLRMDSGFSVPDRFHRQPPFYARIFGGSHGKQRKIAKYYKKQENLLKDFSEMETMNEMGGLDQNAPTEEEQKQLAKSERFAINLSNAVNLVLFVTKVVASVESASMAVIASTLDSLLDLLSGFILWFTAYKMKKPNKYNYPIGKRRMQPVGIIVFASVMGTLGFQVLIESGRQLITQEHADFKFKQELWMVISMSSVAVVKFFLMLYCRTFKNEIVRAYAQDHFFDVITNSVGLVSALLAVRFKWWMDPVGAILIALYTITTWARTVLENVGTLIGXQHIDTVRAYTFGTHYFVEVDIVLSGDMPLSQAHDIGESLQEKLEQLPEVERAFVHVDFEFTHRPEHKAEV

SEQ ID NO: 342808 - protein, 817 aa, Zea mays
  Clone ID: MRT4577_75805C.1.pep
MRRKEIKERPVVLPVPPTSKENGKKVAAAAIPLYPDVLFIGRAESPAVSDDEPTAPGEEPPQRESRRRRNRRRNVRRHHAAGERDPEQPVSRDEVSEIGETPEERVFRERRNSRRRDRRRTQEQAEQDARQRRENPLFGRNLNPDFARAMNTPSEVGGVLARIADGLPRTPDAEGYRRLFTQAANHLLPLAHPPNDLRHAINSRRDARSSINASRERRHENEIRRREEYDRDHGFPTQSQATQTESATASTGGTNRGRAIQWPPNFKVSNVDKYEPKQDPGGWLAVYTTAARAAGASEDVMTAYLPIVLGQDALQWLRHLPRHCIDDWGDFSRRFTANFQSLSDKPAQPWDLKSIKRRGDETLRSYLKGFHTMRNRIPEVTEAAVIEDFYRGSNDSAFVRAILQKAPTTSEELFREADLYITADERAQDLIGGAKPTPAAPRRDANQPPDKRWEKRPREEVHAAGPPASRARGGPRGGERTLDDILDAQCPYHKDMRHTLRNCRDFKHSVGHGRPFQPLPPPPPRGGPDEPRQPHQPEEGGGGAFPRVDREVNVIFGGHGSQENKRQQKLNDRQILVATTGPPAPYRWSEHPITFTRDDQWLNFDHPGKYPLLVDPVIRESRVKKVLVDGGSSINVTFPRTLQGLGVHLKELHELDTPFFGIVPTEGEYPLGHIYMPVTFGTPDNYRTEFLRFEVANFDCGYNAIIGRPGLAKFMAIPHYTYMILKMPGPQGIITVRADFQGVAECFRVAIQAALTTKPSTVPSTPANSKPDEDLAVPANEAQAATSMRPTEDTKRINLGFADERKTAIISSSLSDK

SEQ ID NO: 342809 - protein, 385 aa, Zea mays
  Clone ID: MRT4577_75806C.1.pep
MGDDDDHNEGLRAGPTASWRLNVSDFHMPERPKEPPFVARVFLRSHGKQRKIAKYYKKQENLLKDFSEMETMNEMGGLDQNAPTEEEQKQLAKSERFAINLSNAVNLVLFVTKVVASVESASMAVIASTLDSLLDLLSGFILWFTAYKMKKPNKYNYPIGKRRMQPVGIIVFASVMGTLGFQVLIESGRQLITQEHADFKFKQELWMVISMSSVAVVKFFLMLYCRTFKNEIVRAYAQDHFFDVITNSVGLVSALLAVRYKWWMDPVGAILIALYTITTWARTVLENVGTLIGKSAPAEYLTKLTYLIWNHHEEIQHIDTVRAYTFGTHYFVEVDIVLSGDMPLSQAHDIGESLQEKLEQLPEVERAFVHVDFEFTHRPEHKAEV

SEQ ID NO: 342810 - protein, 93 aa, Zea mays
  Clone ID: MRT4577_75807C.1.pep
FFFFFFLPFFFHFCCYFLVFLSPQTSKRPRGGGHSPISSYMRGGSDGKKKRAHKKKNLFFAKPNHKSPNWVFVTPPGPGPKINHLFENPGPGS

SEQ ID NO: 342811 - protein, 84 aa, Zea mays
  unsure (1)..(84): unsure at all Xaa locations
  Clone ID: MRT4577_75808C.1.pep
PGSTPXASRPPRYRGPXLGPAFSRRLRRRAQTCCVGELCLCEGTAXXRRPXXCASWXRSSGARCXWPLIYXXPSXCWLXIASXX

SEQ ID NO: 342812 - protein, 65 aa, Zea mays
  Clone ID: MRT4577_75809C.1.pep
WRRSGTPSTRSTSCGGVCSPTCSPVRTIIHCTRVWVYCAHVLTCYLTKSAGHPIIKSEVPHYDTL

SEQ ID NO: 342813 - protein, 77 aa, Zea mays
  Clone ID: MRT4577_7580C.1.pep
VGFVLWIASFSSATSAATSADEIAGGEYYLKLLSSSMVYQSYERCCSFRAMLWTINSLMSIIMLQSAFAYIQHNIFS

SEQ ID NO: 342814 - protein, 879 aa, Zea mays
  Clone ID: MRT4577_75810C.1.pep
MAVTFHSKITVGPGSVFCFGTISSVADEEGILHRIADPPEKKSPPTNSKKAGETQPPALRKKIISGKAGAGSSLTRETPLSTSPTKEWTWIARKKETRERQVVLSVPPASKENGKKVATTATPFYPDVLFIGRVESLAVSDDEPTAPGEEPPQRESRRRRNRRRNVRRHHAAGERDPEQPVSRDEVSEIGETPEERVFRERRNSQRRDRRRTQEQAEQDARQRRENPLFGRNLNPDFARAMNTPSEVGGVLARIADGLPTPRDTDACSLRRPTIFYRSLTRRTIYDTPSTVAETREALSMLRANDGMKTKFAVGRSMTGIMASRLKARPPGLSQQQLQLADPGGWLAIYTTAARAAGASEDVMTAYLPIVLGQDALQWLRHLPRHCIDDWGDFSRRFTANFQSLSDKPAQPWDLKSIKRRGDETLLSYLKRFQTMRNRIPEVTEVAVIEDFYRGSNDSAFVRAILQKAPTTSEELFREADLYITADERAQDLIGGAKPAPAAPRRDANQPSDKRWEKRPREEVHAAGPPASRARGGPRGGERTLDDILDAQCPYHKDMRHTLRNCRDFKHSVGHGRPFQPLPPPPPRGGPDEPRQPHQQEEGGGGAFPRVDREVNVIFGGHGSQENKRQQKLNDRQILVATTGPPAPYRWSEHPITFTGEDQWLNFDHPGKYPLLVDPVIRESRVKKVLVDGGSSINVTFPRTLQGLGVHLKELHESDTPFFGIVPTEGEYPLGHIYMPVTFGTPENYRTEFLRFEVANFDCGYNAIIGRPGLAKFMAIPHYTYMILKMPGPQGIITVRADFQGAAECFRVAIQAALTTKPSTVPSTLANSKPEEDLTVPANEAQVVTSMRPTEETKRINLGFADERKTAIISSSLSDK

SEQ ID NO: 342815 - protein, 303 aa, Zea mays
  Clone ID: MRT4577_75811C.1.pep
MSSSTPGRDDDAPDLVCQIDCVHGMVDALSSVRWKRHQDAVMELSEHGIVLSVEESGCLQAKVFLKRELFVEYDYAGDGRQRFGLSLGLFVDCLNIFSSPGHASAVEIRYPGPDMQLLLKSVGSADACLYAEIRTRIPDTVSWDYHFEHAGNSPVSFTVKSAVLKETIDDLEWPGSSIQIRMQPDPPTVILKGEGHGDLQTEFPYYANTDLLIVFQCEHEVSHRYKYKFLRATTSNIPSSAVKENRRTKVSIGRGGMLKVQHLVSLARPGMPYFRSIGGGNEQTSRIAHIEFFVKPEEDDNGA

SEQ ID NO: 342816 - protein, 1713 aa, Zea mays
  Clone ID: MRT4577_75812C.1.pep
RDDDKKGKKKEKKSYYKKKGGDAHVSQEWDSDESSTDSSSDGDAANIAVNKGLLFPNVDHKCFMAKDGKKRKVHSRSIPKYTTSSDEGSSSENEDDVKELNVCNDSISCLRDENARLSAKIEELNVCKPSTSTVDHVSICTRCRDINVEAIDDHIAMIKQQNDHIAKLTTKNNEHEHENEKFKFARSMLYNGRRPSIKDGIGFQQGSNVKLNAPKRLSNFVKGKVVAKYVGGKHKSSKTCVWVPKVYASGGSSWIIDSGCTNHMTGEKRMFSSYEKNEDPQRAITFGDGNQGLVKGLGKIAISPDNSISNVFLVDSLDYNLLSVSQLCKMGYNCLFTDRGVTVFRRSDDSIAFKGVLEGQLYLVDFNQAKLDTCLIAKTNMGWLWHRRLAHVGMKNLDKLLKGEHILGLTNIHFEKDRVCSACQEGKQIGSHRPHKNIMTTDRPLELLHMDLFGPIAYISIGGSRKSKFAPKAIEGFLLGYDSNTRAYRVFNKSTGLVEVSCDIVFDETNGSQVEQVDLDELDDEEAPCIALRNMSIGMIEDALRDPDWVLFHVLTKNVVGTKWVFRNKQDEHGVVTRNKARLVAKGYSQVEGLDFDETYAPVARLESIRILLAYATYHGFKLYQMDVKSAFINGPIKEEVYVEQPPSFEDSEYPNHVYKLSKALYGLKQDSRAWYECLRDFLITNGFKVGKADPTLFTKTIAKDLFVCQIYVDDIIFGSTNKSTCEEFSRIMIQKFEMSMMGELKYFLGFQIKQFQEGTFISQTKYIQDILKKFGMKDGKPIKTPMGTNGHLDLDTGDEEGILHRLADLPEQKSPPTNSENTGKTLPPALRKKIVSGEAGARSSLTWKTPLSTSPTKEWTRVVRKKETRERQVVLPVPPTSKENGKKVTAAAIPFYPDVLFIGRAESPAISDDEPTAPGEEPPQRESRRRRNRRRNVRRHHAAGERDPEQPVSRDEVSEIGETPEERVFRERRNSRRRDRRRTQEQAEQDARQRCENPLFGRNLNPDFARAMNTPSEVRGVLARIADGLPRTPDAEGYRRLFTQAANHLLPLAHPPNDLRHTINSRRDARNSINASRERRHENEIRRREEYDRDHGFPTQSQATRTESATASTGSTTRGRSRDRHHHSPPRDRRHPRRQEDTCGVSALTPRLRAIQWPPNFKVSNVDKYEPKQDPGGWLAVYTTAARAAGASEDVMTAYLPIVLGQDALQWLRHLPRHCIDDWGDFSRRFIANFQSLSDKPAQPWDLKSIKRRGDETLRSYLKRFQTMRNRIPEVTEAAVIEDLYRGSNDSVFVRAILQKAPTTSEELFREADLYITADERAQDLIGGAKPASAAPRRDANPPSDKRWEKRPREEVHAAGPPASRARGGPRGGERTLDDILDAQCPYHKDMRHTLRNCRDFKHSVGHGRPFQPLPPPPPRGGPDEPQQPRRQEEGGGGAFPRVDREVNVIFGGHGSQENKRQQKLNDRQILVATTGPPAPYRWSEHPITFTREDQWLNFDHPGKYPLLVDPVIRESRVKKVLVDGGSSINVTFPRTLKGLGVHLKELHESDTPFFGIVPTEGEYPLGHIYMPVTFGTPENYRTEFLRFEVANFDCGYNAIIGRPGLAKFMAIPHYTYMILKMPGPRGIIIVRADFQGAAECFRVAIQAALTTKPSTVPSTSANSKPEEGLTVPANETQAATSMRPTEETKRINLGFADERKTAVISSSLDDK

SEQ ID NO: 342817 - protein, 252 aa, Zea mays
  unsure (1)..(252): unsure at all Xaa locations
  Clone ID: MRT4577_75813C.1.pep
DTVSWDYHFEHAGNSPVSFTVKXLSRRALYICWHYVILVHDEXMIRCLKFQSAVLKETIDDLEWPGSSIQIRMQPDPPTVILKGEGHGDLQVRFTGCPVIYVHLAPSCAYDSLSLITQIRQTEFPYYANTDLLIVFQCEHEVSHRXKKILVPRSVPPLLPVLICRASLFSPSRYKYKFLRATTSNIPSSAVKENRRTKVSIGRGGMLKVQHLVSLARPGMPYFRSIGGGNEQTSRIAHIEFFVKPEEDDNGA

SEQ ID NO: 342818 - protein, 179 aa, Zea mays
  Clone ID: MRT4577_75814C.1.pep
YLSLKDSLKSEVKIFFECYSRLPLSNCSGKPTSTSPPTSELRTSSEERSQHLQHHDAIRTSNPTNAGRRGLAKKCTPPDHLPLAPGEDLAEANARWTTSSTPSARTTRTCATPFGTAETSSTLSDMTGPSNLYLLLRRGEDQENRDNPNSRRRGEVEPSRVLQRGQRLFGNRIAGEQNP

SEQ ID NO: 342819 - protein, 75 aa, Zea mays
  unsure (1)..(75): unsure at all Xaa locations
  Clone ID: MRT4577_75815C.1.pep
LSXPYXLAXPXFTNXQARSALSSXXRXXRRRRXLSPXPELAPTASNRXSIPXRXTXCQNXNAXNRXXTXRFFXXX

SEQ ID NO: 342820 - protein, 74 aa, Zea mays
  Clone ID: MRT4577_75816C.1.pep
GPLLGESANQKRRARVFPGGACLVFAHPDTRWLGGSSPVSFKGPPGGGGQCPWGRAFGSPGINLLPSQGAALLF

SEQ ID NO: 342821 - protein, 27 aa, Zea mays
  Clone ID: MRT4577_75817C.1.pep
CLRTLSCAAGRIMFSSSERTLLNFVLC

SEQ ID NO: 342822 - protein, 68 aa, Zea mays
  Clone ID: MRT4577_75818C.1.pep
GLQVANPTSTHNPDARKRKHHPKAAPRSTRAQTSRLQEGSEVQDATVTCPRRTRLSPMKDKLVSLRFA

SEQ ID NO: 342823 - protein, 211 aa, Zea mays
  unsure (1)..(211): unsure at all Xaa locations
  Clone ID: MRT4577_75819C.1.pep
PSRRPGPSISLHIPRPRRTHASQHSRALLRADRTGSQRDWDCXRACQDLNFSRRDICXQACSEPRGVADRGGGGGGGDYASLGDRGGSSFGGGFGAAGSDVRPGDWYCSCXPHNFASRSSCLKCSAYKEEAAVNRGAGGCSGDMSRSRGYGLGTGAAGAGADAATTTNRPGGKSGDWICTSISMQERNFASQMGRFRCDAANSGTGGKDRA

SEQ ID NO: 342824 - protein, 76 aa, Zea mays
  Clone ID: MRT4577_7581C.1.pep
SMAVRGGSAGGIGARCVRVDLVLSISSRVRHSASEFSSDCLWVGNSDPRVGSSGRVKSWARRCGGSSGGQTSGSSH

SEQ ID NO: 342825 - protein, 77 aa, Zea mays
  Clone ID: MRT4577_75820C.1.pep
TPPSSISLLPYQTLPIPSSLSTSSILPKFYPSHILYFLLLITINHFYSASSLSPNIFPLSLSLNNIYYNINKNIHKY

SEQ ID NO: 342826 - protein, 52 aa, Zea mays
  Clone ID: MRT4577_75821C.1.pep
MAASAFSFVGMDSILHPHDSLPRLLLKIIPATTPEENRRRNPQPRYARNPPD

SEQ ID NO: 342827 - protein, 99 aa, Zea mays
  Clone ID: MRT4577_75822C.1.pep
PSLHRPAAAEGAGRGDGALSGPHRPLQCLAGVAKQVVTLTPRKSLVSKALQRRSKAVVCEEGQVLALERVVVGELERGAELLFRRMVQTRVALLNVLSS

SEQ ID NO: 342828 - protein, 77 aa, Zea mays
  unsure (1)..(77): unsure at all Xaa locations
  Clone ID: MRT4577_75823C.1.pep
FVRRSAENRTLNYQRYLLEAQTLKIMAWRERTRWKERWKKTRQWGTTKPDYXGDVTGAVLPHTRMVMISGVEEAYLD

SEQ ID NO: 342829 - protein, 77 aa, Zea mays
  unsure (1)..(77): unsure at all Xaa locations
  Clone ID: MRT4577_75824C.1.pep
MATKILFLLALVALFASATNAFIIPQCSLALSFIVTQVLPPVTXMGFEHPVVRAYRLQQAVVTSILQQPISQLXQQF

SEQ ID NO: 342830 - protein, 83 aa, Zea mays
  Clone ID: MRT4577_75825C.1.pep
WGQPGAPSFMGPLGLVNPGGAPLLATPPGPGGKPRMKIFWGPNPIRGGLFLTPGGIKGVFSGHDSGLPKGRAPDRFFLGIFPF

SEQ ID NO: 342831 - protein, 66 aa, Zea mays
  Clone ID: MRT4577_75826C.1.pep
FILAIPFYFTQLARSLLGKTHLWTQTKSDTESHFTSTLRTNPRKQISTVTPHSKTCFVTGITLRCL

SEQ ID NO: 342832 - protein, 84 aa, Zea mays
  Clone ID: MRT4577_75827C.1.pep
RVFIWCTKGQKQESSRHKFIEFCFLAQYPRSVLVPLSTINRNLCAPRVFNFWGSCGNRPPGSCVFFFLGTWPLCLLFYRGPFSF

SEQ ID NO: 342833 - protein, 268 aa, Zea mays
  unsure (1)..(268): unsure at all Xaa locations
  Clone ID: MRT4577_75828C.1.pep
QPQQQEEGEGGAFPRVNREVNVIFGGHGSQENRRQQKLNDRXILVATTGPPAPYRWSEHPITFTRADQWLNFDHPGKYPLLVDPXINVTFPRTLQGLGVHLKELRESDTPFFGIVPTEGEYPLGHIYMPVTFGTPENYRTEFLRFEVANFDCGYNAIIGRPGLAKFMAIPHYTYMILKMPGPQGIITVRADFQGAAECFRVAIQAALTXNRRRLLQHRQTLSLRKXTALANEAQAATSMRPTEETKRINLGFADEHKTAIISSSLDDK

SEQ ID NO: 342834 - protein, 506 aa, Zea mays
  Clone ID: MRT4577_75829C.1.pep
MAVTFHRKITLRPGSVFRFGTISSIADEEGTLHRIADQPKKKSTPTRSENIGMKKEKAQPPALRKKIAFSKPGAENPLTRRTPLSTSSTKEWTQIARKKEANKTGRKQVVLSVPPPSKENGKKIATTAAPSTPTSSSSREWSRPLSPTTSQPCPEKNLLSGNPADGGTDAEISGDITRPESGIQSNLSRETSSINASRERRHENEIRRREEYDRDHGIPARSQATRTESATASTGGTTWGRSRNHDNYSPSRDKHNPRRQEDTCGVTALTPRLRAIQWPPNFKDPGGWLAVYTTAAGASEDVMTAYLPIVLGQDALQWLRHLPRHCIDDWSDFSRCFTANFQSLSDKPTQPWDLKSIKRRGDETLRSYLKRFQTMRNRIPEVTEAAVIEDFYRGSNDSAFVRAILQKAPITSEQLFREADLYITADERAQDLIGGAKPAPAAPRRDTNQQPDKRWEKRPREEVHAAGPPASRARGGPRRGERTLDDILDAQCPYHKDMLRAPRGGG

SEQ ID NO: 342835 - protein, 92 aa, Zea mays
  unsure (1)..(92): unsure at all Xaa locations
  Clone ID: MRT4577_7582C.1.pep
TNAFIIPQCSLAPSTIIPHILPPDTPMRFXHSYMQSYKLQQSLTSIVLQQPIFHLQQQSYIHLTIQTIVSNYLXQLIQQNMINPISYFQQQI

SEQ ID NO: 342836 - protein, 402 aa, Zea mays
  Clone ID: MRT4577_75830C.1.pep
MAVTFYSKITLRPGSVFCFGTISSVADEEGILHRIADPPEKKSPPTNSENAGEAQPPALRKKIVSGKSGAEGSLTQKTPLSTSPTKEWTRIARKKETREKQVVLSVPPASKENGKKVATTAAPFYPDVLFIGRVGSPTVSDDEPTAPGEEPPQRESRRRRNRRRNVRRHHAAGERDPEQPVSRDEVSEIGETPEERVFRERRNSRRRDRRRAQEQAEQDARQPRENPFFGRNLNPDFARAMNTPSEVGGVLARIADGLPRTPDAEGYRRLFTQAANHLLPLAHPPNDLRHAINSRRDARSSINASRERRHENEIRRREEYDRDHGIPAQSQATRTESATASTGGTTRGRSRNHNSPPRDRHRPRRQEDTCGVSALTPRLRAIQWPPNFKKEIGTQQPMYCPS

SEQ ID NO: 342837 - protein, 103 aa, Zea mays
  unsure (1)..(103): unsure at all Xaa locations
  Clone ID: MRT4577_75831C.1.pep
RNXXHLGAXRGLGKLDXSCXRESTASKETSSHLLWAPAEVPNSPPLLIGYRNSPINLFLGSGGYRSTSIPELCCGSHISDPPINQPHHSLIILSSSTALHSST

SEQ ID NO: 342838 - protein, 917 aa, Zea mays
  Clone ID: MRT4577_75832C.1.pep
MAITFYSKIAMRPGSVFCFGTISSVADEEGILHRIADPPEKKSPPTNFGNAGETQPPALRKKIVSGKAGAGSSLTRKTPLSTSPTKEWTRITRKKETREKQVVLSVPPTSKENGKKVATTAAPFYPDVLFIGRVESPTVSDDEPTAPREEPPQRESRRRRNRRRNIRRHHAAGERDPEQPVSRDEVSEIGETPEECVFRERRNSRRRDRRRAQEQAEQDARQRRENPLFGRNLNPDFARAMNTPSEVGGAANHLLPLAHPPNDLRHAINSHRDARSSINASRERRHENEIRRREEYDRDHGIPTQSQATRTESATASTGGTTRGRSRNHNHHSPPRDRHRPRRQEDTCGVSALTPRLRAIQWPPNFKVSNVDKYEPKQDPGGWLAVYTTAARAAGASEDVMTAYLPIILGQDALQWLRHLPRHCIDDWGDFSRRFTANFQSLSDKPAQPWDLKSIKRRGDETLRSYLKRFQTMRNRIPEVTEAAVIEDFYRGSNDSAFVRAILQKAPTTSEELFREADLYITADERAQDLIGGAKPPSAAPRRDANQPPDKRWEKRPREEVHAAGPPASRARGGPRGGERMLDDILDAQCPYHKDMRHTLRNCRDFKHSVGHGRPFQPLPPPPPRGGPDEPRQPHQPEEGGGGAFPRVDREVNVIFGGHGSQENKRQQKLNDRQILVATTGPPTPYRWSEHPITFTREDQWLNFDHPGKYPLLVDPVIRESRVKKVLVDGGSSINVTFPRTLQGLGAHLKELHKSDTPFFGIVPTEGEYPLGHIYMPVTFGTPENYRTEFLRFEVANFDCGYNAIIGRPGLAKFMAIPHYTYMILKMPGPQGIITVRADFQGAAECFRVAIQAALTTKPSTVPSTLANSKPEEDLAVPANEAQAATSMRPTEETKRINLGFADERKTAIISSSLDDK

SEQ ID NO: 342839 - protein, 69 aa, Zea mays
  Clone ID: MRT4577_75833C.1.pep
SHWSTSMIVSSITRGLRNLALVGCPRWGHYIIAAILLDHPIQHCYARKYHSCYKTPGILDLPQICQILI

SEQ ID NO: 342840 - protein, 941 aa, Zea mays
  Clone ID: MRT4577_75834C.1.pep
MAVTFHSKITMRPGSIFCFGTISSVADEEGILHRLADLPEQKSPPTNSENAGKTLPPALRNKIVSGEAGARSSLTRKTPLSTSPTKEWTQVMRRKEIRERPVVLPVPPTSKENGKKVAAAAIPFYPDVLFIGRAESPAVSDDEPTAPGEEPPQRESRRRRNRRRNVRRHHAAGERDPEQPVSRDEVSEIGETPEERVFRERRNSRRRDRRRTQEQAEQDARQRRENPLFGRNLNPDFARAMNTPSEVGGVLARIADGLPRTPDAEGYRRLFTQAANHLLPLAHPPNDLRHAINSRRDARSSINASRERRHENEIRRREEYDRDHGFPTQSQATRTESATASTGGTTRGRSRNHHRHSPPRDRRHPRRQEDTCGVSALTPRLRAIQWPPNFKVSNVDKYEPKQDPGGWLAVYTTAARAAGASEDVMTAYLPIVLGQDALQWLRHLPRHCIDDWGDFSRRFTANFQSLSDKPAQPWDLKSIKRRGDETLRSYLKRFQTMRNRIPEVTEAAVIEDFYRGSNDSAFVRAILQKAPTTSEELFREADLYITADERAQDLIGGAKPAPAAPRRDANQPPDKRWEKRPREEVHAAGPPASRARGGPRGGERTLDDILDAQCPYHKDMRHTLRNCRDFKHSVGHGRPFQPLPPPPPRGGPDEPRQPHQPEEGGGGAFPRVDREVNVIFGGHGSQENKRQQKLNDRQILVATTGPPAPYRWSEHPITFTREDQWLNFDHPGKYPLLVDPVIRESRVKKVLVDGGSSINVTFPRTLQGLGVHLKELHESDTPFFGIVPTEGEYPLGHIYMPVTFGTPDNYRTEFLRFEVANFDCGYNAIIGRPGLAKFMAIPHYTYMILKMPGPQGIITVRADFQGAAECFRVAIQAALTTKPSAVPSTPANSKPEEDLAVPANEAQAATSMRPTEDTKRINLGFADERKTAIISSSLSDK

SEQ ID NO: 342841 - protein, 128 aa, Zea mays
  Clone ID: MRT4577_75835C.1.pep
MAPLLAAAMNHAAAHPGLRSHLVGPNNESFSRHHLPSSSPQSSKRRCNLSFTTRSARVGSQNGVQMLSPSEIPQRDWFPSDFTFGAATSAYQIEGAWNEDGKGESNWDHFCHNHPERILDGSNWSFQQ

SEQ ID NO: 342842 - protein, 73 aa, Zea mays
  unsure (1)..(73): unsure at all Xaa locations
  Clone ID: MRT4577_75836C.1.pep
AAPSCLAVWLLFSRWXCSPAPAGGASVXLCVLRGRSPLFLXLVCRRWFPRCRCLVASALVCLPGGAARGLCRV

SEQ ID NO: 342843 - protein, 516 aa, Zea mays
  unsure (1)..(516): unsure at all Xaa locations
  Clone ID: MRT4577_75837C.1.pep
MTAYLPIVLGQDALQWLRHLPRHCIDDWGDFSRRFTANFQSLSDKPAQPWDLKSIKRRGDETLRSYLKRFQTMRNRIPEVTEAAVIEDFYRGSNDSAFVRAILQKAPTTSEELFREADLYITADERAQDLIGGAKPAPAAPRRDANQPPDKRWEKRPREEVHAAGPPASRARGGPRGGERTLDDILDAQCPYHKDMRHTLRNCRDFKHSVGHGRPFQPLPPPPPRGGPGEPRQPHQPEEGGGGAFPRVDREVNVIFGGHGSQENKRQQKLNDRQILVATTGPPAPYRWSEHPITFTREDQWLNFDHPGKYPLLVDPVIRESRVKKVLVDGGSSINVTFPRTLQGLGVHLKELHESDTPFFGIVPTEGEYPLGHIYMPVTFGTPDNYRTEFLRFEVANFDCGYNAIIGRPGLAKFMAIPHYTYMILKMPGPQGIITVRADFQGAAECFRVAIQAAXPPSRRRFLLHRRTLSLRKTSXPANEAQAATSMRPTEETKRINLGFADERKTAIISSSLNDK

SEQ ID NO: 342844 - protein, 714 aa, Zea mays
  Clone ID: MRT4577_75838C.1.pep
MAVTFHRKITLRPGSVFCFGTISSVADEEGTLHRIADPPRKKSPPTNSENIGVRKEKAQPPALRKKIAFNKPGAEGPLTRRTPLSTSPTKEWTQIARKKETNKTGMKQVVLSVPPSSKESGKKIATTTAPFYPDVLFIGRVESPPVFDDEPIAPGEEPPQRESRRRRNRRRNIRRHHEAGERDPEQPVSRDEVSEIGETPEERVFRERRNSRRRDRRRAQEQAEQEARQHRENPLFGRNLNPDFVRAMNTPSEVGGPTTFYLSLTRRTTYDMPSTATGTCEAPSMLRVNDDMRTRSTAGRSTTGIMASQLGVGPPELSWQRPRLAVLPGDGRGTTTTTPLLGTDIIPDDKKTRVECLPLLHALGPFNGPLTSSATMGPQIHQAPGDKTLRSYLKRFQTMRNRIPKVTEVAVIEDFYRGSNDSAFVRAILQKAPTTSEQLFREADLYIIADERAQDLIGGAKPTLAAPRRDANQQPDKRWEKRPREEVHAAGPPASRARGGPRGGERTLDDILDAQCSYHKDMRHTLRNCRDFKHSVGHGRPFQPLPPPPPRGGPGEPRQPQQQEEGGGGAFPRVDGEVNVIFGGHGSQENRRQQKLNDRQILVATTGPPTLYRWSEHPITFTRADQWLNFDHPGKYPLLVDPVIQESRVKKVLVDGGSSINVTFPRTLQGLGVHLKELHESDTPFFGIVPTEGEYPLGHIYMPVVGDLFSSAMS

SEQ ID NO: 342845 - protein, 238 aa, Zea mays
  Clone ID: MRT4577_75839C.1.pep
MDNLKTHSEYADQPQGPQANAVSFALPTGQVLDLDSHMIGQQHTNLSSFWFSLEQHRLQLDQALQLHNQQLQVSLQQQISMQNSTLLNLVESMTRDVLMQKNDEIASLRVELQRNQEDLETTLHDRDEWMKVAMAAYEINQTLIRMLRTVQLEANSHVSSNDLDAPSYSEASSMARTALETAQPNLICKVCNSGNAGVLMLPCQHLCACKPCVAWLATCPICGAVKTDAIEARFVYKK

SEQ ID NO: 342846 - protein, 119 aa, Zea mays
  Clone ID: MRT4577_7583C.1.pep
EFAPGDSEEGDWIEVLGEQCEANGLVPPTKEVAKETASEDECQLLILSGVLETEVDFVDADAEGDHRARCSVDVGLATVPSVEQLQEEQPTVFLTEACHNNTEMSKSFLKKKKGGRVIY

SEQ ID NO: 342847 - protein, 79 aa, Zea mays
  Clone ID: MRT4577_75840C.1.pep
PPNLPLTSHLYTPKPHAGAFKIIHSLPIIQTSLYYSFFHNTIYFLNLPLSLLYSSYNTIFFFNNSILINIISSLFLSII

SEQ ID NO: 342848 - protein, 49 aa, Zea mays
  Clone ID: MRT4577_75841C.1.pep
QGRLLLFFDQADSLPIIDQPAIVLELCTWHLSVNKQSTMLSLMSIILLA

SEQ ID NO: 342849 - protein, 64 aa, Zea mays
  Clone ID: MRT4577_75842C.1.pep
QSGPFLKISQVLKRGIAANPIKWRKTRVSQTKPCKTTATKMKLGVTKKKAIMLSRTRKINLDLF

SEQ ID NO: 342850 - protein, 222 aa, Zea mays
  Clone ID: MRT4577_75843C.1.pep
MIHPPLPPHPHSAVSGSLNSHNTLQPAMQALTARSPASSSCPSSSTVHRRGGTRTRSTARFAPPRAAAAAANSVFSAPPAAVRYAAPPKPAAPIAPVPAPAPAAGGEKGLSFLQRAASAALDAFESGVIAGLLERPRALPRSADPAVQIAGNFAPVGEQPPVRSLPVSGRIPPFISGVYARNGANPCFDPAAGHHLFDGDGMVHAVRIRNGAAESYACRFTE

SEQ ID NO: 342851 - protein, 114 aa, Zea mays
  Clone ID: MRT4577_75844C.1.pep
NPKTFFLELGGEKDHQLPGGKRAPLKNPAYNIKRAGGPPFLGPPKPKGKGAKGPPYWGTKNPLGTILGGGIFLFMGHYEHLWPFLGGGIMVKKGERESSGGSNSQPTGLSLPMA

SEQ ID NO: 342852 - protein, 78 aa, Zea mays
  unsure (1)..(78): unsure at all Xaa locations
  Clone ID: MRT4577_75845C.1.pep
RGREAAPASTTAAXAAAALLLRRLLSLASAGDMSIASYGERTDQEARRMPAEWMAAHGRTYFAGGEEERRHQARPGHP

SEQ ID NO: 342853 - protein, 39 aa, Zea mays
  Clone ID: MRT4577_75846C.1.pep
SWSQVNAGKLIFRLESVVLLCSRILKNICQNVNICSEVI

SEQ ID NO: 342854 - protein, 121 aa, Zea mays
  Clone ID: MRT4577_75847C.1.pep
PRKRRSCVGIRHPHRRIRHQSRPRRRRRHVRSCGRCSVTSATMVEPPLGRWDLRRAAPVVIDAHGGCSGAPSPWARPARCPCAWERGRGMRSCGGSRRSTASMGAGKSWMRSTYRIDRRNQ

SEQ ID NO: 342855 - protein, 114 aa, Zea mays
  unsure (1)..(114): unsure at all Xaa locations
  Clone ID: MRT4577_75848C.1.pep
RQVRALPILALGQIALAIIVLLLVVPQNSGXQTNYXCSRYGYCGTTDTYCGDGYQTGPCRSSGHGRGGDXGGGEGSGGANVTNADTDAFFNGXIRTQAGSVFQLLNLLKTRLNS

SEQ ID NO: 342856 - protein, 83 aa, Zea mays
  Clone ID: MRT4577_75849C.1.pep
MESWATWVGTSVTSAFFASLERCSCINLSTDDDDDDEDHDEAKDRPLILAAAPRHDSAAKPDPDSAAEDQDDQKQEQPPLPPV

SEQ ID NO: 342857 - protein, 32 aa, Zea mays
  Clone ID: MRT4577_7584C.1.pep
SKEYKFFIRGNLNNMNIELCCPQPREKGYSIL

SEQ ID NO: 342858 - protein, 99 aa, Zea mays
  unsure (1)..(99): unsure at all Xaa locations
  Clone ID: MRT4577_75850C.1.pep
RNXPXXDXXIXTPRLVAPPEPPALLLRLKIPRYQLGLQDSRNLATEITMSCSTNPARGVPTFSHGDPSPPTMVTRYPVFWFGSGAGGSLGFKYPPPPRG

SEQ ID NO: 342859 - protein, 114 aa, Zea mays
  unsure (1)..(114): unsure at all Xaa locations
  Clone ID: MRT4577_75851C.1.pep
KNQAYEHIPCDVLPLLSCLLIPFFLSLVLPLLDLDTPGVPHLIRLAARPPFAFWRFNQLARPARLSYQPRSLTGDWDSLWLWPLSSVAVGVSPNXVLLSLASAPMPPPLAVFPF

SEQ ID NO: 342860 - protein, 242 aa, Zea mays
  unsure (1)..(242): unsure at all Xaa locations
  Clone ID: MRT4577_75852C.1.pep
MEPLPIPHPPAPPPALTSALAHLRSLLSAASSALAALPSPLQPRPITPIACIPSPQATTTKPPLPPPVTAINLPLPAAPAPYSDCPAVVRLRPSPTSTAISLPAFLAAVCADFSSSTTGPSPSHPPRILPSELSLLRRELDSWATGGHHLPGSYSYAVARVGASFCSGVTPRWEAELRQWVLENSPRYXVKVNVTDADHILVLLRLLLKAMALEAMYLLEGMQNVDNKRVGFDPRAMRVECP

SEQ ID NO: 342861 - protein, 51 aa, Zea mays
  Clone ID: MRT4577_75853C.1.pep
GPVASRNYCVGPFGCAPFNFICGGVGLSWGLFFLGQVIFGRFLVIGTPGDP

SEQ ID NO: 342862 - protein, 75 aa, Zea mays
  unsure (1)..(75): unsure at all Xaa locations
  Clone ID: MRT4577_75854C.1.pep
GRPTLFYKVPPAELANVPQNFPECPCWKKEGYPGRVPGGKKTVPYQPGAFNKRGGPSLXSFPHPRKSLNPLRRKE

SEQ ID NO: 342863 - protein, 78 aa, Zea mays
  Clone ID: MRT4577_75855C.1.pep
RMPPEAVDLVSRLLQYSPNLRCTAVDACAHPFFDELRDPKVCLPSGRPLPALFDFTAAELEGLPIELVHRIVPEHMRK

SEQ ID NO: 342864 - protein, 109 aa, Zea mays
  Clone ID: MRT4577_75856C.1.pep
FSGKQLENGCPLGVSTFRKGGPPPLVLPLRGGIQIFLKPFTGKTITLEVEGFFPIGNVKVKIPAKGGVPPDQKGFFFSGKQLENGCPPSGFNIPKGGPPPLVLRFCGGF

SEQ ID NO: 342865 - protein, 35 aa, Zea mays
  Clone ID: MRT4577_75857C.1.pep
KKKKKKKKKKKKKKKKKNNKKKKKKKNKKKTGRSV

SEQ ID NO: 342866 - protein, 39 aa, Zea mays
  Clone ID: MRT4577_75858C.1.pep
GFYRVNFPSYGEYGEEGGSLVRWQEKIKLLKKNYLSFIT

SEQ ID NO: 342867 - protein, 96 aa, Zea mays
  Clone ID: MRT4577_75859C.1.pep
PGPLFRTPVNTPPRVWVFKGRENLRVFVVIPPPPGRIFFFYVWGIPPPPAKLKFPPFWDGGCFPAPKDDLWVKGFPPFFTLGLAPPPGGLRFPSPG

SEQ ID NO: 342868 - protein, 237 aa, Zea mays
  Clone ID: MRT4577_7585C.1.pep
MAPRVADKSPLPPATGLGLGVGGGVGGVGMGPHYRGVRKRPWGRYAAEIRDPAKKSRVWLGTYDTAEEAAKAYDSAAREFRGAKAKTNFPFPSQCSVASGAAGSASSNSTVDSSGGGSGCGIQAPMQAMPLPPALDLDLFHRAAAVNAVSTGMRFPFKGYPVACPTPQQYFFYEQAAAAASGYRMLKVAPPAVTVAAVAQSDSDSSSVVDHSPSPPAVTANKVGFELDLNWPPPAEN

SEQ ID NO: 342869 - protein, 45 aa, Zea mays
  Clone ID: MRT4577_75860C.1.pep
DSRRSHMPYHLECPINKPRSVFTFASIGCVLHIRKQQLHYLTQKK

SEQ ID NO: 342870 - protein, 69 aa, Zea mays
  Clone ID: MRT4577_75861C.1.pep
KIPPKFYDKGKKFFKIFRGRAQLAQLKKRDFWGGPQMGLLKPLKIFEFIRVKKRGVLPGVKGPHFWGFF

SEQ ID NO: 342871 - protein, 65 aa, Zea mays
  Clone ID: MRT4577_75862C.1.pep
NPLSIQCCDATGKVQFTKEPNNRYNVHSYNYSDLSNKKTVSIQPSAGKDSAAVLSTTDTKKQNTP

SEQ ID NO: 342872 - protein, 105 aa, Zea mays
  Clone ID: MRT4577_75863C.1.pep
LISSTTGAQSRQKRAFLLATVTMKVAHDSAPVVVDRHFNGERRACGACPPRQRPAAASTTSAWSRSRPQPPRPTPRCRRLVPARYRRRPRARSSSQRKSECSASY

SEQ ID NO: 342873 - protein, 61 aa, Zea mays
  Clone ID: MRT4577_75864C.1.pep
WVQSNSHGSNTTPGHVRKDMTWPGNSAKFHIKSLPHTEKSEDNNLTACTQYLTIDKNGHST

SEQ ID NO: 342874 - protein, 141 aa, Zea mays
  unsure (1)..(141): unsure at all Xaa locations
  Clone ID: MRT4577_75865C.1.pep
VGHASTEPGALTVLLADEHVRGLQVRRAAADDWVTVQPVRDAFIVNVGDQVQILSNSVYKSVEHRVVVNAEEERISLALFYNPKGDVPIAPAPELVAAASLPALYPTMTFDEYRLYVRNKGARGKAQIEALXGQGNTESQL

SEQ ID NO: 342875 - protein, 53 aa, Zea mays
  Clone ID: MRT4577_75866C.1.pep
DNALQPAYLIIMCHYTIARQDGGHTHSHEHLLQSSTRFICLFYPSLPSRILPP

SEQ ID NO: 342876 - protein, 47 aa, Zea mays
  Clone ID: MRT4577_75867C.1.pep
EDQLNRGLALVPGPESDPALSIVYRCTCLGMMNLLLYLSMYMHTYIP

SEQ ID NO: 342877 - protein, 508 aa, Zea mays
  unsure (1)..(508): unsure at all Xaa locations
  Clone ID: MRT4577_75868C.1.pep
MTMAEAEAGRAAIRRALRSLKRRHLAEEGAHSPAIEALTRPFAAHALEWKEKAEKHELELQQCYKAQSRLSEQLVTEIEEGKVSKALLKEKEAMVTSLQAELEKTSEENVQLKQSLDEKIKALDLLIQEHQTVKSELEQALTKLKAAEDENQNLVDRWMLEKMKDAERLNEANAMYEEMVLKLKTAGVGGIQLNAQQETDGIIRRSEAGYIETPIPSTCTITIRAHDGGCGALMFEHNSDKLISGGQDQTVKIWGASTGALTATLHGCLGWVNDLAVXNDNKFVIAACSSNKLFVWEVSGGRPRHTLTGHTKNVSSVDASWVKSFVVASSSSDRTIKVWDLQTGFCKSTIMSASNPNSLAFIDGDTICSGHRDGNLRLWDIRSGKCTTQIAAHLDVTSVCVSRSRNFVLTSGRDNVHNLFDVRTLEICGTFRAMGNRVVSSWGKPSISPDENCIAAGSSDGSVYIWSRLKNGTPTILEGGHSSPVLASAWCGLGALATSDRNHIYIWS

SEQ ID NO: 342878 - protein, 59 aa, Zea mays
  Clone ID: MRT4577_75869C.1.pep
IRLEALQGLNFFNNGSESRGSKEVRFLREADKMVRTRVTPAKRLLHLFQTTWQRNGYHG

SEQ ID NO: 342879 - protein, 110 aa, Zea mays
  Clone ID: MRT4577_7586C.1.pep
MQGGFTELMLEQIRNSQEDDQSDSNRQVKQYYKYIEITVHKRGNYSCIGGVNLAQSKCNLPGLLKIVQQHERMQGTLTQMIIGNDMNEVKLYMLVNLVVLYFLVNNHHFH

SEQ ID NO: 342880 - protein, 115 aa, Zea mays
  unsure (1)..(115): unsure at all Xaa locations
  Clone ID: MRT4577_75870C.1.pep
FNELVPFTLTXRILHALFSNRGVERLVVSAMCSAVQPVVSPKQSQRIWHHLAMSFPDELLSXFXKRPPGISSVPAADGMINPSHDQQMVANNCAHVISRIMIISAHCLADEDDNA

SEQ ID NO: 342881 - protein, 181 aa, Zea mays
  unsure (1)..(181): unsure at all Xaa locations
  Clone ID: MRT4577_75871C.1.pep
MVEAEAGRAAIRRALRSLKRRHLAEEGAHSPAIEALTRPFAAHALEWKEKAEKHELELQQCYKAQSRLSEQLVTEIEEGKVSKALLKEKEAMVTSLQAELEKTSEENVQLKQSLDEKIKALDLLIQEHQTVKSELEQALTKLXAAEDENQNLVDRWMLEKMKDAERXHEAMRCIEEMVLKL

SEQ ID NO: 342882 - protein, 159 aa, Zea mays
  unsure (1)..(159): unsure at all Xaa locations
  Clone ID: MRT4577_75872C.1.pep
GLSTSGRPPGVVAKSNKGYNITCATYGSDIEGGDDKEPPASEDAMPSDTSWPSAPPYVATPFCFCPAPRLPFLSCAGRGGLPRVRSQTARPSTFYFQPPATXSDSTVCFSNQSSSATDTRHEQRKLSSCLFLQXSATRADKRGARPLRDIGSRRGHGDL

SEQ ID NO: 342883 - protein, 76 aa, Zea mays
  Clone ID: MRT4577_75873C.1.pep
KTMNFTREGANYLNKISLQSNFFCYTGHSKSFLHNTFAQRKAVQTISYKICRYLTTSYVPSKLGLYSQKKPTTAAT

SEQ ID NO: 342884 - protein, 39 aa, Zea mays
  Clone ID: MRT4577_75874C.1.pep
MACEQGRRDTGVTERVSLPPRMAKAEEVEELADIALHWA

SEQ ID NO: 342885 - protein, 138 aa, Zea mays
  unsure (1)..(138): unsure at all Xaa locations
  Clone ID: MRT4577_75875C.1.pep
MGTAFDSPTSCPAAANLPRQPLPTFGRREXAPGHERCRKPXRLRPGTIALGEIRKYHNTTKLLXIQRLTFKRLRRXIAQDFKTELRDHCSDEAAMQEAVDVYLKRLLEDTNLCNIHVKMDTIMSKDIQIDSRIRDERA

SEQ ID NO: 342886 - protein, 64 aa, Zea mays
  Clone ID: MRT4577_75876C.1.pep
SAWQFRPEFSEELQACYLALNHAMNALEKFEVLFTICLAPQLDGAYTNTLMVKCISSGCVLELA

SEQ ID NO: 342887 - protein, 37 aa, Zea mays
  Clone ID: MRT4577_75877C.1.pep
WGSHHREKDITCRCGAYTRCVILDPASRAYRGCKNGR

SEQ ID NO: 342888 - protein, 47 aa, Zea mays
  Clone ID: MRT4577_75878C.1.pep
KRFTNFVSLWCIRPESSQVIVEWKRLCCILLKKVKLIMDLPWYCLFS

SEQ ID NO: 342889 - protein, 169 aa, Zea mays
  Clone ID: MRT4577_75879C.1.pep
LHGGNQQRDWLHTTSLSSRRLLEPAGSVVPTAHQAISAADSDPCSTTSLVSPCVEFVLLQLDLKGSPEERRARDAYPAWPPAQHLTPPRFAFAAELTPRACSHKEGRISRMARTGCRVGLGPRRWSKGCSNVQYFLIGDSWVTFSPTSTSYGCSKPQISMDYSCCSSPT

SEQ ID NO: 342890 - protein, 97 aa, Zea mays
  Clone ID: MRT4577_7587C.1.pep
DLRGQFDHATFFFWFTGQTKTTLAKTHYLNLKGPNPKTKSLGKKGWGLNSSPYQTKKKFWSIIKQVTPPPPILPEHPQNNGARPWTFGNRGAGGNLP

SEQ ID NO: 342891 - protein, 231 aa, Zea mays
  Clone ID: MRT4577_75880C.1.pep
MRAKIQNQRSHLQQLDPSIREMAEQIASDPVFNQTAEQLQKSAQGAGEQGIPALDPQQYMETMQQVMQNPQFVSMAERLGNALMQDPAMSSMLENLTSPAHKEQLEERMARIKEDPSLKPILDEIENGGPSAMVKYWNDPEVLQKIGQAMGVNLPGDSSVSTVLSGPEETEEEGGDDDESIVHHTASVGDEEGLKKALEGGADKDEEDAEGRRALHFACGYGEDKIFSLPP

SEQ ID NO: 342892 - protein, 118 aa, Zea mays
  unsure (1)..(118): unsure at all Xaa locations
  Clone ID: MRT4577_75881C.1.pep
IQLRQGHARQAPHPVLXXAIAAXPAPPAARRRRGHAAAAAAAGAAAAAVHHAPPGGGRVRGAGGHGRAVRAPARAAPARDGRRGGRAADTGVAGDRAALGHQVLRARAVLRARAHRGG

SEQ ID NO: 342893 - protein, 257 aa, Zea mays
  unsure (1)..(257): unsure at all Xaa locations
  Clone ID: MRT4577_75882C.1.pep
FFLSAEPHSDSFGIVNFTIVLYARHVQDPSIREMAEQIASDPVFNQMAEQLQKSAQGAGEQGIPALDPQQYMETMQQVMQNPQFVSMAERLGNALMQDPAMSSMLENLTSPAHKEQLEERMARIKEDPSLKPILDEIENGGPSAMVKYWNDPEVLQKIGQAMGVNLSGDSSVSTVLSGPEETXILLEAGAAVDALDKNKNTPLHYAAGYGRKECVDLLLKYGAAVTLQNLDGKTPIEVAKLNSQDEVLKLLEKDAFL

SEQ ID NO: 342894 - protein, 323 aa, Zea mays
  Clone ID: MRT4577_75883C.1.pep
MASDESKNSKPEKPSSAAGAGLPNPFDFSSMSNLLNDPSIREMAEQIASDPVFNQMAEQLQKSAQGAGEQGIPALDPQQYMETMQQVMQNPQFVSMAERLGNALMQDPAMSSMLENLTSPAHKEQLEERMARIKEDPSLKPILDEIENGGPSAMVKYWNDPEVLQKIGQAMGVNLPGDSSVSTVLSGPEETEEEGGDDDESIVHHTASVGDEEGLKKALEGGADKDEEDAEGRRALHFACGYGELKCAEILLEAGAAVDALDKNKNTPLHYAAGYGRKECVDLLLKYGAAVTLQNLDGKTPIEVAKLNSQDEVLKLLEKDAFL

SEQ ID NO: 342895 - protein, 152 aa, Zea mays
  unsure (1)..(152): unsure at all Xaa locations
  Clone ID: MRT4577_75884C.1.pep
PLPPPKRVFPPVGQPXGPPCXPFPGPPVKAXIFCPSPLAKKKAPGGPKPEPPFPRGFPIFLNNLAKQXPPGNRPLXPPPIYFRLLPSLAPPVFPLYLPAFFFGGNFKGKPFPPRNPLRPXPPSFNPPPKRETWNPPRARPEIPGPPPGPPPG

SEQ ID NO: 342896 - protein, 87 aa, Zea mays
  Clone ID: MRT4577_75885C.1.pep
VWVLDVGTGVAELFFEGHSHPGEGVLFIQALVTLRDCSRCRVLSYGMVQVVLGCGSINAVPKHKIIQWCLGGKCHPGRWISAIKFSL

SEQ ID NO: 342897 - protein, 56 aa, Zea mays
  Clone ID: MRT4577_75886C.1.pep
CPGSSKHVTSDWLSSMPHSRVKAQKSSSVMFLIGRDPQVQSGQQRLVARAPPPQSF

SEQ ID NO: 342898 - protein, 59 aa, Zea mays
  Clone ID: MRT4577_75887C.1.pep
IYSRGSFKRYGSTKNLTGAMTDPPFFCPTYPLLDIFLGACLSRGGTQIFFLTPAKFTKI

SEQ ID NO: 342899 - protein, 95 aa, Zea mays
  Clone ID: MRT4577_75888C.1.pep
LHASMSTARAASQEVGVRLRGPPATSTSLSPAAMMTMCWTSIIFPASAASASLCLCPLSLPSGHRAGRIRLSVATYLFMASPAVHQKNKHGIRQS

SEQ ID NO: 342900 - protein, 108 aa, Zea mays
  unsure (1)..(108): unsure at all Xaa locations
  Clone ID: MRT4577_75889C.1.pep
MGPKAENXPAAYKPAEEEPAADNAPAGKKPEAGNRVPACKAPAKESGEGNKGKKKGKKSAETYKIYIFKVLKQVHPDIWISSKAMCIMNSFINDIFEKLAAEADKLAR

SEQ ID NO: 342901 - protein, 65 aa, Zea mays
  Clone ID: MRT4577_7588C.1.pep
RPRAGPGVRVNAGPEQGAQATCPPAEGFGRSSRSKTRWFARFCNSHQVSHFATFFIDAGAEISVR

SEQ ID NO: 342902 - protein, 108 aa, Zea mays
  unsure (1)..(108): unsure at all Xaa locations
  Clone ID: MRT4577_75890C.1.pep
IQKTPSRKKAPTAKTPAPNHPKAKPRKNPPHWRPLNQPLKGPNPPKSKPXYQSTARRLXQRRNGKNPGTPQLKPLATHPPSPRWGKTKKARPNPPSQKCPNRKAKRTP

SEQ ID NO: 342903 - protein, 29 aa, Zea mays
  Clone ID: MRT4577_75891C.1.pep
HYLLNLNPDLSNKFFFHKNSNYRNILMTL

SEQ ID NO: 342904 - protein, 31 aa, Zea mays
  Clone ID: MRT4577_75892C.1.pep
ARLKCSYHSPLGMIDSSQARSVKASCLAFTI

SEQ ID NO: 342905 - protein, 70 aa, Zea mays
  Clone ID: MRT4577_75893C.1.pep
FSFGFFFISFLFFFYFFLPTKKNFIFELYLITNLKEGPTNGGLFEKPCWFSKKQFGTMAPIVTIKKGCQS

SEQ ID NO: 342906 - protein, 66 aa, Zea mays
  Clone ID: MRT4577_75894C.1.pep
WSSSRPAWSMWTHLALWWSAWLTVSPHCSFAPPSRQRGLKETTLHVAISVSLILNNFRTLPTKELT

SEQ ID NO: 342907 - protein, 132 aa, Zea mays
  unsure (1)..(132): unsure at all Xaa locations
  Clone ID: MRT4577_75895C.1.pep
GVTRTSCNPTPSPSPTSDAQNPTQHHPPLPGVEVGGSSIPMPPLTPTPSSSSICPMSCVCTRSIVSSAPTVPRPSHRPPMAIPPTASRPRTSLQTSPPASTYPREWIPGRXPPSVVPXSTPPPSMPRCPPAA

SEQ ID NO: 342908 - protein, 103 aa, Zea mays
  Clone ID: MRT4577_75896C.1.pep
QNPPFFHVSQLKPFTPNYGPVFSKLPKVLDLGHEIVQPMDILDKRLVKKGGAALTQVLIKWSGLPVTATTWEDYNVIRARFPNALPWGQASIPGGANVPAEGD

SEQ ID NO: 342909 - protein, 85 aa, Zea mays
  Clone ID: MRT4577_75897C.1.pep
TILSNLVFTELQHVISTAREKARTERSCCCRKKKNYRRRRRTDGDSSMRNTGMHWTSCVCPGSACAPPLRAHRARTPCRARALAG

SEQ ID NO: 342910 - protein, 113 aa, Zea mays
  Clone ID: MRT4577_75898C.1.pep
PRGVGFAPRGVPAQGPDLSFVFCLARAPPIFFPGFFFFAPGNSNYVGGVGGYFLLKFFSRFKNPFPSGKGGVSGGCLEGFPLIRVPLGKPVFFRAGGFFLGRGSQFLGGAPPF

SEQ ID NO: 342911 - protein, 559 aa, Zea mays
  Clone ID: MRT4577_75899C.1.pep
MRRSRSCLSCVPMGTAALPIENHFVAPAALPSVPASDSEDGGFGKGSIDLGGLEVRQVTTFAKVWSTTQGGQDGLGATFFKPSPVPAGFSVLGHYAQPNNRPLFGHVLVGRDTSGAGGALLAAPVDYALVWSSPDGAGHFWLPTAPEGYKAVGVVVTAAADKPSPDEVRCVRADFTDACETEESVWSSDKDGFSASTLRPAVRGIEARGVHAGTFLAQSSATPAAAAGVSTTLACLKNNSASYTSSMPDLAQLNSLLAAYAPHVYLHPNEPYFPSSVAWFFENGALMYQKGSSQTPTPVPADGSNLPQGGGNDGGYWLDLPADGNQREKVKRGDLAGAKVYVQAKPMLGGTVADLAVWIFYPFNGPARAKVGLIPSIPLGEIGEHVGDWEHVTLRVSNFSGELLRMYFSQHSAGTWVDASRLEYLDGGDGGGSRPVAYASLHGHAFYPNAGTVLQGNSGLGIGIRNDCARGSRLDTGAGRCEVVSAEYLGVKEPAWLGFEREWGPRDEYDIGREINRAARLLPRSVRERLAKLVEKVLVGEGPTGPKMHGNWRNDEREA

SEQ ID NO: 342912 - protein, 51 aa, Zea mays
  Clone ID: MRT4577_7589C.1.pep
FLPVMLTLTDTPAQLSFLEEAPLLVPSLPSYSSCTLKPPSISLPSMPNLYT

SEQ ID NO: 342913 - protein, 43 aa, Zea mays
  Clone ID: MRT4577_758C.1.pep
TERHQSPGGEFLFLFYRLNRISSHMQSHHTSQVKNLLSISKLE

SEQ ID NO: 342914 - protein, 129 aa, Zea mays
  Clone ID: MRT4577_75900C.1.pep
PISTTNLSSLSPNCLPTTGFGDKSDQEKHLPLHAQEIGTDRPGCADEPLQVSPPYSLQRHLKTEVACADKIWLRLWASSMLASRGSQSAVSALRMLCFSKEEVDALVEHMNGDMRVRFVGVPVALNKES

SEQ ID NO: 342915 - protein, 66 aa, Zea mays
  unsure (1)..(66): unsure at all Xaa locations
  Clone ID: MRT4577_75901C.1.pep
LLEHEVLPAVTSYHRTGSVCEXPQDQPYLMQQAIAAGILPLSASILQQSSALLQQVPHVHLLAQNI

SEQ ID NO: 342916 - protein, 90 aa, Zea mays
  Clone ID: MRT4577_75902C.1.pep
ASPPSAGRSSARSPPHESPGDGGAPLSLTSAAVAAASARSLAMAVEASMERARDCRRHEHQLMHQPRIHRRSALASVTSFTMQWASGSAS

SEQ ID NO: 342917 - protein, 186 aa, Zea mays
  unsure (1)..(186): unsure at all Xaa locations
  Clone ID: MRT4577_75903C.1.pep
MFVQEEKIFAGKVLRLHICAADGAEWLEEATEDTSVEKLKESCLKHGAHGSLEDPKNVTHHKLIHAASERVLSDSKTILEENIQDQDVLLLIKKRVPSPLPKMADVSAEEKKKQEQKAPDKDAILRATANLPACSTDRTAVQTTMRDFQTDXRXILVSLIGGAQKLLALNPDAXVELFXEANAMLD

SEQ ID NO: 342918 - protein, 120 aa, Zea mays
  Clone ID: MRT4577_75904C.1.pep
PSVWVSGTSPCCSRVTPAENEEESEVTQEKTPPPLESQAGTWLYFDICESEPDSPTNKENEEESEVTQEKTPPPSESQAGTWLYFDICESEPDSPTNKGEEVADFCCFCAKVVPHDEKQD

SEQ ID NO: 342919 - protein, 92 aa, Zea mays
  Clone ID: MRT4577_75905C.1.pep
VDDAPADGRIRAREVYAPLCASPLVFARQRSQMGPGVISPRSQGLFFLFKKKSLTTPRVPGFVSRKEKERRKRNALSRARRCPKKKRKKKED

SEQ ID NO: 342920 - protein, 80 aa, Zea mays
  Clone ID: MRT4577_75906C.1.pep
WTPLVGFGCFLTRNRAGPEYCPSGIGHSDIQATAKLDGARYAGCHLFECCFGRLGSFISVYSHLVHSLYIRILFPVPSSK

SEQ ID NO: 342921 - protein, 85 aa, Zea mays
  Clone ID: MRT4577_75908C.1.pep
FTKLCFVQISTTEVRKRRVKEGRKKKKHSERLGCSYFKLVERLGSDRGRFKFQFQALEAGWSQGSPSSSFIRSASLHRKVAPPRF

SEQ ID NO: 342922 - protein, 300 aa, Zea mays
  unsure (1)..(300): unsure at all Xaa locations
  Clone ID: MRT4577_75909C.1.pep
MEAAAGGVEAEGVMRVLVVDDSPVDRRVAQLLLSSDSCAGSFHVIAVDSARKAMEFLGLKDGGEEQAVDMVLTDYCMPEMTGYDLLKAIKALNPLEPIPVVVMSSEDEPQRISRXQPALFFPLFEHRFLWSLSRPLXCMLNHPVRXIADGAKSPGPCVLTGXFIHSSTRPVCTDGLVILRSRCLSAGAEDFIVKPLQSKDVQRLRNCSAAARPSKGAAPCEAAVVAKRNQKPPHPAGAASPSGRRASLAGVAMVLHSSGVEYLPLLLKLVVLAYAALCLGELLHRWASSDGRCSLSPWCA

SEQ ID NO: 342923 - protein, 75 aa, Zea mays
  unsure (1)..(75): unsure at all Xaa locations
  Clone ID: MRT4577_7590C.1.pep
KKKKNNKKKLKKIKKKKKKKKKKNKKKEKKKKKXKKKKKINKTKKKKKKKKKKKKKKKKKXKRIIKTKKQKQYVN

SEQ ID NO: 342924 - protein, 105 aa, Zea mays
  unsure (1)..(105): unsure at all Xaa locations
  Clone ID: MRT4577_75910C.1.pep
LPLFPSDLYTLFDGFDILNSFRANPPXPGIELGPEFKKVDKYLARIKYIPSIGELDTLNGSCDGXAGSGMTLKGXVTISAKPSTKLLIXEGNVLENKDVNGPEDL

SEQ ID NO: 342925 - protein, 348 aa, Zea mays
  Clone ID: MRT4577_75911C.1.pep
MAGKMKELDGASPAKIFIGGLSKDTSMSTFKEHFGKYGDIIDAVIMKDRYTQKPRGFGFITFADPTVVDRVIEDEHVINGKPVEIKRTIPKGAAPLKDFKTKKIFVGGLPSALKEDEFKEFFSKFGKVVEHEIIRDHATNRSRGFGFIVFDAEKAVDDLLHKKGNMIDLNGSQVEIKKAEPKKPSNQPPRSLDSEPRGRPYADSYDGFGSSYNYGGSFGPYRSPRSFGARPSSYSSAYGPGDYGSGYATYGGALVGYREPSLYSSRYGSTYGGSLGGGYGGVSYDGGLAGAYERDAGGYGGSSYGRSYDSSWANTGDGFGTGGLYGARTGYGGSGGSGAAGRYHPYGR

SEQ ID NO: 342926 - protein, 138 aa, Zea mays
  unsure (1)..(138): unsure at all Xaa locations
  Clone ID: MRT4577_75912C.1.pep
VWRTALSGAPGVVHSKXFSFGFPRHSSALIHRTVWCTSGAMAICAQWSTLMDEQCTTVTRQKSEQKVRGAPDCPVWHRTIRCGTGLSGVGPDCLLPHEDKASNGRPAPDPNDRVTWRRTRHYPMAHRTVRCAHRQQPS

SEQ ID NO: 342927 - protein, 862 aa, Zea mays
  unsure (1)..(862): unsure at all Xaa locations
  Clone ID: MRT4577_75913C.1.pep
MAAASPPTSSSPPPPRAADGDGDGVGCGAARCSSPTPAQRRRTSPNHSGGSSRKSSGSRDFAGGSLLKYVNKSTLHFKKSKNRRSGSPVNWTPRKKTESYMKRKIKHLQETDGMTASLHETLGNANPHYTRMAREKIAAREAARKATDARKAAMVEASWCRILRAARIQNKNAEEVMEKAVLQATEAFEEARALGVMMYDRPDCPHKQYEVESSLHTGAQSTHKVIASFQTAFQVDMEVSAAVKKAFVQLANSPDSAKREEFKELLWKISQNPDLTEHEDKQQLVDCSNEDAIVLKLNKEHLSGSCVASDFNTTKVQESIDVVSIMLERLKALHEEELASLAVIVATSGLNAELQNERSKYHETGAVNNTSAGSLRSQARRYSTAASFIGVQGPKKEVTSELPSLDKFLVKHLSKLEREVQEAREASRKSTLVKSVTQGAHIQFTGSNAKTPESTSELSSILVKHVSKLEKEILEAKKXSTKEFTRWKEIVRMSNQMCSQETKNWNLTRFSQKLKVTVIQREAXESKESCIDNNDIKDNDDCVQEDKENKNCYSHQLPPSGAKGKHGGKRLTRLEAARLEALKSFCTIDGNALDAGLDKIFVKPIHRLEKEKREAREGQINVQKHPQKLGQSATVTEGLDDILVKHVSRLEREKIDYQKRNELGVGERWSNVPHDQRSNGNNVKSSDSLDQVLVKRISRLEREKLEYEKRNALEGGSDVEPKREPHCNNAAASDSLDQNXLNMSPDLTRRRXHEKNGGMIIVKKGQTQCTNGAEGGLADVFVKRPTKLEQAKLASAAEEKPASGFNPVEERRRARQKELLDAWGGMGLGNSMKPHVSRIERDKVAWRIAEDEQKQMAAAREA

SEQ ID NO: 342928 - protein, 79 aa, Zea mays
  unsure (1)..(79): unsure at all Xaa locations
  Clone ID: MRT4577_75914C.1.pep
PYGAASNPPPAGQPAYVPPPPVQXPKKRIGALALPGRGAPAEEEQHNKKKKGKKKKKKKKKKSLVVPCLGESAIPPWRR

SEQ ID NO: 342929 - protein, 225 aa, Zea mays
  unsure (1)..(225): unsure at all Xaa locations
  Clone ID: MRT4577_75915C.1.pep
MAVDPFDSALDLLRRLNPKQTTDHLNAIISIAPDLTEDLLSSVDQPLNVRRCKQTGRDYLLCDYNRDGDSYRSPWSNQFDPPLDEAGSGGVGAGGNEGAGEGAIPSERVRKMEVKANEAFDVYRDLYYEGGVSSVYFWNLDXXFAGVVLLKKSSPQGGISRGCXWDSXXHVFEAIERGRSTHYKLTSTVILTLXXTSGGNXGGMDLSGXMTRQVEQDLPVENDDS

SEQ ID NO: 342930 - protein, 56 aa, Zea mays
  Clone ID: MRT4577_75916C.1.pep
PNQHHAGHLPTLASTKESPHHEYHSSESQTLNHEHTQIAEHSLTHLNLKSQPSTII

SEQ ID NO: 342931 - protein, 60 aa, Zea mays
  Clone ID: MRT4577_75917C.1.pep
LDARIIHAPRVFAPPPPPPPQPQQCRRTRPSGSRELAKRCAERPSLLDRMALTYISTRQR

SEQ ID NO: 342932 - protein, 141 aa, Zea mays
  unsure (1)..(141): unsure at all Xaa locations
  Clone ID: MRT4577_75918C.1.pep
GRLVRAQRPQDXDAEFRRRELTIPGCSFSAAGLLFPYHLGAAQCLMDRGYIXLIASGNTMQDALQVTKVLADNCRSKGTAFRLGAVLKDVLVELLPDDPHIRCNGRIRVAITQLSWRPRAMLEDQYDFKEDVINAASTGPL

SEQ ID NO: 342933 - protein, 110 aa, Zea mays
  Clone ID: MRT4577_75919C.1.pep
TGEKKPRPNCKIFKKKKKRLHNQTQKKKKPNSQNWKTKRKHPPPCMHGRAKKILHYKPRHHHQTWETFLRSPPPPLKKPNSTNPSCKSANPPAVNKQKGTLAPVHRERVK

SEQ ID NO: 342934 - protein, 171 aa, Zea mays
  unsure (1)..(171): unsure at all Xaa locations
  Clone ID: MRT4577_7591C.1.pep
TLLASPPAAAGEEAXXXXEXAPGXGPXXAXXXXENGQSXEAXRXXXXDXDRXGKAXKRTAGXPFFFAGDAXNQXNXXGEGXXTDEARSXXEXNPPKXKEGKXXXXSXGXXEPKXGXHXXEXTGXPGQSNEXXQEXXRXXRXHXDRGXNEXKXXDXEKAQXGRGXSHSRXKG

SEQ ID NO: 342935 - protein, 397 aa, Zea mays
  unsure (1)..(397): unsure at all Xaa locations
  Clone ID: MRT4577_75920C.1.pep
MLRACTRVGGAGAGGCGRRERLMASLIPFLPPSPYSTHLPRQPQSQPPTAATQPAAAARPSRFRLLFARAAAQRQRDSEPAPAAEERRSLAVRTGELFLGLAALLLRGTGAERSGGAAVEEMEARDGVVWEQRPQDVDAERRRRELTSPGFSFSAAGLLFPYHLGAAQCLMDRGYITETTPLAGSSAGAIICAVIASGNTMQDALQVTKVLADNCRSKGTAFRLGAVLKDVLVEFLPDDLHIRCNGRIRVAITQLSWRPRGLLVDQFDSKEDVINAVITSSFIPGYLAPRPATFFRNRLCIDGGLTLFMPPTSAAETVRICAFPAKPFGIXDIGISQDIEIRPDCNPENRASPRQLFNCLSPRMINPLSLIELSSVCPEVILVSKAEFMRIHACNIL

SEQ ID NO: 342936 - protein, 75 aa, Zea mays
  Clone ID: MRT4577_75921C.1.pep
KHTGPGVLSMANAGPNTNGSQFFVTTVKTSWLDGRHVVFGNVVEGMDVVKQVEALGSQSGKPSKKVVIADCGQLS

SEQ ID NO: 342937 - protein, 345 aa, Zea mays
  Clone ID: MRT4577_75922C.1.pep
TQPAAAARPSRFRLLFARAAAQRQRDSEPAPAAEERRSLAVRTGELFLGLAALLLRGTGAERSGGAAVEEVEARDGVVWEQRPQDVDSERRRRELTSPGFSFSAAGLLFPYHLGAAQCLMDRGYITETTPLAGSSAGAIICAVIASGNTMQDALQVTKVLADNCRSKGTAFRLGAVLKDVLVEFLPDDLHIRCNGRIRVAITQLSWRPRGLLVDQFDSKEDVINAVITSSFIPGYLAPRPATFFRNRLCIDGGLTLFMPPTSAAETVRICAFPASRLGLQDIGISPDCNPENRASPRQLFNWALEPAADETLDKLYELGYLDAAVWAEQNYAELIAKNDQSLVAD

SEQ ID NO: 342938 - protein, 124 aa, Zea mays
  Clone ID: MRT4577_75923C.1.pep
LTYQHQAIKNFTSTPMTSRFELFTEYTTSIVRVCFPLYQSPWIFLSSRRCERIKKGGQLRCSKALRTPNTTSAARWSLVTATWTGARLELVEHGDEQLHDEGSSGMARAQAETGVARPASRYPM

SEQ ID NO: 342939 - protein, 98 aa, Zea mays
  Clone ID: MRT4577_75924C.1.pep
LPKQTIPWGFMAPRWQKCWRFHPSEGLINGIKKGGNPKKSFLHGGGALQTGGQEGPTGGGGYRTEHFLRPHFPRNIFDRGFIQGAQILRGLRGWVNGT

SEQ ID NO: 342940 - protein, 83 aa, Zea mays
  unsure (1)..(83): unsure at all Xaa locations
  Clone ID: MRT4577_75925C.1.pep
ALFIFYYFFLFASGYRIQAHXGNARLKTSKFTSRYKIIKAYASVCRPINAQYTMHLALPNGICXLXQKVKWTRFAGLKHSLYV

SEQ ID NO: 342941 - protein, 173 aa, Zea mays
  Clone ID: MRT4577_75926C.1.pep
AAAMGADLIVMAISAVDGWTDDDTKLMEHVSVNRKSSGSAVPMVLVINKVDCAPFVPGEQFKQFSGLFRKHVQTCAVTGKGISDLESAVIEVRGIEHVPSEGRRWTVNQRQFEQLLRTKEAFARLESSINEQLPMDFWTVDLREAALALATISGEDISEEVLSSIFSKFCIGK

SEQ ID NO: 342942 - protein, 281 aa, Zea mays
  unsure (1)..(281): unsure at all Xaa locations
  Clone ID: MRT4577_75927C.1.pep
PPVLVQGRRRTVAASSPAXPPIRALDVGAAMHDRDSDVSNARLSQCARMLEARGILVNSFDWLEARALEALSRGLCTPGRSAPPVHCIGPLVLAGNKGGASERHACLEWLDAQPDRSVVFLSFGSLGRHALPQLREIARGLENSGQRFLWVVRSPPEHRSNSVEPDLDLEPLLPEGFLERTRERGFAVKNWAPQSEVLRHLSIGAFVTHCGWNSALEGIASGVPMICWPLYAEQKMNKVHMVEELKVGVVMEGYXEELVKAEEVEAKVRLVNAPGSGDGEE

SEQ ID NO: 342943 - protein, 102 aa, Zea mays
  Clone ID: MRT4577_75928C.1.pep
MLILGTSGSNGSAARSDGGDLTNTTVFVGGLDPNVSEEDLRQTFSQYGEISSVKIPIGKQCGFVQFAQRKNAEDALQGLNGSTIGKQNVRLSWGRNPANKQR

SEQ ID NO: 342944 - protein, 82 aa, Zea mays
  Clone ID: MRT4577_75929C.1.pep
ANQFFFLFFLSKGKHKYQTQRKGNKPPQNCKKSKAFEILKLLHSKQKSSLFLPKSPNKLKVNRLSPSLSKCPPLFSQPPFFP

SEQ ID NO: 342945 - protein, 129 aa, Zea mays
  unsure (1)..(129): unsure at all Xaa locations
  Clone ID: MRT4577_7592C.1.pep
QLPPAVLGVQCHKKDQQNTPLLGVFLPPQHPLMHEADQLCHPHIWNTTXDPLGADHAPTENTWHAHHAPDDILGQLRSTIERHIILHIEPAYTXLYSMSXFVIAVHADNVAVSGHQRTRNLYTRPSPKD

SEQ ID NO: 342946 - protein, 91 aa, Zea mays
  Clone ID: MRT4577_75930C.1.pep
LYYLGILGGFCSFFAFFLPILLFCSKKLPSPPLLRPHTPGPTRAPTLGKPKPNSSATSLSTTYVATRERLLFSAQTNTQILRLLVVQGNTQ

SEQ ID NO: 342947 - protein, 79 aa, Zea mays
  Clone ID: MRT4577_75931C.1.pep
AARQLCYSVLPWGFFQAVCPRFFPNRFFLLAVGIWLCRHVRLDVYQSLWGPDDPRMNPTFPFIGAVSVKFSKNKLEKPP

SEQ ID NO: 342948 - protein, 94 aa, Zea mays
  Clone ID: MRT4577_75932C.1.pep
TRLKLGIRLERTEKTSRQVNMSPASQPASQHPTHALPRTRLTTDSRLAVSSPPLRSSVHTSPRERESWTPGGVFYSAKWPGPVVFAASCEASAP

SEQ ID NO: 342949 - protein, 126 aa, Zea mays
  Clone ID: MRT4577_75933C.1.pep
FSITTTSSCFLNSRALSPPACGVYMMTANGMIKGPFEVAEVEVRITKFFIDSRLLRSLLRQDESRPSNPPTGNVIAFILGRTQGLRLPPPDRRARGLQQQALPQDDAIRWCTHPPQVRLLDRPAIA

SEQ ID NO: 342950 - protein, 43 aa, Zea mays
  Clone ID: MRT4577_75934C.1.pep
RHIQWTTRITGSNLTLRPTLSLVGINICSRSNKKKKKKSTAAQ

SEQ ID NO: 342951 - protein, 87 aa, Zea mays
  Clone ID: MRT4577_75936C.1.pep
MRVLLVALALLALAGSATFTHTSGGCGCQPPAPVHLPPPVHLPPSVHLPPSVHFPPAVHLAASVHLPPSVHVPPSVYLSSTPCHYPT

SEQ ID NO: 342952 - protein, 255 aa, Zea mays
  unsure (1)..(255): unsure at all Xaa locations
  Clone ID: MRT4577_75938C.1.pep
PAGLGEQITRTIRPLPRHYLLQGCYAARATRSSCSNPIPPSPVAPPALAHARAPRLLPPSXQPAPEAPXQPAALSPATSRSSTPLTHAPDHDGDGPXPRRPPGAPPRPXPMPPTASSPRSRLSSLPPPPRRLASSRSSPSIPTAPMGFPAPXPPPPEPPRPRCPRPPRXPTPSPSRXRQPPAAVTPVSPXPPPLRAPPGPPPXDAHXPPPSPASRRPPRRXXPLRRRPPQPPXSAPPXSSPPPXXSPTRPPSTQR

SEQ ID NO: 342953 - protein, 176 aa, Zea mays
  Clone ID: MRT4577_75939C.1.pep
MGDSGGSVVSVDVERISFGGKEHHIQTNHGSVSVAIYGEHDKPALITYPDIALNHMSCFQGLLFCPEAASLLLHNFCIYHISPPGHELGAAPILPSTPVASPDDLADQIADILDFFGLDSVMCLGVTAGAYILTLFATKYRERVLGLILVSPLCKAPSWSEWFYNKVMANLLYYYG

SEQ ID NO: 342954 - protein, 108 aa, Zea mays
  Clone ID: MRT4577_7593C.1.pep
KKKKKKKKKKKKKKKKKKKKKKKKKKKKKKKKKKKKKRLAGPLLFRPKPFGLFLIRPPGFMGAPPRGPGGGFFWGARGQSPEISKTQCCRKGGQTDFFLRGVPVSSWA

SEQ ID NO: 342955 - protein, 112 aa, Zea mays
  Clone ID: MRT4577_75940C.1.pep
GDTVQIVDSIQDRDINQVYVIGGDGTQRGAGVIFEEVRRRGLKVSVAGIPKTIDNDIPVIDKSFGFDTAVEEAQRAINAAHVEAVSAENGIGLVKLMGRHSGKLLRETNKLC

SEQ ID NO: 342956 - protein, 91 aa, Zea mays
  Clone ID: MRT4577_75941C.1.pep
APTAVTFSQYLHGLPLGVYLGAAVFLQNWPQYFPHYDPAMVILGLSYLVGHLVPEFGPVHPFLLRIELLAGCPCSHFSRVRKPTTSPPRKA

SEQ ID NO: 342957 - protein, 64 aa, Zea mays
  Clone ID: MRT4577_75942C.1.pep
FFFFLFLGWVFFKLFVLMFFTFLYLCDFFFFSFIKKKKRGLFQHQTENFLKKPLVPPKLRGVKT

SEQ ID NO: 342958 - protein, 773 aa, Zea mays
  Clone ID: MRT4577_75943C.1.pep
MATTAGEKLSHRGVRRRGEGGKRRSPDIRSSAFLLVPVYLSTFIDLDEGYQKLNIRCIPHDVIVSSWIMSDRQHDVVARLGFSSIFDLRTDALESRSLIRWLMDKLDPHDMTIRPGAGKELKITKETVRLILGLSCAGGGREFTDWYGEVDAAAKLRRGLKVGKEEFDVVKLQDKIVLGNDDELSIRCFFLILFNRLLFPSASWGITNNEVLMTSNMPQMADIDWCQLVYTDLCDAATRWHKRNKTNLTATIYGCSLIVLIYYLDHLHHPASPDNKYGTPRIKFFDNETIRDLARGDRRPPVKLFRSRSETCYVIAPERPVSAIFNIYVPRIKHLIGNKLQCLPSQHRPMFQSMFDAHDKEVDKYCDSLQLSHQMIVSKQIELSETFDNPPTSMPPTNAPVSSPPVPTPDNQQHDQESHVPTDHIKVSDHEGQKSITHDTLVSGAPQFDKTPLTDATTELVARDSSSKSAVAEPPHVSREDCARNLLKFILSGQLDPSMSIINFGGFGGSILDVVQSFGPNKCLENIFMQGFIDCIREDDVLYNPDSVINTLILNVNVGTVLNIEEFEQHSSNPQPFSTSLLKEQLEPTLSPDEVLKQIKLILVPMLRRSHWTLYAINFEKRRIDILDSNPYGTLLGGTTWKQIHNDQLLINGTKIPWSRLIMRRLSIALHEARPDSTLPKFGNYKIGLLPNCPTMLPGSNDCGFFVANFLQYYNFVDGDLSEFYTPDEPLDQRAFVLHYLTFHRNNRVVPLPAELLPFKFAPRRRRCLKAKT

SEQ ID NO: 342959 - protein, 96 aa, Zea mays
  unsure (1)..(96): unsure at all Xaa locations
  Clone ID: MRT4577_75944C.1.pep
ITTLRTYMINCYFTLAHPSSLHHNTHTYTRIRSTAPTPDHNPLSIITSSSLTCALWAGGDIREEKKEEEKVXEGQVVVVYYLVIKQKVFQIYVFNI

SEQ ID NO: 342960 - protein, 70 aa, Zea mays
  Clone ID: MRT4577_75945C.1.pep
RITGDLSEGARSRRQPVQSSVHILVSSTRTISDIYHKVVHYCQQKKKNYLLQRLQDPFWARNSPIGHAFR

SEQ ID NO: 342961 - protein, 66 aa, Zea mays
  Clone ID: MRT4577_75946C.1.pep
KSRTREPPQDPTIRTADRRVNSVVSPAPTRFRAKACRSCTSRRMLMIDVSSPNNVKGCLLKAVNVN

SEQ ID NO: 342962 - protein, 131 aa, Zea mays
  Clone ID: MRT4577_75947C.1.pep
MGFARKSGVAAVGVWWLLLLAGVLLPLAAAFGRHADAGNDMCDIKCQHHSDPARRQQCVDECHSREHHHPSREFCEMKCQHHQDPARKEICVQQCMSYGLSHRASASVDDEGEKRFHGWETTVAGGILEVV

SEQ ID NO: 342963 - protein, 129 aa, Zea mays
  Clone ID: MRT4577_75948C.1.pep
MGFARKSGVAVGVWWLLLLAGVLLPATAFGRHADAGKDMCDIKCQHHSDPARRQQCVDECHSREHHHPSREFCEMKCQHHQDPARKEICVQQCMSYGLSHRASASVVDEGEKRFHGWETTVAGGILEVV

SEQ ID NO: 342964 - protein, 64 aa, Zea mays
  Clone ID: MRT4577_75949C.1.pep
GLEFQASKVVCCAQVCAVSIYDVSDSGRVDIIRMDLLVLMRAYLCASMPMQHYSVRASSICVVV

SEQ ID NO: 342965 - protein, 83 aa, Zea mays
  Clone ID: MRT4577_7594C.1.pep
GNLSTSDFITCWTVFISQNIVDVVRAQLCLVLKLHLRRAHSVCVQSIFLWHVGVRYSYHHTSGHSSSSYVMSLAGRHDSEVGS

SEQ ID NO: 342966 - protein, 111 aa, Zea mays
  Clone ID: MRT4577_75950C.1.pep
ARAVSMGMQVVDVINYRRGHVYSRYIELFPLSLSLPCNASERHILRSIFSEKYAIHHAHHFISQAAGRGTRKHLARSFQSSYGRGLTGYWPAGTCASRTGWRTRPQGGTSP

SEQ ID NO: 342967 - protein, 131 aa, Zea mays
  Clone ID: MRT4577_75951C.1.pep
RTGDDLATAGHSGNSSNGPPSASEEQDHSTNSKDKLQKASSQNTKKVFGNSTNGKQGASNLEQECANEDGSHVLVAAVYKDIDNERSSQKIRDDVSDAQLDTASSDDKSSEEVEDVKVCDICGDVGEEEKL

SEQ ID NO: 342968 - protein, 48 aa, Zea mays
  Clone ID: MRT4577_75953C.1.pep
PRQIFLNRTSVRAQVVLRGSRLRRNFQYRARQPCLRFVRKCLGIQARA

SEQ ID NO: 342969 - protein, 199 aa, Zea mays
  Clone ID: MRT4577_75954C.1.pep
MMGSDVENEEQKGGTKSKYEAEVLPPVPKIEIQWEPHHQTLPVGRGIQIMGERVIVEGSVQHNPLNEGSILWITESRMPLGIVDELFGPVKNPYYLVRYNSEEEVPAGISAGTDVCFVAEFADHILNMKELYAKGYDESDSVDKDAEDLPDFSDDEKEAEYKRSLRQAKRQTDRQHEPMKTSCYMKGSQAISSGIRKPM

SEQ ID NO: 342970 - protein, 310 aa, Zea mays
  Clone ID: MRT4577_75955C.1.pep
MSSPPRGQPATAAVPAVAAATSPQLPAASHTLPRAFLATSSPRAIVAAPAPPLFTGRPLNPNPPAHGSSVPHGILYPVLKSASTSNSAAAAVTAQLRRVPPMAVGYPRTHAVAIPIAQQHQPLVHAQPRSFAAVPRALVTGVSTGSEQPPRGVPIGSQPKVNPVPPVGPSNEQSNPKDREKSREEPTVVVINDRKVNLLDSESGSFYALCRSWVRNGVPHESQPSFGNGEPLLPRPLPASVVDSRISDKDDNDVAGEDSDEEPQKNANGEYNTSDLLKQHVKRAKRIRAGLQKDRLRRIERYKQRLALLL

SEQ ID NO: 342971 - protein, 103 aa, Zea mays
  Clone ID: MRT4577_75956C.1.pep
IRFLVCLNPKADFSRRGPPPVFYRLEGLAPHSLLVWWGSCVRAAHSLLIAYLFFRGFRFFPKFWIIFPQPWFQHGSFSLRMCWFSRFLLIYVSPACLPPLLIL

SEQ ID NO: 342972 - protein, 86 aa, Zea mays
  unsure (1)..(86): unsure at all Xaa locations
  Clone ID: MRT4577_75957C.1.pep
KKKKRPKKNKKKPTKTKEKNKTKKKKNKKKKKKKKNKKKKNKNKKNKKEKXKHKIKKKKKKKSXKQKNNNKKKEKKRISKKIKMTK

SEQ ID NO: 342973 - protein, 115 aa, Zea mays
  unsure (1)..(115): unsure at all Xaa locations
  Clone ID: MRT4577_75958C.1.pep
YVGRADGFYTSHAITCAIQYHNSITVGTMILHVLMLFALPACVDHTTKLPHSXQAPIASMIISYFLCIDSLQCAENPGIHAYRLQQAIAARKIPLSPLLFKQWPALSLVQGLVPA

SEQ ID NO: 342974 - protein, 48 aa, Zea mays
  Clone ID: MRT4577_75959C.1.pep
DRAIHLGFSLFLPLCSPLSSYHASPMSYKCKVFSISMLPTLAFSRAHS

SEQ ID NO: 342975 - protein, 211 aa, Zea mays
  Clone ID: MRT4577_7595C.1.pep
MGSTGNSPRDTVVGTPTPPAGSKTALEPEAFPVTASPAPRWPRLGVVMVATRAAAMVTALLSMSLMVSSKQRGTLAIFGIEIPLYANWSFSYSLQFLVAMSTASAAYSLAQLLLISRRVVKRDPIVPSRRHAWLFFAGDQVFSLAMMSAGSAAAAVANLNRTGIRHTALPNLCKSLPRFCDLSAASIACAFLSCVFLATSAVINVIWLSSP

SEQ ID NO: 342976 - protein, 126 aa, Zea mays
  unsure (1)..(126): unsure at all Xaa locations
  Clone ID: MRT4577_75960C.1.pep
TSPSFGPTVXADYQTKPMRRLDMREPXRADELEDXLDDIPLLDQYTXMRVAELTEAGQALRFGTILPMTGXDFVRQVSQAXNDMFXAAFLYTDDIPGCELLQNWSEELATRYATTTCFKIISTYWI

SEQ ID NO: 342977 - protein, 29 aa, Zea mays
  Clone ID: MRT4577_75961C.1.pep
MSDKGNGCNVLDNVGNSATVTCFEVTSRE

SEQ ID NO: 342978 - protein, 97 aa, Zea mays
  Clone ID: MRT4577_75962C.1.pep
DGIADVDQCKKVLELELHSLPLLLWQRIIWLHMISLMLLYTSTHLLKSSNIVSMVAKGEEMFAFREKKFCWLAMARMGDGVVCFLCIWKWKRYSEKR

SEQ ID NO: 342979 - protein, 119 aa, Zea mays
  Clone ID: MRT4577_75963C.1.pep
AGRAGNLNLKLTRDSYLLKTEKDSSPPPDASPLRPHFPIHPRRQVLISRRHLPGPIPGTKNKEASGYRHKTILYWDSISLMFGKDHATGEVAKTLADGARDMSKEEVMRASTIPCWHFW

SEQ ID NO: 342980 - protein, 70 aa, Zea mays
  unsure (1)..(70): unsure at all Xaa locations
  Clone ID: MRT4577_75964C.1.pep
TSAKKFKGILKVYKVPVVSVKLRCXKVSSTIEASLTMVMGNKMVKVIFWLKNKWGFFQRVVDLIKIWTNQ

SEQ ID NO: 342981 - protein, 102 aa, Zea mays
  Clone ID: MRT4577_75965C.1.pep
APGFPIARWFSDGRKCCACCLAMGGRARCPQGRVAGALLVVAGGSPQEIIFAFRIARVYVPSSFIYRGGLVINFCPSPLVGRVSLCPASDAPFERARREFFS

SEQ ID NO: 342982 - protein, 29 aa, Zea mays
  Clone ID: MRT4577_75966C.1.pep
LLLMNQIRRVVCPRRLHIPDRHYLEVSTC

SEQ ID NO: 342983 - protein, 86 aa, Zea mays
  Clone ID: MRT4577_75967C.1.pep
KGFVTLYTRCLWNFSNNISTPPVLKSPKNPWFTLRVPFKQKTQQHFVKNPPVAFTKKRKRNLTHGSRMLSLPGVIQIVKQTSCNMP

SEQ ID NO: 342984 - protein, 113 aa, Zea mays
  Clone ID: MRT4577_75968C.1.pep
FGSSASRCFITVVNLTVRWRIGIRGAALPPQSVAKPLAPDNPPLKVRFIDNIYPSGIDHEIAELGSKLATSYSCYKSFLRTLEGGGTADSCIMNIQAVHELLIHDERSRAHDR

SEQ ID NO: 342985 - protein, 550 aa, Zea mays
  unsure (1)..(550): unsure at all Xaa locations
  Clone ID: MRT4577_75969C.1.pep
MGKFCTLDVISPIRSSNPCKKKKKKKKKKMDHSVYYCLVVALLPLVYFLLKSSWKKAPFGSGSRHGLKLPPGPWQLPVIGSIHHLRGSLVHHALRDLSLRHGPLMFLKLGELPVVVASTPEAAKEVMKTHDAIFSTRPLSSTIRTVSKDGLGIVWAPYGDHWRQLRKICTMQLLGARRVQSLRPAREEEAFRLVRAVMSSSTAAGGAAPPPLVDLGKLAAVYVAEASLRAILGRRFKVEDRDTLLRYXNDGVRLAGGFTPRDLFPSSWLVRALTHRAVREVDAYRDSLFAFMDVVVGERLDRRRSTEEEEEEGEDLIDVLLRSHKEGNLPFPLTMRTIEAVIFDLIGGGIETATTTLQWAMAELMRNPGIMAKAQAEVRGLFXWAKXVTEDRLGELPYLQLVIKETLRLHVPGPLLIPRECQEQCRILGYDVPRGAMVLVNAWAIARSPDHWEEPDAFVPERFVGDARDFKGNDLEFIPFGAGRRICPGMSFGLAXANVELGLASLLFYFDWSLPAGVLPAEMDMAETMGITARRKADLFLSATLRVKLP

SEQ ID NO: 342986 - protein, 82 aa, Zea mays
  Clone ID: MRT4577_7596C.1.pep
MSREENVYMAKWAAQAERYEVMAEYMEKVATTVDVVELTVEERNLMYVAYKNVIGARRASWSTVPCMEQIEEFRRIEKHVHL

SEQ ID NO: 342987 - protein, 134 aa, Zea mays
  unsure (1)..(134): unsure at all Xaa locations
  Clone ID: MRT4577_75970C.1.pep
PGLSALLRGGVPPQVQPPGVSPFGGPPPPGFFQRLFLPPPFPQGPVFLRPGFFFRPPLPAPRSPFFPPPPPLFXPFFPPWPSLAGLASKPAPPAXTPGLPPPPLSPPWLLSAWGGGFPLFPLFFFLVFKRPFVG

SEQ ID NO: 342988 - protein, 56 aa, Zea mays
  unsure (1)..(56): unsure at all Xaa locations
  Clone ID: MRT4577_75971C.1.pep
CSILTPTRGCTLHYLGHXQIYRTPPPSPEQSVYHIPHHTRRLIMCHAPSIIFTTPY

SEQ ID NO: 342989 - protein, 126 aa, Zea mays
  unsure (1)..(126): unsure at all Xaa locations
  Clone ID: MRT4577_75972C.1.pep
RCCSGSAAQSCGPCSITRWSLSSRRIIALREFMLHRVDHDVLSASTFSFVQPVSCLAAFLLLSLNSXRASCSSCWCHLLSLNLLRCHFVLGRTRSGRVEALLCGVAPSVVAALGADLGDTVTGTSQ

SEQ ID NO: 342990 - protein, 66 aa, Zea mays
  Clone ID: MRT4577_75973C.1.pep
GPWVPMPFSYSKFTLQDWPACNIILSPKWVGFQVVKIIMHLDTPNLYGNLVSNTPPVYCWRDGLHA

SEQ ID NO: 342991 - protein, 84 aa, Zea mays
  Clone ID: MRT4577_75974C.1.pep
RFGFGKKFFFFRLRAPLLKFPINYAPGSPKVGKNLFPPGFFFFPRVCLGAPFHPFFFTPLGYIFFFFFRPFGTPPPPILSPFFG

SEQ ID NO: 342992 - protein, 45 aa, Zea mays
  Clone ID: MRT4577_75975C.1.pep
PSPAPACVVSRRITQIVVFVPMLCKPMFHTWLLSDCEKISILLLL

SEQ ID NO: 342993 - protein, 114 aa, Zea mays
  Clone ID: MRT4577_75976C.1.pep
YRAAAPVLISRRDEQAMGDGPAIGIDLGTTYSCVGVCQHDRVEIIGRDQGHPTTPWYVAFTDSERLIGDAVNNQVGMNLINTVFDAQRLIGRRFRDSSVQSDIKLWPFKVIPGP

SEQ ID NO: 342994 - protein, 127 aa, Zea mays
  Clone ID: MRT4577_75977C.1.pep
MDLSWGFATAASSSSAADALRGWWDDINKSAQRQDAAFFSLAAAYALVSDVALIQVVRTQHRTPKHGQTNHKERHLMNYLVNGARALGFGCHEHGFLVPSQLDIYLNAHGPGLLFFITYTKGVLPRA

SEQ ID NO: 342995 - protein, 51 aa, Zea mays
  Clone ID: MRT4577_75978C.1.pep
SRFILSKAIVDFFTICRGAVASSTVYSGKLDWLLTGRNCNNCFYIQILFYC

SEQ ID NO: 342996 - protein, 121 aa, Zea mays
  Clone ID: MRT4577_75979C.1.pep
DPAAIFHSFMASQRCVCSLANFGYRYGSVGRVLQRFFHYTVIAVFFRSYQSVLASSSAVVLSCSTERLASLKTATFSFRMWIATSSCILFRHSSMARCISWLLSSRFTISAPVAITACSTL

SEQ ID NO: 342997 - protein, 80 aa, Zea mays
  Clone ID: MRT4577_7597C.1.pep
QKESPPPLGPGPRGGQKERGGLNCQRAGVVGGPPPKGRWSKKSRLGTKAGQGLVKKRPGFVVCASSPNLCQIMKKFDVWL

SEQ ID NO: 342998 - protein, 87 aa, Zea mays
  Clone ID: MRT4577_75980C.1.pep
PAAAAKSGHQASESVLIRSALYVFPRYDLCGRTRTSLGAVAISIEVGGRVSLKSVFHFAASAGACASSRVSDFRLCKSGSGAVASGI

SEQ ID NO: 342999 - protein, 191 aa, Zea mays
  unsure (1)..(191): unsure at all Xaa locations
  Clone ID: MRT4577_75981C.1.pep
SVAWRWSAPLEPCRQASREGSPGARPPAASTSAAXVGWPPVGAFRRSHLQVGAKAVEEPTSKVKLGEQGPAPARSTMFVKVNMEGCAVGRKVDLQAHCGYASLSRALQAMFHGFLSDGQWRIAGREEDDDDDXAAAGADEEGGEXSNKKAYILLYEDNEGDRMLVGDVPWELFMASVKRLYIAQDPRKTKN

SEQ ID NO: 343000 - protein, 100 aa, Zea mays
  Clone ID: MRT4577_75982C.1.pep
VDLQAHCGYASLSRALQAMFHGFLSDGQWRIAGREEDDDDDDEQPEPTKKGENKSNKKAYILLYEDNEGDRMLVGDVPWELFMASVKRLYIAQDPRKTKN

SEQ ID NO: 343001 - protein, 79 aa, Zea mays
  unsure (1)..(79): unsure at all Xaa locations
  Clone ID: MRT4577_75983C.1.pep
NPHLTQLNLLPTHPPLTNYHYIKYSHTHPPSQQFPNLNXNXHSPCNHSLTPHLFILTHILTSTLPNSLTPDPFPLFPSF

SEQ ID NO: 343002 - protein, 150 aa, Zea mays
  unsure (1)..(150): unsure at all Xaa locations
  Clone ID: MRT4577_75984C.1.pep
NTCPGHKEWLCTLPQTSSGGXKSRPPSPSSWKGQLYCARSNLSSSVAAFPFSLFFLSFSFTFRGGGGGGGGGCFLGRLRRGLVRNSLKTGRMTRRRXGXVEVLSLSPXLGVVXXESPPRIMEPPGRREGRVRRGRWRPTRPRMRGAPPWF

SEQ ID NO: 343003 - protein, 63 aa, Zea mays
  Clone ID: MRT4577_75985C.1.pep
EPCMDPLAPHMGKYKALGCLSEGLGFFPAPGMAAVVNARASNIPYPPKVSPSATFKVGFGDSP

SEQ ID NO: 343004 - protein, 52 aa, Zea mays
  Clone ID: MRT4577_75986C.1.pep
VFFRTGWLAFSLPAHGYAGQQGARAFVAQVWGVGREESSHVRRLHRYISERL

SEQ ID NO: 343005 - protein, 59 aa, Zea mays
  Clone ID: MRT4577_75987C.1.pep
MYGARCCHVWIQSLRPGTDRRTCSSPPTHMGVISIKKCWIYTPLEVALRKKRLVFALVP

SEQ ID NO: 343006 - protein, 48 aa, Zea mays
  Clone ID: MRT4577_75988C.1.pep
QSFTSQAVAVKQLDRNGLQGNREFMVEVLMLSLLHHTNLVNLIGYCAD

SEQ ID NO: 343007 - protein, 75 aa, Zea mays
  Clone ID: MRT4577_75989C.1.pep
MSCSLQLKADSEEATKKFEHIVRLMNEELARFQEQKTADIGLAFHEFAKGQAKLAKDIADAWRSVLRKLEACSTS

SEQ ID NO: 343008 - protein, 97 aa, Zea mays
  Clone ID: MRT4577_7598C.1.pep
SSSSHLHRTPSPRTPPWTPSPRGPSPHTSPPPPSPRAPPPPSRMLLLISTRFARDIIVPPVEWSVAGATCSWSYGGRRRPLRLPPGFLTAASAPKAN

SEQ ID NO: 343009 - protein, 67 aa, Zea mays
  Clone ID: MRT4577_75990C.1.pep
WIYDNKSALYLSAFPEYCLVWLCCVGLILCKSASLSRTFWISPCDRIIGVCSRVMLVLSNAAPGTRS

SEQ ID NO: 343010 - protein, 38 aa, Zea mays
  Clone ID: MRT4577_75991C.1.pep
MSCSLQLKADSEEATKKFEHIVRLMNEELARFQEQRQL

SEQ ID NO: 343011 - protein, 84 aa, Zea mays
  Clone ID: MRT4577_75992C.1.pep
HLMLPPHNKEALGSKPHFAQFLCREVSLNGQRGQIKQAVPARVPRQPAVPGPHLLHVSPLGTTRITLVLNGPEPNQYQPHVFYP

SEQ ID NO: 343012 - protein, 116 aa, Zea mays
  Clone ID: MRT4577_75993C.1.pep
KSIQREGPKTRAIQENRKPPHPFYLRNNHPKPPRGPKQKQIGGEKKKNIPREDFEGKKSPKFLKELGFAKPRFGKKPPPIFLNFLAAFWQGQKAEGQKGGRFQQKPRRGQKKYHRL

SEQ ID NO: 343013 - protein, 59 aa, Zea mays
  Clone ID: MRT4577_75994C.1.pep
AYRPAGIQWGMASKPTNQKSSIVNFVVAVSVRGLIPGTQQLLFAVLLLAFSPHISSFPV

SEQ ID NO: 343014 - protein, 73 aa, Zea mays
  Clone ID: MRT4577_75995C.1.pep
LKVNFNGPQFEWKFGQFAPFNSRPEREGFFHNFPFFSSRPGRFFFKKKNFFSPPLFFFFFWTHNPVVDIYALS

SEQ ID NO: 343015 - protein, 144 aa, Zea mays
  unsure (1)..(144): unsure at all Xaa locations
  Clone ID: MRT4577_75996C.1.pep
VWRKXYRQLNETTPSRKHRSQPPAEMEMHPLDRLHRQLSPSLLHRHSTLRGRPPASDADFLWHEITSSLPCVSGQYNTPDRLSRHLPNRSGRHDLRLGLHRNAIPSLLQGYRVPGTVQQCDSGDEKISPIALDETTTSQETIDL

SEQ ID NO: 343016 - protein, 99 aa, Zea mays
  Clone ID: MRT4577_75997C.1.pep
NPVEDQKIAPPVPQKTERILFGQRRGRSPCSRRLVNAPNVNGNRFMGGKQVRILFLNPRPGPPQRGPVLFIIRAVYNNHGCWAIWKFKWNGTPRNQRWS

SEQ ID NO: 343017 - protein, 104 aa, Zea mays
  unsure (1)..(104): unsure at all Xaa locations
  Clone ID: MRT4577_75998C.1.pep
GLGGGLPAGFGPLSSPPFSRGRPCPARSRVGVVPSRGRARLLALARAFRCFCPVRGLGCGVXSPPPAAGGSCLFLCCCLGPLAXARCRWXPGACLPGCPCARPP

SEQ ID NO: 343018 - protein, 56 aa, Zea mays
  Clone ID: MRT4577_75999C.1.pep
KKKNLITKGVEKKKKWCNSSLNSFLFPRGSARLNYSNFFSKRNLIGLHFIALFKVN

SEQ ID NO: 343019 - protein, 119 aa, Zea mays
  Clone ID: MRT4577_7599C.1.pep
MAAGLQVFGQPASTDVARVLTCLFEKNLEFELIRTDTFKKSHKLPEFIKLRDPTGQVTFKHGDKTIVDSRSSRCRGSTPARSSDRSAVYAVMHACMRRGVSFLYRRRPPEASSSSGFVP

SEQ ID NO: 343020 - protein, 33 aa, Zea mays
  Clone ID: MRT4577_759C.1.pep
RSTIRGSGAITLAVMWLLVPTLQFRCTAGRRLE

SEQ ID NO: 343021 - protein, 196 aa, Zea mays
  unsure (1)..(196): unsure at all Xaa locations
  Clone ID: MRT4577_75C.1.pep
MAASLRWWWSAVVFSVVVGVIPVVANTEGDALYSLRQSLKDNNNNLSGGVPSSGSFSLFTPISFANNPNLCGPGTTKPCPGAPPFSPPPPYNPPAPTSSKGVSSTGAVAGGVAAGTALLIAVPAIGYALWRRRKPEEQFFDVPAEEDPEVHLGQLKRFSLRELQVATDNFNNRNVLXGRGGFXKVYKGRLTDGSLV

SEQ ID NO: 343022 - protein, 100 aa, Zea mays
  unsure (1)..(100): unsure at all Xaa locations
  Clone ID: MRT4577_76000C.1.pep
QNRAKXEQPKPKGHERPGGXGSALYSLHXREELLXQSRSKTLNLRRTXAPKADGAPHPTASSNAAAXLEKANAXRQAVAXDEXGDDDPWSDTRPPNCRRA

SEQ ID NO: 343023 - protein, 55 aa, Zea mays
  Clone ID: MRT4577_76001C.1.pep
RRSHVGTHGSTSSPQASCLPSCSSLGRSDLPAGPGDRAEDLVAEALAANVIHLLY

SEQ ID NO: 343024 - protein, 88 aa, Zea mays
  Clone ID: MRT4577_76002C.1.pep
NQNWDDIFRNQEPPIHSFIHVLIFTLLWRGKAMPYRSISNGTTKRRYISPYGKSTGFALNTTGKTYVLGPGGKTKTLNKNSFKKKKIN

SEQ ID NO: 343025 - protein, 176 aa, Zea mays
  unsure (1)..(176): unsure at all Xaa locations
  Clone ID: MRT4577_76003C.1.pep
KMPGGNFQLNAXQQIHXQHQLQQLQQNPQQQLXQXQXQXQIXXLQQQQQQQLQQQQLQQQQQMGSPLQQAQVGSPAGSQQSPMMQQQQQQQQQQISPQQMGQQAAMSPQLSSGTLQQMSNNVANPVATPGPPPSPQLSSXVNSIANSPMEQLQGAIKGGPGSSNRSPLLAYGRCKH

SEQ ID NO: 343026 - protein, 43 aa, Zea mays
  Clone ID: MRT4577_76004C.1.pep
YFFILTSRCLFIYQSINPRILISLPCAFTWSINAVSKHFPHAS

SEQ ID NO: 343027 - protein, 91 aa, Zea mays
  Clone ID: MRT4577_76005C.1.pep
FSPLFLHFSSYSTPLLSSFFSPTLSLTSPYFTPFSEFFYFPKFVPVFSPSSLFWTPPPPPFSVPFLLLKRPNFSVPLVLYKMLSFFFKSVP

SEQ ID NO: 343028 - protein, 78 aa, Zea mays
  Clone ID: MRT4577_76006C.1.pep
MSHPRYGGGYPYPGQQGYYNQGPYPYQGPPVMAPPQYQYAQPPPPPRSPGFLEGCLAALCCCCLLDECCCDPSIVFVS

SEQ ID NO: 343029 - protein, 80 aa, Zea mays
  Clone ID: MRT4577_76007C.1.pep
DILLRDIFEFTFSIKMCLLYVIIIMLVYGIKIIQKIRIVLTEFFLKRTVKNAYRRCSVPRAASAKWVKKVIANFFGILVS

SEQ ID NO: 343030 - protein, 51 aa, Zea mays
  Clone ID: MRT4577_76008C.1.pep
HYSKSTGQESLLNRHIHTDCNIDIYVFIQMSNLCTLVILINRTIQFSVDVC

SEQ ID NO: 343031 - protein, 74 aa, Zea mays
  Clone ID: MRT4577_76009C.1.pep
CHHHSIPFSSSDPPRLYTTTSILIVLLYCTYCLLCLYHYIIQYSSSARICIASSASTRSGVWGLGLAIYMHITC

SEQ ID NO: 343032 - protein, 60 aa, Zea mays
  unsure (1)..(60): unsure at all Xaa locations
  Clone ID: MRT4577_7600C.1.pep
FKIFRRVGLSNEQSWPAVSCFPHYKPGFRRXDDQSVVALVGNPEHGGLVVLGEMLRWEQS

SEQ ID NO: 343033 - protein, 76 aa, Zea mays
  Clone ID: MRT4577_76010C.1.pep
PEYSACRSCQIKLKGYYNQGPYPYQGPPVMAPPQYQYAQPPPPPRSPGFLEGCLAALCCCCLLDECCCDPSIVFVS

SEQ ID NO: 343034 - protein, 157 aa, Zea mays
  Clone ID: MRT4577_76011C.1.pep
MKKVPQWCAEATAIFDPGEAAIVAFMVALPLWGGTPPDLVPALCSPDEKAHGNLDGQSGPPPAFGVFSPPTEMIKNTNQNDPMGHALPPNFPGSRKKASGRAFTASRTPGSTTRRKAASPPTRDPAAFFSPGPLTRRRAAALNVSPLGEAHNSQQVL

SEQ ID NO: 343035 - protein, 53 aa, Zea mays
  Clone ID: MRT4577_76012C.1.pep
ESRRLDVANGLGGRSNLLHFRNVTSLFVGSFLSQFEESLVEGILNGTFREEMG

SEQ ID NO: 343036 - protein, 193 aa, Zea mays
  unsure (1)..(193): unsure at all Xaa locations
  Clone ID: MRT4577_76013C.1.pep
MSEEADRRARQQRLLPVPIIPVVLFLVAPFALFMFTSPDLRWQLPRIRIEYGRHDEPSSAPTADGRTSTPPVLAGAKSDDEEQRLPPPRQLTDPPYSLGTAVSDYDARRAKWLRDNPQFPAFVAPGRPRVLVVTGSAPRTXCGADDGDHVLLRAFKNKVDYCRVHGFDVFYSNAVLDAELAGFWTQLPILRAL

SEQ ID NO: 343037 - protein, 119 aa, Zea mays
  unsure (1)..(119): unsure at all Xaa locations
  Clone ID: MRT4577_76014C.1.pep
MYKKFSSXHISAHVHEATASVQRDILTSITDEYPNLEPLVDDLLPQKSPMTVVQWQNHLNXVMMNNVPLLFDIHDDAYMSTLRXLRHYPDISEELQVSKGAIHIDLSVAKIKWPAETSP

SEQ ID NO: 343038 - protein, 58 aa, Zea mays
  Clone ID: MRT4577_76015C.1.pep
PRKELGGSYSQISVTYSTSLRGTRQISVWRKMPSVSSHRHVSPIQPFSADRQFEHATS

SEQ ID NO: 343039 - protein, 47 aa, Zea mays
  Clone ID: MRT4577_76016C.1.pep
TLLTMYWLRTCVVQYPSIYFFIIYICVSQYRCFLRNSVSGYRRITYP

SEQ ID NO: 343040 - protein, 44 aa, Zea mays
  Clone ID: MRT4577_76017C.1.pep
KFDLGQSQNELIFQTGKELKTDHCSSQVPKLSGSLLDAYQDPDL

SEQ ID NO: 343041 - protein, 119 aa, Zea mays
  unsure (1)..(119): unsure at all Xaa locations
  Clone ID: MRT4577_76018C.1.pep
PPPAPLGFFWFGSWDRPFRSSVGCPFGPLPGPPPSSLPWAPFPRPPLFVFFRFSPPPVFFFFSFFFFFFFFFFFYRKASAPPTSKQRVRLALTQTDCLGERNRASRALPPAIXARHLPA

SEQ ID NO: 343042 - protein, 105 aa, Zea mays
  Clone ID: MRT4577_76019C.1.pep
MIPLLFLVLFAEGAVALLLMVKIGPLRELAMRGVEQVKTGKGPATVKTLACTLSVILMSSVAAIVRIQDRGHKIGNVSPMDQVLWRTHLLEASLIGYTLFLAFVI

SEQ ID NO: 343043 - protein, 34 aa, Zea mays
  Clone ID: MRT4577_76020C.1.pep
DLELGTSVLISQGFNIIKWHTHARANRHIQTMAT

SEQ ID NO: 343044 - protein, 145 aa, Zea mays
  unsure (1)..(145): unsure at all Xaa locations
  Clone ID: MRT4577_76021C.1.pep
IHTSLRCCSKFFVRXSWKXDRTTDLSYNIVITVNEXQDPTSYGDEAVINTPYGFLPERKMQLLQEIHVAVQNXMVRRKTLYSXKYRAEMLVDLGXIPGDILGHSERRVLLVESNEFVEYKAAYALSQGLKVIAXCLSDTLEQREA

SEQ ID NO: 343045 - protein, 185 aa, Zea mays
  Clone ID: MRT4577_76022C.1.pep
LPRPQSPDPLALAHALSAASRSSRSPSRLHAQVLKLGMSGDTFTTNHLLISYSRSGLLGSALAVFDEMPHRNLVSWTAMVSASTRGGAAELGIGLFVSMLRSGFFPNEFSLASALRAACDRSAARAKLQFGALLHGVAVKVGVDADPFLGSSLLLMYARHGWVAAAERAFADVRCKDLTCWNAML

SEQ ID NO: 343046 - protein, 91 aa, Zea mays
  unsure (1)..(91): unsure at all Xaa locations
  Clone ID: MRT4577_76023C.1.pep
VTYYWITVTAHFCDRGVIDGQGEVWWNMWRRXTLEHTRPNLVEFMHSTGIHXXNIVLKNSPFWNIHPCYCDNVVVTNMMILVLRDSPNTDG

SEQ ID NO: 343047 - protein, 725 aa, Zea mays
  unsure (1)..(725): unsure at all Xaa locations
  Clone ID: MRT4577_76024C.1.pep
PRLLAASPSLFLSSPFAHRHHQSTIPASPPPETKKIKKTQQHCNENIRQNPRSLSPLGIAGWGVRRPAVVRDARRWPPPPPSSPRXPGAAAAEPAAWLVDERDGFITWLRGEFAAANAIVDHLIFHLRSISEPGEYDHVFSLVQQRRHHWPHVIHMQQFFPVSDIAFALQQASWRRHAPPAQALGAGASPAALPPPPPRXLVLAVPSLPPAPSPRRPLPPRSSAXAATAATGSEKDGREVHNXGREGAERSGECXDTKSLRLDSPITDEGEEKSKLQAVSEESSKMVATPVEYSTNEIIDGSMVNTVEGLKVYEGLLNVTEANKILSLVNETRASYRRGGLEARQKVIIAKRPMKGHGREIVQLGVPIIDGPPDDENLRETRVEAIPGLLNDLFDRLSQQEIIPFKPDYCVIDIFNEGDYSHPHQSPSWYGRPLCTLCLTDCDMVFGRYISGEKGDHRGPLKLSLATGSLLLMQGRSIDCAKRAIPATRKQRVILNFGKSVARKHIPAESAWSTPLTPPMPWGQSSRPVNGSRHPQSPKHYGYAPISGVLPAPPVGAHHVPPSDGMQPLFVAPAPISAAAIPFTPTVPLQNTSAAWIQEVTPRPAPPRFPGPGTGVFLPPGSGHPLPHQMMPASHGHGEPNSPQGSSAYLHSKVNGKETSNGNLSPKNSPRKTSCTAEEKPECNGSLNGGGGSADEKSTVGMEQQNGVQKNVGSSKVQPHGHATE

SEQ ID NO: 343048 - protein, 72 aa, Zea mays
  Clone ID: MRT4577_76025C.1.pep
ESVPPVFEPQALLTVLAWPMQTLRMISSGNDLVSVCSIVRLIFVALVCASPEHFYPCANKGHVIKGCRCPPP

SEQ ID NO: 343049 - protein, 60 aa, Zea mays
  Clone ID: MRT4577_76026C.1.pep
MTGGIFAKSWLGRNGLSPVQAKGKRGPYLCSTRVIACISGSLNGIGVVKSISVLRVAKVG

SEQ ID NO: 343050 - protein, 166 aa, Zea mays
  Clone ID: MRT4577_76027C.1.pep
MDHTDVVVRKLLDAMALMEKRLTAALAGSHGEQTARGCTAFFDDGRIDELDVWDEDATSVDADDSVSASMVDRELRFDEFTFNDKSAQYHLSSTHEALFSDGANPFFDEACYALTVFDQMPSPCFDGEPIFDEVPNDSITEYELSFMEVPHFALRCEKISSTSTLL

SEQ ID NO: 343051 - protein, 115 aa, Zea mays
  unsure (1)..(115): unsure at all Xaa locations
  Clone ID: MRT4577_76028C.1.pep
CVSWPHRHNLKPDIFSDRWKFLSGCCFSEVKLLTSEHADTVGIGTRSTCHFATRLSEEEELQRLIPVLGAVVXILEIERSLSMNTIICRSAGETVNRGAYIVNDVSRRCLNLCFS

SEQ ID NO: 343052 - protein, 73 aa, Zea mays
  unsure (1)..(73): unsure at all Xaa locations
  Clone ID: MRT4577_76029C.1.pep
KIYPPNVDXKFGSVCLDVIPPPWGPMFFLVNXFGVFLPPLLLYPNPFGPLKGNAPAFFMGVPPAFEQKVKGFF

SEQ ID NO: 343053 - protein, 225 aa, Zea mays
  Clone ID: MRT4577_7602C.1.pep
MAAGLQVFGQPASTDVARVLTCLFEKNLEFELIRTDTFKKSHKLPEFIKLRDPTGQVTFKHGDKTIVDSRAICRYLCTQFPDDGYKKLYGTGSLERASIEQWLQAEAQSFDAPSSELAFQLAFAPHLKNVRPDEARAAENERKLHGMLGVYDDILSKNEYLAGDDFTLADLSHLPNSHYIVNSSDRGRKLFTARKHVARWYDKISTRDSWRQVIKMQREHPGAFE

SEQ ID NO: 343054 - protein, 103 aa, Zea mays
  Clone ID: MRT4577_76030C.1.pep
LLDQRLSTVPQHQWISPPRPPARPVMYRPGRLNVVADALSRRDTEEGSTSFGSALCVRSGPSFTFIDDIRRATSHADDAKDVRRRFEAGELQGPWRIDDGLLL

SEQ ID NO: 343055 - protein, 75 aa, Zea mays
  Clone ID: MRT4577_76031C.1.pep
CYIILSISTIGKSSDSLLSVISSHNMLFQLSNHPDPPSRTNLPLRTTSSNSLNSGATTRRPSSSGGLTSNSSRPS

SEQ ID NO: 343056 - protein, 51 aa, Zea mays
  Clone ID: MRT4577_76032C.1.pep
GWGWLEPGTLMVDRAVSSVVVVDSWLFGGGVVPSRCLLPMCMLLGCVRVRI

SEQ ID NO: 343057 - protein, 60 aa, Zea mays
  Clone ID: MRT4577_76033C.1.pep
LGMLIDPTVGAISHLHLDHHHKSTFCAQGAHFPCPAYARTFTGTSPDAHFPLSPPSPTPR

SEQ ID NO: 343058 - protein, 47 aa, Zea mays
  Clone ID: MRT4577_76034C.1.pep
SAGNPLRGTRLRPQSIRFASAPCTPHYPQWVGPISTCALYGFFLFPP

SEQ ID NO: 343059 - protein, 113 aa, Zea mays
  unsure (1)..(113): unsure at all Xaa locations
  Clone ID: MRT4577_76035C.1.pep
MAANILTLLALLALXMSATNASIIPHRSLAASAIMPQFLPPHTSMGFEHAAVQAYMLQLALAASVLQQPIAQLQQQCLAHINLQTIATQQQQQFLPSLSHLAVVNPCPYLQQQ

SEQ ID NO: 343060 - protein, 342 aa, Zea mays
  Clone ID: MRT4577_76036C.1.pep
MERYEVIRDIGSGNFGVTKLVRDVRTKELFAVKFIERGQKIDEHVQREIMNHRSLKHPNIIRFKEVVLTPTHLAIVMEYAAGGELFERICSAGRFSEDEARFFFQQLISGVSYCHSMQVCHRDLKLENTLLDGSVAPRLKICDFGYSKSSVLHSQPKSTVGTPAYIAPEVLSRKEYDGKVADVWSCGVTLYVMLVGAYPFEDPDDPKNFRKTITRILSVQYSIPDYVRVTMECGHLLSRIFVGNPEQRITIPEIKKHPWFLKNLPIEMTDEYQQSMQLADMNTPGQSLEEVMAIIQEARKPGDAMNLAGQLPCLGSVDLDDIDFDDIDDIDTENSGDFVCAV

SEQ ID NO: 343061 - protein, 171 aa, Zea mays
  unsure (1)..(171): unsure at all Xaa locations
  Clone ID: MRT4577_76037C.1.pep
TSRFQSSVLHSQPKSTVGTPAYIAPEVLSRKEYDGKVMAVALVHLSXVLSIAAETLEHRMXTLXADVWSCGVTLYVMLVGAYPFEDPDDPKNFRKTITXYTPVPRFYGITKTKKKTIWLSVIKSEQXMQLIGALXRILSVQYSIPDYVRVTMECGHLLSRIFVGNPEQVHF

SEQ ID NO: 343062 - protein, 372 aa, Zea mays
  Clone ID: MRT4577_76038C.1.pep
MGRLAAALAAVAVLCLCVTLAGAEVVDEFGGGASFIFGDSLVDAGNNNYIPTLSRANMTPNGIDFAASGGAPTGRFTNGRTIADIIGEMLGQADYSPPFLAPNATGGAILNGVNYASGGGGILNATGKVFVNRIGMDVQVDYFNVTRGQLDALLGRDRAREFLRRKAIFSVTVGSNDFLNNYLMPVLSTGTRIRESPDAFVDDLIFHLRDQLTRLYTLDARKFVVANVGPLGCIPYQKTINRVGEDECVKLPNQLAAQYNSRLRELIIDLNAGLPGARFCLANVYDLVMELITNYPNYGFQTASVACCGNGGSYDGLVPCGPTTSLCDARDKHVFWDPYHPSEAANVLLAKYIVDGDSKYISPMNLRKLYSL

SEQ ID NO: 343063 - protein, 359 aa, Zea mays
  unsure (1)..(359): unsure at all Xaa locations
  Clone ID: MRT4577_76039C.1.pep
YLVFQVVLTPTHLAIVMEYAAGGELFERICSAGRFSEDEARFFFQQLISGVSYCHSMQVCHRDLKLENTLLDGSVAPRLKICDFGYSKSSVLHSQPKSTVGTPAYIAPEVLSRKEYDGKVADVWSCGVTLYVMLVGAYPFEDPDDPKNFRKTITRILSVQYSIPDYVRVTMECGHLLSRIFVGNPEQXLFLILKLFSLQGQTXLEALTWIESIEKIETSLLAAHAERRLQICELVTQFLPLYQTCPSKXNLYHLSPYTHNLRRXRITIPEIKKHPWFLKNLPIEMTDEYQQSMQLADMNTPGQSLEEVMAIIQEARKPGDAMNLAGQLPCLGSVDLDDIDFDDIDDIDTENSGDFVCAV

SEQ ID NO: 343064 - protein, 82 aa, Zea mays
  Clone ID: MRT4577_7603C.1.pep
LHGMLGVYDDILSKNEYLAGDDFTLADLSHLPNSHYIVNSSDRGRKLFTARKHVARWYDKISTRDSWRQVIKMQREHPGAFE

SEQ ID NO: 343065 - protein, 46 aa, Zea mays
  Clone ID: MRT4577_76040C.1.pep
LPQFLLEHRHPLLRRHGQSRFLRLEEGAQAIGPSLPHLSTIGLGPR

SEQ ID NO: 343066 - protein, 175 aa, Zea mays
  Clone ID: MRT4577_76041C.1.pep
IRHEASLPQAPAELPHAILSLAFIPTAATTWALLSLPSHGGSPWIPPCEDPLPWMVSSLPAAHRAPSHGRCPSLELVPALCPAPSLLAVPIPLQWSSSSVRARPSSARFQLGRACRPLPLLLQQVSAPLFFFPMVAHLSVAAPRCRTSSGSPAPSATVWYLIKCSSGVLCHGQPY

SEQ ID NO: 343067 - protein, 70 aa, Zea mays
  Clone ID: MRT4577_76042C.1.pep
VEEHRVVHLVLEITVVAVLVLLIATAVLGRVRLPGVGGILVCTHVRCGAQGALRRDQQGPVLSVRVAPRI

SEQ ID NO: 343068 - protein, 97 aa, Zea mays
  Clone ID: MRT4577_76043C.1.pep
MTSSPCSNEPQHAMGMTVPGIILRRHSHASVVGAASSIDASMALVVQRIKMALRMVERCCIAASSLSVPQLSVLPSPMALVVHAATGVSQGCYHTYA

SEQ ID NO: 343069 - protein, 62 aa, Zea mays
  Clone ID: MRT4577_76044C.1.pep
NPWRCWREEPQGWVMKRRSMRIARQMFDRRLQSKAVVVLAKKKSSRIMMWYASELRDVEDQR

SEQ ID NO: 343070 - protein, 181 aa, Zea mays
  Clone ID: MRT4577_76045C.1.pep
KLRTSFLLHPRLFLKLQPNSLTPSSSLAFIPTAATTWALLSLPSHGGSPWIPPCEDPLPWMVSSLPAAHRAPSHGRCPSLELAPALCPAPSLLAVPIPLQWSSSSVRARPSSARFQLGRACRPLPLLLQQVSAPLFFFSIVAHLSVAAPRCRTSSGSPAPSAPVWCLIKCSSGVLCHGQLY

SEQ ID NO: 343071 - protein, 182 aa, Zea mays
  unsure (1)..(182): unsure at all Xaa locations
  Clone ID: MRT4577_76046C.1.pep
WAPRGLPFFLPLLFLFGFFPVSLSPPGKGVFLCFSQFWAGAGFPYYRPPVGWNSPFGGSRPRCPPPAWVFFSRLVLVFPPWVGLAGNCWLSLGSPFWDFWIPGFCPPLFVPQKKKKKKKKKKKKKKKKKKKKKKKKKNKKKNIKKKIIINKKXKKXCTARAGAASKGLQYPITLRPSSPCIL

SEQ ID NO: 343072 - protein, 100 aa, Zea mays
  Clone ID: MRT4577_76047C.1.pep
KSWFKRPKETFEMAGVPFWLLLILGGGNGPGLGNALASIPGPTPTPSSGRCPLLLQAKPGLGKAGPSLKLGSPSGGSASGRGRRYALPSSTASGRVVGRG

SEQ ID NO: 343073 - protein, 76 aa, Zea mays
  Clone ID: MRT4577_76048C.1.pep
APCCRTSSGSPAPSATRMVFDKMFKWSVVSWPTLLAAWDVWFFPAYLRPRRPPVRSCSCPIVLALDVDYYCVNCVC

SEQ ID NO: 343074 - protein, 97 aa, Zea mays
  Clone ID: MRT4577_76049C.1.pep
NRRHQTGVSDPSKPTSRATGQSRGETPKGLPDPTRTGCTAPLRTTGGTPVPWQAPTIPGGPQILRATFKTRIHSLPPNKPSTTSQLPVTFDTMEHYL

SEQ ID NO: 343075 - protein, 218 aa, Zea mays
  Clone ID: MRT4577_7604C.1.pep
DSWPFLVVCMVWSTVLPLLDLYYYSTVLFCLFVCLLACCEIEEQRKIGVMMACLLTPPFSVHLCASGRHAAGDESSHHYLLIGRIFAFSLSASSSSCSFFFLLSVVSLCLQHMALLVRCSDCFQEHGIHKAGAKLYICIDLMTIYIFLFSDICCLFLSSRIVFAWCAGPAASKFLESLGRDPLFIGVYFLHIMLTPMEVDVNNGSSCMHVFLEPTIIT

SEQ ID NO: 343076 - protein, 66 aa, Zea mays
  Clone ID: MRT4577_76051C.1.pep
RNDPHGRTPPQGRRHDPTPNRPRSGHLRQKIVLVSRPQPTWPPLLVLALENPKWAGPILFSPGVSG

SEQ ID NO: 343077 - protein, 56 aa, Zea mays
  unsure (1)..(56): unsure at all Xaa locations
  Clone ID: MRT4577_76052C.1.pep
MGSITIGIHGFGKSRQLVARVALLSDDIXLAGLNNPFISTDYMTYMFKYXDTVHAT

SEQ ID NO: 343078 - protein, 91 aa, Zea mays
  unsure (1)..(91): unsure at all Xaa locations
  Clone ID: MRT4577_76053C.1.pep
FILVRXEPLIHXIGHRAXLXXQWREAXVXRXLTXRLSXRIQAXNRXLCSXPXPTHVXAXEXQGPVPLAQPARPTRRXGPXRSSLPNGXRXE

SEQ ID NO: 343079 - protein, 92 aa, Zea mays
  Clone ID: MRT4577_76054C.1.pep
FVSRRMWQPTFRRARWFASTVQLLFFIWRTTIASCMHPCASTSKEQGEIYCMLQWDHYLQWHHEIALQLTPCTSGYQSAASQTPKSLPIGTF

SEQ ID NO: 343080 - protein, 80 aa, Zea mays
  Clone ID: MRT4577_76055C.1.pep
FWAPCCTLSSAHSPIDSSDLNWSDSRHRHDTAHRVVTRHGHTVHCDANTFFCGASFLPAQGYCRQRDASLLECLSGHRRP

SEQ ID NO: 343081 - protein, 124 aa, Zea mays
  Clone ID: MRT4577_76056C.1.pep
KKEGAKPYTKAPKIQRLVTERLQRRRHFRSLKRRKTEQQKVQVAEYPQVVAECLHQKKQPPLTQIANVSPIAFLTQQQLLPFYLHAAPNAGTLLQLQQLLPFNQLALTNPTVFYQQPIIGGALF

SEQ ID NO: 343082 - protein, 72 aa, Zea mays
  Clone ID: MRT4577_76058C.1.pep
SISLARCAWCCPPFTSAAIAAILARILASPSAFHHQPIVGGALFRFLMSYSPIHRVFCLMFVASRDVTKYIF

SEQ ID NO: 343083 - protein, 55 aa, Zea mays
  Clone ID: MRT4577_76059C.1.pep
CGSLIGKSAHLPPPPARPLRSAASACRVGGLLRACDTATFLPRISAKKVNFVLHI

SEQ ID NO: 343084 - protein, 226 aa, Zea mays
  unsure (1)..(226): unsure at all Xaa locations
  Clone ID: MRT4577_7605C.1.pep
MAAGLQVFGQPASTDVARVLTCLFEKNLEFELVRTDTFKKSHKLPEFIKLRDPTGQVTFKHGDKTIVDSRTICRYLCTQFPDDGYKKLYGTGSLERASIEQWLQAEAQSFDAPSSELAFQLAFAPHLKDVRPDEARVAENEKKLHSMLGVYDDILSKNEYLAGDDFTLADLXSHLPNSHYIVNSSDRGRKLFTARKHVARWYDKISTRDSWRQVMKMQREHPGAFE

SEQ ID NO: 343085 - protein, 103 aa, Zea mays
  unsure (1)..(103): unsure at all Xaa locations
  Clone ID: MRT4577_76060C.1.pep
AISIRPNPEVPQVEPHVGTSNFYGEPLVLPQSSSPTEMEVIGMEKLGTKRQSLGLKXGGALQESFARLSVLETTPLAQSPKKPLAKTHAREWGVALKDIKEHH

SEQ ID NO: 343086 - protein, 90 aa, Zea mays
  Clone ID: MRT4577_76061C.1.pep
MNHQDQAVHTGNVYPATGVKREARHERDKIIDQGDQLVGALHVDQTDVRADRRMGTDSAGGQVMAQITVPVPRTRVRMPRTRSPSARPSM

SEQ ID NO: 343087 - protein, 253 aa, Zea mays
  unsure (1)..(253): unsure at all Xaa locations
  Clone ID: MRT4577_76062C.1.pep
MQLNKKSRLLQLPHFSSFTTTTTSSLISSSRPFSLSSIKMSNEEITHPTIVDGXFREISDMWPGHAMTLRVEKVLVHEKSKYQDVLIFKSTDFGNVLVLDNVIQCTERDEFSYQEMIAHLALNSHPNPKKVLVIGGGDGGVLREIVKHDCVEEATLCDIDEAVIRLSKEHLPSMACGFDHPKSKTHVGDGFKFLNDYXNEFDVIITDSSDPDGPXEALFQKSYFQLPHDALREGGVITTQAESPWXHLPLIAR

SEQ ID NO: 343088 - protein, 197 aa, Zea mays
  Clone ID: MRT4577_76063C.1.pep
ALPCSQSYTCILVIVDLFTKYANFLPLKHPYTALSVARLFHDQVYKHHGLPQSIVSDRDRVFLSHLWKELFHLADVQLQMSTAYHPQSDGQSERVNQCLETFLRCFVHACPHQWSRWLSVAQFWYNSSPHSAIGMSPFQALYGCPPKQFGIADQTVITSSELSSWLKERQLMSELVKQHLERAKLRMKRQADKGRSE

SEQ ID NO: 343089 - protein, 572 aa, Zea mays
  Clone ID: MRT4577_76064C.1.pep
MASPDLAAGDGSYDFHLRSLSAASRDSAAASDPASDPNLLQSVRRVCEMRRTAKEAKDEMVARAFPVMGKLFQRCAAAPTQAVASTGVLLLTILQFFLDFGEAVLHDADGSLKTFFRSCLSREFADPIVAERTVEFLVTNKTKILSSFPNLIPQFYPLLLKLIASNGERLENKFSEVLPLMMSAGSFLPLFLSLMDLPMLVVALEKVERSSGTLIGSSIATIQKSAAPEMLLALMDEAYTGSAVEEPSGNSGSDDSGPLDLTDPMFLDLLKDENDGIAAKHWISPTISSTLQAAFNSPQSDRLKQSLEMAPRFLTLYFATALRDVNDSLLCALIPVVMSRYAAMFPDKVFSFKVRERLSDFILAAFQRSPNIIAVLKKPITDRLGEAHDNLAKTELALHLCWAIGEHGAGGVGHKDVARELFENLELLLYENLATSRLGLSQEPGSDSMGASSRKSSQARLLCFVVTAIAKLATCHSELLPRARVSLGKVARSRTSDRRVWQRACDYLGLMNEPAICLSVLGPSTAQGNGPGIVNWSEGGTKMVAHVPFYLLAQQKGPPSHNFSFADLLPTE

SEQ ID NO: 343090 - protein, 71 aa, Zea mays
  Clone ID: MRT4577_76065C.1.pep
GSIHNPSLMHWDNITDQGLKAVLMSNVQLTKTTIFGALPLTYEGLIDSVWSLNMETDIGIKKLRVTNHFTA

SEQ ID NO: 343091 - protein, 260 aa, Zea mays
  Clone ID: MRT4577_76066C.1.pep
MLSSTGRLHLQGVLADTLRGYGGAHHHRQHLGSLAAARYMPKLPASRRGMRAPRMRWTSSLHARFVHAVELLGGHERATPKSVLELMDVKDLTLAHVKSHFQMYRTVKSTDKPPAATSSGGGGPPVDGGGGSGDDDHPSDWRRAPSSSAGRDVSPQAFTGHRSASSDGAASHAGGDVECSSADDSDGGRPRSASPPRLPPPSACNAGHPSFSWRTISTTEDMEPACRSAGLQHSLNHEMSCPPSLEFTLGRPNWNGAEHD

SEQ ID NO: 343092 - protein, 42 aa, Zea mays
  Clone ID: MRT4577_76067C.1.pep
FQHHHTHYPTRSFSRSRILPTTILLNQQILFNIPHKLTPFTT

SEQ ID NO: 343093 - protein, 100 aa, Zea mays
  unsure (1)..(100): unsure at all Xaa locations
  Clone ID: MRT4577_76068C.1.pep
IKPNHHRGGFNKIRAANNQDGSTMAFTTNLTTNQQSXPLMHVPALALPCKPLRGKTDSLXFPSRTMFSNANLNPRPGVPTQHNPREPDPKDFLNLNNCDI

SEQ ID NO: 343094 - protein, 96 aa, Zea mays
  Clone ID: MRT4577_76069C.1.pep
PNYSTRPFYIKWHNGFEPVCQCTKQRRAQRANREGISQYQQMRQTTDVSFFCIPILTYFNKTTFIIVLDGKKKKKERILDLLYILLGPLSFSNANQ

SEQ ID NO: 343095 - protein, 61 aa, Zea mays
  unsure (1)..(61): unsure at all Xaa locations
  Clone ID: MRT4577_7606C.1.pep
NYSRPHIYLNGTLFVAYDSFLSNMLYILQVTWDIPDLRVLLCPESXIYHVTHDSCFYQIYL

SEQ ID NO: 343096 - protein, 50 aa, Zea mays
  Clone ID: MRT4577_76070C.1.pep
KPPHNPMHATQYNPVKIKYMTAGFFIFRPKDFFHVPCKNLMRFSVESHKT

SEQ ID NO: 343097 - protein, 50 aa, Zea mays
  Clone ID: MRT4577_76071C.1.pep
IRPKYSHRSILIPENELHSLSDCMREQVHIELVVAIGESHHQANTPLPQS

SEQ ID NO: 343098 - protein, 81 aa, Zea mays
  Clone ID: MRT4577_76072C.1.pep
ELPAIDRPLADDTHGRQRDRHQLPVYPAALHIYPAPAPAPCHSSYPTSPPSVTKTTRRPLKVAARNLGASPLTWRRMASSS

SEQ ID NO: 343099 - protein, 214 aa, Zea mays
  Clone ID: MRT4577_76073C.1.pep
ASPDPLVAVSLLGPPARPRARSPSLCLSSRFSLSPPTHRESRRRSAEPLLARQPLTRPPASLAKASAASSSFHLTSLQPPRMPSSSIAGCRPGNPWRRRLKATPPAGSCVPPPGSARASVPAASRFACIPVAPPHALFWRHPRHPTTTTTTGANLRHLPGQVDARADPKALLYSSRLEPLPLTTTFVFCCCFIGEHMPPPCCLAFASRLRPRPA

SEQ ID NO: 343100 - protein, 45 aa, Zea mays
  Clone ID: MRT4577_76074C.1.pep
TAQGQCRHPALGASAPTKQTQSSRPVCPLTGLARRLSTHHSMPAR

SEQ ID NO: 343101 - protein, 52 aa, Zea mays
  Clone ID: MRT4577_76075C.1.pep
RALTKNRGIKVRYPGKQIAPLLHALTATRRLAPLSLATLCVSMSRRDWNPMT

SEQ ID NO: 343102 - protein, 40 aa, Zea mays
  Clone ID: MRT4577_76076C.1.pep
VRLTAVTIMARGTVITVATTSTGATYGAEPVRAICSSGVY

SEQ ID NO: 343103 - protein, 170 aa, Zea mays
  Clone ID: MRT4577_76077C.1.pep
MGVFTETKKATTPFEGQKPGTSALRKKGTVFQQTHYLQNFAQTTFNALPAYQVTGGTIAVSADARYFSKDAVQIITKMDAANEVRRDCIEQNSLMSTPVVSAVIRERIEAYGSNGTGDLILTASHNPGGPTEDFRIKYNMLNGGPGPEYDDDKIFSNTTTISVYLISEDL

SEQ ID NO: 343104 - protein, 87 aa, Zea mays
  Clone ID: MRT4577_76078C.1.pep
YVTIGDKSRQRTDPVYPLGTKTSSDDLGPMYYQRTSCIYRTLFTMLMPNQVMIGMIPTRYDRLQVLPANARAFSVTVWTLWPFCKQE

SEQ ID NO: 343105 - protein, 352 aa, Zea mays
  unsure (1)..(352): unsure at all Xaa locations
  Clone ID: MRT4577_76079C.1.pep
MRPCLYILYWTHSGPACSCSSSPSTVTTDRARTMTRTTTSSTLLTAALLCLALPLLPGATANKAARRRQGDNLARLRGSPWPAESSVSLAVAATDDRASRHAASPPAGRSKEDDRVDKLPGQPSGVDFEQYAGYVTVDAAAGRALFYYLTAASKPSSSPINLRGIMIGNAVINDWTDTKGMYDFFWTHALISDATADAIGRHCNFSAAAAXDAAGSNDKCDEATSEADEALQDIDIYNIYAPNCQSPGLVSPPITPSMDRFDPCSDYYVNAYLNDPDVQRALHANVTRLDHPWSACSDVLRRWTDSATTVLPILTELLNNDIRVWVYRYASTSSVSPPPSGPVRFAWNEGVE

SEQ ID NO: 343106 - protein, 511 aa, Zea mays
  unsure (1)..(511): unsure at all Xaa locations
  Clone ID: MRT4577_76080C.1.pep
MKPTTSSTLLLAAAVLCLALPLLPGATAKAARARQGDYLARLRGSSPWPAESASLAVAATDRASRHAASPGVGRKEDDRVDRLPGQPSGVDFEQYAGYVTVDAAAGRALFYYLAEAVGGGSASAAKPLLLWLNGGPGCSSLGYGAMEELGPFRVKSDGKTLYRNPYAWNNAANVLFLESPAGVGFSYSNTTDDYSRSGDNKTAEDALRFLLNWMEKFPEYKGRDLYLAGESYAGHYVPQLAHAILGHAAPPXAVVVAPLNLRGIMVRVTYVTVTVRAIMLAAAGGRAANNXRLRSCRCAWRGNXGTAIANDWTDTKGMYDFFWTHALISDATADAIGRHCNFSAAAAAAAAGSNDKCDEATSEADEALEDIDIYNIYAPNCQSPGLVSPPITPSMDNFDPCSDYYVEAYLNDPDVQRALHANVTRLDHPWSACSDVLRRWTDSATTVLPILTELLNNDIRVWVYXGDTDGXVPVTSSRYSVNQLQLPXXAAKWXAWFNNTQGAGKVGPLHR

SEQ ID NO: 343107 - protein, 46 aa, Zea mays
  Clone ID: MRT4577_76081C.1.pep
LFLVVRLFCDDLVRSVFRAYYAVIGKNRRNWLVTGPRERLLVGRPT

SEQ ID NO: 343108 - protein, 364 aa, Zea mays
  unsure (1)..(364): unsure at all Xaa locations
  Clone ID: MRT4577_76082C.1.pep
ASRHAASPPAGRSKEDDRVDKLPGQPSGVDFGGYAGYVTVDAAAGRALFYYLTEAVGGGAAAKPLLLWLNGGPGCSSLGYGAMEELGPFRVKSDGKTLYRNPYAWNNAANVLFLESPAGVGFSYSNRTEDYSRSGDNKTAEDALLFLLNWMEKFPEYKGRDLYLAGESYAGHYVPQLAHAILRHAAAXPASRRRPINLRGIMIGNAVINDWTDTKGMYDFFWTHALISDATADAIGRHCNFSAATTGXHQGMYDVRWSHVLICDATADAMRRHCNFSAAAVQGSNDKCDEATSEADEALEDMDIYNMYAPNCQSGDLVSPPITPLMDNFDPCSDYYVDAYLNDPDVQRALHANVTRLDHPWNIC

SEQ ID NO: 343109 - protein, 42 aa, Zea mays
  unsure (1)..(42): unsure at all Xaa locations
  Clone ID: MRT4577_76083C.1.pep
VLVKHYVKHTVSSALKPSPHDNQGFISXXPHTQKPDAWADAW

SEQ ID NO: 343110 - protein, 301 aa, Zea mays
  Clone ID: MRT4577_76084C.1.pep
MADQGGTHNAWQSDFCTTILQHTSYYPAHRHTSHFVGHGGIQKTLQRLRTYFFVHRDKALVRDWVRSCAVCQQNKIETLHPAGLLQPLGGTILDLVRHLNGFHQSPTKETPPPPLIPYQQGAAATPTIEEMFRERDCFLAEVRDRLLQAQEHARQFNDGHHRDLEFKVGDWVWLRLLHRQAQSLVSRPKGKLGVWDQGLLKPFRGSPPVLPPALPVLENGRLLPTPQKVLKARLQRGKWFILVQWSAEQLEQATWEPMQQFKTSYPQFQLEDELFVERGRDVMTGKVYRHRPKQPVEDKLD

SEQ ID NO: 343111 - protein, 227 aa, Zea mays
  unsure (1)..(227): unsure at all Xaa locations
  Clone ID: MRT4577_76085C.1.pep
GRVGPFRVKSDGKTLYRNPYAWNNAANVLFLESPAGVGFSYSNRTEDYSRSGDNKTAEDALLFLLNWMEKFPEYKGRDLYLAGESYAGHYVPQLAHAILRHAAAAAAAGKPSSSPINLRGIMIGNAVINDWTDTKGMYDFFWTHALISDATADAIGRHCNFSAAAAAGSNDKCDEATSEADEALEDIDIYNIYAPNCQSXDLVSPXITPSMDNFDPCSGYYVDAYPH

SEQ ID NO: 343112 - protein, 54 aa, Zea mays
  Clone ID: MRT4577_76086C.1.pep
FFLRSYTLTRSMSTVYKRYMLDFPGTFTAPFFGPSITVSSVNLPFLLHLVLQFS

SEQ ID NO: 343113 - protein, 130 aa, Zea mays
  unsure (1)..(130): unsure at all Xaa locations
  Clone ID: MRT4577_76087C.1.pep
MLFLIFCLAYYAYCLTVRHXAVVLAPXKLRDQYQHCHKELRHSWNGKDEQVHPDFELIMRGTGLFIKXSAXQCHCVKLLSYHTXYLDEXLLYIDTLDLDWDFRCVRLTDNILLDFYDFRVDEDYYFVGDT

SEQ ID NO: 343114 - protein, 130 aa, Zea mays
  Clone ID: MRT4577_76088C.1.pep
LVGLPVPMAYAGYFASSVPHSASDASSVSVACCSIGLPCYRFPDPASLLASVGSPGCAPRDRSPGCASPCSPRLWPGFWSPGMVAWRSPLSLPEWPALCRRRLGRPDPRLKKLYGVGRSRPVPAAAACGR

SEQ ID NO: 343115 - protein, 74 aa, Zea mays
  Clone ID: MRT4577_76089C.1.pep
CGHCISAGTRTCRFTWTDSLTLDDCLYSCAAAMSCSYILRHNGVVDMHIYTCWDIVIDHSSHLHIYSGTMASST

SEQ ID NO: 343116 - protein, 73 aa, Zea mays
  Clone ID: MRT4577_7608C.1.pep
TPAFTLGGKTNGPDMVSQWQLKITIFGYRYEHHILLAHFSKKGVHWRMNISRGRGQGSDVFLGGKKTHFLELS

SEQ ID NO: 343117 - protein, 51 aa, Zea mays
  Clone ID: MRT4577_76090C.1.pep
RRRSPRRLSPMTQSSQPKAHPATVGAPEGGRSRRRGDPRRRRDEHGPARPA

SEQ ID NO: 343118 - protein, 41 aa, Zea mays
  Clone ID: MRT4577_76091C.1.pep
TPSIHRAIMFKAGYHNFSGGALDYRRNPSLIHTHSMLNIYA

SEQ ID NO: 343119 - protein, 72 aa, Zea mays
  Clone ID: MRT4577_76092C.1.pep
ESAKQPHGGGRKRKKKKKGEGRGRRPSPPASPYNPSSGNPRLPLSPAIQCRCPRLSRRRLRFAVAASDSPRA

SEQ ID NO: 343120 - protein, 40 aa, Zea mays
  Clone ID: MRT4577_76093C.1.pep
KELNGFGPGGVMAQITPSIRLGDPSLKLFLMPNELADPPH

SEQ ID NO: 343121 - protein, 43 aa, Zea mays
  Clone ID: MRT4577_76094C.1.pep
TQQFYLADRTLLPLVTHIKVHTRNQRALTQILSLIYPPLRPLI

SEQ ID NO: 343122 - protein, 73 aa, Zea mays
  unsure (1)..(73): unsure at all Xaa locations
  Clone ID: MRT4577_76095C.1.pep
GGHIWITVRRVKQYFKTKVXPKSSIAYVRTRLTRRKRGRTGLPQGVAGSEAKIRRIRSGGRSTRSSGTRRVNI

SEQ ID NO: 343123 - protein, 100 aa, Zea mays
  Clone ID: MRT4577_76096C.1.pep
APSTAMPNNKIEAANMEHKGSAGKAAVPHDQLPRFTIFLIPNRREPPLDLVKIACLNHRINLGNGVPGQHYENSYLQKVLVKRNRWSAVLTSSTPAVESR

SEQ ID NO: 343124 - protein, 117 aa, Zea mays
  Clone ID: MRT4577_76097C.1.pep
GMGLKNMDASKIRELSNLYESGYKSPSFLADHNLSLSAGSPPELGEPKFSTSTPYLKRTSRSIQDDMDDFSDDYDNLDMKNPTPERDKLDEYIAESDLEPQREIDQSDHGNPSQKMG

SEQ ID NO: 343125 - protein, 77 aa, Zea mays
  Clone ID: MRT4577_76098C.1.pep
ALPALAVVASDSLAERSQNRGTERGLGGELVVLVLCRVLRCLLVVNGTNWCDLSRIMRAKWVIECYTHSCCGWNVTH

SEQ ID NO: 343126 - protein, 104 aa, Zea mays
  Clone ID: MRT4577_76099C.1.pep
AARAGPAGFPYLHDRIHLFLSSPLLCRPLPSTRSPQIPQIEPQTEASRELRRPHHTFYSNKEIFLREFISNSSDALDKIRIESLTDKSKLEAQPELFVHIIPDK

SEQ ID NO: 343127 - protein, 217 aa, Zea mays
  Clone ID: MRT4577_7609C.1.pep
MGEACRDAAAAGQQLRQDEAGGGGGRHAEKELVGDPTHDSVVSAKLYEDVPATPMMALNHISRLCVSVDASVRFYVKALGFVLIQRPPALDFSGAWLFNYGVGIHLVQRDDARRAPDVRPEEAELDPMDNHVSFQCEDMGAMERRLREMRVRYMKRTINEEEGSPIDQLFFRDPDGFMIEICNCENLELVPAGAFGRLRLPRDRHNPPVRMVAGSDE

SEQ ID NO: 343128 - protein, 84 aa, Zea mays
  Clone ID: MRT4577_760C.1.pep
SVSNYYVAVACAERVLDPEPCVMYDSLPAAHGGIIRPRAAPAVPGPPALGTRRVPPVNAPQQYRFRLRMLLSLLESDDQRRVAS

SEQ ID NO: 343129 - protein, 61 aa, Zea mays
  Clone ID: MRT4577_76100C.1.pep
LIRCENILYVLEFLHLLQTAGYSIVFAFLRETGLRFDKDAVCRNLHEQLRTDGKIYRVLHT

SEQ ID NO: 343130 - protein, 80 aa, Zea mays
  Clone ID: MRT4577_76101C.1.pep
LRATRCRRANVKSFDGVRLARCKPARADWCGTVEVELCRGVNVRRCGAVTGERCRVVNAAGCGSVEVARAVINMVEEEQP

SEQ ID NO: 343131 - protein, 94 aa, Zea mays
  Clone ID: MRT4577_76102C.1.pep
PLFFFFFFFFFFFFFFFFFFFFFFFLGKKNKSFKGPLGPKGLGNKSPPTMKSIAFGLLGNNGGGSGNTPGGGTGEKNFFSGGGGIPDPLNPGKG

SEQ ID NO: 343132 - protein, 106 aa, Zea mays
  Clone ID: MRT4577_76103C.1.pep
MSASSTPVDALGEPIPTSSVLMAASKHIAVRCRPENVAFLNCKKKDPNPEKCLEKGRQVTSCVLSLLRYVSEAVCEVTDDTVEQLPGIAYLGNHQQYMQMLCRDMI

SEQ ID NO: 343133 - protein, 148 aa, Zea mays
  unsure (1)..(148): unsure at all Xaa locations
  Clone ID: MRT4577_76104C.1.pep
MSTEEAVMREVAVTEAPADDPPAQEAEDLRSDEXPHHNNPPTEKILSAVKKPARHPPYTEMFVSRIPAXLFASTGTSSAAMGXYIQRKYGGEILTNFRKQITVHVYNLADAGNLTMVNNSFKLAVSDAKPDAAXPMLPRMRTSPRPLP

SEQ ID NO: 343134 - protein, 62 aa, Zea mays
  Clone ID: MRT4577_76105C.1.pep
DGCSIRKQPAFIPCPLTKVRADQIHIESPRIRFVQGPFRVGKFMAIRSSRSESCHLVFRMAF

SEQ ID NO: 343135 - protein, 51 aa, Zea mays
  Clone ID: MRT4577_76106C.1.pep
RAIPERPGGCVGALTQAVCIRSGQCCSGQRHGRGQWMILFVWKHFLPPLEV

SEQ ID NO: 343136 - protein, 46 aa, Zea mays
  Clone ID: MRT4577_76107C.1.pep
GVTRIGRTRVTNDAIEYRHEDRRELSASGDKKLSNYNFPRSTGQPY

SEQ ID NO: 343137 - protein, 170 aa, Zea mays
  Clone ID: MRT4577_76108C.1.pep
MVKYSTDPANPTKSAKAMGRDLRVHFKNTRETAFALRKMSLNKAKRYLEDVLAHKQAIPFRRYCRGVGRTAQVKNRQPNGQGRWPAKSAKFVLDLLKNAESNAEVKGLDVDALYISHIQVNQAQKQRRRTYRAHGRINPYMSNPCHIELILSEKEEPVKKEAESQIARKA

SEQ ID NO: 343138 - protein, 158 aa, Zea mays
  Clone ID: MRT4577_76109C.1.pep
GRVGDAAAAASVPRLPPHPGAPRRRGGATGRRHLRPAQSRWPQQARSAGQARATETEAPHARGAGAAEADADGPGRRHRAEPVPEDRLPRPVHVGHREAAAAAAAGREAAGRRRRAAAGHGRRAHQGRRGQGRGGRARQRPPDAAAGARPAARLRRVV

SEQ ID NO: 343139 - protein, 136 aa, Zea mays
  unsure (1)..(136): unsure at all Xaa locations
  Clone ID: MRT4577_7610C.1.pep
FLSHKPPHTLYNTTSISTTIKNQSTFIITNSKSPHTTSCKTTHSKSFSKTTKXQFLPFKHKPTITLLLPASYXLTRYPIHXSRITSYAYSTPSITKPSKSHNSAKFNLYHYPNAYYXLYHNTSPDAKIMSWSDFPY

SEQ ID NO: 343140 - protein, 151 aa, Zea mays
  Clone ID: MRT4577_76110C.1.pep
AEFIRSGRSEPGGYPDGSESPYERLSIISKGLPFQEADGDGSPSPESSARKDTNPILVSSKSRRVRFVLPENAQINSQVRNELQELTEAREAGMSFIMGRSYMKAKSGSSLMKRIAINFIYEFLTRNSRGPAYAANVPHVSTLEVGMVCQV

SEQ ID NO: 343141 - protein, 101 aa, Zea mays
  Clone ID: MRT4577_76111C.1.pep
NIIFVRWWSNRAYCVREVVTYLKYRIIASSTSERSYHVAATLIIVLEATINDACHVPASLRSGSQGRSERASSGCRQMEPVGCGSRRLRWVHAGWCNSHQL

SEQ ID NO: 343142 - protein, 204 aa, Zea mays
  Clone ID: MRT4577_76112C.1.pep
EALPLVIAQYPSILGLPLKAKLAAQQYFFTLKLQIDPDGFARAIEKLPQLVSLNQNVILKPVEFLRGRGISNEDVARMVVRCPQILLLRIELMKNSLYFFKSEMKRPMSELLEYPEYFTYSLESRIKPRYMRVTSRGIKCSLDWFLNCSDMRFEDRMQGDFIEGDAPGPSFTMGGKLQMPGSQLVSDDDEDTDDEVLYRRTVMI

SEQ ID NO: 343143 - protein, 51 aa, Zea mays
  Clone ID: MRT4577_76113C.1.pep
NNCSTSDEVLVQIRQANLKVKLTSSSNDTLTRFVPRAEAEHTEVRIPCDGL

SEQ ID NO: 343144 - protein, 102 aa, Zea mays
  Clone ID: MRT4577_76114C.1.pep
MRHEVDSGERSPDLFERRTSSLSFNCIKDSGRSQNVYGHGSSRHTRCWRRSSGSRDDVAHPSSCVLAPSARSGLGRRCCCHTSSGSDDAGGTRSVALTYVSC

SEQ ID NO: 343145 - protein, 109 aa, Zea mays
  Clone ID: MRT4577_76115C.1.pep
QMEIPSHRRPDVSIVYDRLTTILSSEGRLYHAPYGVQGIRHTSISHPPKILDGSHARRACVEAAIRGLICYSTPGDPRDMMQEIYSQLPCVEPAIMSYDSLRLESVRLD

SEQ ID NO: 343146 - protein, 66 aa, Zea mays
  Clone ID: MRT4577_76116C.1.pep
ERICELQCVQVRTEDGYSDEEQRCMDGNIRRAGGRLRPLAAAPLHYSPLPLSIYLCLFNLNRIRIE

SEQ ID NO: 343147 - protein, 69 aa, Zea mays
  unsure (1)..(69): unsure at all Xaa locations
  Clone ID: MRT4577_76117C.1.pep
KLQPQFHLYXSTWTSELMVSDRVDSVYFNGKLGPAVPCYVPVSRDADCLACLIRIADLINANTKVLKAD

SEQ ID NO: 343148 - protein, 36 aa, Zea mays
  Clone ID: MRT4577_76118C.1.pep
LGSSCDSYGILFYRACPFFFCSYKTFLMGAGPRLTR

SEQ ID NO: 343149 - protein, 121 aa, Zea mays
  unsure (1)..(121): unsure at all Xaa locations
  Clone ID: MRT4577_76119C.1.pep
PHSSPFQTLLYFHSAFAARRYRWSEGDHEEHRAQVHVAGKVPRKQLATNAVRKSSPAXTGGVKKPHRFRPGTEALHEILKYQKSTELLIRKLPFQRLVREIAQDFKTDLRFQSFVVACAEG

SEQ ID NO: 343150 - protein, 54 aa, Zea mays
  Clone ID: MRT4577_7611C.1.pep
PIRIPKQRSVWLTCVHFSLIECRCCSRIRPSQQEFYQSLVALNMLIWYGINDKR

SEQ ID NO: 343151 - protein, 94 aa, Zea mays
  Clone ID: MRT4577_76120C.1.pep
PRSHRVRHSSTSATTITFISTPSSSPCSLLSLARQLEPGSHRCSCARHRPPPVLDEWLEPGDRCRFSSAIPSTSARQVFGEGPEPIVVAASTDF

SEQ ID NO: 343152 - protein, 221 aa, Zea mays
  unsure (1)..(221): unsure at all Xaa locations
  Clone ID: MRT4577_76121C.1.pep
MRALLHLWLIHCAEPEHPVFPLLPQGRLADCLLRRGDKAPVCDERERVAPRSLQNGAMASQQALRAHQHEEQAFPAEHQESQPAKEDAXMDHPRPRASVQXYKAGNKLKDKEALETGGHYHIGRAVCLYFTNEGGTAAFTFKRGQEEKDXAAETLRALRDIHSDTVAREPMALAGDLGYEANCRQEEERMASAYGGRIDVKENTALEHNDRKSIEDKMEAD

SEQ ID NO: 343153 - protein, 60 aa, Zea mays
  Clone ID: MRT4577_76122C.1.pep
TVIEHRWEPPCATWRYTYFINYDVDCYALFLSEQLGDLSCAANRLLPFWRHWTACNLYPK

SEQ ID NO: 343154 - protein, 143 aa, Zea mays
  Clone ID: MRT4577_76123C.1.pep
MELFPSQPDLSLQIGLPASATPHDHHHGAALSARFLAAAASGGGNGIPGNPAVAMAPSLQLPMPMPLPMPMPMPPNAAAAAGAAGGLYYHPDAAAMLRPIRGVPLYQHPHTHAVPPTFPPHAAEAAGPCFCEPCHVTAGAWRR

SEQ ID NO: 343155 - protein, 261 aa, Zea mays
  unsure (1)..(261): unsure at all Xaa locations
  Clone ID: MRT4577_76124C.1.pep
GSSWNEGNKNGESGGGRSGEPWNRRDFDGGRGRGRFGRGDRNQGNNLGSGDGGSWGSGRGNGGGHASADAWGGYRNWNDNNERRPFGQGGGWSQSSDWNANKGSGEGNQAFSKSKPSWDAQNASGGDDQAGKKSDTDNSWSQNRSSPSXSWVSQXDANNKSSAWDGAPNGGAGRGGSGSWGKSDEDGWNSSSGGSAREKPSWGXWGRSSSQEGGXGAWGKGGEGSRSLGGGGEGGSSSSWDKPADGAWSGNNKGGSGSGGW

SEQ ID NO: 343156 - protein, 87 aa, Zea mays
  Clone ID: MRT4577_76125C.1.pep
YRISPARYIGYRLPGPNFCGHYRSQLVRQTLRHVTIAHATGDHQMHEAQFWAGRGSSQFKTFNGNLSSTDFRGSTRNSRNRKPRLVS

SEQ ID NO: 343157 - protein, 469 aa, Zea mays
  unsure (1)..(469): unsure at all Xaa locations
  Clone ID: MRT4577_76126C.1.pep
IGYLEAGRAKTDGSSKVRLFLKKLAKKASTKAALESKTSSGMSVQGEKKILDKLRSYQGAPFIEALIGPQEDKLGGNSSQDTVKATAPPVALNQIGQLSTSPDVNADDRVAGEGTLCWNLLSSRLFFDAKMSDEINKAIKARIQRTLSNMRTPTYVGEITLTDFSLGELPPYVHAMRVLPLDLNELWAFEVDFEYSGGILLHIETRLEVQEPELQKDIMKSNFXADANGDVDSDLLESIEQYGNQFKGSHNSASSIGENDEADASSQSKSIGWTSAYISRWKTILHSIADHVSQVPLSLAIRISSVRGILRIQMKPPPSDQIWYGFTSMPDLEWDLESSVGDRKITNSHIAALIGNRFKASLRDSLVLPNCESISMPWMLAEKDDWVPRKDAPFIWLNHEPTEMRIHATATASTQSEEGGLKDGGSEESSRVVASIDEANKSPRQRHHCTVSLHLLQAANLPTAMQMMS

SEQ ID NO: 343158 - protein, 173 aa, Zea mays
  Clone ID: MRT4577_76127C.1.pep
FGTRGGWSQSSDWNGNKGSGSGEGNQAFSKSKPSWESQNTSGGDDQAGKKSDTDNSWSQNRSSPSILGQPSGDANNKSSAWDGAPSGGAGRGGSGSWGKSDEDGWNSSQEGSGSWGGGAEAPPRKEGDGAWGKGGEGSRSLGGGGGGSSSSSDKPADGPWSGNNKGGSGSGGW

SEQ ID NO: 343159 - protein, 435 aa, Zea mays
  Clone ID: MRT4577_76128C.1.pep
MAPVYAAADHGTNGGSGLTLNPVAARRALSLVGAPTPSSSTPPAYGSIVTVLSIDGGGVRGIIPGTILAFLEEKLQEYDERPDARLADYFDVIAGTSTGGLVTAMLTGKNKDGRPLFAAKDINGFYLDHCPRIFPPGGGGGGPLGLLKKLSGPKYDGKYLHALVRDLLGETRVSQALQNIVIPTFDIKLLQPTVFSKYDAITDVSKDALLSDVCISTSAAPTYLPGHQFQTTDKDGKARAFNLIDGGVAANNPTLLAMTDVSKQILLGNPDFFPIKPADYGRFMVLSLGTGSAKAEEKFDAVQSGKWGLLGWLSSKDTTPIIDSFSQASADLVDIHASVLFQALHSERQYLRIQDDELTRQTSSVDVSTAENLNRLVDVGRGLLKKPACKVNIETGKNEPDGKRGTNEDELVRFAKMLVRERRARIQKKEASNTL

SEQ ID NO: 343160 - protein, 73 aa, Zea mays
  Clone ID: MRT4577_76129C.1.pep
DRPFQDKMDFARLDSLMRDNLVHLDIFITVFFLYVYADVIVDITPQPITLNQRIKSDKCHKNNHSSTYIYLQK

SEQ ID NO: 343161 - protein, 62 aa, Zea mays
  Clone ID: MRT4577_7612C.1.pep
AFDSNLLGKGYVFEEGIFVILSYGDIVIMRAVLFFGDNLFIPSCSLSFHKILNVTLFLPKKK

SEQ ID NO: 343162 - protein, 118 aa, Zea mays
  unsure (1)..(118): unsure at all Xaa locations
  Clone ID: MRT4577_76130C.1.pep
STSRATTGRTVIKVTPEFLVGAITAXDTKEAGEACAGGALCSTPELRKHYEQLVGAARGRAWSPRLDTIKERKGRRALALAAVVSPGRLSPVAVTRLLGLDAAKAETTTDSDRSLIQR

SEQ ID NO: 343163 - protein, 54 aa, Zea mays
  Clone ID: MRT4577_76131C.1.pep
KTPCQTLLDIKKTKSNTKGRYIYQCSMNYIKLHLIKIDNHSQLLLTNLYQKFFF

SEQ ID NO: 343164 - protein, 92 aa, Zea mays
  Clone ID: MRT4577_76132C.1.pep
APQSMNSLNSGKGKERLTSHQHQVSTSTETERIQFHGTSPSATLGIKQAAPSGLATAACSLRPARTRHGASCAQRPYPRVAVGRRAARLLAA

SEQ ID NO: 343165 - protein, 73 aa, Zea mays
  Clone ID: MRT4577_76133C.1.pep
NQLNPYYTSVLNRHVNETIPELMGQKLVPVSCPRIVHHPNQVISSQLMIVTTSNNPGPNESRQHPKPRTASAP

SEQ ID NO: 343166 - protein, 104 aa, Zea mays
  unsure (1)..(104): unsure at all Xaa locations
  Clone ID: MRT4577_76134C.1.pep
SKNKKKKGXXNSFSFSGGGAKLGAIQNLTLTLNFVGWLKYVMLECLSKKNPSLGVESSVQKNQCRPVFFFPYSFHRQLSLCVPSPFSINQTAILKSPCSKNRLL

SEQ ID NO: 343167 - protein, 47 aa, Zea mays
  Clone ID: MRT4577_76135C.1.pep
EADNKGRAHSDHSCVCFLKGYITYPSQTGNSSAIFLLGVILHPNVEN

SEQ ID NO: 343168 - protein, 100 aa, Zea mays
  unsure (1)..(100): unsure at all Xaa locations
  Clone ID: MRT4577_76136C.1.pep
RTAQVGDGDRKTSTTRQGEKESRAPKPQRLETPATLQRKRAGXADRTKRSAHKTGEGDEYFXFLAQRLSELRLRRTDSARQRRGKLYARRRGWAATSAYE

SEQ ID NO: 343169 - protein, 93 aa, Zea mays
  Clone ID: MRT4577_76137C.1.pep
HVPELMPVSMLVRVLRSLDVLLLVHRCRRSDVALFAGPQDRSVRTCLLLSILRVHPQGYDPGNERPSRSPSNSPFTTRQDKDISWSPPSCYSS

SEQ ID NO: 343170 - protein, 888 aa, Zea mays
  unsure (1)..(888): unsure at all Xaa locations
  Clone ID: MRT4577_76138C.1.pep
MSGEHAKREMVTGEKPEGSGSKNDGRTPSREADDKHKEESASSIKSHRKGDKKKKKMKKVVYYDIDSSSPSTSGVKSTTSKRQERKKYCKMPLRYPCSPKHAPLLSVPLDKPPYFDGEDYCMWSDKMRHHLTSLHESIWDIVEFGAQAPQMSHEEVIGKFVRFELMIKDSKHIVNLEQGATSTPEMQPVAFKATEEKKEESTPSRLPIDASKLDNKEMALIMKSFCSTDSSSDEDAANIADNKGILFPNIGHKYLMAKDDKKKDQKKKINELIETINEKDDILESQEDLLVKENKKFVKLKNAYALEVYASGGSSWIIDSGCTNHMTGRKGCSPHMRKMKIPKERLHSGMEIKEKSQTQETLKRFLRRAQNEFGLRIKKIRSDNGTEFKNSQTEGFLEEEGIKHEFSSPYTPQQRRGRDSKFAPKVVECFLLGYDSRAYRVFNKSTGLVEVSCDIVFDETNGSQVEQVDLDELDDEEAPCVTLRNMSIGDVCPKESEEPPQAQDQPPSSIQASSPTQDEEMAEEDEDQDQDDEPPHEQDIDQGGDEDEQDKEDDQEIWDQRPPHXRVHQAIQRDHLVNSILGGIHKGXTKWVFRNKQDEHGVVTRNKARLIAKGYSQVEDLDFDETYAPIARLESIHILLAYATYHDFKLYQMDMKSAFLNGPIKEEVYVEQPPSFEDSEYPSHVYKLSKALYGHKQAPKAWYECLRDFLITNGFKAGKADPTLFTKVIAKDLFICLIYVDDIIFGSTNKSSCEEFSRIMIQKFEMSMMGELKYFLGLQIKQLQEGTFICQTKYIQDVLKKFGMKNVKPIKTPMGTNGHLDLDMGGKTVDQKVYRSMIGSLLYSCASRPDIMLSVCMCSRFQANLKEVHLRAMKRIMRYLVYTLKFRL

SEQ ID NO: 343171 - protein, 47 aa, Zea mays
  Clone ID: MRT4577_76139C.1.pep
CNSNTYSPLNPVLHSIDHIMIVKYENWLPSSTQFYPLINALFNIFQI

SEQ ID NO: 343172 - protein, 63 aa, Zea mays
  Clone ID: MRT4577_7613C.1.pep
KIRKKVLSTKAYRKVPGKHNHGRNDEAPPPFPPLILSGTLFLLMGLFKLLCINAINLAFTFVF

SEQ ID NO: 343173 - protein, 86 aa, Zea mays
  Clone ID: MRT4577_76140C.1.pep
FLRSLPSLFSHYIVQDISRCIIKCVLLVNTIDCTYSLLISAMKRECTPRLIIGNLRMAGFAVCRMKEILLSCRLLQSWIRFRWRRE

SEQ ID NO: 343174 - protein, 652 aa, Zea mays
  Clone ID: MRT4577_76141C.1.pep
MSLRYPRIPKCAPLLSVPLGKPPYFDGEDYCMWSDKMRHHLISLRESIWDIVEFGAQTSQVGDEDYNSDEATQIRHFNSQATSILLASLCREEYNKVQWLKNAKEIWDVLKTAHEGDEVTKITKRETIEGELGRFVLNKGEEPQAMYNRLKTMVNQVHNLRSTNWDDHEMVKMSPEEVIGRFVSFELMIKDSKHIVNLEQGVTSTPEVQPIAFKAIEEKKEESTPSRLPIDASKLDNEEMVLIIKSFRQILKQRKGKDYKPRSKRKGKKKMENKGYYKKKGGEAHMGREWDSDESSTDSSSDEDAVNKGLLFPNVDHKCLMAKDSKKKKIHSRDTPKYTTSDDEGSSSDDNEKFKFARSMLYNGRHPDIKDGIGFQQESQSNIKHNAPRTDSLILLRVYASGGSSWIIDSGCTNRMTGERMFYSYEKNDDPQRAITFEDGNQGLVKATQDEEMAQEEEDEDQDDEPPQDEDIDQWGDEDDQDKEDNQEIQDQRPPHPKVHQEFQRDHPINSILGDIHKGVTTRSRVAHFCEHYSFVSSIEPYMIEDALKDLDWVVAMQEELNNFTRNELYQMDVKSAFLNGAIKEEVHVEQPPSFEDKKSSCEEFNRIMIQKFEMSMMGELKYFLGFQIKQLQEGPSSTILSTFKTYSRSLE

SEQ ID NO: 343175 - protein, 331 aa, Zea mays
  Clone ID: MRT4577_76142C.1.pep
MSGEHTKREMVTSEKPEGSGKKNDERTPSREADNKHKEESASSIKSHRKGDKKKKKMKKVVYYETDSSSPSTSDAESITSKRQERKKYSKMPLRYPRIPKRAPLLFVPLGKPPYFDGEDYCMWSDKMRHYLTSLHESIWDIVDFGAHHSREEYNKVHGLKNAKEIWDVLKTAHEGDEVTKITKCELIEGELSRFVLNKGEEPQAMYNRLKTMDNQVRNLGSTKWDDHEMVKVILRSLVFRNPTQLQLIRGDPRYKQMSPDEVIGKFVSFELMIKDSKHIVNLEQGATSTPEVQPVAFKATEEKKEESTPSRLSIDTSKLDNEDMALIIKSF

SEQ ID NO: 343176 - protein, 80 aa, Zea mays
  Clone ID: MRT4577_76143C.1.pep
PKGDPMAQERKGEPQGAGSYVLQTGLMRLPPSRHISLQLIPHIIQKDGLDIFLHTRTENHVTIDSAIPQRSNTPETLGTG

SEQ ID NO: 343177 - protein, 182 aa, Zea mays
  Clone ID: MRT4577_76144C.1.pep
MKKVVHYETDSSSPSTSDAESTTSKRHEHKKYMHEGDEVTKITKREMIEGELGRFVLNKGEEPQAMYNRLKTMVNQVRNLGSTKWDDHEMVEVILRSLVFRNPTQVQLNRGDPRYKQMSREEVIGKFVSFELMIKDSKHIVNLKQGTTSTLEVQPVAIKATEEKKDESTPNRLPIDATTPKT

SEQ ID NO: 343178 - protein, 79 aa, Zea mays
  Clone ID: MRT4577_76145C.1.pep
GPTRPGPSKYHPFFPSLFWTVPARSIFLQFIRPPPCPSLSFPVGSISLNLIFACSRGFFFLCINAPPFLFFFMGGGCVS

SEQ ID NO: 343179 - protein, 1053 aa, Zea mays
  unsure (1)..(1053): unsure at all Xaa locations
  Clone ID: MRT4577_76146C.1.pep
MALIIKSFLQIFKQRRGKDYKPRSKRVCYRCGNPGHFIAKCSISSESNRDKDKKGKKEKKKYYKKKGGDAHMCREWDSDESSTDSSDEDAANITVNKGLLFPNVGHKCLMAKDGKKKVHSRANPKYTTSSDEDSSSDNENDLLSLFANLSIEQKKKLNELIETINEKDDLLECQEDLLVKENKKFVKLKNAYAQEVEKCENLSKELSICHDSISSIRTENASLVSKIENLNICNGSISSLRIENDKLNAKIEKLNVCKTSTSIVKNNAICTKCRDINVEAIDDHLVMIKQQNDHIATLNAKIAEHELENENFKFARSMLYNGRHPDIKDGIGFQQESQSNVKLNAPKKLFNFVKGKAPIVQDSEGYILYPTNYPELKIRKIHARKPHTISHCAFMYRNEASSSRHTTHVKMPKKKIPNASNEHNISFRTFDVSYVLTNKSGKVVAKYVGGKHKSLKTCVWVPKVYASGGSSWIIDSGCTNHMIGEKRMFSSYEQNEDPQRAITFRDRNQGLVKGVTVFRRSDDSVAFKGVIDGQLYLVDFNDNQTELDTCLISKTNMGWLWHQRLAHVGMKNLHKLLKGEHILVLTNVYFEKDRICSEKSQTQETLKRFLRWAQNEFELRIKKIRSDNGTEFKNSQIEGFLEEEGIKHEFSSPYTPQQNGVVERKNRTLLDMARTMPDEYKTPDRVFGSKCFILIKRGRSFKFAPKAVEGFLLGYDSNTRAYRVFNKSTELVEVSCDIVFDETNGSQVEQVDLDELDDEEAPCVALRNLSIXDVCPKESEEPPQTQDQPSSSMQASPPTQDEDQAQGIEDEDQEDEPPQEEDMDQGGDEDKEDDQEIRDQRPPHPRVHQAIQRDHPVNSILGDIHKGXTFLNGHIKEEVYVEQPPDFEDSEYPNHVYKLSKALYGLKQAPRAWYECLRDFLITNGFKVGKADPTLFTKTIAKDLFIRQIYVDDIIFGSTNKSSCDEFSRIMIQKFEMSMMGELKYFLGFQIKQFQDGTFISQTKYIQDILKKFGMKNGKPINTPMRTNGHLDLNTGGKSVDQKVYLRAPRGGE

SEQ ID NO: 343180 - protein, 323 aa, Zea mays
  Clone ID: MRT4577_76147C.1.pep
MSGDHAKREIVTGDKAEGSRRTPSRESDDKYKEESTSSIKLHRKGDKKKKKMKKVLYYETDSSSPSTSSAESTTSKRHECKPPYFDGEDYCMWSDKMRHHLTSLHESIWDIVEFGAQAPQVGDEDYDSDKTAQIRHFNSQATSILLAFLCREEYNKVQGLKNAKELWDVLKTAHEGDEVTKITKREMIEGELGRFVLNKGEEPQAMYNRLKTMVNQVHNLRSTKWDDHEMVKTPNISSTWSKAPPPHPSDMDDDKKGKKKMEKKRYYKKGGEAHMGWEWDSDESSTDSSDDEDAANIAINKGLLLTNVGHKCLMAKDSKKKMR

SEQ ID NO: 343181 - protein, 181 aa, Zea mays
  Clone ID: MRT4577_76148C.1.pep
MSGDHAKREIVTGDKAIGSGRTLSRESGDKDKDESSSSIKSHRKGDKKKNKMKKVVYYETDSSSPSTSDAESTTSKGLERKKYSKPPYFDGEDYCMWSDKMRHHLTSLHESIWDIVEFGAQAPQVGYEDYDSDEAAQIRHFNSQATSILLTSLCREEYNKVQGLKNAKEIWDVLKTAHEGD

SEQ ID NO: 343182 - protein, 229 aa, Zea mays
  Clone ID: MRT4577_76149C.1.pep
MAAMSRHHHDPLLVLSSLLSSLPRQRSNEPTRSLPSRVVQKQKPTRRSAMAGEGGGRLPLDLSLATAGPSAGERRPRARPNRRTVSSLYAELGAMLPNLPIDRPASKEEIVDAAAERVKVLEDTVAVLETYHSVRSPLHGAGAGAGAAAARRPEVSVAVGAVCFCARLPARSPGSLTRVLEAFHRRGVEVLVATVGPHGHGGAAVVTVTAAAAPPEVLQMIRADITGIC

SEQ ID NO: 343183 - protein, 65 aa, Zea mays
  Clone ID: MRT4577_7614C.1.pep
FKKKKKNKKKKKKQNKKKKIKKTKKRKKKGGPPQRDFPTGFLFSGSGFGGDLISYNLGDYSRGAI

SEQ ID NO: 343184 - protein, 107 aa, Zea mays
  Clone ID: MRT4577_76150C.1.pep
FFALCKSGPYVRTVCLSERERDPPNIDDDRSSSTAPSEICAKTNDELTNNTRDLRDGSESTFLAVRSNHICITHAYMMRCLCVYKCHRIPLQVQSSSIPLPPSLPHT

SEQ ID NO: 343185 - protein, 43 aa, Zea mays
  unsure (1)..(43): unsure at all Xaa locations
  Clone ID: MRT4577_76151C.1.pep
WLIQNELYNSHLPHHVTDFTLNRYLPDHLSTLIPILXTXXXXI

SEQ ID NO: 343186 - protein, 55 aa, Zea mays
  Clone ID: MRT4577_76152C.1.pep
PTRALRRRCNLLTSLSSRNHACLVGLGFPLPHQIRSLYQSAHLLLGTLFHTLLSL

SEQ ID NO: 343187 - protein, 37 aa, Zea mays
  Clone ID: MRT4577_76153C.1.pep
QSNIIVMICSPVGFVFFAHSCVCLHKTPPAALVLPVS

SEQ ID NO: 343188 - protein, 111 aa, Zea mays
  Clone ID: MRT4577_76154C.1.pep
SGSSPSPIAGSSLLPSPYASRLYALPSSSRGRRTLMPNHGRRMREFYDHCPQPHRRELPDLPHDPHLLICTWTSAVCPNRPCHDVHHCALSESHKHLETLTVTWSALTSSL

SEQ ID NO: 343189 - protein, 122 aa, Zea mays
  unsure (1)..(122): unsure at all Xaa locations
  Clone ID: MRT4577_76155C.1.pep
DEMRRVERVNVGLMLAGXGGSIDVFRMASSRWKKRQAKVLEKVRRRMSQDDSRKGGSWSDIWGAPTRYEKNALSTFLLSEAEAKERAKRAAAAARRWREYSRKGTDKYPAFKLPEAVPSSKE

SEQ ID NO: 343190 - protein, 323 aa, Zea mays
  Clone ID: MRT4577_76156C.1.pep
MEYPYNAIIVRGTLNAFEAILHPAYLCMKIPSEQGPITVHGSQEAARKAEGNWTDSKAIHNIDEAEASNDLYGVNRDVIEHSLNVDSSFRPRKQRLRKMSEDKAEGARNEVKRLLSAGVIREVKYPEWLANTVMVKKANGKWRMCIDFTDLNKACPKDEFPLPRIDSLVDATASLELMSLLDCYSGYHQIWMKKEDEPKTSFITPSGTYCYLRMPEGLKNAGGSFSRMTAKVLHSQIGRNVLTYVDDIIVKSTKQENHIADLQETFANFRQAGLKLNPEKCVFGVKKGKFFVCLVSTKGIEANPSKIKAILQMEPPNSKKGAQ

SEQ ID NO: 343191 - protein, 95 aa, Zea mays
  unsure (1)..(95): unsure at all Xaa locations
  Clone ID: MRT4577_76157C.1.pep
METSYTGMAGTLIKVCSLGEGRMTMPKTAANPKRRSSXSHCYRPNRDKNLRPLSLQSSIYLTXEFPGDYGCDTDILCFDPKTLVKNHELDAIHSP

SEQ ID NO: 343192 - protein, 83 aa, Zea mays
  Clone ID: MRT4577_76158C.1.pep
GAGERIHLDHDDGCRVRLTLAARPLWYVSNGLDKRATGPVADRSTMGRWTNATARPSSGSRTSLLSATARAWTCIASTEVPYT

SEQ ID NO: 343193 - protein, 374 aa, Zea mays
  Clone ID: MRT4577_76159C.1.pep
MCSEVHVEGDASVGQKGCKDIRRYKCEFCTVVRSKKCLIQAHMVAHHKDELDKSEIYNSDGEKIVHEQEHRCQECGCCFQKPAHLKQHMQSHSHERLFICPLEDCPFSYKRKDHLNRHMLKHEGKLFSCTLDGCDMRFSMKADMQRHVKEIHDSKNPHQFVCKEDGCNKVFRYSSKLKKHEESHVKLDYVEVVCCEPGCMKMFRNVEYLRAHNQSCHQYVQCEICGEKHLKKNIKRHLQSHDKVPSDGRMKCTFDGCEHFFSNKSNLTKHVKACHDQLKPFKCGIVGCGKAFTYKHVRDNHETSGAHVYMEGDFEELDEQLRARPRGGRKRKALTVETLTRKRVTISGEASSLDDGVEYLRWLLSGGDDSIDCQ

SEQ ID NO: 343194 - protein, 91 aa, Zea mays
  Clone ID: MRT4577_7615C.1.pep
GSRAPGLRGFRILGLRSSVGPAVQARGVHQSVATDGPSSTQPALPKARAVARKPSSRGEYVVATLDDLVNWARRSSLWPMTFGLACCAVEM

SEQ ID NO: 343195 - protein, 95 aa, Zea mays
  Clone ID: MRT4577_76160C.1.pep
KGYYLKGKIGHVPVRFLLDSGAQVSVVHPALWEEVTDADLDTLRPFDNVVKVANGAEMKILGVWDTDVALGSLKLEAHFLVANASADEDIIGTDV

SEQ ID NO: 343196 - protein, 149 aa, Zea mays
  unsure (1)..(149): unsure at all Xaa locations
  Clone ID: MRT4577_76161C.1.pep
MSAPGFDDPQLPPLRLRASCGGSGGLIASPRSCSSSDTFVSMRSTPSASGMPNLCGGLRSPPRAPSEASSSEMEFGTAREYDTTDPFFSDYWLYDNHLFHSKPESDGSEGEDXKFVVGPDVTCXRSECGXLAMGDAAVAATYVRPQAEL

SEQ ID NO: 343197 - protein, 111 aa, Zea mays
  unsure (1)..(111): unsure at all Xaa locations
  Clone ID: MRT4577_76162C.1.pep
KAFTYKHVRDNHETSGAHVYMEVXCYLIYVNXVCVFWPIRSNYQLLIFGDFEELDEQLRARPRGGRKRKALTVETLTRKRVTISGEASSLDDGVEYLRWLLSGGDDSIDCQ

SEQ ID NO: 343198 - protein, 135 aa, Zea mays
  unsure (1)..(135): unsure at all Xaa locations
  Clone ID: MRT4577_76163C.1.pep
PGTHVARTHPSLAAGDGTGGPLLGCAQAARARSTPASVHLRQPLLRTSTHRMCSEVHVEGDASVGQKGCKDIRRYKCEFCTVVRSKKCLIQAHMVAHHKDELDKSEIYNSDGEKIVHEQEHRCXSVAVVSRNQLI

SEQ ID NO: 343199 - protein, 93 aa, Zea mays
  Clone ID: MRT4577_76164C.1.pep
ASIMGVQRRAYVLTRPAAPPTVPRAPPLDGASQGRGKRRRRGRFMIVTVAAGTRVTVAVVSAAYSYCRWGWCNRADHGGLPGLLAPCSDASSP

SEQ ID NO: 343200 - protein, 101 aa, Zea mays
  Clone ID: MRT4577_76165C.1.pep
CHQYVQCEICGEKHLKKNIKRHLQSHDKVPSDGRMKCTFDGCEHFFSNKSNLTKHVKACHDQLKPFKCGIVGCGKAFTYKHVRDNHETSGAHVYMEVSCAT

SEQ ID NO: 343201 - protein, 64 aa, Zea mays
  Clone ID: MRT4577_76166C.1.pep
GVFQAGRWKKPASERKLGGRIERDGHSTVGDGKLEPLGGPPFFCLVFKCHFDLFFFFFFFILFL

SEQ ID NO: 343202 - protein, 39 aa, Zea mays
  Clone ID: MRT4577_76167C.1.pep
RGTPADGRADVITHLQAVNYRLGHAYPYTISVVWLSTFY

SEQ ID NO: 343203 - protein, 101 aa, Zea mays
  Clone ID: MRT4577_76168C.1.pep
PGGGYCATWDATNPLSWGIKYGWTAFWGPAGPPGQAGFGQCFLVATTATGGSIPVRVVDQCSNGGLDLDYDPGFKPIDPNGQGFQAGPLPVNYQLVNWGGN

SEQ ID NO: 343204 - protein, 63 aa, Zea mays
  Clone ID: MRT4577_76169C.1.pep
TPRKIGLVKRSPPPVGAIQGYVAVTVSQETEILRKKKNNQTKKKKKKKKKQKKKKKKKKKNPK

SEQ ID NO: 343205 - protein, 247 aa, Zea mays
  Clone ID: MRT4577_7616C.1.pep
MSGGNAWSPLPSHGFESDSGGMGSRAGEPVARTNSGGGSSSKDSGSFECNICLDLAQDPVVTLCGHLFCWPCLYEWLHVHAHSQECPVCKAVVEEGKLVPLYGRGGNSTSPRARSVAGVEIPSRPTGQRPSTAPQPDHSNHYPPQNPWFMGAGAPPVAGGRWGNYTFSAAIGGLFPLLSFQVHGFPQVSAYGPAAGFPYGYGHSFHGWHGHGYGFPRQAPQGQQVDAYLKVLLLVVGVLVIASLIAF

SEQ ID NO: 343206 - protein, 79 aa, Zea mays
  Clone ID: MRT4577_76170C.1.pep
KVQPTHYTLIAVLTAYKNSGLVEEGMGLLKCMKEQYGLEPFIEHVSCVVDMLCRTGRLSDAYHLIQSSHSEHAKNPILW

SEQ ID NO: 343207 - protein, 75 aa, Zea mays
  Clone ID: MRT4577_76171C.1.pep
STRCMLVNRTPGRRTYLSHVLRPRAGQTIRATPIRQPGPYRLATGYLPCEHLHPGAPSPRAHAARPDLQAACLGT

SEQ ID NO: 343208 - protein, 46 aa, Zea mays
  Clone ID: MRT4577_76172C.1.pep
CDETYCGPAAESEKETKALADFIRNKLSSIKADLRIHSYCQMMIYP

SEQ ID NO: 343209 - protein, 143 aa, Zea mays
  unsure (1)..(143): unsure at all Xaa locations
  Clone ID: MRT4577_76173C.1.pep
MRNCSKKSPTTPLSASIFYNPFGLSEISIEAAKHDHLLYSFDDTPRLTSIVTHLXQSSTETLADEMTWSISVCTAFTSSSVCLEINVSFADVSGAXKPNIGERNVLRCXRQLQTSLYDFRNKRQDXLMXQARHTQYLVSSSRL

SEQ ID NO: 343210 - protein, 691 aa, Zea mays
  unsure (1)..(691): unsure at all Xaa locations
  Clone ID: MRT4577_76174C.1.pep
MAALERRGGHHTAAFIRAAKASSPPPPARQRQSQRCSKSGSGLDDDDDDRDARAAPRSPQKASSQTKLQEQKREAETEVQRRRRRSEAHNSLRKEIQQLETRLRDQQVVRGALEKALGPEXSLSPTTTALVHVHSLSRXSPALKLIREVATLELEIKHLEHYLLALYRKAFEQQQAPTTALPPSDDRRDAARKLSVSSRPDDETPRARAPVIRGGGGNGRRNGGTADDCSPSTTCPRRTAVDSDPAGLRSQSALSFRGAWSSSSSTSSRISPTEDSLARALRSCHSQPFSFLEQGETTAPSGGVVSLADYLGTSVADHIPETPSNLSEEMVRCMAGVYCRLADPPLLARHRPSASSASASLSSAASAVSPTQCLGGGDNNTWSPTSSSSYHCGRRDAARLVNPFRVEGVKEFSGPYSAMVEVPAISRDRPRLREAEDLLQTYKLILYRLETVDLRRMTGEEKLAFWINVHNALVMHAYLKYGVPHNQLKTTTSLLVKAECKIAGRAINAAAIQGLVLGCTAHCSSGHWLRALLRYPRTTTKASRRASRAGGEEWRAFAVRQPEPLLRFALCSGSHSDPAVRVYFPKRLAQQLEAAREEYVRATAGVRKDDRRVLLPRLLDAYARDAGLTADRLLDAVQRCLPETLRTAVQRCRRRGDGPGAGKAVIEWVPHRRSFRYLLARDLAFPHLSLS

SEQ ID NO: 343211 - protein, 98 aa, Zea mays
  unsure (1)..(98): unsure at all Xaa locations
  Clone ID: MRT4577_76175C.1.pep
EHFKRVEKELKHKERLGKVGAVXGXGAYAVYEGHRAKTDPANAQMHKIEAGVTSAAALGAYGYAYHEHRGQNEGHYVSKHHEHMVPHGHEHGHGYSYY

SEQ ID NO: 343212 - protein, 35 aa, Zea mays
  unsure (1)..(35): unsure at all Xaa locations
  Clone ID: MRT4577_76176C.1.pep
SVCYEHIISMYLTALTDHRYSAICATSXDYVTELH

SEQ ID NO: 343213 - protein, 93 aa, Zea mays
  unsure (1)..(93): unsure at all Xaa locations
  Clone ID: MRT4577_76177C.1.pep
SSIIPIHSYHYGDQYDGCVSSLYQCEDVDKLRVLPCGHGYHSRCVDSWLTQTRKTCPIGNQPVHRGPGDXYQEGETQGRVEGDQVDPRDHPSS

SEQ ID NO: 343214 - protein, 103 aa, Zea mays
  Clone ID: MRT4577_76178C.1.pep
PLPVSSLLVSRVRARRFGFFLYTIGFGVSALCHFRLSGSGHRAWICCSRALFSTSPCRLIVPRDVRNDAGYVLYYRGGGVRSVFVPSRGASGLIKNNRAAALD

SEQ ID NO: 343215 - protein, 106 aa, Zea mays
  unsure (1)..(106): unsure at all Xaa locations
  Clone ID: MRT4577_76179C.1.pep
GSAGGGSTCMAEYANCQVCKMHAIGWGXGGAICALRAXMLXPLDVLEDLIRXTRSRARWXNIDSKTACTNRTGFCEDNRDDPWDNAQXRFLTGLKRIANTCELFGD

SEQ ID NO: 343216 - protein, 93 aa, Zea mays
  Clone ID: MRT4577_7617C.1.pep
PHYNSPPTGKQTEGLLIWDLTRKKPEHPYHFITAMEEIYKWLTAYGCPKSQFSEQNGTNLMQPTNSKLMVGTLRNLETTERIPGKKNGPFLAL

SEQ ID NO: 343217 - protein, 80 aa, Zea mays
  unsure (1)..(80): unsure at all Xaa locations
  Clone ID: MRT4577_76180C.1.pep
CRYFGAWEISGCLLGRFKVWLANLCVHRRVNSIYCVGVPLLFVSWTVKSDFFTAMYGKLGEQDXGXXXXGGLEELAPFXN

SEQ ID NO: 343218 - protein, 118 aa, Zea mays
  Clone ID: MRT4577_76181C.1.pep
PGAVWGCFYGFLSRVQGGRGGPPGRGDALKNNGGGGGQFEPSRPPPGGGCKGGSRRGSGGPPSPVEGGPGTRKKPLAPGCRRRAREFLVRNRARGKWPGRAGGRPRTFMERGQRADPG

SEQ ID NO: 343219 - protein, 101 aa, Zea mays
  Clone ID: MRT4577_76182C.1.pep
EGGEDTAILLLQTVNITNREQVRNQKITTKNQKPLVNTYLPFGLCTFFSGLGYFSSILNAFFAFLNNLLGHFPVTIVPDVGEKFSTDEACFNRGVFYIFGG

SEQ ID NO: 343220 - protein, 40 aa, Zea mays
  Clone ID: MRT4577_76183C.1.pep
HITKAGLLNSTHLCISVAQNLALSLCIVDTRITYRRTSTT

SEQ ID NO: 343221 - protein, 93 aa, Zea mays
  Clone ID: MRT4577_76184C.1.pep
DTKVYCGHEYTLSNAKFALSVEPGNKALQEYAANAAELRNKNIPTVPTTIGREKECNPFLRTSNPEIKRTLSVPDHFDEDRVLGVVRRAKDNF

SEQ ID NO: 343222 - protein, 283 aa, Zea mays
  unsure (1)..(283): unsure at all Xaa locations
  Clone ID: MRT4577_76185C.1.pep
MRMLSKACSIVASSLPRCSSSAAAPTMRGQPSLLPSVRKQWPGKPLLYGIGTLLVMPLRTLYGVGRVFGAGRFLCNMTNVSSSLQIELVPCLRDNYAYILHDVDTGTVGVVDPSEAMPIINALEKRNQNLTYILNTHHHYDHTGGNLALKWAYGWEVIGSEKDKDRIPGIDITLKEGDTWMFAGHQVLVLETPGHTTGXDGKFLMTHLIFVLAFKVNSCTAHEGFSLTFHVFLLGHVCYYFAGSGAIFTGDTLFNLSCGKLFEGTPQQVFHLLANIFIYMYVV

SEQ ID NO: 343223 - protein, 345 aa, Zea mays
  unsure (1)..(345): unsure at all Xaa locations
  Clone ID: MRT4577_76186C.1.pep
MRMLSKACSIVASSLPRCSSSAAAPTVXSLSPMRGQPSLLPSVRKQWPGKPLLYGIGTLLVMPLRTLYGVGRVFGAGRFLCNMTNVSSSLQIELVPCLRDNYAYILHDVDTGTVGVVDPSEAMPIINALEKRNQNLTYILNTHHHYDHTGGNLELKAKYGAKVIGSEKDKDRIPGIDITLRGGDTXWMFAGHQVLVLEIPGHTTGHVCYYFAGSGAIFTGDTLFNLSCGKLFEGTPQQMYASLQKITALPDDTKVYCGHEYTLSNAKFALSXVEPGNKALQEYAANAAELRNKNIPTVPTTIGREKECNPFLRTSNPEIKRTLSVPDHFDEDRVLGVVRRAKDNF

SEQ ID NO: 343224 - protein, 51 aa, Zea mays
  unsure (1)..(51): unsure at all Xaa locations
  Clone ID: MRT4577_76187C.1.pep
RDCISXIHIVQAGXIQVGNACCELXCLXHGIQAECQPPGDRTIAGGDDAFI

SEQ ID NO: 343225 - protein, 72 aa, Zea mays
  Clone ID: MRT4577_76188C.1.pep
RCLYANMVVRSYSIPFISGVFNARRRAWLKPQVRTCNERMSTTKMTVAPTTLGTSNTTNPCSALASTKHNGT

SEQ ID NO: 343226 - protein, 56 aa, Zea mays
  Clone ID: MRT4577_76189C.1.pep
TFLGPGHSLGPVTSSFSQPHRRSYTSQTHTNYIINTYFKHQIIKIITNIYLSKILL

SEQ ID NO: 343227 - protein, 218 aa, Zea mays
  Clone ID: MRT4577_7618C.1.pep
MSGGNAWSPLPSHGFESDSGGMGSRAGEPVARTNSSGGGGSSKDSGSFECNICLDLAQDPVVTLCGHLFCWPCLYEWLHVHAHSQECPVCKAVVEEGKLVPLYGRGGNSTSPRARSVAGVEIPSRPTGQRPSTAPQPDHSNHYPPQNLWFMGAGAPPVAGGRWGNYTFSAAIGGVFPLLSFQVHGFPQVSAYGAAAGFPYGYVQSFHGWHGHGYGFPR

SEQ ID NO: 343228 - protein, 58 aa, Zea mays
  Clone ID: MRT4577_76190C.1.pep
AAAPDLQPLEILSLSGHLRSGIIIWMPMHYLTRTITYKMIRRHIMLTCLITIPTWLKP

SEQ ID NO: 343229 - protein, 83 aa, Zea mays
  Clone ID: MRT4577_76191C.1.pep
DPRFFSLYFTFFFSRKQWFLLLPPIFMLMFPAGLPPFPITDVGPRPSFRWVGTIFVNASPGPPPCVMGNKYKNKTPGAPPILF

SEQ ID NO: 343230 - protein, 48 aa, Zea mays
  unsure (1)..(48): unsure at all Xaa locations
  Clone ID: MRT4577_76192C.1.pep
PVKYLNLIDMIYENLEFYRLCLSYNGPERHCLXIIGQCIRINAAVSRG

SEQ ID NO: 343231 - protein, 171 aa, Zea mays
  Clone ID: MRT4577_76193C.1.pep
MGRRSTSSTKSGKFMNPTDQARKEARKRELKKNKKQRMMVRAAVLKMKDPKQIIRDMEKLDEMEFNPVQQPQLNEKVLKDKRKKLRETFERILRLYEKENPDIYKELRKLEVEYEQKRAQLSQYFDAVKNAQHVEVESIPLPDMPHAPSNILIQDIPLPGAQPPSILKKTS

SEQ ID NO: 343232 - protein, 55 aa, Zea mays
  Clone ID: MRT4577_76194C.1.pep
VVLKMAGVKNALGKQLRSKNPLNKARAPIKGTQIINQFKDVLEGGGFPMGELWKC

SEQ ID NO: 343233 - protein, 262 aa, Zea mays
  Clone ID: MRT4577_76195C.1.pep
MAMAAVGVGGAVAFLLPQRRQGAVPWSGGRRRAPVAVRASYEAGVGVMATKVGMMTYFDPETGKPVPVTVVGFREGGNVVTQVKTAATDGYDAVQVGYHGVREDKLTRPELGHLGKAGAPPLRHLQEFRLTAVDAFEPGQPLDFADLFKEGDLIDVSGNSIGKGFQGGIKRHNFKRGLMTHGSKSHRQLGSIGAGTTPGRVYKGKKMPGRMGGTKTKIRKLKIVKIDNNLRVLMIKGAVPGKPGNLLRITPAKIVGKNIPKN

SEQ ID NO: 343234 - protein, 64 aa, Zea mays
  unsure (1)..(64): unsure at all Xaa locations
  Clone ID: MRT4577_76196C.1.pep
MKHLAAYLLLTLGGNXSPSAEDVKAVLSSVGIEAEDERLEKLISELSGKDVNELIAAGSEKLAS

SEQ ID NO: 343235 - protein, 82 aa, Zea mays
  Clone ID: MRT4577_76197C.1.pep
DSALCFGCKFQFKPIRVSEPVLSLPVRRGSVTVLSGYAADEITHCIRPQDIKERRAVIILRKTRLDAPRLETKFLSSFVLPP

SEQ ID NO: 343236 - protein, 105 aa, Zea mays
  Clone ID: MRT4577_76198C.1.pep
LQAFKPQVAKKLDKTPGQVLLRWALQRGTSVIPKSTRDGRIKENIQVFGWEIPEEDFRALCGIKDEVSEGCHCPWGLGFSDNFSMTWLSVCPMHVGYEAKSKNEN

SEQ ID NO: 343237 - protein, 63 aa, Zea mays
  Clone ID: MRT4577_76199C.1.pep
PRLYRGESATLMTTASYSYISYKAELLSVLFILFSPTDANDDSTTDEERTPMLSQRYVYHTHA

SEQ ID NO: 343238 - protein, 279 aa, Zea mays
  unsure (1)..(279): unsure at all Xaa locations
  Clone ID: MRT4577_7619C.1.pep
TLGLAGTPRDAWGFTSLVVSVRDRANLQPFPLRPPALSLPQAGVRSTAVAPPSWRPSGDGSRIASPPPRSLLGSKDSGSFECNICLDLAQDPVVTLCGHLFCWPCLYEWLHVHAHSQECPVCKAVVEEGKLVPLYGRGGSSAVPRARSVAGVEIPSRPTGQRPSTAPQPDHNNHYPHQNPWFNGAGAPPVANGRWGSYTFSAAIGGLFPLLSFQVHGFPQATAYGPAAGFPYGYGHSFHGXWHGHGFPRQAPQGQQVDAYLKALLLAVGVLVIASLIAF

SEQ ID NO: 343239 - protein, 132 aa, Zea mays
  unsure (1)..(132): unsure at all Xaa locations
  Clone ID: MRT4577_761C.1.pep
MSSSSSHSRLLIHKXVNDLVNNPLDGYSPRAWRPQNILEWHETLIGPPDTLYDGAYLNVIMNFPPNYPNSPSLLKFTSEMSHPNAYPDGGACISILHPPGEHPNGYXLATQRCIPSHTVXESIXLSIISTAL

SEQ ID NO: 343240 - protein, 302 aa, Zea mays
  Clone ID: MRT4577_76200C.1.pep
MASAQAVGQGERGHFVLKSGHTIPAVGLGTWRAGSDTAHSVRTAIAEAGYRHVDTAAQYGVEKEVGRGLKAAMEGGINRKDLFVTSKLWCTELAPDRVRPALEKTLKDLQLDYLDLYLIHWPFRLKDGAHMPPEAGEVLEFDMEGVWREMEGLVKDGLVKDIGVCNYTVAKLNRLMRSANVPPAVCQMEMHPGWKNDRIFEACKKHGIHVTAYSPLGSSEKNLAHDPLVEKVANKLDKTPGQVLLRWALQRGTSVIPKSTKDGRIKENIQVFGWEIPEEDFRALCGIKDEVSEGRDDMALGV

SEQ ID NO: 343241 - protein, 174 aa, Zea mays
  Clone ID: MRT4577_76201C.1.pep
MFKKEIQPAPKQKLKSSVQRTLRKDLLDTYPLLNNYIDEIMPKKATLSSMKLTDRNTLYVLDSTPIFFQQDLTGILIPHLRLVHRFPQAFPSIRIDRGAIRFVLSGATLMAPGLTSAGGRLPADGAPEGVPEDKMDQKMDDDFRWSRELVKGEPVVVIAEGKDEACAVGTLSAG

SEQ ID NO: 343242 - protein, 90 aa, Zea mays
  Clone ID: MRT4577_76202C.1.pep
GSVVNLADPLAAPVNTPAWAFGSPLRPRQVSEGIYKLVCVYRRPTYSYMYCRRCTSICEAGSMGSEIVPVVYVFACMLWSLWTLSMKYAV

SEQ ID NO: 343243 - protein, 120 aa, Zea mays
  Clone ID: MRT4577_76203C.1.pep
RMEAGFDDVIWTALLLLNKQSYVLNTPPVRLRQSPGFAGGAADPDVVAAPAQRAGERGRADRAGQQPVQQQEPQHGVEEPHAVLKAHQQLLVGADEAHGRTSRRNQRWLRLDDQDMNNMT

SEQ ID NO: 343244 - protein, 141 aa, Zea mays
  unsure (1)..(141): unsure at all Xaa locations
  Clone ID: MRT4577_76204C.1.pep
MLPSSQILVHLLQYISDYVCLRHTHPSMSIALPPLPATHLVPQPPPXVAGPARWPPPVPPXPCPSPCPAPPTAPRTPCPRPPXPPLPXPSPLHPPPAPSAHPDRVPPPPPALPPPPPPPPQPRSPPPLLPPPPTPPPSPPP

SEQ ID NO: 343245 - protein, 54 aa, Zea mays
  Clone ID: MRT4577_76205C.1.pep
GLDFFFHLFTQRSRRHTFNSSCEMDSFTDKQCPPKGMNTPVEQTRTDQEEAGIS

SEQ ID NO: 343246 - protein, 112 aa, Zea mays
  Clone ID: MRT4577_76206C.1.pep
MADVTRNGFGGRNPPGLLQNAAKNKHAFVQLFLMTGVLLVSLRTLGQKHLLHDLAADNADLRRQRDGLSHRMRDLQDALRTEAGADSSGALASHLRRIFTAHPAPAAAAEDQ

SEQ ID NO: 343247 - protein, 250 aa, Zea mays
  Clone ID: MRT4577_76207C.1.pep
VSPRKLEDRHEQKSDSISVKEQDQLEEAQGLLKSAVKTGQSKEARLARVCAGLSSRLQEYKSENAQLEELLVQEREKSTSHEAHIKQLQQELSMSRVEGSRAESNMVDALTAKNAEIESLVKSLDSWKKRAAASEEKLASLEEDMDGLKRNRELTETRVIQALREELATAERRAEEERISHNATKMAAVEREVELEHRAVEASNALARIQRAADQSSSRVLELEHKVAVLEVEYASLQQELQEMEARNRR

SEQ ID NO: 343248 - protein, 50 aa, Zea mays
  Clone ID: MRT4577_76208C.1.pep
FVLVNAMWPRVVLTTIYSVSSGVCVSLGILWYRSSALQQVNTRRTPGALI

SEQ ID NO: 343249 - protein, 470 aa, Zea mays
  unsure (1)..(470): unsure at all Xaa locations
  Clone ID: MRT4577_76209C.1.pep
MCNLSPRTGTHHCELRVCDSLLRSTLPWPEISHHPFYQARSPSHCATSGDPAMASWLKVAEDLLEVVDRRAKIVATELSDEQSTSQPSGPNNQEVQAKKGKPREKGPLKLTNADGGNKISAQKEKRSRQRPRERMKIEKIRPSPPAGSSSVDTSASEPEVTPIDVKEVGNEGTLEKGEKGTDGLKTDGSGIVNTMVEVQLMEKNSDNATLDGVTHTNSEIPVESYFSVMDSKSESSSSNQTSGFGSVINFXEXDSTVAVMHDTNASELPNTEVTGKLQESKKASVSDSSESIEDRRKQKSDTISVKEQDQLEEAQGLLKSAVKTGQSKEARLARVCAGLSSRLQEYKSENAQLEELLVQEREKSTLHEAHIKQLQQELSMSRVEGSRAELNMVDALTAKNAEIESLVKSLDSWKKRAATSEEKLASLEEDIDGLKRNRELTETRVIQALREELATTERRAEEERIPHNAS

SEQ ID NO: 343250 - protein, 398 aa, Zea mays
  Clone ID: MRT4577_7620C.1.pep
MDPSLKEEVMKAVEEARSASVPRCRVVRIIVHDEDATDSSSSEDEDEDEAGERASPHPGSPSASASAGSVKRSRVLLQSAGCGAEEDEEEEEEGEGPGGLAARGRGWRPIPSPADGSRIASPPPRSLLGSPQLRCRPPPHSPRLLAPRRSPVMSGGNAWSPLPSHGFGSESSGMANRAGEPVARTNSDGGGGGSKDSGSFECNICLDLAQDPVVTLCGHLFCWPCLYEWLHVHAHSQECPVCKAVVEEGKLVPLYGRGGSSAVPRARSVAGVEIPSRPTGQRPSTAPQPDHNNHYPHQNPWFNGAGAPPVANGRWGSYTFSAAIGGLFPLLSFQVHGFPQATAYGPAAGFPYGYGHSFHGWHGHGFPRQAPQGQQVDAYLKVLLLAVGVLVIASLIAF

SEQ ID NO: 343251 - protein, 110 aa, Zea mays
  Clone ID: MRT4577_76210C.1.pep
KFGFFSRGAVNGVVPFRNLFRPLPDPVTKNVFTSIDFLCGPVAFSMIFGPPARWSLLKNRGMLVEKEPKVLHRSYLLHCQQAACKNLLVWLVISDRSFLCPRGNKVQILP

SEQ ID NO: 343252 - protein, 64 aa, Zea mays
  Clone ID: MRT4577_76211C.1.pep
VYDKLMLGRPDHLCASNRFLSSTWIMKICLSMLLGSNFSFLRCQECIVSVMKFVNTFTLVHFFI

SEQ ID NO: 343253 - protein, 57 aa, Zea mays
  Clone ID: MRT4577_76212C.1.pep
IYVVRRQSGCTVLTSQIHNHWYDPSVLSVCPPKRPRTRGWRPLYRIRAYGARALSVI

SEQ ID NO: 343254 - protein, 193 aa, Zea mays
  Clone ID: MRT4577_76213C.1.pep
MAHYKDDIKYEEGFTLNSRGSRLFTCKWTPKKQQRKALIFICHGYGGECSISMADTAARLVHAGYAVHGIDQEGHGKSSGSKGYISSFGDIVKDCSDYFKSVCEKPENKTKKRFLYGFSMGGTVALQVHRKDSMYWDGAVLLAPMVKLGDGMRPHPVVVSALKMICAVVPSWRVIPAPDQLDKVCKDPQFKKE

SEQ ID NO: 343255 - protein, 188 aa, Zea mays
  unsure (1)..(188): unsure at all Xaa locations
  Clone ID: MRT4577_76214C.1.pep
MDQEAKDSRPSRSPSEPNLFLQWGSRKRLRCVKTRDDGSPSPSPSQGLRRAIPRSTRPLLGADIATFRSPRRPSTLNRRKSDLLVNEYKHTMALSPEKDKYYTTRGSPFPFEGNGFDFGTITEDKXHIXPRFFIALSNKEKEEDFMAMKGSKLPQRPKKRPKLMQKCLLMVSPXAWLSDLSHERYEVR

SEQ ID NO: 343256 - protein, 87 aa, Zea mays
  Clone ID: MRT4577_76215C.1.pep
NSEFEGRRTRTFTRAVISASDYSTTWTEIGRVLTIPGIPRMMAFAGPYPKMNMDPLVKALAECHPRRELATLKLLLGNRKAFSSWNK

SEQ ID NO: 343257 - protein, 41 aa, Zea mays
  unsure (1)..(41): unsure at all Xaa locations
  Clone ID: MRT4577_76216C.1.pep
XSSRIPTSIVLVRNPALVPDPGRPLPSLLSRSYDDRVHLAG

SEQ ID NO: 343258 - protein, 124 aa, Zea mays
  Clone ID: MRT4577_76217C.1.pep
LCFCIPRIFLYFFLFFTTLIRPWILPGIAERLDLTYWFSKKPVQRDFCGCWGGTFNWGIICGAWEAPFNCKKIQFSGKPSVYLKRNRIWRNPGEFLASCKLSLLKKIPYYRFILHNTRGFTVTR

SEQ ID NO: 343259 - protein, 79 aa, Zea mays
  Clone ID: MRT4577_76218C.1.pep
LGQAYNKVVLKAPFGNLAQGQFLFFIFNGYIFPSLSSPPLTPTPPSVVLFLSLPHSVSLARTKGGSKGCITITIIKRQD

SEQ ID NO: 343260 - protein, 438 aa, Zea mays
  Clone ID: MRT4577_76219C.1.pep
MEPAKGKPRRASSSLLLRITDICKVHSVAVAENVGEKPNGGSTTGGGSSEDGAHLKVYPHQVSDHESCSGTSTARYEEAVVERLLGAVSGLKLAYVKVQQAHVPYDPERVAVAGERFASELEETAGLKDLYFGADKWSNPMHQSRVSSRIHERQRLALELQADICKKDSELVLLRAELEELERRNLELKEEADQRASQMNKEISFGIGKVGSVDTFIELFENSSKCIHDFTKLVVSWMKVSAGWDLDCSKFPADRSLVFEKRAHRKYCVEAYFARAMLAATKEEYFSMDSFYRVMSSKDPFDALVESPNSAFGRFCREKYLVAVPSTMEVSFLGTLDHRAFVEAGGHPRTQFYRGFARMARSVWALLTVARLLKPRAEMFFVKSGVRFQRKHMESVPARLTAEEAKIGVGFTVMPGFKIGCTIVRCRVYLSMLNARGI

SEQ ID NO: 343261 - protein, 147 aa, Zea mays
  Clone ID: MRT4577_7621C.1.pep
GLPAPPVFHSSREAPPPLLHSPPKRGCLPVGWPFSFACTHPIQVFLFSLLLCQIWAYLSKMFFFRRIFLAVPDPFHFCEMRMFFHFPPTITLFLWLGHFPPRLPRLLAQIHDPALLSPLDADQVTVFWGCQPCPCFVGGRSKSPLLF

SEQ ID NO: 343262 - protein, 310 aa, Zea mays
  Clone ID: MRT4577_76220C.1.pep
MEPAKGKPRRASSSLLLRITDICKVHSVAVAENVGEKPNAGSTTGGGSSEDGAHLKVYPHQVSDHESCSGTSTARYEEAVVERLLGAVSGLKLAYVKVQQAHVPYDPERVAVAAGWDLDCSKFPADRSLVFEKRAHRKYCVEAYFARAMLAATKEEYFSMDSFYRVMSSKDPFDALVESPNSAFGRFCREKYLVAVPSTMEVSFLGTLDHRAFVEAGGHPRTQFYQTFARMARSVWALLTVARLLKPRAEMFFVKSGVRFQRKHMESVPARLTAEEAKIGVGFTVMPGFKIGCTIVRCRVYLSMLNARGI

SEQ ID NO: 343263 - protein, 105 aa, Zea mays
  Clone ID: MRT4577_76221C.1.pep
DTHPRKHRSKKFVSPMAPMSGTTKVRSFMAVLGLVLLIVCASSQSCQGWNHSLVAAPKLKVWCYVLFRREECSDKSCHLVCQDKDKFYRHGAYCVDKTWECCCPT

SEQ ID NO: 343264 - protein, 119 aa, Zea mays
  Clone ID: MRT4577_76222C.1.pep
SAVVPAGASSMAPSLLPMASSSSHSPPLHVLFPPSSPFLKFGPRHPSFCVPAARRACAAPAVASSIPFGALWVFDGMVVWSFVLCAAPSATPSNPGENPLFFLYLFLASTCTQRRLSRG

SEQ ID NO: 343265 - protein, 81 aa, Zea mays
  Clone ID: MRT4577_76223C.1.pep
TRGPVFILRGGPPPVFGQSESLFLKFWPPGVLCSRNKGQPCCPHKKLYFLRLAGAEKKKDKGEYEEKIKKNHKKKKKKKKN

SEQ ID NO: 343266 - protein, 43 aa, Zea mays
  Clone ID: MRT4577_76224C.1.pep
MEYHVTNVILVNATAEGSSRTAHKSDLHRIAVIKDVIQPMFAW

SEQ ID NO: 343267 - protein, 430 aa, Zea mays
  Clone ID: MRT4577_76225C.1.pep
MAGYQSSFTRFWMMDEEDDDMHHLVDNDEVELATYNHLVQCESSQRRRRSDAPPKQIRPRNLGDADGHQRIWLDYFADQPVFNDRQFRERFRMRRHVVLRIVDAVQARNPNYFTRKHDCCGKLGLSALQKCVAALRILAYGLPANAIDEYVRIGESTAREALRHFCRAIIDVYGPYYLRAPNAADVARLLAEGEQRGFPGMLGSIDCMHWEWRNCPSAWKGMFTGRGKHPSMILEAVASHDLWIWHAYFGMPGSNNDINVLQRSPVFSSYLRGQSAPVNFQVNGRTYDMGYYLADGIYPTWPAFVKSIRHPMETKTQHFSTLQESACKDIERAFGVLRARFAVVRGPAYGWYPKQISEIMMACIILHNMIVEDEGDHAENTAFSDIGYIAPVNQNNPDRESFVDAHHRDSFVDAHPPAAIFILVFQSKAS

SEQ ID NO: 343268 - protein, 81 aa, Zea mays
  Clone ID: MRT4577_76226C.1.pep
VVIDFCNVSPSHWDKSKRRITSLRPRVNGGKEERKTLEVRLSSEQVVHVLRPPPPPQPVVFGWLSPAAHCILKNIRSLFVL

SEQ ID NO: 343269 - protein, 57 aa, Zea mays
  Clone ID: MRT4577_76227C.1.pep
GHHLSMYISVSNLKRRAHSHECRSGTGTGSVLVTCMNVSNLVIAQSRDKEIARRIHG

SEQ ID NO: 343270 - protein, 113 aa, Zea mays
  unsure (1)..(113): unsure at all Xaa locations
  Clone ID: MRT4577_76228C.1.pep
KIFLKKKKKKKKKFFFLGRAPPWGYFCNFPPPGGGVGLPFRGPISPFGGPFYIPLAGFLQRWTWKNLGFPPFKPLAARPLFPCLXFAXRPRTGPLSQLFAPLIGLWPPPAPGL

SEQ ID NO: 343271 - protein, 125 aa, Zea mays
  unsure (1)..(125): unsure at all Xaa locations
  Clone ID: MRT4577_76229C.1.pep
RLAGWGCPSRWPFFFLCGAPSRAXXXLPPSGGGGQKKKVLAAAXXAAPPXAAAXXVLLXAAXAVXAFLXGWXVXGSRPPXCGCXSXLAPSWPPLPLCSPLACXAAGXXXPSSVXXGGRNGASGWG

SEQ ID NO: 343272 - protein, 67 aa, Zea mays
  Clone ID: MRT4577_7622C.1.pep
LEFLLVLGGGRPLLIEMSGVKDVANAHCGVHVSEEDSVWRCPGSSVPGIGALVLWLVIWTLVYGGQS

SEQ ID NO: 343273 - protein, 746 aa, Zea mays
  unsure (1)..(746): unsure at all Xaa locations
  Clone ID: MRT4577_76230C.1.pep
MSGDHAKKEMGTGEKSITSHGKAPSGESYNKGKGKEKESSSHKSRRSGDKKKKMRKVVYYETDSSSPSTSGFDTPSVTSKRHERKKFNYARWSDMMRYHLTSLHKSIWDVVEFGVQVPSVGDEDYDEDEVAQIVHFNSQATTILLASLSREEYNKVQGLKSAKEIWDMLKTEHEGDEVTKITKRETIEGELNPDDHEVVKEPQDMYNWLKTLVNQVCNLGSKKWDDHEVVKVILRSLVFLIPTQVQLICGNPRYTLMTPEEVIGNFVRFELMIKGSKKINELDGPSMFEAQPVAFKATEEKKEESTSSRTPIDASKLDNKEMALIIKSFRQILKQRKGKDYKPRSKKVCYKCGKPGHFIAKCPLSSASDRDNDKKGKRYHKKRGGDAHVCREWDSDESSSDSSSNEDAANIVVTKGLLFPNVGHKCLMAKDGKRKKVKSKSSTKYETSSDEDNASDEEDNLHILFANLNMQQKEKLNELISAIHEKDELLDTQEDFLIKENKKHVKVKNAYALEIEKCEKLSSELSNCHDTIANLRNENAKLIAKVDSNICDVSIPNLRDENVDLLAKIEELNISLASLRNENEKLIAKAKDFDVCNVTISNLRSENDILHAKVVELKSCKPSTSTVEHTSICTRCRDINIDAIHDHMALIKQQNDHIAKLDAKITEHDLENEKFKFARSMLYSGRRPGIKDGIGFQKGDNVKINAPPKRLSNFVKGKAPMPQDNEGYILYPAGYPXENKIRRIHS

SEQ ID NO: 343274 - protein, 96 aa, Zea mays
  unsure (1)..(96): unsure at all Xaa locations
  Clone ID: MRT4577_76231C.1.pep
PRXTRXEXPXAHGSTTXXXPXQARXPPSPXGGXXEXXKXXKXTPPQASSKQRAXDSDPXQRTAAREAERARDPGEEEERRPSARGSGGGGGGGADL

SEQ ID NO: 343275 - protein, 905 aa, Zea mays
  Clone ID: MRT4577_76232C.1.pep
MSGDHAKKEMGTGEKPITSHGEAPSGESYNKGKGKEKESPSHKSRRSGDKKKKMRKVVYYETDSSSPSTTGSDTPSVTSKRHERKKFSKIPLRYPRIPKHTPLLSVPLGKPPTFDGEDYARWSDMMRYHLTSLHKSIWDVVEFGVHVPSVGDEDYDEDEVAQIVHFNSQATTILLTSLSREEYNKVQGLKSAKEIWDVLKTAHEGDEVTKITKRETIEGELGRFRLRQGEEPQEMYNRLKTLVNQVRNLGNKKWDDHEMVKVILRSLVFLNPTQVQLIRGNPRYTLMSPEEVIGNFVSFELMIKGSKKINELDGPFTAEAQPVAFKATEEKKEESTSSRQPIDASKLDNEKMTLIIKSFRQILKQRRGKDYKSRSKKVCYKCGKPGHFIAKCPISSDSDRGDDKKGRRKEKKRYYKKKGGDAHVCQEWDSDESSTDSSSDEDAANIAVTKGLLFPNVGHKCLMAKDDKRKKVKSRSSTKYETSSDEDNASDEEDNLCTLFANLNMQQKEKLNELISAIHEKDDLLDTQEDFLIKENKKHVKVKNTYALEVEKCEKLSNELSTCHDTIANLRNENDKLIAKVDSNICDDSISNLRDDKANLLAKIEKLNDSLASLRNENEKLIAKAKDFDVCNVTISNLRSENDILHAKVVELKFCKPSTSTVEHTSICTRCRDINIDAIHDHMALIKQQNDHIAKLDAKIAEHDLENEKFKFARSMLYSGRRPGIKDGIDFQKGDNVKLNAPPKRLSNFVKGKAPMPQDNEGYILYPAGYPESKIRRIHSRKSHSGPNHAFVYKGETSSSRQSTRAKLPKRKTPTASNGHNISFKTFDASYVLTNKSGKVYASGGSSWIIDSGCTNHMTGEKKMFSSYKKNQDPQRAITFGDGNQGLVKGLGKIAISPHYTTVDL

SEQ ID NO: 343276 - protein, 869 aa, Zea mays
  unsure (1)..(869): unsure at all Xaa locations
  Clone ID: MRT4577_76233C.1.pep
MSGDHAKKEMGTGEKPITSHGKAPSGESYNKGKGKEKESPSHKSHRSGDKKKKMRKVVYYETDSSSPSTSGSDTPSVTSKRHERKKFSKIPLRYPRIPKHTPLLSIPLGKPPTFDGEDYARWSDMMRYHLTSLHKSIWDVVEFGVQVPSVGDEDYDEDEVAQCVHFNSQATTILLASLSREKYNKVQGLKSAKEIWDVLKTAHEGDEVTKITKRETIEGELGRFRLRQGEEPQDMYNRLKTLVNQVRNLGSKKWDDHEMVKVILRSLVFYGPFFFFFCFSPDEFLINLPNNXSVMGTKKVSPTFQCXMISPTGSHMVLGVHDXCSPQAKSQRHLADKKKSYPDLALFQGLIWHIAPTNLISTGFLSXRWFGSGLMGSPVKGSNXRFTCEWIKPHLLALCXYSAGDLERKSEPPGXRHVPCSRQKSPFPRKESFFSWSFNXNYALVCIFDRDAFRRCVLIHMVILVLGLFLCLFRHXGRGSGLLTMVDLSSAYLLTLDSDTGGSSXSMLKDDGLTNRTYCSWVSQNHNLHVGIACYAFPDFLTNKWYRVMHVLSQRSXLVLSNQRCKIISXCVCLHLISKTDXRTARADDSGSSXKAFNTMDINIISSTNXLDVXRSKTSLTAEGNELTADSXVSSIGHIXIILAIVLHTSMCPGYRDINVDAVHDHLALIKEQKDHIAQLNAKINEHDLENEKFKFARSMLYSGRRPGIKDGIGFQKGDNIKLNAPPKRLSNFVKGKAPMSQDNEGYILYPAGYPESKIRRIHSRKSHSGPNHAFMYKGETSSSRQSTHAKLPKKKTPSASNDHNISFKTFDASYVLTNKSGKVYASGGSSWIIDSGCTNHMTGEKKMFSSYEKNQDPQRAITFGEGYQ

SEQ ID NO: 343277 - protein, 45 aa, Zea mays
  Clone ID: MRT4577_76234C.1.pep
TGGAPPRSFEKTHVPKKKKKKKKKKKKKKKKKKKKKKKKKKKKKQ

SEQ ID NO: 343278 - protein, 62 aa, Zea mays
  unsure (1)..(62): unsure at all Xaa locations
  Clone ID: MRT4577_76235C.1.pep
VRSKYSSSRVFWKKFTLVERHCTVFLSLPNFPTYKRCVPLSVHSIENRLAPKQLELVQKKXI

SEQ ID NO: 343279 - protein, 147 aa, Zea mays
  Clone ID: MRT4577_76236C.1.pep
GPAFFFFFEGEFLIFLQQTLYGRMGNDYYRGPPNLKRPPRTHTNSTQLHAGTKATDKTWPPAQTYSPPSLALLFAFAHSTSIHRRCSITQSSEGLFLSLLITRCSLRSREPLWRPPGRFTVRRKPPNATPQEQGPPRKSRVHPHSFP

SEQ ID NO: 343280 - protein, 134 aa, Zea mays
  unsure (1)..(134): unsure at all Xaa locations
  Clone ID: MRT4577_76237C.1.pep
GLLRLGKCGRNFTSPELVGGCSIVCELHVYGTPVPVHGRYVNKLQPPGYGTFLMEKPKRFSQKEPRSKKLAVLSGVGTPPYSPKLGFXLKGPYMVKCLAKTRFLFFWAHVDPPSVYNVTWGFFQKKKIFYPLFF

SEQ ID NO: 343281 - protein, 49 aa, Zea mays
  Clone ID: MRT4577_76238C.1.pep
IQTGTLKTHNFCLVYPNLVKLILPDSKSCNLCRKNIKPLGAVENLKDLI

SEQ ID NO: 343282 - protein, 82 aa, Zea mays
  Clone ID: MRT4577_76239C.1.pep
MLLATWKTERFDVPARRNAKLELLHCDSHLQMCLIGYVCMLMLILPGFFFPSGHTWIVVAQRGSPVSGIVHKSSWTFVAKFY

SEQ ID NO: 343283 - protein, 228 aa, Zea mays
  unsure (1)..(228): unsure at all Xaa locations
  Clone ID: MRT4577_7623C.1.pep
AKVATVEPFGAIVQFXSGVKALCPLPHMSELEHVVKPPKKFKVGAELLFRVLGCKSKRVTVTYKKSLVKSKLDVLSSYADAKIGLVTHGWITHIEKHGCFVKFYNGVQGFVSRSDLGLEAGTEAENVYHVGQVVKCRIINVIPASRKLNVSFVISHNRIAPIDTPKLGSIVSGDVERLTPAAVDVSVNGFSKGTILNEHLADHHGQAAQLKNVLKPGHEFNQLLVLDT

SEQ ID NO: 343284 - protein, 343 aa, Zea mays
  unsure (1)..(343): unsure at all Xaa locations
  Clone ID: MRT4577_76240C.1.pep
NGHQNRTAERNRLQPSPLPRTSATRHPTARQSPTRTAPLAPRDHRSELEIKWRRRRCVPLPHGRFEPQASLPETSARRGRSSWPRAPXVSGAEARASLVLALASHALSASQRRFAELADEAAKYAFPSGRFEPRTLEEALMSVPDLETVPFRVLKREAEYEIREVESYFVAETTMPGRSGFDFNGSSQSFNVLASYLFGKNTASEQMEMTTPVFTRKGESNGQSMDMTTPVITKKSAGTNKWKMSFVMPAKYGSNLPRPKDPSVIIKEVPSKIVAVAAFSGLVTDDDINQRESKLRESLRKDTTFRVKDDSVVEVAQYNPPFTLPFTRRNEIALEVERNDIAL

SEQ ID NO: 343285 - protein, 73 aa, Zea mays
  unsure (1)..(73): unsure at all Xaa locations
  Clone ID: MRT4577_76241C.1.pep
HASERFGIVTSSAGTGTTEDTEAXRRGKEQSALGLPDEKFLILSVLQCFPVLSFFLVTYMPKCTVMCLRPASQ

SEQ ID NO: 343286 - protein, 445 aa, Zea mays
  Clone ID: MRT4577_76242C.1.pep
MPSFPPPGAVTICEINRDLVAADALSDDRAKDAYGDVLGMVFAPIPFQPEALLLASREPAAPAADQVEPADTVPTAGLAATISDFFRRMVFPPLDPNLLEEFDTQKVSWNPYKHCLAFVSGKNQVTVQDFEDSDAKEPCILTNDHQTDVKAVEWRPNSGKMIAVACKGGICLWSASYPGNVPFMKSGVTSSSFSAFPRGSGGQWILVDVLRGSSAELVSALCWKPDGRYLASASCNSSSFTIWDVSQGLGTPIRRGLSNISLVRWSPSGDYLLVAKFDGTFHFWETNTWTSEPWSSSNGYVSGANWDPEGRVALLSFSNSTTLGSIHFSSKPPSLDAHLLPVELPEISSLIVSRGIEKLAWDASGERLALSFRDGNEMYRGLIAIYDVRRSPLVSLSLVGFIRGPGEGAKPLAFAFHSKFKQGPLLSVCWSSGWCCTYPLILRPR

SEQ ID NO: 343287 - protein, 103 aa, Zea mays
  unsure (1)..(103): unsure at all Xaa locations
  Clone ID: MRT4577_76243C.1.pep
QKKGPAKRKGXRXKKETREGTPHQEGGGPKKEGGKGKTRPRGGPPTXPGQNRQGKSQWQEAAPGGEVLWEGPPPKNGSPGAGAEGPHPGXRAPPKGPSTLGGG

SEQ ID NO: 343288 - protein, 63 aa, Zea mays
  unsure (1)..(63): unsure at all Xaa locations
  Clone ID: MRT4577_76244C.1.pep
CSITFQLHSSKHIFSSLXXNRVCNKKYLFVILYYLNFFNPPPRQFTPPNTVLVQQERVDGRVG

SEQ ID NO: 343289 - protein, 220 aa, Zea mays
  unsure (1)..(220): unsure at all Xaa locations
  Clone ID: MRT4577_76245C.1.pep
MVFLSGFALCAAVTSATALQIPLLSSSNQALLGHPQGTKPLVNSTELQELISGDRLMTRAKKLYEIAKLGEAEYNHPTRVIGSAGHLGTLSYIYETLLELGDYYTISNQSFPAVSGNVFESRLVIGDGVPKSAAPMGLTPATKDKEPVHGDLVLVDNQGCEASDFPDSVAGNIAFIKRGVCPFGTKSEHAGRXGAVAAIVYTXEKDPVSGTLGTPSPNHI

SEQ ID NO: 343290 - protein, 338 aa, Zea mays
  unsure (1)..(338): unsure at all Xaa locations
  Clone ID: MRT4577_76246C.1.pep
REPLSLAPSAEEGELDAPKSPAHGTRRRRRRHHITEASPSSRIFPAVGPVSLQLPETMSGGLDMSLDDLIKQSKSRPKDSPASLSGPARRAPHPDRAAPYPPAAPKXTACALRPPCPGFPPPENPNAAAAGLXARPSQARAAADSPYXVYSKHIAAIAPPPPAKARSLETGTKLHISNLDSGVTVEDVQELFSEVGELKRYSMNYDKEGRSKGTAEVVFARKVDALDAIKRYNGVLLDGKPMNLELIGNNVEPPPLPPLIHNRPLQNYNDIHSSVLQSQRNGQRRAPQVNGRGGRSSQTSGGRGQGRGRGQDRNRTPISASDLDAELDKYHAAAAKEE

SEQ ID NO: 343291 - protein, 136 aa, Zea mays
  unsure (1)..(136): unsure at all Xaa locations
  Clone ID: MRT4577_76247C.1.pep
MVKMAPPPEKDKFGGWGPLPPVGAPPPPYNCSSSMRTPIKGGRXRPPSRPIPCRRARPPSARPPAGGGAPRWPGGGGPRPPSRGCPAPAAPPWAGGPGGRGGPWPARSPRPRGAGPATGGPWPKGVVVGFAVCSQK

SEQ ID NO: 343292 - protein, 97 aa, Zea mays
  Clone ID: MRT4577_76248C.1.pep
DAWALGTTVSHIYKTSLHWHYSKDLDGVPNATLSLGRPSRVCWAGGSQAVKDYEKNQGFEDYMKEHLAELERWYLSRSAVDCHQRGRKQKRNACHLQ

SEQ ID NO: 343293 - protein, 270 aa, Zea mays
  unsure (1)..(270): unsure at all Xaa locations
  Clone ID: MRT4577_76249C.1.pep
TPFARCECGGRGARRTRKSPAHGTRRRRHHITEASPSSRIFPAVGPVSLQLPETMSGGLDMSLDDLIKQSKSRPKDNPASLSGPARRAPHPXARAAPYPPAAPKARAAADSPYGVYSKHIAAIAPPPLAKARSLETGTKLHISNLDSGVTIEDVQELFSEVGELKRYSMNYDKDGRSKGTVEVVFARKVDALDAIKRYNGVLLDGKPMNLELIGNNVEPPPMPPVIHSRPLQNYNDIHSRHNILVTSQYASIPKRWSAKSTPRQRSGWTQ

SEQ ID NO: 343294 - protein, 223 aa, Zea mays
  unsure (1)..(223): unsure at all Xaa locations
  Clone ID: MRT4577_7624C.1.pep
PRVFFFFFLFFFFFFFFFFFFFFFFFFFFFFFWGAKAKAPPFWVGNLTPPKKEKKIAKHREKLTKAPNLQKKCNFSPKPQKISGPPPGRKHKKFPPPPKGMAKQTPRPWGQGQAESPGGAPSPGPRPKGGPLFPPPGGTPIPKGPKGXRPSPKTGRAKLKPGKXSPGPPQTEKTGXPPXSPPGDGPPQXPVWGEPPRGGPQKKAPPHGPHLDQKNPLGRDPGT

SEQ ID NO: 343295 - protein, 50 aa, Zea mays
  Clone ID: MRT4577_76250C.1.pep
TRSGPHPRLQHPIMQTSMVDMPTATADALVHHGCLGIPHHAVIRLNLESC

SEQ ID NO: 343296 - protein, 123 aa, Zea mays
  Clone ID: MRT4577_76251C.1.pep
SRPAGPGLLTVIVHTITLSPFSPTPSYTRHVEPRLPIADEDERAHTTLEAPPGEHIALGPRSERAARPRPQHQRRNWYARLQLQQFVSLSLRRRPRSSPRNHSLTATGCLSTTIRLKSSCPQA

SEQ ID NO: 343297 - protein, 34 aa, Zea mays
  Clone ID: MRT4577_76252C.1.pep
APVPNNSYDGFEACAEFVLPCYKIYGKDDCTAQK

SEQ ID NO: 343298 - protein, 105 aa, Zea mays
  Clone ID: MRT4577_76253C.1.pep
MGKEKLHKQPSGRLIESLKMERMRNILTHRYPYPHEHSRHFIIAVFACWLFFISSDNLQNLIMKLDKNFKWWSMYACLIGFFYFFSSPFIRKTIKPNYSNFNRWD

SEQ ID NO: 343299 - protein, 148 aa, Zea mays
  unsure (1)..(148): unsure at all Xaa locations
  Clone ID: MRT4577_76254C.1.pep
MHIFVRTLTGNTITLKVXSHXNIDNVKADIHYXEDIPPNQQRVIFAGKQLEDERTLADYXNIHNESTLHLVLRLRLRMQSFDVTTLTVKTITLRVXETSDTIVESXSQIHDKEDIXPPDQYRLIFAAKHIDDTRTLVDYDMQXDSTLH

SEQ ID NO: 343300 - protein, 1727 aa, Zea mays
  unsure (1)..(1727): unsure at all Xaa locations
  Clone ID: MRT4577_76255C.1.pep
MVNPDTQIILDEMSRRFAEQDAKWDRRTADQESRWEAVLSSHTAAQDARVRTLEQATGALEEWKMSIEGVVDDLRMEVGKVAKHCERTLVEKPATLAGVLAPSPTPAVRLSAGSPAVSPHGLRLDSSTRENGFGSVTTLLHSPAKGMCSSAALQFVPSVRDGCFPENTGQLSDMGMCGAMRGRLPQLNFPVFDGDNPKLWIRRSQDYFDMYSVDPHMWIKVATMHLTGAAARWFSSRADECRGSTWPVFCQELLERFGKDEHEVFIRRLFRIKQTSTVAEYVERFSNLVDNLVAYGRPLDPLYFVQRFVDGLHDEIRAAVFVQRPTSLDSACVLALLQEEVSSAPKRVDGRRLEFSMSSRIPVPHNTEKLXSGGDWQSDGSSSSSSCXDDKLAALRAYRRARGLCHRCAEKWSRDHQCPSSVQLHVLQEVLDLHIDEEEAAPADTVMEPTVSEQVFVMLSVAAVSGGESVNTMKFHGCIQGVEVLILVDSGSSHSFLSTTVADQLSGITPMTTPVQVQVADGGRLSCSRQLLGAHWTVQQCSFATDFRLLALSSYGMIIGMDWLSQHSPMKIHWLEKWMVIPYRSATVLLYGISAVCPAGSVVEVTTLQSVPPSLLDLQLPEPLSTLLAEFALLFDPPTGLPPSRNCNHAIPLISGASPVKVRPYRYPPAIKDEIERQVSVMLQTCIIQHSDSPYSSSVLLVKKKDQSWRFCVDFRHLNAITVKSNYPVPVIEELLDELVQASWFTSLDLTAGYHQILLQPEDTHKTAFQTHSGHYEFRVMAFGLTGAPATFQRAMNATLAPLLRRCVLVFFDDILIYSTTFEEHVQHIRAVLELLARDQWQLKLSKCSFAKSQLSYLGHLISASGVATDPAKIQAVAAWTSPTSVKELRSFLGLAGYYRRFVKHFGLIAKPLTTLLKKGVLYVWTNAHEEAFQALKQSLVTAPVLALPNFSLTFCLETDASALGVGAVLMQSGHPIAYLSKALGTKSQGLSTYEKEYLAILVAVDHWRHYLQLKEFHIYTDHRSLVQLDEQRLHTPWQQKMFTRLLGLQYKIIYKKGVENSAADALSRHPEVQLSCSALSTCTPQWITDIAASYQQDDMASSIIAKLAIDAKAVPSYSWHNGILRYKNRIWVGQSLALQQRLLSAFHESAVGGHSGIPVTYARLKQLFAWKGMKKSVYEFVCHCRICQQAKADRARLPGLLQPLPVPTTLWEMISMDFIEALPRSQSFTCILVIVDTFTKYANFLPLKHPFTALSVARLFHDQVYKHHGLPKSIISDRDKIFVSQLWRELFRLADVQLRMSSSYHPQSDGQTERVNQSLETFLRCFVHACPHQWSQWLPVAQFWFNSSPHSATGHTPFELMYGCQPRQFGIGDDAVISSADLSSWLQERQLMANLVRQHLERAKLRMKRQADKGRSERVFDVGDLVFLKLQPYVQSSVASRAHQKLAFKFFGPYRVVQRIGSVAYKLLLPDTSKIHPVFHVSQLKRALGAGLVASPTLPTTNYSFSVPETILQRRTVMNGVNPGAQILVKWTHMPEELATWEDVEDLRQQFPRAAVWGQPAFLGGRNVSHISESAEDGEAGEVPSGLRQDSKRPRKQNMRVFGSNWGPFSPTRRGSVGGVVAALSRKRSVDVRRINPKVPKEEAVTISGRLVQILSDHGPLTIGNTWNNTKVPNQPVSQAEWQKPGSDAGVGAATTEDSAGVDEKETHKEHQKQVQRSYVNPSTSE

SEQ ID NO: 343301 - protein, 88 aa, Zea mays
  Clone ID: MRT4577_76256C.1.pep
HITHPTVFWLVHLKKKKGRSNTHQVGEHSLRLGRHKTTMKIIGPYQTNNTHAPFTPNKHISAHDSNKDETKPMSPSRAKKEPHTDALP

SEQ ID NO: 343302 - protein, 110 aa, Zea mays
  Clone ID: MRT4577_76257C.1.pep
ERISGDYGCCRSLAPLFAVEGVSHLHGNAQAGFTFVMKFGGSSLASAERMREVAGLILSFLDEMPVAVLSAMGKTTNNLLLGPSISSSPSLSQGARFFRLLANKARCACA

SEQ ID NO: 343303 - protein, 87 aa, Zea mays
  Clone ID: MRT4577_76258C.1.pep
YPGVTHPEKKQVSQKNLSFQTTPYMKKQPLRGIPPPALGDSPPSFAKSKKIPKGSIIPRQHKSWHSPSGGPLFPYLGKKASLGILGF

SEQ ID NO: 343304 - protein, 120 aa, Zea mays
  Clone ID: MRT4577_76259C.1.pep
KLGIRLVGQARNLTVAEGGLTRRCLALAAQADNPRDAEDPLNRQEDPGGDDNHQELNAESHCQSSRQRHAKYHKDADEHAHRVSRAKANPRRARRHQLLDPQAEQGATKTADHTAAEARR

SEQ ID NO: 343305 - protein, 87 aa, Zea mays
  Clone ID: MRT4577_7625C.1.pep
MGKEKTHINIVVIGHVDSGKSTTTGHLIYKCGGIDKRTIEKFEKEAAEMGKGSFKYAWVLDKLKAERERGITIDISLWRFETSKYYV

SEQ ID NO: 343306 - protein, 51 aa, Zea mays
  unsure (1)..(51): unsure at all Xaa locations
  Clone ID: MRT4577_76260C.1.pep
MVLFLYKVYVSFTHRCVKIAYGLIFMLNKNEKVGSGILGRCMKALLRSLXF

SEQ ID NO: 343307 - protein, 79 aa, Zea mays
  Clone ID: MRT4577_76261C.1.pep
QKSSETSCVRPLQLCLVPGVCRGYSIAGNVKDQNLHSGCRLSHRPIQLRASCFEEQLVGVMVAVQAIIMEYAGIFGIFH

SEQ ID NO: 343308 - protein, 57 aa, Zea mays
  Clone ID: MRT4577_76262C.1.pep
VLDTRGGLLTALGYGLWPSMVLLSEIVQTFILADFCYYYVKSVFGGQLVLRLPSGVV

SEQ ID NO: 343309 - protein, 122 aa, Zea mays
  Clone ID: MRT4577_76263C.1.pep
RNHPSTSHIFVNRISWAFCVYLEAVSVLPQLRLMQNTKIVEPFTAHYVFALGVARFLSCAHWVLQVLDTRGGLLTALGYGLWPSMVLLSEIVQTFILADFCYYYVKSVFGGQLVLRLPSGVV

SEQ ID NO: 343310 - protein, 80 aa, Zea mays
  unsure (1)..(80): unsure at all Xaa locations
  Clone ID: MRT4577_76264C.1.pep
MAAKIFWLLMLLGLSGRAGSGNIFPQWLQASIGFLLSPDLLTTGVLVFGNPILXPYWIPPAIAGWILTLLTLVLPPLLSL

SEQ ID NO: 343311 - protein, 272 aa, Zea mays
  Clone ID: MRT4577_76265C.1.pep
MRGTKRPLGVVTSWVRRQPPKVKAFLAVVTGMAALVFIRFIVHDHDNLFVAAEAAHALGIGVLIYKLTKEKTCAGLSLKSQDLTALFLAVRLYCSFVMEYDIHTILDTATLVATLFVIYMIRFKLRSTYMVDKDNFALYYVVLPCAGLALLVHPSTSHNIVNRISWAFCVYLEAVSVLPQLRLMQNTKIVEPFTAHYVFALGVARFLSCAHWVLQVLDTRGRLLTALGYGLWPSMVLLSEIVQTFILADFCYYYVKSVFGGQLVLRLPSGVV

SEQ ID NO: 343312 - protein, 74 aa, Zea mays
  unsure (1)..(74): unsure at all Xaa locations
  Clone ID: MRT4577_76266C.1.pep
FSTDKDKAAAHLKGGAKKVGISAPSKDAPMFVVGVNEDKFTLDVIICSIACCTTICLAPLAXVIHDNFGIVEGF

SEQ ID NO: 343313 - protein, 90 aa, Zea mays
  unsure (1)..(90): unsure at all Xaa locations
  Clone ID: MRT4577_76267C.1.pep
DAVMGLVVSAAMRSGWTMVLGMEGPPMASXSAGRPEVLTLPWSLFTKSPRWRMRVAFACSVCGQRTTKAINPHAYTDGTMFVQDLAIAYL

SEQ ID NO: 343314 - protein, 68 aa, Zea mays
  unsure (1)..(68): unsure at all Xaa locations
  Clone ID: MRT4577_76268C.1.pep
AGAXTHTSSWRMVGNNTVASLFYYSLLIICAAAWHADAXHADRLATLRLPRTASLFLLCSAPALAPRP

SEQ ID NO: 343315 - protein, 101 aa, Zea mays
  unsure (1)..(101): unsure at all Xaa locations
  Clone ID: MRT4577_76269C.1.pep
DAVMGLVVSAAMRSGWTMVLGMEGPPMASXSAGRPEVLTLPWSLFTKSPRWRMRVAFACSVCGQRTTKAINPHAYTDGTMFVQICNAVVQCNSCPPNFFVQ

SEQ ID NO: 343316 - protein, 52 aa, Zea mays
  Clone ID: MRT4577_7626C.1.pep
DQICIIHCPMQCYGHSVSCSQWWMIPTELIINGSLVEVIDTRLMQLAALCLQ

SEQ ID NO: 343317 - protein, 31 aa, Zea mays
  Clone ID: MRT4577_76270C.1.pep
VLCFRRVVLECTTSNLNNLLGPLKSTRIDFN

SEQ ID NO: 343318 - protein, 62 aa, Zea mays
  Clone ID: MRT4577_76271C.1.pep
SPQQIRPLVHSRSQQRIPSPSAQALSIRNPASRLAYIYKALCRPTTLGSRSVAPFRALSGTE

SEQ ID NO: 343319 - protein, 51 aa, Zea mays
  Clone ID: MRT4577_76272C.1.pep
GWVPRSILKQNPKKVQVRGFLAAQKAHHLGGMWGLQKPTPCPYISAGGVPP

SEQ ID NO: 343320 - protein, 64 aa, Zea mays
  unsure (1)..(64): unsure at all Xaa locations
  Clone ID: MRT4577_76273C.1.pep
GAGVAGXVPAARGLAPARPAALAVRVLAAAGRVAXAGGLAVVGXPLPSPXXLSGGALWGLCWRV

SEQ ID NO: 343321 - protein, 81 aa, Zea mays
  unsure (1)..(81): unsure at all Xaa locations
  Clone ID: MRT4577_76274C.1.pep
VEGKVVGSRGPQAKGRPTKXSEVLNPSDXXAIXXSGSPLRNRHPRRTPHEPRTXETGRGRXXAPTPXXTWRRRRRIPEPST

SEQ ID NO: 343322 - protein, 551 aa, Zea mays
  unsure (1)..(551): unsure at all Xaa locations
  Clone ID: MRT4577_76275C.1.pep
TASAVLCAPRTRLVGSSIQLPPDVDQLPILTTKVKRRVGKYELGRTIGEGTFAKVRFAKNTETGEPVAVKILDKEKVLRHKMAEQVTFPALKYRAMFGLVYSHVFYIVHGPFLSDSVCSSSSVSVFTIFFYYLQAQYGLWHTCSEFSQXFGGTSHFADDDTNYYMVRXIKREISTMKLIKHPNVVRIYEVMGSKTKVYIVLEYVTGGELFDTIANQGRMREGEARSYFQQLINAVDYCHSRGVYHRDLKPENLLLDSYGNLNVSDFGLSALSQQIKDDGLLHTTCGTPNYVAPEVLEDQGYDGAMADLWSCGVILFVLLAGYLPFEDSNLMTLYKKISNAEYTFPPWTSFPAKRLLTRILDPNPMTRITIPEILEDEWFKKGYKRPEFDEKYDTPLDDVDAVFNDSEEHHVTEKKEEEPVALNAFELISRSAGLNLGNLFDSEQEFKRETRFTSKCPPKEIIRKIEEAAKPLGFGVQKKNYKLRLEKVKAGRKGNLNVATEILQVAPSLHMVQVRKAKGDTLEFQKFYKNLSKTLKDVVWKSEDLQMRAAS

SEQ ID NO: 343323 - protein, 65 aa, Zea mays
  Clone ID: MRT4577_76276C.1.pep
TFIHMPMPSPSIVLPPWCLLTRSSKRVTVSLCFTLAGRRYQAASAASCSSMLYSRLEYTEHRSVA

SEQ ID NO: 343324 - protein, 172 aa, Zea mays
  Clone ID: MRT4577_76277C.1.pep
CGAVDLASRLFVRIKEPTMFCRNSMLAGYVKTYGVDHALELFDIMPERDVVSWNMMVSALSQSGRGREALDMVVDMQSKGVRLDSTTYTSSLTACARLSSLRWGKQLHAQVIRNLPHIDPYVASALVELYAKCGCFKEAKGVFNSLHDRNNVAWTVLISGFLQYGCFTESVE

SEQ ID NO: 343325 - protein, 277 aa, Zea mays
  unsure (1)..(277): unsure at all Xaa locations
  Clone ID: MRT4577_76278C.1.pep
XNGEPVAVKILDRXKVLRHKMAEQVMGSKTNVYIVLEYVTGGELFDTIANHGRMREGEARSYFQQLINAVDYCHSRGVYHRDLKPENLLLDSYGNLKVSDFGLSALSQQIKDDGLLHTTCGTPNYVAPEVLEDQGYDGAMADLWSCGVILFVLLAGYLPFEDSNLMTLYKKISNAEYTFPPWTSFPAKRLLTRILDPNPMTXILRPYYSXNSFIPSRFISPLNLLTRLVEQSRRKFVXFRITIPEILEDEWVKKGYKRPEFVEEYDTPXDDVDAVFN

SEQ ID NO: 343326 - protein, 86 aa, Zea mays
  unsure (1)..(86): unsure at all Xaa locations
  Clone ID: MRT4577_76279C.1.pep
LXKLFAAWYERRQMRKIYSPLLEGILAFYLGFEWIQTDNILAPMITHGIYSTVVLGHGLWKIHDHRRRLRQRIQQVRSQESSSDTL

SEQ ID NO: 343327 - protein, 89 aa, Zea mays
  Clone ID: MRT4577_7627C.1.pep
LIIIYVKHLMDIRATCITRYRSSPRVQCCVFLAAPFMYEFSLRCNVIQSSTRRRYDVAEVFHNSTGPIRSQTGSVFACLNCVAQEWQTT

SEQ ID NO: 343328 - protein, 72 aa, Zea mays
  Clone ID: MRT4577_76280C.1.pep
NLTHSCILRNSSFIATPPTNGLVVFLLLPSSKNPDATQLYLLPAHTSIDTLSNIELCRSYTPSTHTTIQPGK

SEQ ID NO: 343329 - protein, 73 aa, Zea mays
  unsure (1)..(73): unsure at all Xaa locations
  Clone ID: MRT4577_76281C.1.pep
MRALLVAGALLALAESATSTHTSGGCGCQPPPSVHIPPPVHMSPXVXLPPSVHLPPPVHLSTPVHLAPTVHVP

SEQ ID NO: 343330 - protein, 41 aa, Zea mays
  unsure (1)..(41): unsure at all Xaa locations
  Clone ID: MRT4577_76282C.1.pep
XNRXVXAFSHLLSTKRFSSSILASLLTLASANASASLAALR

SEQ ID NO: 343331 - protein, 159 aa, Zea mays
  Clone ID: MRT4577_76283C.1.pep
RPWESWAPALGDFLRQGDAEVACSCRKAGRRGAEKNRGQVPWQEEGLDPLLKASHGKGVGQALPCSSVSLAPPAPRGNFFGVSSPILEVAAPWEKLGWGGLPDLGQRRPALKELLRGAAARAWTQRNALRAGSLGEGDAVQGTGAMDTRLEHLQRRRSS

SEQ ID NO: 343332 - protein, 516 aa, Zea mays
  unsure (1)..(516): unsure at all Xaa locations
  Clone ID: MRT4577_76284C.1.pep
MSAAATKVKRRVGKYELGRTIGEGTFAKVRFAKNTETGEPVAVKILDKEKVLRHKMAEQIKREISTMKLIKHPNVVRIYEVMGSKTKVYIVLEYVTGGELFDTIANQGRMREGEARSYFQQLINAVDYCHSRGVYHRDLKXNLLLDSYGNLNVSDFGLSALSQQIKDDGLLHTTCGTPNYVAPEVLEDQGYDGAMADLWSCGVILFVLLAGYLPFEDSNLMTLYKKISNAEYTFPPWTSFPAKRVXCVHIIAEQLXIPSRFIXRTVSNIGXDXRTGTNLTLGSDTNLNGPXIDLYAFLNGAGMHNSNLRFQIQLNLLTRXSNKAEENSCDFRITIPEILEDEWFKKGYKRPEFDEKYDTPLDDVDAVFNDSEEHHVTEKKEEEPVALNAFELISRSAGLNLGNLFDSEQEFKRETRFTSKCPPKEIIRKIEEAAKPLGFGVQKKNYKLRLEKVKAGRKGNLNVATEILQVAPSLHMVQVRKAKGDTLEFQKFYKNLSKTLKDVVWKSEDLQMRAAS

SEQ ID NO: 343333 - protein, 56 aa, Zea mays
  Clone ID: MRT4577_76285C.1.pep
NPAELSSNKGDVSNLLLQCMTDNMSLTSNTNDTKHIPTDRFLPTSIPFRKLYHKKT

SEQ ID NO: 343334 - protein, 56 aa, Zea mays
  Clone ID: MRT4577_76286C.1.pep
MPRGGDDAEGRRRLGEIMSRGRVHVRGAVTRPPCPSKSRGRKMKKVKTAGACVARG

SEQ ID NO: 343335 - protein, 529 aa, Zea mays
  unsure (1)..(529): unsure at all Xaa locations
  Clone ID: MRT4577_76287C.1.pep
MSAAATKVKRRVGKYELGRTIGEGTFAKVRFAKNTETGEPVAVKILDKEKVLRHKMAEQIKREISTMKLIKHPNVVRIYEVMGSKTKVYIVLEYVTGGELFDTIANQGRMREGEARSYFQQLINAVDYCHSRGVYHRDLKPENLLLDSYGNLNVSDFGLSALSQQIKDDGLLHTTCGTPNYVAPEVLEDQGYDGAMADLWSCGVILFVLLAGYLPFEDSNLMTLYKKISNAEYTFPPWTSFPAKRLLTRILDPNPMTXILRPYYSXNSFIPSRFISGVLXNIGSMTXELALIXLGSDTNLNGPTNRSICFFKRRWNAXSNLRFQIQLNLLTRLVEQSRRKFVXFRITIPEILEDEWFKKGYKRPEFDEKYDTPLDDVDAVFNDSEEHHVTEKKEEEPVALNAFELISRSAGLNLGNLFDSEQEFKRETRFTSKCPPKEIIRKIEEAAKPLGFGVQKKNYKLRLEKVKAGRKGNLNVATEILQVAPSLHMVQVRKAKGDTLEFQKFYKNLSKTLKDVVWKSEDLQMRAAS

SEQ ID NO: 343336 - protein, 190 aa, Zea mays
  Clone ID: MRT4577_76288C.1.pep
PSVRPASGCCYLQEGLDTPKPFYRSRRPLHLPGAGNPQVQAPRTPMAASLSMQPSSLTSQPWTSLRCASSSPTVELPSVAVASDSFRWVFILSRWTPLLFLSHRRTSVDPICTVQQRRSIAVASTSPLRHALGVLDVMPQEAAAATPFAVSSSPSRASRRRSAQCFCVVVKTHACVVVALCASFLDRKPN

SEQ ID NO: 343337 - protein, 398 aa, Zea mays
  unsure (1)..(398): unsure at all Xaa locations
  Clone ID: MRT4577_76289C.1.pep
TGEPVAVRILDRXKVLRHKMAEQIKREISTMKLIKHPNVVRIYEVMGXSKTKVYIVLEYVTGGELFDTIANQGRMREGEARSYFQQLINAVDYCHSRGVYHRDLKPENLLLDSYGNLNVSDFGLSALSQQIKDDGLLHTTCGTPNYVAPEVLEDQGYDGAMADLWSCGVILFVLLAGYLPFEDSNLMTLYKKISNAEYTFPPWTSFPAKRLLTRILDPNPMTXILRPYYSXNSFIPSRFISPVPNTVKFADXWSNKAEENSCDFRITIPEILEDEWFKKGYKRPEFDEKYDTPLDDVDAVFNDSEEHHVTEKKEEEPVALNAFELISRSAGLNLGNLFDSEQEFKRETRFTSKCPPKEIIRKIEEAAKPLGFGVQKKNYKLRLEKVKAGSHGSTGCRP

SEQ ID NO: 343338 - protein, 49 aa, Zea mays
  Clone ID: MRT4577_7628C.1.pep
FLHELKFFKNWDKLPLTGPGLFTKKNWKFYPPFRSKKKTWSRNPPVWVF

SEQ ID NO: 343339 - protein, 121 aa, Zea mays
  Clone ID: MRT4577_76290C.1.pep
LGSLSESLMASPHKIVFVLLLLTASSSSMLQARTMAPSDRQHAQTDHQAAAHAKERETLPSPSSQQLTRDDTASSTTPPPAPPASNTEVVVVAAKGGEAMAQSAADGSVPSPGIGHHKMLQ

SEQ ID NO: 343340 - protein, 299 aa, Zea mays
  unsure (1)..(299): unsure at all Xaa locations
  Clone ID: MRT4577_76291C.1.pep
LLSHTAAARAPSPSSSPSSXRMGQKPPWPSSSGAGAQPPQLGTPQAHGTAAPLLSHPGAPSPKRIHGARRIXPPRQVLQPGVHGASALHNVPLPQAPSTQSISLGPGSSSRSPQQLPQRRPPLPQVRQPSPTXSPMVLLPPGWGSTPKGWNPTLSLFPSISSSPGISFCPAEIPPGRWRRQAHAGAWQGLTDALSMAGFEQWVEPLFLPWHLTPVLLCPTTPSLSTGAADIRPSLTPPFPTSRLQRLERTPAAPGIQAAMEGSRTPSPWLEPAPSPCWFLGRPFPGGYSVTLPYLYSSS

SEQ ID NO: 343341 - protein, 74 aa, Zea mays
  Clone ID: MRT4577_76292C.1.pep
RSLSTFSPVCPTGVLPQNGSHRMCSSPLKPGLHPSVGVLRHCASISEWPLGLMAARWRLRVQSPQMFVKGSPNK

SEQ ID NO: 343342 - protein, 45 aa, Zea mays
  Clone ID: MRT4577_76293C.1.pep
WAKGLSKRHAGVCCSMAGPGMAARRLRLAPSASAKLLRTRGRTRG

SEQ ID NO: 343343 - protein, 179 aa, Zea mays
  Clone ID: MRT4577_76294C.1.pep
EDLLLCRCSNLVSMAPVPCTTSPSPRLPARRAFLWVQARAAAPLNNSFNAGLLCPRSGSPPQPSFSHGAATSRMGLDTQSLSTGAGDLCISLAQEIPKCRRPGLPWPLASPCNQAPLLPSHGRASGVHRAPPRSSSPLLLWPATPLGGSSSCHVGHRSFSSATVEPAWTRSALCSSAGP

SEQ ID NO: 343344 - protein, 77 aa, Zea mays
  Clone ID: MRT4577_76295C.1.pep
KGNEHGHVAYGYMYHAEPLHKVIGILYIALSLTIYKSLGALKVRFLMTWRYIASFLVGCATNRDKKLLHLHSEHLFL

SEQ ID NO: 343345 - protein, 271 aa, Zea mays
  unsure (1)..(271): unsure at all Xaa locations
  Clone ID: MRT4577_76296C.1.pep
AGRGEDELDQRPGAAGDRERETSGHPTTHLMAERLEAGAGDDDEYTQDGTVDLHGNPVLRSKRGGWKACGFVVVYEVFERMAYYGISSNLVLYLTTKLHQGVVPSANNVTNWVGTVWMTPIIGAYIADTHLGRYRTFMVASVIYLTGMILVTLSVSLPALRPPKCGAGTADPSCLQQATSAQLAVFFLGLYILAVGTGGTKPNISTIGADQFDDTHPRERGHKLSFFNWWMFSIFFGTLFANTVLVYIQXXNVGWXVGYALPTLXGLAVSI

SEQ ID NO: 343346 - protein, 130 aa, Zea mays
  Clone ID: MRT4577_76297C.1.pep
NYHTHGHHLPTAPPLPLWSVPSPIRRTWPPSREPQMCLSTITTKPPIFSSSTTYVDEHAATGSPALADRNGSDSGPENKPHRTHPDQDLDQSLINESVKPCNNTMVARDALLGSDRRRDHHCAKLGGVCS

SEQ ID NO: 343347 - protein, 78 aa, Zea mays
  Clone ID: MRT4577_76298C.1.pep
LITSPPRFLPRLLKKLINNSIQNQQTIKTKRNFLINIIYSNNHKTYYFSHIYFITFYKTSFLNNYYNLFYHNLPNYSH

SEQ ID NO: 343348 - protein, 84 aa, Zea mays
  Clone ID: MRT4577_76299C.1.pep
SEATILVSGLVRISHRQARIHFERSRLMARHISTGSEHSLTTSHLIAKCWDRTKVRDLAVYDSQAWRLRMALTHQYGLQTRHWA

SEQ ID NO: 343349 - protein, 93 aa, Zea mays
  Clone ID: MRT4577_7629C.1.pep
VSSLNSTNQLLLYPCGHRSKLFPTQRLAILKEIVVLAAVELIFLEVHERGEPRANVAIACLLVGATGSCKMFIKLSFGARLIIPVANSAIEHC

SEQ ID NO: 343350 - protein, 52 aa, Zea mays
  Clone ID: MRT4577_762C.1.pep
RSDKRFSLESSTLHSNAQLRGHSYTLVNHTITFFPRPLPSYTNSFLAYLLNT

SEQ ID NO: 343351 - protein, 134 aa, Zea mays
  Clone ID: MRT4577_76300C.1.pep
IKLVNHRWLKECLKAWEILPVDHYTKSGWEVEIMGAQAKDSEDETEYAGTGSLSSRRIDRRTPIREISTKSHVDSALHAPSGGPTVSASNVVGATGKHLSTPEQFMKAHDASTKSSDIRTDSGTAPDTKCAAMS

SEQ ID NO: 343352 - protein, 150 aa, Zea mays
  Clone ID: MRT4577_76301C.1.pep
KKKKKKEFSIYLVLPFLTISLALLAFNWYPSIVFVGDTYTYFAGMALAVIGILGHFSETLLLFFLPQVLNFLCSVPQLFHFVPCPRHRLPRFDPGAGLLTGTKDGNLVNIFLRLFGKCSERALCIRLLIFQALCCVFCFWLRYMLTGWYK

SEQ ID NO: 343353 - protein, 422 aa, Zea mays
  Clone ID: MRT4577_76302C.1.pep
MAVRRRPAAAAAGDLPPQAPPADAAPTPAPDELVLRPPNLRVAAVAAVLFLAPFSYLSFVRYRLGADLQRSILKCGAMSLIGFCVALKLIPVAASYHLRRRMFGYDINKKGLPTGQIKVPEALGLVVGIIYLVIAIIFQQFHYAPDSIWLVEYNAALASVCFMILLGFVDDVLDVPWRVKLALPTFAALPLLMAYAGGTSIIIPKPLTPYVGLTVLELGLFYKLFMLLLAVFCTNSINIHAGLNGLEVGQTIVISAAVLIHNVMRIASSTDIETQQAHEFSIYLVLPFLTISLALLAFNWYPSIVFVGDTYTYFAGMALAVIGILGHFSETLLLFFLPQVLNFLCSVPQLFHFVPCPRHRLPRFDPETGLLTGTKDGNLVNIFLRLFGKCSEKALCIRLLIFQALCCVFCFWLRYMLTGWYK

SEQ ID NO: 343354 - protein, 86 aa, Zea mays
  Clone ID: MRT4577_76303C.1.pep
NLLTKTSPWGTGAELEFWAASQLARPLWLLGPKALQPFFGQLQNWPLKAQKDKLDFEFGHGATSLKQNVWEKNADWRRNLQPKRET

SEQ ID NO: 343355 - protein, 50 aa, Zea mays
  Clone ID: MRT4577_76304C.1.pep
NPSALIDSISFGKPTYFTAASHSKLCTQYTRFQISMHSVIHQHQALETSL

SEQ ID NO: 343356 - protein, 81 aa, Zea mays
  Clone ID: MRT4577_76305C.1.pep
VLVDGGKEVWEVADVLYECVVGVEGAMETAVVAVDENAMEHGRGDDAGDAMMRGGVVTQEDPLGDSNNEDKSGSTRGRKGR

SEQ ID NO: 343357 - protein, 99 aa, Zea mays
  Clone ID: MRT4577_76306C.1.pep
PWRHQSRVSPIGFCLVHCNTHDTLFGCCVHPQLVQLRCSISSSMKETKCAMKCGQPVDNKTFSSNEVKGMFKFSNGLSRTKCQQCPRRRKWWTVPLFLF

SEQ ID NO: 343358 - protein, 138 aa, Zea mays
  Clone ID: MRT4577_76307C.1.pep
AQISRRRCNVMRLRGHALVSSSSSEGNAQRPTSQNLHGQKATRPRRTRAVKRLQISRAHSFLVLRTKRPNDQCHLIETGVQVQVKTGSADPYLQTNGNNHVDSFYTPWTLKSIGTKQLVHRHNLIKSRVMLSECCCES

SEQ ID NO: 343359 - protein, 272 aa, Zea mays
  unsure (1)..(272): unsure at all Xaa locations
  Clone ID: MRT4577_76308C.1.pep
MYLNPRIVGSGERTLVLSHGYGGSQAIWDKVLPHLSRTNKVLLFDWDFSSTAAAAGEEEEDAEHSCYTFSRFAEELVALMDKMKLSGAVYVGHSMAGMVGCIASITRPDLFTHLVLVGASPRYMNSEDYEGGFDELDIKAMLSRISSDFRGWAXGFVPLAIGGSADDQPSCIPPTPWDFSRSSSRATKCSGYLTAFSSAPLLPKRRRLPRRRRLPPRPRRRVARSYPLVVLPMRWSPRAVSTWRHSAPAALVQHPSRSLDLSALAGSCAGLS

SEQ ID NO: 343360 - protein, 83 aa, Zea mays
  Clone ID: MRT4577_76309C.1.pep
LQSKHTPARSYLRCYHHQMVSAPQHSAGRRMAHACLWQYTHKPRSRKKEKGKHCRTYHHCTRKHGLLGHHHCYELLDFKVALP

SEQ ID NO: 343361 - protein, 504 aa, Zea mays
  Clone ID: MRT4577_7630C.1.pep
MVLTHVHDLDEASAASAVVFASRYVQDPLPRYELGEKSVSKDAAYQIIHDELLLDSSPRLNLASFVTTWMEPECDKLILEGINKNYADMDEYPVTTELQNRCVNIIARLFHAPVGASEKAVGVGTVGSSEAIMLAGLAFKRRWQNRRRAAGQPCDRPNIVTGANVQVCWEKFARYFEVELKEVRLREGCYVMDPDEAVRMVDDNTICVAAILGSTLTGEFEDVRRLNDLLAANNRRTGWDTPIHVDAASGGFIAPFLYPDLEWDFRLPLVKSINVSGHKYGLVYAGVGWVVWRSKEDLPDELIFHINYLGADQPTFTLNFSKGSSQIIAQYYQFLRLGFEGYRNVMENCMESARTLREGLERTGRFTIISKEQGVPLVAFTFKAKDETPLAFKLSAELRRFGWIVPAYTMPANLEHMAVLRVVVREDFGRPLAERFLSHVRMALEELDHAAKGGPVPRMRLTIELGPPARGSGEEASARVVNREAVVPVHRSVSLAGGKTKGVC

SEQ ID NO: 343362 - protein, 156 aa, Zea mays
  unsure (1)..(156): unsure at all Xaa locations
  Clone ID: MRT4577_76310C.1.pep
MSAWRPGPPMPSYLILMDSSSYRLTQLPECDYFFDVLLIGDYGAGXTCLFLRFYGYSLDELSTTLCVDSTGEYADXEXNKSGLPCAYTGGQDMVRTLTRSYYLAAQRIIMLYDVIRQKTVSKLSDIWCKGIELYSILQRXAKMLAGNRGNMESATC

SEQ ID NO: 343363 - protein, 212 aa, Zea mays
  unsure (1)..(212): unsure at all Xaa locations
  Clone ID: MRT4577_76311C.1.pep
LKGGKRDPLLAAAMNHAATHPDRRKPLLLRKYESFSRHHLPTSSPQTTXQRVTFPFTTRSARACIQDGSSMPSPSPIXHKDCSPSDFTLLAATSPYHVLYTCNEDVKVESYWDHFCHEHPQRILDGTDSXIGANSYHMDMTHVRLLREMSLDAYXLLYSCPRILPKGTTQRGISPDXGSSHYAHLNRLXLLSNGXNSYETICHCDGPQALQR

SEQ ID NO: 343364 - protein, 74 aa, Zea mays
  Clone ID: MRT4577_76312C.1.pep
ARPKRQPTRPHSSPRSHFPGIMASVNARAPVAALRPLTASLKFLADFLGHSNRHWRNTSTMKGIVKADAKGEWL

SEQ ID NO: 343365 - protein, 114 aa, Zea mays
  Clone ID: MRT4577_76313C.1.pep
MSTSTFATSCTLLGNVRTTQASQTAVKSPSSLSFFSQVTKVPSLKTSKKLDVSAMAVYKVKLVGPEGEEHEFDAPDDAYILDAAETAGVELPYSCRAGACSTCAVKIESSLWSH

SEQ ID NO: 343366 - protein, 153 aa, Zea mays
  unsure (1)..(153): unsure at all Xaa locations
  Clone ID: MRT4577_76314C.1.pep
LNQVTKVASLKTSKKLDVSIHSDYRVKLDGPEGEEHEFDAPDDAYILDAAETAGVELPYXVKLGRAPGEPAESSPLDDAYIIDPAETAGVELPYSCRAGACSTCAGKIESGSVDQSDGSFLDDGQQEEGYVLTCVSYPKSDCVIHTHKEGDLY

SEQ ID NO: 343367 - protein, 174 aa, Zea mays
  Clone ID: MRT4577_76315C.1.pep
MDGKRLGTSKQGRGKEEKHRDQDPCSPPPPLISARLSGFNMSTSTFATSCTLVGNVRTTQASQTRVRGLSSLSFSAMAVYKVKLVGPEGEEHEFDAPDDAYILDAAETAGVELPYSCRAGACSTCAGKIESGSVDQSDGSFLDDGQQEEGYVLTCVSYPKSDCVIHTHKEGDLY

SEQ ID NO: 343368 - protein, 74 aa, Zea mays
  Clone ID: MRT4577_76316C.1.pep
ARLITRTYYLTNCTTLQLVIDQCNLDRTVLIYYLRTVRVLRNTCLRYFTCFKCGHKTHHRRGDIPGGVTPAPFT

SEQ ID NO: 343369 - protein, 174 aa, Zea mays
  unsure (1)..(174): unsure at all Xaa locations
  Clone ID: MRT4577_76317C.1.pep
MSTSTFATSCTLLGNVRTTQASQTAVKSPSSLSFFXPSLKTSKKLDVSAMAVYKVKLVGPEGEEHEFDAPEDLYILDIAVYKGKELPPEGEEREFXXDDAYILDAAETAGVELPYSCRAGACSTCAGKIESGSVDQSDGSFLDDGQQEEGYVLTCVSYPKSDCVIHTHKEGDLY

SEQ ID NO: 343370 - protein, 100 aa, Zea mays
  unsure (1)..(100): unsure at all Xaa locations
  Clone ID: MRT4577_76318C.1.pep
TYYATSSLLAPTVMMASSATAVAPFQGLKSTASLPIARRSSRSLGNDRNGGRIRCMQVWPAYGNKKVKTLSYLPPLSTDNLLKQXVDYLLHNRXIPCLNM

SEQ ID NO: 343371 - protein, 46 aa, Zea mays
  Clone ID: MRT4577_76319C.1.pep
LLIFTSSLGVKSEFVGLQKPPKVQHEPRIHNILTSIHKNSLCIERK

SEQ ID NO: 343372 - protein, 86 aa, Zea mays
  Clone ID: MRT4577_7631C.1.pep
SIVREACVVQASSGLRLVGLMVAGRCLDRGRCVLACMGVSVGRCRSSSEVRLVCVRRCRVAGVSRRVTALSSQGPLSRIHGVGLTC

SEQ ID NO: 343373 - protein, 152 aa, Zea mays
  Clone ID: MRT4577_76320C.1.pep
MSTSTFATSCTLLGNVRTTQASQTAVKSPSSLSFFSQVTKVPSLKTSKKLDVSAMAVYKVKLVGPEGEEHEFDAPDDAYILDAAETAGVELPYSCRAGACSTCAGKIESGSVDQSDGSFLDDGQQEEGYVLTCVSYPKSDCVIHTHKEGDLY

SEQ ID NO: 343374 - protein, 201 aa, Zea mays
  Clone ID: MRT4577_76321C.1.pep
MSTSTFATSCTLLGNVRTTQASQTAVKSPSSLSFFSQVTKVPSLKTSKKLDVSAMAVYKVKLVGPEGEEHEFDAPDDAYILDAAETAGVELPYSCRAGACSTCAGKIESGSVDQSDGSFLDDGQQEEGYVLTCVSYPKSAWVIHTHGEGDLYYSWGWCVVRAKLMPSCAPTPANANCAGTQTCGCLSSIVLLVYVESVGIY

SEQ ID NO: 343375 - protein, 152 aa, Zea mays
  Clone ID: MRT4577_76322C.1.pep
MSTSTFATSCTLLGNVRTTQASQTAVKSPSSLSFCSQVTKVPSLKTSKKLDVSAMAVYKVKLVGPEGEEHEFDAPDDAYILDAAETAGVELPYSCRAGACSTCAGKIESGSVDQSDGSFLDDGQQEEGYVLTCVSYPKSDCVIHTHKEGDLY

SEQ ID NO: 343376 - protein, 300 aa, Zea mays
  unsure (1)..(300): unsure at all Xaa locations
  Clone ID: MRT4577_76323C.1.pep
MLQTTPTSLTQPRLPVWSCHTRAVLGLAPPVPAKSSLVRLTSRMGPFLMTGSSRITQKPHRVSRLVLLSPAGFHEDSNVVFSMVEKLILFVGPVLAPLIPGLYIPTRFFRMLLNNVEAKWRERGGPRRRGEAPHQDPCSPPPPLISARVSGFNMSTSTFATSCTLWGNVRTTQASQTAVKSPSSLSFFXPSLKTSKKLDVSAMAVYKVKLVGPEGEEHEFDAPDDAYILDAAETAGVELPYSCRAGACSTCAGKIESGSVDQSDGSFLDDGQQEEGYVLTCVSYPKSDCVIHTHKEGDLY

SEQ ID NO: 343377 - protein, 63 aa, Zea mays
  Clone ID: MRT4577_76324C.1.pep
GFLIVEVTHPGRARPYYTLVSHPMQLYAELHMELAWHLRAAYSSSVFNSSSSYPVCIAGTAFS

SEQ ID NO: 343378 - protein, 158 aa, Zea mays
  Clone ID: MRT4577_76325C.1.pep
MLSGFNMSTSTFATSCTLLGNVRTTQASQTAVKSPSSLSFFSQVTKVPSLKTSKKLDVSAMAVYKVKLVGPEGEEHEFDAPDDAYILDAAETAGVELPYSCRAGACSTCAGKIESGSVDQSDGSFLDDGQQEEGYVLTCVSYPKSDCVIHTHKEGDLY

SEQ ID NO: 343379 - protein, 90 aa, Zea mays
  Clone ID: MRT4577_76326C.1.pep
IHDVRDHSKLNTTFRSPFIGEVVGIEKKIVANVSPDNSDVQYQFMLEQRVLRRLCVQKIVVPTPMKDRLDKDTNFTIAEDGSLHVLPKSV

SEQ ID NO: 343380 - protein, 130 aa, Zea mays
  unsure (1)..(130): unsure at all Xaa locations
  Clone ID: MRT4577_76327C.1.pep
MRDPPTSLRNLSRTRNLAVVSIATTALGLMLAATSDTRIRCANTLPAILLFVSDALGHASATSYVCWMVDMRLXHATRTSYDRRAAYNCHNNSPDVVIELYMVNGINICFTCMVIIYYSISTSTECSGVI

SEQ ID NO: 343381 - protein, 72 aa, Zea mays
  unsure (1)..(72): unsure at all Xaa locations
  Clone ID: MRT4577_76328C.1.pep
ATRVRTRATRRPVSVIANEGNPYEPMINNACCTTNCIAPFVKVXIDQTFSIINGTMTSQYSYTSDERLMDAS

SEQ ID NO: 343382 - protein, 278 aa, Zea mays
  unsure (1)..(278): unsure at all Xaa locations
  Clone ID: MRT4577_76329C.1.pep
WQPDLAARRAHGDEAPAPAARPLPPRARALVPRLPPPPLPPPRRSPVRRRGGERRRAPPPPRGHRRRRGPDPGGGGRAAGQRVGVHLPQHRQPPPPPLPPRPLPHQRHLRAAAADSVPSPHSLPRRPQRRRPPRRLPRIPPRLPPRAPPPPPPPRRRRRRGRHGRPPRPPPRPAPRRRAPTCAVVGNSGTLLGSGRGAQIDAHDLVIRLNNARVAGFAADVGATTGVSFVNSNILHHCAVRSGITAPGCACHPYGRAVPLAMYVCQPAHXLDALICNA

SEQ ID NO: 343383 - protein, 134 aa, Zea mays
  Clone ID: MRT4577_7632C.1.pep
GAPLGGDILFFGASPPKKIIRGMVPLEGLLPHKRFFSPFRGGAPFFIMGSCFKMGQHSTPFRGIFFIFKRVFRFWPLFLKKKGVFQKIFANFFKKLSPAIFPFPSGGAPLLKRDLWGPLFYYSTSRKRGVFQKD

SEQ ID NO: 343384 - protein, 33 aa, Zea mays
  Clone ID: MRT4577_76330C.1.pep
RIYLPEEKSNCGNFGRFSIVAIFMHLNARSVNT

SEQ ID NO: 343385 - protein, 41 aa, Zea mays
  Clone ID: MRT4577_76331C.1.pep
AVSSLREKETFRFVYSSTGLLISGFGNEIIALIASGDQLAL

SEQ ID NO: 343386 - protein, 83 aa, Zea mays
  Clone ID: MRT4577_76332C.1.pep
MGACASVHKDSGFPKEQFLDSPTKAEAANGKGGSGGGVASVGDDDFADFKSKVDSEQQRAELNPKSPDSGTRDGWVFVFLVFF

SEQ ID NO: 343387 - protein, 172 aa, Zea mays
  unsure (1)..(172): unsure at all Xaa locations
  Clone ID: MRT4577_76333C.1.pep
KFFYWFRGPKGLTKKREKIFFFSFSGGGPRPTKNLGKQTPPFPPQSPHFQRGKFPPPPRGPGGGPKGFXKLLGGLTPGPQGPGLWGXLGRKGPQKRGPGYPHPGPFQGVQKVWGPPYXANPRKXPPGGEIFSPPAHQGELPPPPPGEAPPGKTGPPXEGRKRKPPPPPPXGG

SEQ ID NO: 343388 - protein, 109 aa, Zea mays
  unsure (1)..(109): unsure at all Xaa locations
  Clone ID: MRT4577_76334C.1.pep
SYLMLHGLSLSAGTATIFPQCSQASIATLLPPYLSLSVSGVCENPIFEPYKIQQAIATSILPLSPLILQHPTALLHQTPLVHLLAHNIEAQQLQQLLLGNPAAXYSQQQ

SEQ ID NO: 343389 - protein, 86 aa, Zea mays
  unsure (1)..(86): unsure at all Xaa locations
  Clone ID: MRT4577_76335C.1.pep
FFLLSVFFVWGAGQKARTTPHWKHTLXGNQPIPTYISYGSRFINHNAPPTTPFTSCNTDPWHYLQKSAGYYSPSTGHIILPITGSP

SEQ ID NO: 343390 - protein, 94 aa, Zea mays
  Clone ID: MRT4577_76336C.1.pep
IQAGYTPVLDCHTAHIACKFETIHDKIDRRTGKSQEENPKFIKNGDAALVTLVPTKALCVEVFQEYPPLGRYAVRDMKQTVAVGVIKKVEKKDK

SEQ ID NO: 343391 - protein, 88 aa, Zea mays
  unsure (1)..(88): unsure at all Xaa locations
  Clone ID: MRT4577_76337C.1.pep
MWSSCGLVQVHRQDDPGKVPGRPRTSGILKGFDPLLNLVLDGTIEYMRDPDDQYKLTEDTRQLGLVVCRGTSVVLICPXDGMEASPTP

SEQ ID NO: 343392 - protein, 140 aa, Zea mays
  unsure (1)..(140): unsure at all Xaa locations
  Clone ID: MRT4577_76338C.1.pep
PLGPAGGLPPLPFAPGPLTSGEAPXGPVAPPKPPGPPPPPGAGGDAPFPPPGLKPPKPPLAPCALKACPPLGPGAQNPGGGTKQKGQKGDAAGGPPXPPPVLPPPPPSAFWDSPPPPFLSXPRGPPGGFCPSGAQPPPLF

SEQ ID NO: 343393 - protein, 61 aa, Zea mays
  Clone ID: MRT4577_76339C.1.pep
RHRDQEGRVAPAVGPGQGPRRRAGAGAAAALVVRSAWCTGWLPDRYARIAPSYIDLRVTSR

SEQ ID NO: 343394 - protein, 85 aa, Zea mays
  Clone ID: MRT4577_7633C.1.pep
CGAAAVPPTQLPVALHLLDAALSFLFSIIKMSRSGNVGSRQSSLGYLFGSSEPPQPAVVTTASAPTVEQPSAGKTCCAQQVAAGV

SEQ ID NO: 343395 - protein, 72 aa, Zea mays
  Clone ID: MRT4577_76340C.1.pep
TALRTAKTATREDTHPMTAFYPAHDGRRICDGGEHQRRIPARTGRAPPDDATPVFNENGEAPGIIPQLRTPT

SEQ ID NO: 343396 - protein, 44 aa, Zea mays
  Clone ID: MRT4577_76341C.1.pep
LFGCHVSYLSIIYPLQRCPVESSCCCKTWPFIPRNGKYTLSFVL

SEQ ID NO: 343397 - protein, 81 aa, Zea mays
  unsure (1)..(81): unsure at all Xaa locations
  Clone ID: MRT4577_76342C.1.pep
AFWVIVHLPPFLKGXLGRHNRSPTLVIVRWIVMGSLFSILWGSLGEFLSKRYGAFLEKCVLYFHLSWGPFSIKFLSRGEYT

SEQ ID NO: 343398 - protein, 76 aa, Zea mays
  Clone ID: MRT4577_76343C.1.pep
PGCFPPILLVCYIDLALTITTRTHHRSLLSNLNTGVNLLCKDNLAVVIDFTGTSAVKLKIVQRHRNRLLRCNVLAH

SEQ ID NO: 343399 - protein, 36 aa, Zea mays
  Clone ID: MRT4577_76344C.1.pep
PPLFFFFFCSTQMCTLLPMIIAYLGTRYFLSSKIIW

SEQ ID NO: 343400 - protein, 92 aa, Zea mays
  unsure (1)..(92): unsure at all Xaa locations
  Clone ID: MRT4577_76345C.1.pep
MRSSINLLIASSLIPDKMLEDKNTITVPDHVHDDSDQRIRSGHLRYMLPRIGHRVIHRLEKEAAAMNKPDLMCTWVLDKLNAXTERGLTIDM

SEQ ID NO: 343401 - protein, 60 aa, Zea mays
  Clone ID: MRT4577_76346C.1.pep
KPPSTPYQTISLMITVTSRSCFITIGFLLPRNNYCSTSNQGMRILCLNLHIYGLTHPIGL

SEQ ID NO: 343402 - protein, 144 aa, Zea mays
  Clone ID: MRT4577_76347C.1.pep
PAPGRYSKGSRRSPGERIQGPPGDYTNKLRVCVDRFSKNVLLPPSQDRLLTPQRVLWWGVLTPVLDSFPGSKQQRGGGGGSSLLNEQASLLDCGSLSLFLKMETYDRGGPAPKKSKKACSDINEQGTCCILITRYKKNCGKFLS

SEQ ID NO: 343403 - protein, 41 aa, Zea mays
  Clone ID: MRT4577_76348C.1.pep
FFLAEQKLTGLTEMPVFPVWQCTSLQSSSSSRRVPGIQTVW

SEQ ID NO: 343404 - protein, 121 aa, Zea mays
  Clone ID: MRT4577_76349C.1.pep
KNTNNMRGEERKKDQHVHDYQINAQVNEDTCLAERSSKLHWCVNSFINSCLPLPLRSACKKSEESYLLHAFCFSISHHHSLLAAAVVVVVLHCSCSTPCMLLSAVSVCLSHLPTIDFSVLR

SEQ ID NO: 343405 - protein, 197 aa, Zea mays
  Clone ID: MRT4577_7634C.1.pep
IGYLEAGRDGVSNDGNSDELALEVFCPVFGASQQPISKQQESISSVTKIGLWGGQGGSAQDITAEQPPRRLHSITVRAGVAVDSIEFTYTDDAGQRRTAGRWGGLGGNVRTIDLGDAEDVREVSGTYGAFEGAITLTSLRLVTSSRTWGPWGVENGTRFSITAPNGSSIAGFYARAGTRLVDAIGVYIRPVVPCRPR

SEQ ID NO: 343406 - protein, 752 aa, Zea mays
  unsure (1)..(752): unsure at all Xaa locations
  Clone ID: MRT4577_76350C.1.pep
HAAVFVNARLHVSGGALGGGRMVEDSSSVAVLDTAAGVWCDTKSVVTTPRTGRYSADAAGGDASVELTRRCRHAAAAVGDLIFVYGGLRGGVLLDDLLVAEDLAAAETTSAANHAAAAAAASSNVQREPGRYAYNDEQSGQTVTVSSPDGAVVLGTPVAPPVNGDMYTDISPENAIIQGQRRLSKGVDYLVEASAAEAEAISATLAAVKARQVNGEMEHSPDREQSPDAAPSAKQNSSLIKPDPALMNNSTPPPGVRLHHRAVVVAAETGGALGGMVRQLSIDQFENEGRRVIYGTPENATAARKLLDRQMSINSVPKKVIASLLKPRGWKPPVRRQFFLDCNEIADLCDNAERIFSSEPSVLQLKAPIKIFGDLHGQFGDLMRLFDEYGAPSTAGDIXSILCFVYFFARSCFLDLTNIVLDSGTQIILDSKSPXCLFSKRNNRKMLSCKFFIYLXNTADIYVAGTPDFVCTFFELKXSYIDYLFLGDYVDRGQHSLETISLLLALKVEYPHNVHLIRGNHEAADINALFGFRIECIERMGERDGIWTWHRVNRLFNWLPLAALIEKKIICMHGGIGRSINHIEQIENLHRPITMEAGSVVLMDLLWSDPTENDSVEGLRPNARGPGLVTFGPDRVMEFCNNNDLQLIVRAHECVMDGFERFAQGHLITLFSATNYCGTANNAGAILVLGRDLVVVPKLIHPLPPAITSPETSPEHHIEDTWMQELNANRPPTPTRGRPQAPNNDRGSVAWI

SEQ ID NO: 343407 - protein, 62 aa, Zea mays
  unsure (1)..(62): unsure at all Xaa locations
  Clone ID: MRT4577_76351C.1.pep
SIIPSRRLLRLAACVSHSLISIPSGRTPSFVXSAAHLTAHGIASRNKVSALLLCLLFLAAVV

SEQ ID NO: 343408 - protein, 511 aa, Zea mays
  Clone ID: MRT4577_76352C.1.pep
GNGDMYTDISPENAIIQGQRKMSKGVDYLVEASAAEAEAISATLAAVKARQVNGEMEHSPDREQSPDAAPSTKQNSSLIKPDVALVNNSTAPPGVRLHHRAVVVAAETGGALGGMVRQLSIDQFENEGRRVIYGTPENATAARKLLDRQMSINSVPKKVIASLLKPRGWKPPVRRQFFLDCNEIADLCDSAERIFSSEPSVLQLKAPIKIFGDLHGQFGDLMRLFDEYGAPSTAGDIAYIDYLFLGDYVDRGQHSLETISLLLALKVEYPHNVHLIRGNHEAADINALFGFRIECIERMGERDGIWTWHRVNRLFNWLPLAALIEKKIICMHGGIGRSINHIEQIENLQRPITMEAGSVVLMDLLWSDPTENDSVEGLRPNARGPGLVTFGPDRVMEFCNNNDLQLIVRAHECVMDGFERFAQGHLITLFSATNYCGTANNAGAILVLGRDLVVVPKLIHPLPPAITSPETSPEHHIEDTWMQELNANRPPTPTRGRPQAPNNDRGSLAWI

SEQ ID NO: 343409 - protein, 94 aa, Zea mays
  Clone ID: MRT4577_76353C.1.pep
IHSGFFLIFLGNSLYQNSLRRAYPMKIREASALRVHLSTQKNPFCQNQNTKGGSLNPSLCRGDGAFQYRLHRPDYRSLFSMHALRVGSTGATLL

SEQ ID NO: 343410 - protein, 131 aa, Zea mays
  Clone ID: MRT4577_76354C.1.pep
TDAWGRRAMTMTIPACPGWSSSPGVPAAAEKTSAGAEGEGNGGLKAVGEAAGGGIPTPTEEANHTRPLETRRPLSTRGGHSTHSEAAQSTRAAEETTTTLSTGGGGYGGATGKASTSGGGLDPDGDPEVGL

SEQ ID NO: 343411 - protein, 43 aa, Zea mays
  Clone ID: MRT4577_76355C.1.pep
PAFLKLPNIHNRPNSNCVNSKHDDQQNSEQSLVRPDSIQQACS

SEQ ID NO: 343412 - protein, 68 aa, Zea mays
  Clone ID: MRT4577_76356C.1.pep
ARLAWSQSESGQRTWPIWTYILIWLLKTLFCTIYCIVYNWSLNMGTRVGKLLDSLTKLFIIFISVFEV

SEQ ID NO: 343413 - protein, 99 aa, Zea mays
  unsure (1)..(99): unsure at all Xaa locations
  Clone ID: MRT4577_76357C.1.pep
MAANASVKLFLRVNLLMFAMPKACGDNXPTPTPSTPSTSSPTQPSLGKSPRHAFNMNVCANEMPLIMAXVNEPFTDPSXPLLNGLLLLLLVASVYTTIW

SEQ ID NO: 343414 - protein, 92 aa, Zea mays
  Clone ID: MRT4577_76358C.1.pep
KINRRPGICTTTSTILEGWLVCFSTNVIGLDWNGFHSQPSKILSHFFPFSSNPYGIGIPDQALSWRVFSLHPLRLQAVASPINLSPEKTRYS

SEQ ID NO: 343415 - protein, 53 aa, Zea mays
  Clone ID: MRT4577_76359C.1.pep
LFFFFFGKKTTGYALLMDSGHKCGKTLMLLLAITTILDQAARFSNEAQKPSAY

SEQ ID NO: 343416 - protein, 52 aa, Zea mays
  unsure (1)..(52): unsure at all Xaa locations
  Clone ID: MRT4577_7635C.1.pep
FVYCDRPARIRDWRAFRVFPFCICQCSRRXILFLLKKSLPRAANIEDPSLRT

SEQ ID NO: 343417 - protein, 54 aa, Zea mays
  unsure (1)..(54): unsure at all Xaa locations
  Clone ID: MRT4577_76360C.1.pep
GTXHIPRGWVVQSKGITFIHGADHGGRERNQGPHHLHTMQLERRIGRTYIYPHF

SEQ ID NO: 343418 - protein, 34 aa, Zea mays
  Clone ID: MRT4577_76361C.1.pep
FQTKLALNSIPTIDTLSSQTTIHKNKPTNLLYYI

SEQ ID NO: 343419 - protein, 95 aa, Zea mays
  Clone ID: MRT4577_76362C.1.pep
AQEPFTDASPPPWISHRRGQGPLCHNLNETISLFDSLSSPGRDVLFELDFGTPGPRIGAHQRGLLRGGRRGAVLRCKGWKVRHVRRSPKGRPRLD

SEQ ID NO: 343420 - protein, 80 aa, Zea mays
  unsure (1)..(80): unsure at all Xaa locations
  Clone ID: MRT4577_76363C.1.pep
SHMILPNRFACALERGAGCLIIFXAPQTQEIFPGPLGTISSVSKVVVSLCVRSAELLACKQLVIPVCSDFTSSLSKSFVL

SEQ ID NO: 343421 - protein, 68 aa, Zea mays
  Clone ID: MRT4577_76364C.1.pep
HATRAKYVFYSLDRAWIMLAKAVVAAEEVEMLPVLADPVFRLPKDGHSSVNNCVCGLEELIEMFVIDE

SEQ ID NO: 343422 - protein, 56 aa, Zea mays
  Clone ID: MRT4577_76365C.1.pep
ENACSELGARMSAMDSSSRGAGDMLDRLTLTYNRTRQASITTELTEIISGASALEG

SEQ ID NO: 343423 - protein, 185 aa, Zea mays
  unsure (1)..(185): unsure at all Xaa locations
  Clone ID: MRT4577_76366C.1.pep
RTRGRTRGRTRGRTRGRTRGRTRGIEMTATELQKNPINYTQVAVLADDILKNVEYDALRVIFNKFQSVISFKPTMVTILSPEVAEKESEAGGKMGDLDSYEIEGGETKSEILQNLAEFQFSCVLYNGALXNACSELGARMSAMDSSSRNAGDMLDRLTLTYNRTRQASITTELTEIISGASALEG

SEQ ID NO: 343424 - protein, 62 aa, Zea mays
  unsure (1)..(62): unsure at all Xaa locations
  Clone ID: MRT4577_76367C.1.pep
MALLPRTERLALRSTPRSDWAIHDATAXTPTPPSQTPYSGTPPPAMMNTAEFAGSKDGYLMK

SEQ ID NO: 343425 - protein, 61 aa, Zea mays
  Clone ID: MRT4577_76368C.1.pep
PGFKNAPFKGTGPPQVKPRGGALFKFSNGPPGGKMEGGGKLPGGKKGVPTPGGGFKNAPGS

SEQ ID NO: 343426 - protein, 164 aa, Zea mays
  Clone ID: MRT4577_76369C.1.pep
GTSVLRSPPQGVAALWTAASRSCALIPSGTGPSPPWHAPGQGRADHSCLLWSLVPRPAALEYGAQHIGISCGSLAYSSVIPSQAWSSAGELGHARPSALACAMGTGPGSYGRSTVLTHCARVQPKLSESARRAQLHGRIPAARQPGAQLQLGEGGVGTCTPCLC

SEQ ID NO: 343427 - protein, 140 aa, Zea mays
  unsure (1)..(140): unsure at all Xaa locations
  Clone ID: MRT4577_7636C.1.pep
QRGKPRKARGGAFAEARGQAQGGARGGAQGGAVGNKKPTRDDGCHNCGKLGHWARECXQPRRGQGNVAXRRRRSRXALLLAHASIKIPSASPAAAALLHLDESKAHAFLGDGYNNDMIEGWCCLSLVLKCCESRIRQHNC

SEQ ID NO: 343428 - protein, 106 aa, Zea mays
  Clone ID: MRT4577_76370C.1.pep
YQISSIILQISIAPRRTSEPPLRPSRLQPRTARVHNVAGTGESEGELEMDKDNRLRARAGEKASKSRSHGSTALFVAVDYAFLLAFAGFLAYLVGSRILPSAVSFV

SEQ ID NO: 343429 - protein, 82 aa, Zea mays
  Clone ID: MRT4577_76371C.1.pep
VGVREGTTLGRMTPSIGTTRVNIGVLTDQSTQGLLPACHGLAAVCGWLISHQDQIQTQIESRRGLSKRHVYPIKFAKQNRCW

SEQ ID NO: 343430 - protein, 208 aa, Zea mays
  Clone ID: MRT4577_76372C.1.pep
MEEMSGDSVVSSAVPAAATRTTSFKGASPSSKYVKLNVGGALYYTTMQTLTKQDTMLKAMFSGRMEVLTDSEGWILIDRCGKHFGTILNYLRDGGVPLPESRREIEELLAEAKYYLVQGLLEECQAALQNKDTYEPFCKVPVITSSKEEQRLIATSNKPAVKLLYNRSNNKYSYTSNSDDNMLKNIELFDKLSLRFNGRVLFIKDVIG

SEQ ID NO: 343431 - protein, 22 aa, Zea mays
  Clone ID: MRT4577_76373C.1.pep
TVFVMRHMLILRKCDIYDLSKF

SEQ ID NO: 343432 - protein, 102 aa, Zea mays
  Clone ID: MRT4577_76374C.1.pep
TSSRPGPISKTELGSPLFPYRASGRRAKSASLTHCLVPGSRSPWVSLSNRNDERKRSRRGMISTAGRAARVYTHLGINVGDDKEIHFTRGTGQEVETGNGGD

SEQ ID NO: 343433 - protein, 36 aa, Zea mays
  Clone ID: MRT4577_76375C.1.pep
VGYLAHRMYVELCFELLILDSQSIKSDYLIQKLKPT

SEQ ID NO: 343434 - protein, 100 aa, Zea mays
  Clone ID: MRT4577_76376C.1.pep
LGPPRHVYGNGIITPPGPAIKKKPAGDNLPPTKPGRPAGRLQSKNGGPRGSQRPNREEGPKPSPPDAIFAPASGQAKIFFSSWDSRISPNPPLWLGGENG

SEQ ID NO: 343435 - protein, 80 aa, Zea mays
  Clone ID: MRT4577_76377C.1.pep
QLSTGPHNPHMQHDQLRCRPWTMGSHFRASQRFSGDPIEKERASCSHGDISMLRGWRRENSVYQNSSLVFNFTATTTDGL

SEQ ID NO: 343436 - protein, 112 aa, Zea mays
  Clone ID: MRT4577_76378C.1.pep
PIGDWDSQGRPGKSPYHHQNRGTRLALSPHPGRITSAVGGIPDHQSQAHDFGSEAFAGARLGLLGTSSGAGGGVGPLDCSSATRDPAGARFSALRHEPRVRHHNPSSAVTRI

SEQ ID NO: 343437 - protein, 68 aa, Zea mays
  Clone ID: MRT4577_76379C.1.pep
VTRFSGVLLQMSDQRREICTPPTIQKCLRCHGLTLSDNALRPTERSTSHDHTKSRDSKVPTTTIGYLL

SEQ ID NO: 343438 - protein, 325 aa, Zea mays
  Clone ID: MRT4577_7637C.1.pep
MENPAPSIVVAIAAPVAAEFVKLTFRALYMRRAGPGSREMTVPGRPSDQLGRRVVTDSPVYDGRGADARLVARIQGVTVLVGNADALFTMVFETDRLKGSTLVINGMVTDGSDEWAIYGGTGVFAMATGVMKRRNLAGGSNDGNSDELALEVFCPVFGASQQPISKQQESISSVTKIGLWGGQGGSAQDITAEQPPRRLHSITVRAGVAVDSIEFTYTDDAGQRRTAGRWGGLGGNVRTIDLGDAEDVREVSGTYGAFEGAITLTSLRLVTSSRTWGPWGVENGTRFSITAPNGSSIAGFYARAGTRLVDAIGVYIRPVVPGRPR

SEQ ID NO: 343439 - protein, 75 aa, Zea mays
  Clone ID: MRT4577_76380C.1.pep
IFYSITLLVWTGLVRLGSGVKRRGGVLSLIYGTSKTMPKAAAPYPCLEVFIHFIFSKLPYKAGSELSLIGLLPFV

SEQ ID NO: 343440 - protein, 82 aa, Zea mays
  unsure (1)..(82): unsure at all Xaa locations
  Clone ID: MRT4577_76381C.1.pep
RIQRGFTRWSTSSETSCEAVRETCVALFERLKPIKENLLAEAGTAEXCSFIAHARIASVNLFEHAYWTPEPSFIRSLNYGPC

SEQ ID NO: 343441 - protein, 85 aa, Zea mays
  Clone ID: MRT4577_76382C.1.pep
NFAYIKYAYNNYGMEGVCENGWSTLLISDLLLFFSKGNIICQGQLWVVILCAYVLLVSYPHRYMLLAWLLQYYFLTILASPTETK

SEQ ID NO: 343442 - protein, 61 aa, Zea mays
  Clone ID: MRT4577_76383C.1.pep
RCDYVSLQKQFLWFQVMDNYSKDRPSVMKTTRLLLDEDGWMGFYRGFGPRFLNMFVSRLTK

SEQ ID NO: 343443 - protein, 73 aa, Zea mays
  Clone ID: MRT4577_76384C.1.pep
NRGEERGCLCLKHKWLVHRNSSCQVKLLKMSMEMRNRPLKLSGADWCHTLNDHAPMPVAAKLPRPCEPPGSSN

SEQ ID NO: 343444 - protein, 235 aa, Zea mays
  Clone ID: MRT4577_76385C.1.pep
MDTTFITIHDLSDDAHILYSSDSIVDILGHTPDEVVNKSVWHFFHPEEIPLAKAQHRRGVRLDKAAVLSYCRLKNRQGEWVGCECCFSVVYDVLVCCTSVYRQGIQSQKRAVEAPMVRKLFASSPKDPRYHMLSHLSTKFDLGDEDQTHEPRAALFLNRFTRTLTVMYATSGIEQIIGISSQAMKGRSFYYCIAPNCLEDAVRCLESAKGNDSIAYMRFFFRDPRQDDPPDVTSS

SEQ ID NO: 343445 - protein, 73 aa, Zea mays
  Clone ID: MRT4577_76386C.1.pep
MVFFCFLVDQRRTVRSSKPAAGICSRCGGCASVADMETATRVCYLLTVHRSTWRAIICTFCGAMLKSYRHYRL

SEQ ID NO: 343446 - protein, 125 aa, Zea mays
  Clone ID: MRT4577_76387C.1.pep
MGTHPGGADPCRTPPQRSVIGPRLRVRFIGSGTFSPSSSAASSIAVPITALRSVASSLPHLAAPIQQEQEASTAPSASLLRSSKSRKYSSIRAQGGRQMEFVLIISLPLLILIIIVAVVLCIICR

SEQ ID NO: 343447 - protein, 61 aa, Zea mays
  unsure (1)..(61): unsure at all Xaa locations
  Clone ID: MRT4577_76388C.1.pep
MAPDLSELAAAAAARGAYLAGVGVAVLLAXACLLPVAQSSRVQDNSLVRDITHMPYSSYGI

SEQ ID NO: 343448 - protein, 169 aa, Zea mays
  Clone ID: MRT4577_76389C.1.pep
PAGPPPPHLPQPHTTPPVGHRPSPSRSLYRLWHLLAQLFRQLHRSPHYCTALCRLLSSPPRCSDPARAPSARREVVRWSSCSSSRCRCSYSSSSSPSSSASSAARLAERPQRRRRRFSPVRLCSLHSASCDPTIPCVSADLTLYVQHDLINPPLSLSLSLSLSCLHCRT

SEQ ID NO: 343449 - protein, 325 aa, Zea mays
  Clone ID: MRT4577_7638C.1.pep
MENPAPSIVVAIAAPVAAEFVKLTFRALYMRRAGPGSREMTVPGRPSDQLGRRVVTDSPVYDGRGADARLVARIQGVTVLVGNADALFTMVFETDRLKGSTLVINGMVTDGSDEWAIYGGTGVFAMATGVMKRRNLAAGSNDGNSDELALEVFCPVFGASQQPISKQQDSISSVTKIGLWGGQGGSAQDITAEQPPRRLHSITVRAGVAVDSIEFTYTDDAGQRRTAGRWGGLGGNVRTIDLGDAEDVREVSGTYGAFEGAITLTSLRLVTSSRTWGPWGIENGTRFSITAPNGSSIAGFYARAGTRLVDAIGVYIRPVVPGRPR

SEQ ID NO: 343450 - protein, 77 aa, Zea mays
  Clone ID: MRT4577_76390C.1.pep
KKKISLPPPPYLVSPRKKLLSASQVTVENSGCCCSSACTGGCSSAGRARRGGRRRHERSHRTTGESESEVVAGDYGE

SEQ ID NO: 343451 - protein, 88 aa, Zea mays
  unsure (1)..(88): unsure at all Xaa locations
  Clone ID: MRT4577_76391C.1.pep
CRVGAASPLRPRHYIGRQYETNTTSARLREAGAETFHLTGMDQPQDPPSLVTNAPAQSGECITMVPRELAXGRMRQMVIGRVETEAER

SEQ ID NO: 343452 - protein, 118 aa, Zea mays
  Clone ID: MRT4577_76392C.1.pep
MKYVSGPYFEPDFDPLLDRFGTPGVVVDNETREDCTLVKVDSVNRDGVLLEMVQLLTDLDLVISKSYISSDGGWLMDVFHVTDQIGRKLTDPSLPEFIQRALVPTHRPGNGPSPRFTT

SEQ ID NO: 343453 - protein, 128 aa, Zea mays
  unsure (1)..(128): unsure at all Xaa locations
  Clone ID: MRT4577_76393C.1.pep
MGLTRVGLAGLAGMGQNLALNIAEKGGGEAGYNXLSSKGDETVXRAKXKGDLPVCGVHDPACFVSSIQKPRVRIMRVKAWAXXGQTIATRAAHLDRGDCVGXGXNEWDENTXRREKAMEERGLLYLGM

SEQ ID NO: 343454 - protein, 212 aa, Zea mays
  Clone ID: MRT4577_76394C.1.pep
RVEVRVEVRPGDVLRRAPRALPCRWLPPWTELLDSADLIYLCLGGNEEGAPYSHAKGRVAERAALKRRTERNKQRERETETGGKERRQHDERAPCSHATPRVAGAAAWQRNDSILAGDAGYHQRTLLPWGNGGDETNGARGYIGQTVDEREWRRDRRRAGDRLPCVLPQERGACQAPKPRPGRPRARSRVVVERARSRAPNLRFAPRASVRG

SEQ ID NO: 343455 - protein, 730 aa, Zea mays
  unsure (1)..(730): unsure at all Xaa locations
  Clone ID: MRT4577_76395C.1.pep
TITAKHRGKRGTGAVEQLQFVGXKRGCKEASAXRHVVNQLFCHFDIPCPPPRMTAYXEGRGRVRMSGLKSHVFSDFSSLGTGKETEASMLLQQLSDACLVVDALEPSVREELVKNFCSKELTSYRQIFEGAELAKLDKTERRYAWIKRRLSSNEDTWKIFPPSWHVDYLLCIQFCKITRAQLVDILNNLKEKPDVATLLLAFQRTIEFEEELAEKFSGGTTNARNKETTSDDEDEGGGHNKIVSDLLKKFEKKLAAPSDEDKDKQKDLSVPGAGFNFHGIISSCFEPYMTVYIELEEKSLVDQLEKLVQEERWEIEEGSQTNILSSSMQVFLVIRKSLKRCSALTKNQTLFNLFQVFQRILKAYAAKLYARLPKGGTGIVAAATGTDGQIRTSDRDERMICYIVNTAEYCHQTSGELAENVAKMINPQFADKVDMSEVQDEFSAVITKALMTLVHGLETKFDAEMVAMTRVPWATLESVGDQSEYVNGISSILSSSIPVLGTLLSPTYFQYFLDKLAASLGPRFYLNIYKCKHISETGAQQMLLDTQAVKTILLDIPALGKQSTGAASYSKFVSREMGKAEALLKVILSPVDSVANTYRALLPEGTPLEFQRILDLKGLKKADQQAILEDFNKHAPAPAPAIKHPAVAPTVATPVATASVQIVPSVATPAVSITPSMASLKGALANQEDVLARAAALGRGAATTGFKRFLALTEAAKDRKDGPFRKLFNA

SEQ ID NO: 343456 - protein, 165 aa, Zea mays
  unsure (1)..(165): unsure at all Xaa locations
  Clone ID: MRT4577_76396C.1.pep
ASYSKFVXSREMGKAEALLKVILSPVDSVANTYRALLPEGTPLEFQRILDLKGLKKADQQAILEDFNKHAPAPVPAIKHPAVAPTVATPVATASVQIVPSVATPAVSITPSMASLKGALANQEDVLARAAALGRGAATTGFKRFLALTEAAKDRKDGPFRKLFNA

SEQ ID NO: 343457 - protein, 128 aa, Zea mays
  Clone ID: MRT4577_76397C.1.pep
IRHEVKAYAAKLYARLPKGGTGIVAAATGTDGQIRTSDRDERMICYIVNTAEYCHQTSGELAENVAKMINPQFADKVDMSEVQDEFSAVITKALMTLVHGLETKFDAEMVAMTRVPWATLESVGDQSE

SEQ ID NO: 343458 - protein, 242 aa, Zea mays
  Clone ID: MRT4577_76398C.1.pep
MAVQAHYHHHYHRESPFLVSGAPEGSRLAAAMELHHQAQKEAMAPQQAQAPPLFLDFSHGDYGGGRKRQREAEPMSSQFFSLQQQPQAQGPKVINLAQLQKRTAMGLRLDFDEGSEHVSCTSPASASASCLLSKELAAQRDQHRNEMDRLIQEHADRLRRALADTRRRHYRSLVGAAEAAAAQRVREKEAEASEAARRRADLEDRVARLRAEAAAWQAKDAADDAGSCFVDPDRVVEVAPPR

SEQ ID NO: 343459 - protein, 64 aa, Zea mays
  Clone ID: MRT4577_76399C.1.pep
MPDVKSAAATVAKTVAGDSPSPAATPPAPAVASSNGTPQKPPPIPAATFDMPKPNLRGLNSPSA

SEQ ID NO: 343460 - protein, 91 aa, Zea mays
  Clone ID: MRT4577_7639C.1.pep
MAAAAPTRAEVLSLFRSLLRTAKQFSDYNIREYTRRRAADAFRENSALSDAPSAAALFAVGKQQLEVAKRQAVIYSIYAPKAKSVMELKVQ

SEQ ID NO: 343461 - protein, 38 aa, Zea mays
  Clone ID: MRT4577_763C.1.pep
FSKKRFYFLRANRTIPLWRSRGTKPRQHKKTQNLPKGV

SEQ ID NO: 343462 - protein, 172 aa, Zea mays
  unsure (1)..(172): unsure at all Xaa locations
  Clone ID: MRT4577_76400C.1.pep
RNARCDTTSSVGMPASNSXDDPGTGRFASFTSQXIIMNHAAQXGSGXAPCLDCXHTSHIDEQYAELGTKIDRPSDPELDNEPKXMNNGDAGMAKTGPTKPMXVETFYENPTLGRFGVXDMRQTGADGAINSVXKKDPTVARVTKAAAKKKRAICLEVCLLGGYQLEAENISI

SEQ ID NO: 343463 - protein, 145 aa, Zea mays
  Clone ID: MRT4577_76401C.1.pep
NLGRVSLWPILPGVKGQVEFRGYGEKGGASWGGPTPPFLWKANFFRGNRPPIGKIYQTGAGPARGGFETHREKGGPQPAAPQGGSSLKRGLQAFDRNPFFLIGQKGGRAPFCIMGFMVAGEGGPNIFPPPLENPRGSNLFNIFQT

SEQ ID NO: 343464 - protein, 68 aa, Zea mays
  unsure (1)..(68): unsure at all Xaa locations
  Clone ID: MRT4577_76402C.1.pep
STLWLCVEPRXXRGLCAPLCGVLAXPXGTWASVSCSCREKVLGRFMLGSSAVSTLGPGGSGSLCVRFI

SEQ ID NO: 343465 - protein, 87 aa, Zea mays
  Clone ID: MRT4577_76403C.1.pep
SFPERGKRGGEAAGIGRFSGRSVCDSFLDEGFLYRLRPRNRSGFSHASGTLERPRSATLPRLLGRGVWGPYNPVADGYHDLWVKMCN

SEQ ID NO: 343466 - protein, 81 aa, Zea mays
  Clone ID: MRT4577_76404C.1.pep
MTPAGGANHSPTPRSLVFAFYLTGHGFGHATRAIEVVRHLIAAGHEVHVATAVPEFVFTAEVRSPRLRIRRVILDCGAVQA

SEQ ID NO: 343467 - protein, 119 aa, Zea mays
  unsure (1)..(119): unsure at all Xaa locations
  Clone ID: MRT4577_76405C.1.pep
STAIRLLCSFLSPLCLCRAFRALRPLPPATAQRKGRRLSTQRSPSTPPPRIGTPALRNPPXGDGFTVIFNKARDEKKGGNGQDTESPSKDTRTERVESYAAKPSTKKWFCCVTASPTQS

SEQ ID NO: 343468 - protein, 80 aa, Zea mays
  Clone ID: MRT4577_76406C.1.pep
MAEESGRPLPKFGDWDVNDPASADGFTVIFNKARDEKKGGNGQDTESPSRDTRTERVESYAAKPSTKKWFCCVTASPTQS

SEQ ID NO: 343469 - protein, 80 aa, Zea mays; identical to SEQ ID NO: 224569
  Clone ID: MRT4577_76407C.1.pep

SEQ ID NO: 343470 - protein, 65 aa, Zea mays
  unsure (1)..(65): unsure at all Xaa locations
  Clone ID: MRT4577_76408C.1.pep
LVISVITRTPWPIIGEPPNQNRXKTNEQNEKKVALRLEAFVYNASCDGWCVYILVLFFYQTVSIC

SEQ ID NO: 343471 - protein, 60 aa, Zea mays
  Clone ID: MRT4577_76409C.1.pep
QGAVHHVHHQHVQLDVHVQYVIWHPPRVNKTADRIACPLDQEDHIQRSYPALMYRVQFGF

SEQ ID NO: 343472 - protein, 79 aa, Zea mays
  Clone ID: MRT4577_7640C.1.pep
MASRPSLKSKPKGKGGKKATADDEDATAAATTVRLMKEWTTWTMKKAKVVAHYGFIPLVIVIGMNSEPKPSVFQLLSPV

SEQ ID NO: 343473 - protein, 139 aa, Zea mays
  unsure (1)..(139): unsure at all Xaa locations
  Clone ID: MRT4577_76410C.1.pep
MIVADSECHSEIKGYLPFTRGGVAGPETREEHREGQARRGSRGPSAFIPVEEILREGAESLEQHLGLEALMSSGRVDNLAVVMGLHPDYLSSFWRLHYLLLHTDGPLASSWRHYIAIMAAARHQCSYLXVGSHMTEFLQ

SEQ ID NO: 343474 - protein, 302 aa, Zea mays
  unsure (1)..(302): unsure at all Xaa locations
  Clone ID: MRT4577_76411C.1.pep
GEKKRKKERKKEKGGEKKGGERGEKGEKKGGRKRKKEKEKGEGKKEKKEKKKRKKKREGKKXRERREEKGKERKKKKWGRERVKERKERGEREKIQAEREEEKRKEGGTKEKRGKKREKKKKRGKKKRRKKKEEKKKKGNREKKERGEKKXKKKRRGEKREKKGRRGKKKKKERERRKXRRRERKEREEGKKKKKEETAGTRKRKKREGRRREKEEERRGKRGGKGEKGGRGIIGKEERSSSKEKRRKRESKKQSCRDLGGHHKHTAHQTGELRGGQALLGLGLNTCGRLLRLLLGRRLLLR

SEQ ID NO: 343475 - protein, 98 aa, Zea mays
  Clone ID: MRT4577_76412C.1.pep
SLKCLPNPRWTLPHLALEYLTLSSVCSDLSMRQTKPSTMSGLVTMMSQLFTIFSTILPNSNTFACSRSCPLILATGHLYSLLAYNSANTQTREKYTRE

SEQ ID NO: 343476 - protein, 143 aa, Zea mays
  Clone ID: MRT4577_76413C.1.pep
CIAMDAKTTVTAARTVRAWEKGGKETTTRRGRVSASSFLRCGCGLPSALRNRRPPPLAQRQRICLPSCSLTGSSLRQPSSQPAWRPPASDSPAKPSCCGFYLVQIITPFPPIIFPLLEGPGRPPEPISSVHLSTGIHPTATGG

SEQ ID NO: 343477 - protein, 93 aa, Zea mays
  Clone ID: MRT4577_76414C.1.pep
LSPPGLFFFRVVCSPRENKKYFWVDGALTHYSYVLSDKTLHGLTSFQDPKKTVGLNFTTEHPRVHFSFFFPPFFFGGVNTAHFCFLPRQHFLF

SEQ ID NO: 343478 - protein, 55 aa, Zea mays
  Clone ID: MRT4577_76415C.1.pep
KICYRLGWKKCGDATKNVVLIGRLGRQYWFSSLKSVNNVHLLRQKYIRTKKKKKK

SEQ ID NO: 343479 - protein, 58 aa, Zea mays
  Clone ID: MRT4577_76416C.1.pep
PSGTCNIPFKCGIKYTSNTADRPRSVLMDGSIVSLQQDIGRYYFTRGHDLMASEGLTS

SEQ ID NO: 343480 - protein, 84 aa, Zea mays
  unsure (1)..(84): unsure at all Xaa locations
  Clone ID: MRT4577_76417C.1.pep
MASSSSSIHRRLILSGAGLLSVXAGANASAGTSCVPGWAIPHNPLPSWRWYRTIPTCGIGPSLPWXPSLNRRCXCREXLADNPR

SEQ ID NO: 343481 - protein, 97 aa, Zea mays
  Clone ID: MRT4577_76418C.1.pep
LPRPSGCGGDKLSCSPGFLCLLGLCFLILRPSLASRSSVLADKPFEGAARDGDACRPLPGPRGRRHRVLSLPPSAATPAGRANITSCGSISSVEVVA

SEQ ID NO: 343482 - protein, 89 aa, Zea mays
  Clone ID: MRT4577_76419C.1.pep
RQHRDQAGTLSCSVKLLSVHKRRPFLRGYHDCVGRCSCSTCSTPSVSFIQRQLKRNGGSTSLWLSLLTTTASAALIVLCMDSDTFLWSL

SEQ ID NO: 343483 - protein, 57 aa, Zea mays
  Clone ID: MRT4577_7641C.1.pep
KSWDHLRRIVVFVHPTHRYHVNCASKNATKYYVLLGSDQCGDRPCRGCDNTRRGSSP

SEQ ID NO: 343484 - protein, 45 aa, Zea mays
  Clone ID: MRT4577_76420C.1.pep
FHGGQLRLDRGDIGRHRSLRAVHERHHGAVGDAGCRPPTGRRRRP

SEQ ID NO: 343485 - protein, 140 aa, Zea mays
  unsure (1)..(140): unsure at all Xaa locations
  Clone ID: MRT4577_76421C.1.pep
AKLLPMLXRYVLSSKVQSALGYMAPEFACKTVKIPEKCDVYGFGVLLLEALTGRRPVEYLEDDVVVLCDLVRGALEEGRPEDCVDPRLPGEFPMDEALPVIKLGLVCPSQVPSNRPGMGEVVSMLELVRNPRDIAEDELV

SEQ ID NO: 343486 - protein, 150 aa, Zea mays
  Clone ID: MRT4577_76422C.1.pep
MCRVRTKTVKKASRVVIEKYYPRLTLDFQVNKKILDEVTIIQSKRLRNKIAGFTTHLMKRISRGPVRGISFKLQEEERERRDNYVPEFSALDTSAIEVDPETKELLKAINFENLPGVQVTNPIAAQADVRRGRRDNRGPRPPRAQAEASA

SEQ ID NO: 343487 - protein, 97 aa, Zea mays
  Clone ID: MRT4577_76423C.1.pep
ISSLMLIYRLWVVKFVEALYHSSHRPFSSPWLRTLCSPSPTRDCAPSAPATLCSGCTPSAPARGCCRGLCSSPSSVWCPPLLQASTGVHPPAHGRPP

SEQ ID NO: 343488 - protein, 352 aa, Zea mays
  Clone ID: MRT4577_76424C.1.pep
MEDGRALEGGLRWRPGAEAGTTHWRGSSRGLCSSHVLEQRGCNPSRGSPEQRGHSRALEKGYRGCAATGWRRDDGYCGTGRGVGQHSRDLGSQRHNTHATAFPLDFLLTQPSAHPAREEIQCQQHSQAGCGCDDTHHLQGTHHKFVDASCMQRLNELHHPQAINQHQAGDELALVTVPIGLCLPPTDGSEISAACLNSVDSGDISSNGKLSLGLHQSQSSAQQPATPSQTKTLDSIDCRANPEGSSIRAAAIAAGARIGSPSDAATIIKAAQSKGAIYIRPGEIIPNYLKPLAPKPLSSLPPMNPGQLRRFGDSAAAKDAIFGSSDGTDDDDEEDTDDEEDDELTDNDAEHE

SEQ ID NO: 343489 - protein, 91 aa, Zea mays
  Clone ID: MRT4577_76425C.1.pep
QLKDFGLRLADRKRRCSHANVILGSSGSQVMYLRVTRISPSLVSRASERRLHKEAAVAPQHSLPSDLVDDCGFFAVEEMTKGSAPGGARAE

SEQ ID NO: 343490 - protein, 134 aa, Zea mays
  Clone ID: MRT4577_76426C.1.pep
MSSEKQETAAVRVLGRWPSPFVIRVLIALGLKGVDHELVEEAAGNKSELLLASNPVHKKIPVLLHHGRPVSESLIIVQYVDEAWASQAPALIPSDPYARAAERFWAQYVDDKVKRQGNPVPIFALILSVLSETK

SEQ ID NO: 343491 - protein, 122 aa, Zea mays
  Clone ID: MRT4577_76427C.1.pep
LAFSSFLQCSLPLWPGQPSLQGLQLLIQRGRVPCPHQIANAGSFNCTFDAYHVQARLQKQYTSLAFHIVDIRNIWGSAEKILYMTRPWAARVCSIVIWLIHLDQSIAIQHSCVPWSLFFASI

SEQ ID NO: 343492 - protein, 55 aa, Zea mays
  Clone ID: MRT4577_76428C.1.pep
SWRWRARAARRCCSNLRAQEPCFCQYARNPAYSSYINSPNARRTLTSCGIAVPSC

SEQ ID NO: 343493 - protein, 118 aa, Zea mays
  Clone ID: MRT4577_76429C.1.pep
VEDIFCLILSVRSMLLDMALAPSGPSTLLVENTCKGKSILFDIISALSDLAVLLGDIPRDGTDTVMGFLSFSAKSMLLDIVSMPSDASRLLGEATRDGTFTDNGLLPFCVAPTLSDAF

SEQ ID NO: 343494 - protein, 102 aa, Zea mays
  Clone ID: MRT4577_7642C.1.pep
LAHRARALLRARHAAALLSQQPHRVQLPGRRTRPAPRGTRPPQRPPLGAPTRRRRRGGPCHRTGETDAADVGKLVMFLNDRLAGVSSPTPCFLGSLTAWFAR

SEQ ID NO: 343495 - protein, 95 aa, Zea mays
  Clone ID: MRT4577_76430C.1.pep
MARAVAMLVALALALIVAVASAGGAAAQQCSAAQLAACAPAIISGSPPTASCCSNLRAQEPCFCQYARNPAYSSYINSPNARRTLTSCGIAVPSC

SEQ ID NO: 343496 - protein, 50 aa, Zea mays
  Clone ID: MRT4577_76431C.1.pep
PFSRGALVTETAKIYPVGFGLSPPICISPQSQKPCISSISRGQLKLNLVV

SEQ ID NO: 343497 - protein, 89 aa, Zea mays
  Clone ID: MRT4577_76432C.1.pep
GGRPFFFFFFFFFLKILLLFSHKIRVGILNNQGGGKKKLQTNSFYAQHGYWQSTTKISNKNCPPLNTHTKFGLAPDTSRYHHHRPFTTI

SEQ ID NO: 343498 - protein, 195 aa, Zea mays
  Clone ID: MRT4577_76433C.1.pep
RPGFTGTIPPTLGLLSNLFWLDLADNQLTGSIPVSTATTPGLDQLTHTKHFHFNKNQLSGTLTGLFNSNMSLIHILFDSNQLTGPIPEELGGISSLQVLRLDRNILKGTVPPNISNLVNLNELNLASNQLTGPLPDLSSMTKLNVVDLSNNSFAVSAAPNWFTTLTSLTCVSISNGHLSGAVPKGSLQVAPPATS

SEQ ID NO: 343499 - protein, 302 aa, Zea mays
  Clone ID: MRT4577_76434C.1.pep
MEPTAAPAACEIARLPDDLLSAALGRTGPLDACRAAAVSPAFRAAADADAVWSSFLPPDLPPLADGELPADATATKKQLFMRLSDPARPVLLADGLTSMWLDRATVAKCYMLSARKLTIIWGDTPQYWHWIPLTDSRFSECAELQHVCWLEIRGKIPCDMLSRNTTYAAYMVFKMSDESYGLDYPLQEAEVSIGATRSTRQVCLGYVDDDEDGEEVPQNYRSFGAVGNVFRPRIGRRNRRQPPGVHVLHPQTRAGGWMEMEMGEFRNEEGEDGEVSVSLMETRGGNWKRGLTVQGIEIRVKK

SEQ ID NO: 343500 - protein, 117 aa, Zea mays
  unsure (1)..(117): unsure at all Xaa locations
  Clone ID: MRT4577_76435C.1.pep
LLFATCSISHSPRDFMYTFLTPVSNVIIYTDVLITLLLITPLFKYTPNSILYSIIISADISLIHYXTAILIWKVDNIDFISCMLASFYVIFNSIDIGLLNTPSILFPKILFQITKTI

SEQ ID NO: 343501 - protein, 109 aa, Zea mays
  unsure (1)..(109): unsure at all Xaa locations
  Clone ID: MRT4577_76436C.1.pep
MMVLVVALALLALDASAAYSTSGGCGCQTPPLDLPTPIYXPTPFYLPPQQQPQPWQYPTQPPKVSPCQQXGSCGASSXASPFLGQXCVELLRHHNSPGETPYGSPHCQA

SEQ ID NO: 343502 - protein, 613 aa, Zea mays
  Clone ID: MRT4577_76437C.1.pep
SPLSSGVYWAGSETAVPLALLDRGGKKNKREAGRSSRGEEFANHAFSLRSFLECLLSGGTSTETADLTTSEANNQESSVQDGLDTTCAKENKGNDGVDNAAENSTQISESSDGGQLSLQDNKMGDSDAADANRSSASSTIVSEGKESILKHDCDSVQAPKLGASAANGPSSKSKRSYRVNILRCESLASLAPSTLERLLARDYDIVVSMIPLPSSSVLPCPSGLVHFGPPSYSSMTPWMKLALYTSGTCGPVSAVFMKGQRLRLLPEPLASCEKALIWSWDQSVVGGLGGKFEGNLVKGSLLLHYLNSMTKHSAVVVQPLSEHDLDETGSIVTIDVPLPLKNADGSIPSTVVGTDLPEDQVSTRTRGLEDLSNRVELSTVGYLRLLRLHRANESSEHGSFEWVPLTIEFGIPLFSPQLCERICERVVESQMLQKDDIAEHYETMQNVRRRLRELCTEYQATGPTARLFNQRGGSKNTSPRKLVQIVSGRWSPFHDPSTPTHSSSPPAEHERAKPARRQRCFTEVLSFDGRILRSYALTPVYEAATRSVSEEQPTTPAAKPDHEDANTKDVALPGVNLIFDGTELHPFDIVACLQARQPLSLIAEASATSLAMK

SEQ ID NO: 343503 - protein, 48 aa, Zea mays
  Clone ID: MRT4577_76438C.1.pep
FCLRKKKNILAIDCFTSHIPPPICMDWIVKYDEGNWTAGVAYTYKRFF

SEQ ID NO: 343504 - protein, 41 aa, Zea mays
  Clone ID: MRT4577_76439C.1.pep
YIVFFEHSNQIDSLALIDMIISCKRRSVHFVFTWLTYKILI

SEQ ID NO: 343505 - protein, 368 aa, Zea mays
  Clone ID: MRT4577_7643C.1.pep
EKRLDRGYCLLEVRRWYEKTTWMYISVPLLLYVGERMLRALRSNAYTVKILKVCLLPGNVLTITMSKPYGFRYRSGQYIFLQCPIISPFEWHPFSITSAPGDDYLSVHIRTNGDWTQELKRIFVENYFSPHLNRRASFSELGAAEPRSLPKLLVDGPYGAPAQDFRNYDVLLLVGLGIGATPFISILRDLLNNIKIADELMDLAMETSRSEDSANSFSVSTASSNRKRAYRTSRAHFYWVTREAGSFEWFKGVMNEVAEMDKKGVIELHNYLTSVYEERDARTTLLSMVQALNHAKHGVDIVSGTRVRTHFARPNWKEVFTRIASKHPNSTVGVFYCGAPTLAKELKALAHEMSHRTGTRFHFHKEYF

SEQ ID NO: 343506 - protein, 38 aa, Zea mays
  Clone ID: MRT4577_76440C.1.pep
PAKEANKVFVGITQGKLVDPMLESPKEGGGKPLPFNFK

SEQ ID NO: 343507 - protein, 131 aa, Zea mays
  Clone ID: MRT4577_76441C.1.pep
MADVVSSLASGGSSLDDEDDPCGSSMPPMARPLRIDGMGTFSLLANGEGASSLRGNGMDASSLRADVDGTISMRADVEGASSLRGSGVDASSLQADVEGASALGCDDQDASSLRGLCIDSSSMQLVSVIPR

SEQ ID NO: 343508 - protein, 246 aa, Zea mays
  Clone ID: MRT4577_76442C.1.pep
KDVLSYCHPPVSTERYFWFSVGIDASVVHTDLNVPVYDWRISFNSILRLENKLPYEAEYAIWEISTKSNMVEKQHGIVPSGGSVFIYSADIRKPIYLTLFLQNGWILEKDAVLIMDLLSLEHVSSFWMVQKQSQRRLRVSVEHDLGASDAAPKTLRLFVPYWIKNHSSIPLCYRIVEGESTESTEADSLSRPDSLSRVSKSSKFSLKYSSKSLVRRGTMSHRNMQVLEDIEDCSTDYVMLSPQDYL

SEQ ID NO: 343509 - protein, 115 aa, Zea mays
  Clone ID: MRT4577_76443C.1.pep
RYDCVWYKSSTTVNMRVMVWSEYEMMKMPDAVSWCCRPPLPPLQIMAATTAPRCAVCMQNNSMILMSPAALSTTSQSKIESYLYPTYSVHHQRRTRGCGRGPKNSASRTSFCSIT

SEQ ID NO: 343510 - protein, 80 aa, Zea mays
  unsure (1)..(80): unsure at all Xaa locations
  Clone ID: MRT4577_76444C.1.pep
GQAKQEVEHKKKKLEAQVQELQSKCSDGERARAXLNDKVHKLQNEVESVTGMLNEAEGKAIKLAKDVASLSSQFQDTQEL

SEQ ID NO: 343511 - protein, 151 aa, Zea mays
  unsure (1)..(151): unsure at all Xaa locations
  Clone ID: MRT4577_76445C.1.pep
AVSGLVLAXSPAXXPCPXWVPGXPSCPGWPWWXGPASXWWGGCXSXGAPRCXPASCGLLPWXARXPWCSLARGGPPPPAXASARSXWSPPRPSCSRPWXAASXGXGARASAVVVRLGAGVXGAARVGAAXPGWRGPSVAWGXPGGFAPPRR

SEQ ID NO: 343512 - protein, 558 aa, Zea mays
  unsure (1)..(558): unsure at all Xaa locations
  Clone ID: MRT4577_76446C.1.pep
MEGEAETVVGSCSKPCGPLEDYYIPDYILKPGAQQVLVDHAAPCPVVVFINSRSGGQLGSSLIKTYRELLNEAQVFDLSKEAPDKVLHRLYANLERLKMEGDILAVQIWRTLRLIVAGGDGTASWLLGVVSDLKLSHPPPVATVPLGTGNNLPFSFGWGKKNPSTDQEAVKSFLGLVKHAKEIKIDRXLPHIPWRILXTLVWVRLQCCSHLYCYTNAARPLCTYTIQLFIYIFYLDMXLGSSSCYXLVFRQPTKESSASLVRLLLWHHXFLIKSISGEFXADNKLKNSGTRVKHDDHDLXVAGMDAEVSYAFHSERKKNPEKFKNQLTNQGTYAKLGLKQGWFCASLSQPSSRNLAQIAKVKIMKRAGSLWEELHIHHSIRSIVCLNLPSFSGGLNPWGTPGTRRAEDREFTAPFVDDGLLEVVGFRDAWHGLVLLAPNGHGTRIAQAHRIRFEFHKGAAEHTFMRVDGEPWKQPLPKDDDTVVVEISHLGQVTMLANEPCRSKSVNDQSSLSPAHDSHGDYNDIAEEDEDEWEDGRRKFGAADTFKIPDEIDIAHFS

SEQ ID NO: 343513 - protein, 38 aa, Zea mays
  Clone ID: MRT4577_76447C.1.pep
GLLFFFFFKCQISKRQVPDNLQSDMREIQRKNMAFHNT

SEQ ID NO: 343514 - protein, 206 aa, Zea mays
  unsure (1)..(206): unsure at all Xaa locations
  Clone ID: MRT4577_76448C.1.pep
MAAAAISLPRSPSLLQPTRRRSAPPACTQSERGVSFDPGSAFYRSDSAAGRDLAVLAATLHRRRGRPDPSAPFLCLDAMCGCGVRALRYLAQAGADFVWANDASEALRPIILANLCRFERGSPEAVAGCRRWVVXHNDATRLLAERYLRREYFDVIDVDSFGGDAAYVRAALLALKIGGLLYLTSXDWRSARGYGSRSSLSSYGAY

SEQ ID NO: 343515 - protein, 500 aa, Zea mays
  Clone ID: MRT4577_76449C.1.pep
MEGEAETVVGSCSKPCGPLEDYYIPDYILKPGAQQVLVDHAAPCPVVVFINSRSGGQLGSSLIKTYRELLNEAQVFDLSKEAPDKVLHRLYANLERLKMEGDILAVQIWRTLRLIVAGGDGTASWLLGVVSDLKLSHPPPVATVPLGTGNNLPFSFGWGKKNPSTDQEAVKSFLGLVKHAKEIKIDSWHIILRMRVPEEGPCDPIAPLDLPHSLHAFHRVSSSDSLNMEGYHTFRGGFWNYFSMGMDAEVSYAFHSERKKNPEKFKNQLTNQGTYAKLGLKQGWFCASLSQPSSRNLAQIAKVKIMKRAGSLWEELHIHHSIRSIVCLNLPSFSGGLNPWGTPGTRRAEDREFTAPFVDDGLLEVVGFRDAWHGLVLLAPNGHGTRIAQAHRIRFEFHKGAADHTFMRVDGEPWKQPLPKDDDTVVVEISHLGQVTMLANEPCRSKSVNDQSSLSPAHDSHGDDKDIAEEDEDEWEDGRRKFGAADTFKIPDEIDIAHFS

SEQ ID NO: 343516 - protein, 222 aa, Zea mays
  Clone ID: MRT4577_7644C.1.pep
SSSQVQTGCSFGLVGRPATTRMNRRFVNLVMHNWVEGVYSVRRINPYNHLFYPSAKAALEAADEAAKYKDYFPVMQSLQLPDPGIKFTATPSGVGLDMFALFNPRGTSEGRIVFSNSIGEAVLYDADKQLFNTMGCLNEPKGADPMCLPIEHPGTDQDSLYVLDSCPWKADSRCFEVLEFMPECSELSNLRATWRWRLLPRLLLSRKLGTNLPLFSPTLPQS

SEQ ID NO: 343517 - protein, 215 aa, Zea mays
  unsure (1)..(215): unsure at all Xaa locations
  Clone ID: MRT4577_76450C.1.pep
TRLLCFRNLAQIAKVKIMKRAGSLWEELRIHHSIRSIVCLNLPSFSGGLNPWGTPGTRRAEDREFTAPFVDDGLLEVVGFRDAWHGLVLLAPNGHGTRIAQAHRIRFEFHKGAAEHTFMRVDGEPWKQPLPKDDDTVVVEISHLGQVTMLANEPCRSKSVNDQSSLSPAHDSHGDYNDIAEEDEDEWEDXRKFGAADTFXIPDEIDIGSFQLSFD

SEQ ID NO: 343518 - protein, 39 aa, Zea mays
  Clone ID: MRT4577_76451C.1.pep
PCFPHRRDPRPWPAPAGVCRPPTLGSVDMRDGGGDSKLV

SEQ ID NO: 343519 - protein, 249 aa, Zea mays
  Clone ID: MRT4577_76452C.1.pep
MASSSFSSSPSRRLVHLTRHLVSSSSGELSSVGAPAAAASDADPVKSPRSTASRVHAAVLVCLFEDPSSGPRVLLTKRASSLSSHSGEVSLPGGKVDDGDADPKATALREAKEEIGLDPALVSVVTVLEPFLSKNGLTVVPVIGMVPDKALYKPVLNKAEVEDIFDAPLEMFLKDDHRRTRQMNWMGIDIPVQFFDYEADGKKFVIWGLTAHILTRAAAVIFGRKPSFVELPRPKYAGAPVAGTGKSNL

SEQ ID NO: 343520 - protein, 78 aa, Zea mays
  Clone ID: MRT4577_76453C.1.pep
SYRVSSTPRGTRPDLHPKLNYYNTTSSCRSHNLKYYLTCIISSISFHMTLNTVVDPNAEDYAAYTGTNDDMHVHMHLL

SEQ ID NO: 343521 - protein, 51 aa, Zea mays
  Clone ID: MRT4577_76454C.1.pep
PPGVRPARGANRARGGELEVGSRPTLRSYYEPEWRLWTFIYIPLCVVTMYV

SEQ ID NO: 343522 - protein, 95 aa, Zea mays
  Clone ID: MRT4577_76455C.1.pep
PQSPKIPKNKDLPPSDTKTLLSKKISWQDQTSRERVRKAPARKTQSTSGENTNDINAINRNPRRPPDYHQKTAIPPAKERTKGGITCRTRRLKKE

SEQ ID NO: 343523 - protein, 128 aa, Zea mays
  Clone ID: MRT4577_76456C.1.pep
YMKVAPHPSPVLVRPVAILCLNLVGWLQKTRVYHHPLRLASLECLNATVVDVVPQGPWCVQTVGRATHKAQHARRLPLPAPWLHDPLRAVGVPKLFAIPRLVGLEGGHLRLSPARAFLPASPLSFGSV

SEQ ID NO: 343524 - protein, 156 aa, Zea mays
  Clone ID: MRT4577_76457C.1.pep
TLHFLSLPFSNSYRSLSLSLIYCSSFLKYNHRKRITIVQNTTFCWGITSSVFRTSVMRSNWRSMTMNSMSSSSSAKNLRRGDILWWMWKQRTKATGVGTEVRQGLRMREERGSDEGGAGATAVQGRRGWKGGDMGEHGERRRGCSRGCGSRERNFG

SEQ ID NO: 343525 - protein, 86 aa, Zea mays
  Clone ID: MRT4577_76458C.1.pep
PPTKFHQQPGSVNKAKVVKNLASWPLLLQGLVFRPLSCRGNNPCGGQLRRKYGLPRKKSPRGSPMLSPIRLLKWIAGGGFKKKCNP

SEQ ID NO: 343526 - protein, 93 aa, Zea mays
  unsure (1)..(93): unsure at all Xaa locations
  Clone ID: MRT4577_76459C.1.pep
SSKAFYRSTCXRPRPFCTWHRESFPSCTPRRMLSLLKQKPSNWRLCDKHRLSSFYVLFSSFSFSFSFXXXFTXSIIXXXMPMXTPILXXMVPT

SEQ ID NO: 343527 - protein, 51 aa, Zea mays
  Clone ID: MRT4577_7645C.1.pep
SFSFFFFFPPPPPFGGGRGPIQFSSHLSQQNDLFKKPTKNLWFLKLKATFP

SEQ ID NO: 343528 - protein, 477 aa, Zea mays
  Clone ID: MRT4577_76460C.1.pep
MAAPQPVAQAPEAPPSAQVVGNAFVQQYYLVLHQSPDLVYRFYQEASRLGRPASAAGAAGMDSVTTMEAIGEKIMEMDVSKAEIRTVDSQESLGGGVTVLVTGHLTGRDGVRREFSQSFFLAPQEKGYFVLNDMFRFVGEIPAPTAVEAQPEADAVVLSVAANGTSTLAVEPATPDDRNAVPQQEHHVVDRSPPQPEEEEEAEVYDPPPEEVVDEEQPVPEVINEVPNNVAAVLATTVAPVLQEEAPKKSYASIVKVMKEVSLPAPAPPTRTAPPKPEKQSPALAPVKDVLPFSSNPENGNIQEPEDDAHAIYVRNLPLNATETQLEDEFKKFGTIKQNGIQVRSNKIQGFCYGFVEFEDSTSVQSAIEASPVMIGGRQCYIEEKRTPGSRGSSRGGRFVPGRGNNFRSEGTRGRGNYGGGRGYGRGEFSYRSDYGGRSGGRGGSSRGADVGYQRVDHAGYAGGRGSRTAAAGAPSK

SEQ ID NO: 343529 - protein, 79 aa, Zea mays
  Clone ID: MRT4577_76461C.1.pep
MAGVVDLTEILPGLALYVPGLVFVVLAEIAGGLRGGARLLQVMVLLADKGQRENGFNYSIQSTFVLDCLFVCLCVVQWH

SEQ ID NO: 343530 - protein, 36 aa, Zea mays
  Clone ID: MRT4577_76462C.1.pep
SEANAIALMNSYVPIKTLTDSCGTSRQLCHKHFLIL

SEQ ID NO: 343531 - protein, 132 aa, Zea mays
  unsure (1)..(132): unsure at all Xaa locations
  Clone ID: MRT4577_76463C.1.pep
IVRGRRAGRKKGERGPRGEKGSRKEGHTKTGPKAEKKSLGGQKRELTNIKREKKRDKKKKRKGGKKREKKKKKRRGERGKEKREXGGRQLKKGNGQQRRGGNRRGXERGRKRPTRGRAKRRKPRTRGANGGK

SEQ ID NO: 343532 - protein, 247 aa, Zea mays
  unsure (1)..(247): unsure at all Xaa locations
  Clone ID: MRT4577_76464C.1.pep
RGLESLRGXVAGKYKDEIEESVSMVDILAVQLSKRENELLQQKTEVTRIATSLKLASEDARRIVDEERTNARTEIENARAAVLRVQKVLKEKENSSQRIGKQDVDELREKVQEARRVKMLHCPSKAMDIKSEIHVLRDQYAEISSSSTHLLKELELHQSFKENXALMXELEGLESLGSMAVRSCXNDVALSNSSVQWFRIQPEGPKKEIISGATKLVYAPEXMXVGRYLQAEVNLGGQTSVAKTAGP

SEQ ID NO: 343533 - protein, 118 aa, Zea mays
  Clone ID: MRT4577_76465C.1.pep
GKKGFGGAPLKQLRGVPGPGKGPVWEGSVGALFYFSGGGFPPHFFFSPGLFTHGGAGFAPPLRFSPKPKSQGPRWGGGRLFLPEVEATGKKGFPCPWLNKKRVHWLGGSGQRGLAIFF

SEQ ID NO: 343534 - protein, 100 aa, Zea mays
  unsure (1)..(100): unsure at all Xaa locations
  Clone ID: MRT4577_76466C.1.pep
CQENGYEEVDGQXLTGSEWEENLRCEAEARALSQEGPTLTKLINDLRPIAQNSIPVELKQEISASIRAFIKANIQHDHADDKDQDQDEDEEDDAAKKEVV

SEQ ID NO: 343535 - protein, 121 aa, Zea mays
  Clone ID: MRT4577_76467C.1.pep
KGNLGFFPGNFFQKGPFSPPGWSFWGPVNPTPPKGAPRGPPPKIFLPPKEGPFLLKGSPTQLPGGGQFPPLGFPVKFGPPQKGFFFSAPRFFFLAFFPPRGWAPSLFFLVWPTQQSFFFFF

SEQ ID NO: 343536 - protein, 51 aa, Zea mays
  Clone ID: MRT4577_76468C.1.pep
LGITTKPHPQEGIFVGLKHEQYRQSRSSKAQAYLRPYKLAIGGTLRIHTSL

SEQ ID NO: 343537 - protein, 46 aa, Zea mays
  Clone ID: MRT4577_76469C.1.pep
RAVRTDHTSTSEAEVLRTLRPGATLSAGIQPKQPYSIIYYFIHWRS

SEQ ID NO: 343538 - protein, 47 aa, Zea mays
  Clone ID: MRT4577_7646C.1.pep
SYPPDAGLSDDEEHPDASLPPDPPPLTVPQTHNARDQWLQDAFHISL

SEQ ID NO: 343539 - protein, 197 aa, Zea mays
  unsure (1)..(197): unsure at all Xaa locations
  Clone ID: MRT4577_76470C.1.pep
KARSRFPAQANAARGGAAAPAPAATQXPRGQXXXXDXXDGTGXEGXNQDXXHSXXNAPKQXGRGDEGLFFSSXADEQXXXNSRGKQARTAXXXRXKXXEEEGPKTEKHXNNXEXXXXSKGKDXPPXDTXEXXXXXXXEXKXXPXKXXKXQKGRXXXXXKEDNQXGXXXXKXHKKXXXGTXXDTTXXKDXKKKEEHRD

SEQ ID NO: 343540 - protein, 80 aa, Zea mays
  Clone ID: MRT4577_76471C.1.pep
NFHELSISLCCENKKIWCYWCMQCAVAKERKLCSVNVIEREFAILLSVKPENHNITIGFVCFLCTQKRLVRAVERVLHYV

SEQ ID NO: 343541 - protein, 137 aa, Zea mays
  Clone ID: MRT4577_76472C.1.pep
DIIVPMIDYEKENEWKRKARTTLTDWCMSLETIIQWSPYSTEAELIQEFGSIGEQGTRIIIYNLWEDDEGELELDFDADANDIQIRGVNRDQNKIKKANQFPNSKHFFTYRHSLRVAAKVTIGFVKDARQHDIQGFN

SEQ ID NO: 343542 - protein, 245 aa, Zea mays
  Clone ID: MRT4577_76473C.1.pep
FHSGASSSAGISGAYVLPATDGREQGDVVTGTISVDSFAAHALFDSGASYSFVSEDFVSRAGLSVQRLGHPILVSSANGSISSCSVCQGCSIILADEVFSANLVVISLGAFDVILGMDWLSQYRAVISYFWKTVLLQASSGKEVVFLGSSPKFTLSLLAQLLPDRRSRKSGIFFSMVVEGEAALRVQDIQVVCDFADVFPAELLGIPPERDAAFEIKLIPGMQPIHKAPYRMAPKELLGTCSQIL

SEQ ID NO: 343543 - protein, 142 aa, Zea mays
  Clone ID: MRT4577_76474C.1.pep
CCRDELKKLSTRNVDQRHKEQFVGWVERKISKLNQQWKTRGPASYTLSQGPDHRARVFNRWFINGFLFRTEKIEQNLCTQNSGVVVKGDESFGNIDWYGVIKKIIALDFPQGKEVVLFQCNWFHVPTAKNKGRGYQRDQYGI

SEQ ID NO: 343544 - protein, 327 aa, Zea mays
  unsure (1)..(327): unsure at all Xaa locations
  Clone ID: MRT4577_76475C.1.pep
GDPVPPPPALEDPALFHYAIFSDNVLAASCVVRSAVANSNDPSKHVFHVVTDRMNLGAMQVIIRRMDLKGAHYEVKAFEDYXVLNSSYVPVLRQLESANLQKFYFENKLENATKDASNMKFRNPKYLSMLNHLRFYLPEMYPKLHRILFLDDDVVVQRDLTGLWKIDMDGKVNGAVETCFGSFHRYAQYMNFSHPLIKAKFNPNACGWAYGMNFFDLDSWRREKCTEQYHYWQNQNENRTLWKLGTLPPGLITFYSTTKPLEKSWHVLGLGYNPSISMEEIRNAAVVHFNGNMKPWLDIGMNQFRHLWTKYVDYDDSYIRQCNFAPP

SEQ ID NO: 343545 - protein, 86 aa, Zea mays
  Clone ID: MRT4577_76476C.1.pep
FSPRGACQSLFKAYSVGPKWGPKAEAPNGRGPPKGAKDPWGPSRSGVFGEQRPLVGGTLNPALFKPFACAISLPPFYSSVLFFLKG

SEQ ID NO: 343546 - protein, 521 aa, Zea mays
  unsure (1)..(521): unsure at all Xaa locations
  Clone ID: MRT4577_76477C.1.pep
MVAGAGNPGRPVAVLALLLLAAAAPPGAWAGSAAVNGDRLRAEQIRKQASDAAASAAALAAASRRLHLDRARHLRLLSSLHRNLTNTLRXSPVAADFASDPSSANVSSSRQLDLQAKDLIRAARAAIADSKPLFDPQLKIQRLKDTIFAQNELLARAKKRGAFASLIAAESIPKPLHCLAVRLTAERIARPDQYADPVPPPPALEDPALFHYAIFSDNVLAASCVVRSAVANSNDPSKHVFHVVTDRMNLGAMQVIIRRMDLKGAHYEVKAFEDYKFLNSSYVPVLRQLESANLQKFYFENKLENATKDASNMKFRNPKYLSMLNHLRFYLPEMYPKLHRILFLDDDVVVQRDLTGLWKIDMDGKVNGAVETCFGSFHRYAQYMNFSHPLIKAKFNPNACGWAYGMNFFDLDSWRREKCTEQYHYWQNQNENRTLWKLGTLPPGLITFYSTTKPLEKSWHVLGLGYNPSISMEEIRNAAVVHFNGNMKPWLDIGMNQFRHLWTKYVDYDDSYIRQCNFAPP

SEQ ID NO: 343547 - protein, 99 aa, Zea mays
  Clone ID: MRT4577_76478C.1.pep
PTKACGNIEDAGVQRAWLRIQRTHAYNTNMSSNAKSTDDDDMQAKGAVIKRVIRTHSVAKLPVIGFAVCHRYYWVLQYLGSIGKITSFVDRTMHELTNK

SEQ ID NO: 343548 - protein, 43 aa, Zea mays
  Clone ID: MRT4577_76479C.1.pep
SIDCLASEAPVHLRLSWFVVRRGMTAASSDMVRLCLALCLSAP

SEQ ID NO: 343549 - protein, 32 aa, Zea mays
  Clone ID: MRT4577_7647C.1.pep
FDHKYASKLRGLYVQPRQSQTRASNQYENQPS

SEQ ID NO: 343550 - protein, 75 aa, Zea mays
  Clone ID: MRT4577_76480C.1.pep
QGSYVCTGTPRKCWMGCTCPHRLMLYLVRAELVATMVINTMDVAITWVAATPVVVALNQRLEAAMLEVGVILLEA

SEQ ID NO: 343551 - protein, 112 aa, Zea mays
  unsure (1)..(112): unsure at all Xaa locations
  Clone ID: MRT4577_76481C.1.pep
SFCFYLISKVAGYIDLLDVCPSPSEMKVTIALADTGIKYEYIDEDLTYYRSLLLQMYPVHKKIPSLIHTDKPIXESLITVHYIDEVSDDRNPLLPSDPYHIAQPRFLADYPD

SEQ ID NO: 343552 - protein, 44 aa, Zea mays
  Clone ID: MRT4577_76482C.1.pep
ETVCHYYMRQKISRRENCSEEKWKKIYYLSNGNGAEMRWLAAFV

SEQ ID NO: 343553 - protein, 116 aa, Zea mays
  Clone ID: MRT4577_76483C.1.pep
AAFPSFHGGVRVLPPRRPRILILWIHLPPTPSWRSGRCLRRFKRTLILLPPPRFPFKATSRTLHKQHRSHHAASGADHPLHGSRWLTQRPNLSNIHRRKTSQQAGPVCKGTTMQKQ

SEQ ID NO: 343554 - protein, 82 aa, Zea mays
  Clone ID: MRT4577_76484C.1.pep
RNYPFRMTDRTVPQKTTFLSRNAENYPMEQYSIIQSHPVDISDKYKSISHCLSFFCNQNKKPREAEMLKAQQRNNRNETYIS

SEQ ID NO: 343555 - protein, 107 aa, Zea mays
  Clone ID: MRT4577_76485C.1.pep
SFRGMIGFPPLCESIFRGARLTFAVARQVSLQIDFWFVPMACWARVPLVWLVPGGQLWVLLFLVLPLSGIVGSPGCFGAPPFFVFMGHGLPCYRMLGCVSLFPGYVP

SEQ ID NO: 343556 - protein, 123 aa, Zea mays
  unsure (1)..(123): unsure at all Xaa locations
  Clone ID: MRT4577_76486C.1.pep
FCSFLFLGSSLNERPACLLCVIFFFQPHKNSFLFIDLSLFLLSLRVRLSLFFSRLCALKKRPEFHEHWPRRPCRQLAHPFGRXSCCRPGTDGXPSTTAREWXRRVGLLTXFNFLKTRSSPHLL

SEQ ID NO: 343557 - protein, 202 aa, Zea mays
  Clone ID: MRT4577_76487C.1.pep
AALINFTEDCPKSLLIPYLDNLVKHLHSIMVLKLQELIQKGTKLVLEQVVTSIASVADTAEEKFVPYYDLFMPSLKHIVENAVQKELRLLRGKTIECISLIGLAVGKEKFMQDASDVMQLLLKTQTDFNDMEDDDPQISYMISAWARMCKILGKEFQQYLPVVMGPLMKTASIKPEVALLDTQDMENMSDDDGWEFVNLGDQ

SEQ ID NO: 343558 - protein, 76 aa, Zea mays
  Clone ID: MRT4577_76488C.1.pep
LDVANPCILYSVISGFSRCLSPVVYLYCVLECKQSSAGSIQYLAPLQFIQCSCVGVSVSFCGLYVYSSCLCRFVVS

SEQ ID NO: 343559 - protein, 96 aa, Zea mays
  Clone ID: MRT4577_76489C.1.pep
MMLLLQYYQKKKKKKKKKKKKKKKKKKKKKKKKKKKKKKKKKKKKKKKKKKKKKKKKKKKKKKGGGLLKKQNFYHGAGKRKFFFLGPKKKKHWRGF

SEQ ID NO: 343560 - protein, 86 aa, Zea mays
  unsure (1)..(86): unsure at all Xaa locations
  Clone ID: MRT4577_7648C.1.pep
RFXLLDVRXPWGGGLXYSXFGAPCSASSPVAGLPLXALSRSPSGLCFSFAPAPGPXPLAPSWSCCAPVGAPCLSLSLCLSLWPPFF

SEQ ID NO: 343561 - protein, 70 aa, Zea mays
  Clone ID: MRT4577_76490C.1.pep
RSASRERIHRRVKKNRRCSFERRWSHHKSDEAIAETIFIARGGLTPTRSLTPLPPAVSIAGLPPADGVIL

SEQ ID NO: 343562 - protein, 50 aa, Zea mays
  Clone ID: MRT4577_76491C.1.pep
SRILGWIIKILGTVKVMIRPKLQFCMGRCEDCIEVEWPMSFDAWADAGRR

SEQ ID NO: 343563 - protein, 38 aa, Zea mays
  Clone ID: MRT4577_76492C.1.pep
MREILHIRGGQRCNQIGSYFSEVVCDEHGMHPTQRYMG

SEQ ID NO: 343564 - protein, 188 aa, Zea mays
  unsure (1)..(188): unsure at all Xaa locations
  Clone ID: MRT4577_76493C.1.pep
EAATEPESGNGSQPIEIDDEEDWQDVGXKRKLTSEVWKEFKRVKLLDEVKAHFMHCGKKLSAKSKSGTKHLHVHLTGCPYRRSKLASKDKVLAQTSLRFSSKQPGSLSLENYSFDPDVARRELAAMIVLHEYPLSMVDHTGFRRFVSALQPLFKMVTRNTIRKDIMDAYLEEKTKALEYMSATKSRVA

SEQ ID NO: 343565 - protein, 138 aa, Zea mays
  Clone ID: MRT4577_76494C.1.pep
RDWHRTALCVWPLYVWRSPFRFCRLRLFLYAASELSLAAVLLSLFSLSVFFLISPAALLLGRQGEPDNRSLVSQCPLFAIIIFFFQPYKNSFLFIDLSLCTENTGPADLAANEHIPLGGRAAVCWELTVVRARQVGCV

SEQ ID NO: 343566 - protein, 53 aa, Zea mays
  Clone ID: MRT4577_76495C.1.pep
TEIFGCLKSFCIQHAYMIYLDVCLTPCLHPVRLYFCHVQFAALGSVLLSANVC

SEQ ID NO: 343567 - protein, 39 aa, Zea mays
  Clone ID: MRT4577_76496C.1.pep
TPPADAAAVSFQCGLSSKWFVAPYGHTAHISSPVPTLAC

SEQ ID NO: 343568 - protein, 185 aa, Zea mays
  unsure (1)..(185): unsure at all Xaa locations
  Clone ID: MRT4577_76497C.1.pep
DMKCSCRXXRMFSVCCMPDQTCASCALEPSLPREPAXRXGQAGPXGTGNACMQHVRARISKCVARTRWCVRCGVPGIRQQQADDATAGNNKHGHACMLTMNASSKHAGRSGPVARRPDATAVPVVGPTYVRAGGNMCPRARLFYSFRSDVSRKKGKFTGVRVQCMQGRMHVNIKMPACVREPAGG

SEQ ID NO: 343569 - protein, 44 aa, Zea mays
  Clone ID: MRT4577_76498C.1.pep
RVVVLLNHTHVLIGACLFYFFFFFFGWVFFVFFFVFFQAHKSAK

SEQ ID NO: 343570 - protein, 56 aa, Zea mays
  Clone ID: MRT4577_76499C.1.pep
MCVEVRSMCCVILIQVFVSLRFLAHENSFSMENFQQGKIAGDGQEKDRQYRRCRKE

SEQ ID NO: 343571 - protein, 281 aa, Zea mays
  Clone ID: MRT4577_7649C.1.pep
MAAGSGPAPPAEAQPPPPIHHLPPDALHNVLLRLQLRDAVVCRPVSRLFHETLSPQLLALLPSLRLLLLRHPRPDGGGCLHAFDPARRTWLRLPFAHFLPYHSFSPVASSTSLLYLWVETSSSTSPLALPPSTSSASSASPVHPPKSLAVCNPFAGTYRLLPQLGSAWARHGTVLAGPAGTVLVLTELAALSYTPSGSAKWMKHPLSLPSKPRSPILASDAVFALCDVGTPWRSQWKLFSCPLAMLTGGWAPVERAAWGDVFEVLKRPRLLAGASGRRVLM

SEQ ID NO: 343572 - protein, 116 aa, Zea mays
  Clone ID: MRT4577_764C.1.pep
MARLLPTAAVVAIEDDVLAAGLPGARAESASPAGDDAPSYRNHTDGGGDGWFFDANTNDWSGYYYDWADGETLYLGDYLILKTNDNSSEEQTTRRHDIQSLRRQRRSGGDYVHLRR

SEQ ID NO: 343573 - protein, 51 aa, Zea mays
  unsure (1)..(51): unsure at all Xaa locations
  Clone ID: MRT4577_76500C.1.pep
QRRVRGGERLINCTKKKKKKKKKKKKKKKKKKKNKKKKKKKKKKKXLCNNC

SEQ ID NO: 343574 - protein, 152 aa, Zea mays
  Clone ID: MRT4577_76501C.1.pep
RIHTRSRRQAGRGSCRECRARAHVSAGRRLAAAPPRLACTRGTCRRGGGCSGTPWARYSAASAAPPRPALCRGERRTAAVEFFSTDRTVRRPVKAGPRHAMDYGHPGGQQTLMYLLSLMRNSLVFFDCGCAYKLYVLKTGVIICAKRKKKKK

SEQ ID NO: 343575 - protein, 242 aa, Zea mays
  unsure (1)..(242): unsure at all Xaa locations
  Clone ID: MRT4577_76502C.1.pep
MATNKLAALVVLVAFLAGPAACEGINICLNFNGWLKPSILDPLFCPRGSGPPVPSPSGSGLSYGYYNTRCPTAEKIIKDAVKKAVDENPGMGAGLIRLFFHDCFVRGCDASVLLNTTNSQNSDTEREGLPNKDSLRGFEVIDEAKTAIEAACNNTVSCADIVAFAARDASYFLSNGSINIRMPGXPLXDXRESFANETDQLPGPFSNVAQLQASFAAKGLHXDEMVTLSGAHTIGRPLHVLL

SEQ ID NO: 343576 - protein, 37 aa, Zea mays
  Clone ID: MRT4577_76503C.1.pep
PTRPPTRPPTRPPTRPPTRPPTRPPTRPGTASLPVVL

SEQ ID NO: 343577 - protein, 82 aa, Zea mays
  Clone ID: MRT4577_76504C.1.pep
SALSARRRPLQDYSPPRYLLLVLLGLPSSVPLSGNALRGGAGPWSGGAATASDFCSPEGEFFFSPGLVGSKEAAASGETFTG

SEQ ID NO: 343578 - protein, 114 aa, Zea mays
  unsure (1)..(114): unsure at all Xaa locations
  Clone ID: MRT4577_76505C.1.pep
LTFLSETAEATMAGAKAAAVATVAAAVPTVXPASHSVLPWFIACLMSALPVISXASVRMLPWAKAHLNPTGQALIISTVAGMAYFIVADKTILSMARKHSFDDAPDHLKNTSFH

SEQ ID NO: 343579 - protein, 231 aa, Zea mays
  unsure (1)..(231): unsure at all Xaa locations
  Clone ID: MRT4577_76506C.1.pep
IRHEASSVAAGATASPASSASSASSASLQRSLTSAAASKMKKALGLRSSASSKGVGSPGSGGKAAPPRRPATFGELMRVQMRISEPTDARIRRGLLRIAASQLGRRAESMVLPLEFLQQFKASDFSDPQEYEAWRSRNLKLLEAGLLVHPLVPLNKSDSSVQRLRQIIRXAYDRPLETGKNSESMQGLRTCVMSLAGRSHDGTSDGCHWADGFPLNLHLYQTLVEACFDND

SEQ ID NO: 343580 - protein, 40 aa, Zea mays
  Clone ID: MRT4577_76507C.1.pep
KNKQKHWTSKILFEIIDKYYLCPLESIILVLWMEVLVFCL

SEQ ID NO: 343581 - protein, 40 aa, Zea mays
  Clone ID: MRT4577_76508C.1.pep
IPNLLVNGHVLSQNHKTRSFRFYPLVMFPMSPFIKSKCRG

SEQ ID NO: 343582 - protein, 102 aa, Zea mays
  Clone ID: MRT4577_76509C.1.pep
LSNRCKVMIQAADPDEDDDDEPGRPSKSRTPKTMLGALHAIWSKEGIPGFFKGLNAQILKTVLSSALLLMIKEKISKFTWVSLLALRRYLFVSQKRIKSATV

SEQ ID NO: 343583 - protein, 88 aa, Zea mays
  Clone ID: MRT4577_7650C.1.pep
RKPMSPLSPPTSQAGNGFMWIQWRVMIFPPFTQRVLLLHPPLGQSNKCAWGNGRSFCSTSFSGHFPVSCVTFSGLEGSGVFSLESNPL

SEQ ID NO: 343584 - protein, 57 aa, Zea mays
  Clone ID: MRT4577_76510C.1.pep
WERCSGHFLSSLSHKPTSTYTLPLASQAASLPGRGDWTHLFLLGCSGAFIQCQGGTT

SEQ ID NO: 343585 - protein, 59 aa, Zea mays
  Clone ID: MRT4577_76511C.1.pep
CLLVLGYVHGTRAEEAHSRTVEAGSNLHPKSFTRAKRSGHTIKSRKRINEHEFPLRSPR

SEQ ID NO: 343586 - protein, 40 aa, Zea mays
  Clone ID: MRT4577_76512C.1.pep
VQCEQPFPRPARLSTPASQLRFRHRQSSPIIVSTVQGRGP

SEQ ID NO: 343587 - protein, 85 aa, Zea mays
  Clone ID: MRT4577_76513C.1.pep
RVLTAFKVWPHHRSVVIDGVRDCHPICVCSIWRRHRVRRINVRLTTTRISVLSHGQIDPRTAGRPGHAGRARRPDAWAHAWADAW

SEQ ID NO: 343588 - protein, 103 aa, Zea mays
  unsure (1)..(103): unsure at all Xaa locations
  Clone ID: MRT4577_76514C.1.pep
RGGGGSISFCLELGIGRLTCIINMMLKYLTKPTRKNISDALLILGVIGSVISVIVGWIVFIAVSTIIXGDPDHLXWKPLALVSFEGIIPNNDNIRFVGAPXTG

SEQ ID NO: 343589 - protein, 41 aa, Zea mays
  Clone ID: MRT4577_76515C.1.pep
HYSPIVLNVGILLRYPLPQSPSPGGLGTTVILRKIFFHLCS

SEQ ID NO: 343590 - protein, 91 aa, Zea mays
  Clone ID: MRT4577_76516C.1.pep
MALTTMGLGGPAGMGQNLALNIADKGDPISETNRTAWKVDETVQCAKAEGNPTVYRLHDPAFFVKCIQKPRVVIMLIKGGAPIDQTIATLA

SEQ ID NO: 343591 - protein, 77 aa, Zea mays
  Clone ID: MRT4577_76517C.1.pep
GRWATASAKPRRSTVSSPASGSYTISNSESSLVPIPLQHRHSRNLCPTTRQAASIQFLGGRVRAWLNLTKLKDPLTR

SEQ ID NO: 343592 - protein, 146 aa, Zea mays
  unsure (1)..(146): unsure at all Xaa locations
  Clone ID: MRT4577_76518C.1.pep
LADDVCDALYTSPQADTVHNRLSASSVLVCGDGPLPRAKIAHFGAADLAGELPVEHKDDDDHRGGGGSRGSSGSGDNRRTXSRXRRIEGTRXYMAPELEAGGPPSRRSDXFALSVXLLHLXSAQEPXXXQLPNPTAKHHKTYLTHT

SEQ ID NO: 343593 - protein, 88 aa, Zea mays
  Clone ID: MRT4577_76519C.1.pep
MAGKRPQIHGQRGENDGEKVSGGPEKLRTAIPATGRGLKALANFSRGRGDTGNYSSELDRAKSVGHCASTADRRGRTPAKAKLDEHRA

SEQ ID NO: 343594 - protein, 52 aa, Zea mays
  unsure (1)..(52): unsure at all Xaa locations
  Clone ID: MRT4577_7651C.1.pep
MADSMAISAVRLCTRKFFRSRILDRKQFVLEVIXIGRAIVSKAELKERLPRR

SEQ ID NO: 343595 - protein, 43 aa, Zea mays
  Clone ID: MRT4577_76520C.1.pep
PLAPQDASCNPYTLRTLSGRAGVPTIENTEHEQHCTRGQPGCC

SEQ ID NO: 343596 - protein, 189 aa, Zea mays
  unsure (1)..(189): unsure at all Xaa locations
  Clone ID: MRT4577_76521C.1.pep
MGRRPARCYRYCKNKPYPKSRFCRGVPDAKIRIFDLGRKKAKVDEFPLCGHMVSDAYEQLSSEALEAARICANKYMVKSCGKDGFHIRVRLHPFHVIRINKMLSCAGADRLQTGMRGAFGKPQGTVARVHIGQVIMSIRTKLQNKEHVIEXALRRAXFKFPGRQKIHISKKWGFTKFNADEFEDMVAEK

SEQ ID NO: 343597 - protein, 322 aa, Zea mays
  unsure (1)..(322): unsure at all Xaa locations
  Clone ID: MRT4577_76522C.1.pep
MEVCCCSTSSSVLTAGGRGAAARRLAAPAARWGAAGYGRAVAAVLAHPLPRPAPRPATRRARRGGVGVVRAVFERFTERAVKAVVLSQREARGLGEPAVAPSHLLLGLVAEDRSSGGFLSSGINIERAREECRGIAASARDADSATATSRPGSSGLDTDVPFAAPTKQVFDVAVVLSKNMGSSFVSPEHLAIALFSLDDPTTNNLLRSLGADPSHLASVAVDRLQAELAKDGRDPAEPSXQSSKESPXAAGRSAFSQSLTKKKDKGALDQFCLDLTTQASGGFIDPIIGREEEIERVVQIVCRRTKNNPILLGEAGVGKTAI

SEQ ID NO: 343598 - protein, 108 aa, Zea mays
  Clone ID: MRT4577_76523C.1.pep
PFTHPPPDDAANHGARVRLTRARAHHYTSGIRRPPAVPTDSRGTKRHGAGAQADGRGGNHHQLQRATRHDTERDHAPDTKDPTKTQQARTGHHKADLTKETHTTKTQK

SEQ ID NO: 343599 - protein, 51 aa, Zea mays
  Clone ID: MRT4577_76524C.1.pep
VATGQLYVKSDVYGFRVVLLELLTGLRAHQLNPATQQHNLVEWAPAYLFGR

SEQ ID NO: 343600 - protein, 57 aa, Zea mays
  unsure (1)..(57): unsure at all Xaa locations
  Clone ID: MRT4577_76525C.1.pep
LIWNPGXHINYKILGFIKGYIRTFNLACIDHRGTPXHAARTCTLETDDXDICWGIAY

SEQ ID NO: 343601 - protein, 30 aa, Zea mays
  unsure (1)..(30): unsure at all Xaa locations
  Clone ID: MRT4577_76526C.1.pep
FQDRCAPLYLEPXQPSISEVLHQKLSNSVA

SEQ ID NO: 343602 - protein, 90 aa, Zea mays
  unsure (1)..(90): unsure at all Xaa locations
  Clone ID: MRT4577_76527C.1.pep
MVSXKXQKXLAASXLKCGKXKVWLDPNEVRXIXXANXRQNIRKXVKDGFIIRKPQKVHXRSRARRAHXAKQXGRXXGYXSAGYRELAPTR

SEQ ID NO: 343603 - protein, 214 aa, Zea mays
  unsure (1)..(214): unsure at all Xaa locations
  Clone ID: MRT4577_76528C.1.pep
PRRGGLCTTDQQPRRLLGHGHQVPCGAGACGRGVRARMGVGGXGAPAHXLCGRXRVVAPLLCASEGGRRMASTLFPVACCDYQASSQRRDGGGRWIRGAGARSGGTTPSLLPLVASLLSPRLGCPAGRIASFGLVAVATSSGSAGAAGGGLTASAGGGGVALFSAAGARRGGSRAGRRASSSWCWGSGVWDGSGPLVAGSSLGSWWWRLRRRWR

SEQ ID NO: 343604 - protein, 211 aa, Zea mays
  Clone ID: MRT4577_76529C.1.pep
MGLGGAALKFGSTAIYALEFCCAAIVLGIYSYFLAVQADRDVNIPVWQQAVTGLSGAVVLYTIFAVLLTCCIGGKTMFAMLAILFNILCCGAMIAIAVLTRDGASSCSGNVKTPLGNGPARSKQGFGSNGQGNQITYSASLGTTCRLNTACFAVAIIGAFLFLLSALLQVALMRHHKKEKRFGPGPSNGYTKGSRHEVLAAQEGSQDPLAA

SEQ ID NO: 343605 - protein, 97 aa, Zea mays
  unsure (1)..(97): unsure at all Xaa locations
  Clone ID: MRT4577_7652C.1.pep
SPPPAFPCFAPHNVASAPPPXKKAYXLXPLLRREEXXPPTDPHXGVPHQSHGLLGSLRLSXVYPXSPPFRGWESPPPPPXXPXSVXXFPPPPLXLPL

SEQ ID NO: 343606 - protein, 218 aa, Zea mays
  Clone ID: MRT4577_76530C.1.pep
MHHRFAGLVPTARPALPPIHGGVVGRSYPPVHRSLALRLAPFASASVRRACRPLAVSAQSTSLRPEKFFEVEMKVRDYEIDQYGVVNNAVYASYCQHGRHELLESVGISADAVARSGESLALSELNLKYFAPLRSGDKFVVKVRLAGIKGVRMIFDHIITKLPNHELILEAKATAVCLNKDYYPTRIPRELLSKMQLFLPVDSRGSNEDVNNRNNSCN

SEQ ID NO: 343607 - protein, 137 aa, Zea mays
  unsure (1)..(137): unsure at all Xaa locations
  Clone ID: MRT4577_76531C.1.pep
PAGITPPPPPQPIPNPRSGGSPPCCGLLSSGPVHRHGHWHARRRCNGAAPSAAMPTSKHRERQXPNPAKEVTPSSTSPPSDLPKPPPAPSSTSPSRSAPVEQPATTPPTGPGSASIAPXRRSPRKPRRAGCGACCSG

SEQ ID NO: 343608 - protein, 98 aa, Zea mays
  unsure (1)..(98): unsure at all Xaa locations
  Clone ID: MRT4577_76532C.1.pep
MSAAIGEGCMMDLQTTTTTLQEVKGLATTDRLIVDKPAFTLADLKKGIPPHCLQRSLIRSCYYLGHDLIIPERILFSSLPVIPELPXNXLKVSAWPLY

SEQ ID NO: 343609 - protein, 65 aa, Zea mays
  Clone ID: MRT4577_76533C.1.pep
ACGMNSSSPLRPGLTLLEELNLYTAVPNEGYLPLRLPLLLLSLFTCQIQFYSQDANSNKVQIYVT

SEQ ID NO: 343610 - protein, 527 aa, Zea mays
  Clone ID: MRT4577_76534C.1.pep
MQLAALCTDPVVLCSAFLCLLLHVALRSLLHPPSAASSSGRRGQLPPGPPGLPILGALPLVGPAPHAGLAALARKYGPIMYLKMGTAGVVVASSPRAARTFLKALDARYANRPAVASAADITYGRQNMVFADYGPKWKLMRKLASVHLLGARALADWACVRRGEAGHVLRGVAEAAAAGRPVVVPELLVCALANIVGQITVSKRVFDAQGDDSNRYKDMIVSLLTGTGMFNISDFVPALARLDLQGVQAKLRRVHRQFDGLITKLLAEHAATAADRARQGRPDFVDRLRATMDAGAAADDESGETITEVNIKGLIFDMFTAGTDTSSIIVEWAMAEMLKNPSVMARAQEELDRAVGRGRRLEESDLPGLPYLQAVCKEAMRLHPSTPLSLPHFSLDACDDVDGYRVPANTRLLVNVWAIGRDPEAWERPLDFRPERFLPGGGAEKVDPLGNCFELIPFGAGRRICAGKLAGMVFVQYFLGTLLHAFDWRLPDGEEKLDMSETFGLALPKAVPLRAVATPRLVPEAYA

SEQ ID NO: 343611 - protein, 115 aa, Zea mays
  Clone ID: MRT4577_76535C.1.pep
RRRGRPRARAGRGPGRCANPVGPRCAGRPRPRRQGPRPRAVRPPGPVRPSGSCQPPGPEPRQAVRPRVVLTTAAKATPTAPGLRSRASDRGCAAEEQRRPWGPTRAPGRTRGGRG

SEQ ID NO: 343612 - protein, 85 aa, Zea mays
  Clone ID: MRT4577_76536C.1.pep
SYRILSCEPLLNKGGGSYKSCEIHMEWLVSYEFWRNFTKRLNLMESFLCVTVSSNSCVFLSAPSKHSVSCVFSIHRIQDVRALYS

SEQ ID NO: 343613 - protein, 338 aa, Zea mays
  unsure (1)..(338): unsure at all Xaa locations
  Clone ID: MRT4577_76537C.1.pep
MVFSSLPIFLDPPNWGQMQMQMQPPLQCLLGSGGGSDHHHLMPPPSGLAPLPGGPADTAASAPXEASRPPRSXQAAAGAGAGAQPRPVVSMAERARLARVPLPEPGTLRCPRCDSTNTKFCYFNNYSLSQPRHFCKACRRYWTRGGALRNVPVGGGCRRNTKRSSKKSSRGGGAGATAATSSSSTTSTSTTATTTTTTSAAMAAAEAIAGMQAQLPHLGLPPAAAAAALEASLEGYHHYLPLQMQPQFLQQAGLHGYHFADDGTGVLAADGFPRGVVASGLLAQLAAVKMEEHGSNGGGAIAAHHEQQSYWPGSTGGGGGWPVEFLSGFSSSSSGNVL

SEQ ID NO: 343614 - protein, 65 aa, Zea mays
  Clone ID: MRT4577_76538C.1.pep
HIPLVVARSTKHAAPKRWHPSYQLHTIAAIHTNLLLTKPSRHSNQHTHHLVVALLLRFLNELIVQ

SEQ ID NO: 343615 - protein, 94 aa, Zea mays
  Clone ID: MRT4577_76539C.1.pep
VFLPREDHLFRKVHYLPFLPSTEDVYDCRVEHWGLDEPLLKHWEFDAPSPLPETTENVVCALGLTVGLVGIIIGTIFIIKGLRKSNAAERRGPL

SEQ ID NO: 343616 - protein, 88 aa, Zea mays
  Clone ID: MRT4577_7653C.1.pep
MAPPGKAIGAGAANKATSRSSKAGLPFPAGRIARFLKAGKHAEGVGAGAAATVGADQESPGAAARGRGGNGDGGRGRGGRRGGGGGAG

SEQ ID NO: 343617 - protein, 56 aa, Zea mays
  Clone ID: MRT4577_76540C.1.pep
HSGSTLANMLSDQWVAQYFSPSLTLLDSYQQAAAYLRLCIPHCITHNTSSSVTVAR

SEQ ID NO: 343618 - protein, 62 aa, Zea mays
  unsure (1)..(62): unsure at all Xaa locations
  Clone ID: MRT4577_76541C.1.pep
SNRNKSDRLFVSISRDVSIWCLTNLCVPVSYLYPXSPSFSXFSLIFFFXRXAPYLLSXSYPL

SEQ ID NO: 343619 - protein, 37 aa, Zea mays
  Clone ID: MRT4577_76542C.1.pep
QVSLEVIEAVQELHPLGGTANQSCDSCAVCHLHKCSR

SEQ ID NO: 343620 - protein, 279 aa, Zea mays
  unsure (1)..(279): unsure at all Xaa locations
  Clone ID: MRT4577_76543C.1.pep
MGRAPCCEKMGLKRGPWTPEEDKILVAHIQSFGHSNWRALPKQAGLLRCGKSCRLRWINYLRPDIKRGNFSKEEEDAIITLHEQLGNRWSAIAARLPGRTDNEIKNVWHTHLKKRLEPTTKQLEQEQHGAHAGGDAARKRSRPKRAGARXKTTTAAVAPATTAPASPERSAASSSVTESTEQEQGNTGTSSPGFPKEESFTSSSEAAEEFQFDDTFWSETLSMPLDSFDDVPTEPCSSGAFGDVAASSSSSSVGADADLDYWLGVFMKSGDAHQQLPQV

SEQ ID NO: 343621 - protein, 98 aa, Zea mays
  Clone ID: MRT4577_76544C.1.pep
DVLIGLLFLLGSPVTLLTCEAAGTSFPVNIWPKPTSMYWADRTRPSRCRRRSTSSSRRQVTRTSSRQRTLLQAAVPGDVPDHRSHAVNFHSGHALETL

SEQ ID NO: 343622 - protein, 94 aa, Zea mays
  unsure (1)..(94): unsure at all Xaa locations
  Clone ID: MRT4577_76545C.1.pep
EXXGSDPDAVSRQTKWRPTIKARSKKXSSATGVVLRRSSMRCXDAGASRRNGLSPAWRCRVTLDAHWRSSSRATRTQNVLGEKGRRIRELTSVV

SEQ ID NO: 343623 - protein, 108 aa, Zea mays
  Clone ID: MRT4577_76546C.1.pep
LPMGNGPKNLQQQLLQHQFVPQIGPAFFQQVGANPFASLEQFFPFNQLIVWNFGGVLQQGHQFFNPLAVGNPLVGAFLQQQQLLPNNQFFFMNPPLLGQQPIVGGALF

SEQ ID NO: 343624 - protein, 96 aa, Zea mays
  Clone ID: MRT4577_76547C.1.pep
MPERSAARERGGSTTANMREIRHIQGGQCGNQTGAKFWEGGGGEHWGDSTGRYCGTCSKQAGLERSRGYYNEAGGGRDEPRAEPTDPEPGTMEAMR

SEQ ID NO: 343625 - protein, 98 aa, Zea mays
  Clone ID: MRT4577_76548C.1.pep
RRCCRRLVFFAASSADTVCSPRMSRNFCIANLPSRYARDGSERWRNTADIPILAAEILTRSGKREHYSRTVWSSIGGVVAGIPGCTGSDGIGLRRSDS

SEQ ID NO: 343626 - protein, 58 aa, Zea mays
  Clone ID: MRT4577_76549C.1.pep
LPRGGGLIFGVGMAFVIWSARVCTRLLAELASSGDEHRGLIAYACWLVYMLFSLLVIF

SEQ ID NO: 343627 - protein, 53 aa, Zea mays
  Clone ID: MRT4577_7654C.1.pep
GYTKAKKDPPCFMVIVTKKYLQGMSYIVSFIPIPFSSSFILFSKLQHGHYFSY

SEQ ID NO: 343628 - protein, 50 aa, Zea mays
  Clone ID: MRT4577_76550C.1.pep
KKLKKKKKKKKKKEKKKKKKKKKKKKKKKKKKKKKKKKKKGGRVFRRKNF

SEQ ID NO: 343629 - protein, 93 aa, Zea mays
  Clone ID: MRT4577_76551C.1.pep
SHKLRANKNSKYTSAIDIWSIGRIFAELLTERPLFTAKNVEHQLDIITDLLATTSSETLSRILNEKARIYFICMLKKYSLPFTHKFIHSDPIA

SEQ ID NO: 343630 - protein, 70 aa, Zea mays
  Clone ID: MRT4577_76552C.1.pep
STSSDGPSSPPPSFVYLLGPLASRTSMASSPSIPMFLHRFLSYRFCVCVCARARAGVGGRGIIDCYSTLQ

SEQ ID NO: 343631 - protein, 45 aa, Zea mays
  Clone ID: MRT4577_76553C.1.pep
TKQRERAPCLPFVYNTFNFYLHKFTTKQKFINKRIPLFKKVLTKY

SEQ ID NO: 343632 - protein, 640 aa, Zea mays
  unsure (1)..(640): unsure at all Xaa locations
  Clone ID: MRT4577_76554C.1.pep
MAAAAAAAAAAPESYIGSLISLMSKSEIRYEGVLYTINTEESSIGLKNVRSFGTEGRKKDGQQIPASDKIYEYILFRGSDIKDLQVKSSPPSQSATLHNDPAIIQSHYPHPASLSTSLPSAASTIGANPTSQNAPSLIQMPPPFQGNLPPYQSGTSLQSWNSAPMPSSANGTGLTMPPMYWPGYYTPPTGFSHLQPPLFLRPPHSLAVPQVLQLPVQYPGLGSLPAGFPNMPELPSFLQPGNSNSLNQTSGVPTSVSTPASLSTSQTESSRSQLPNKFSSDSASVFSVGFTPPSVTPSVSTVEPSIPVSAVLPSLVNSKPVALPDSTMPSLSTAKPVIVPDASVLTYLSSQPPSANDVSPVNAAEQVPLVTPGQLLSTTSSTIISSHALQTASAVDLSSKAAPSTVPSSQATLFEGSTTQVASSSILSQQVAMTNESKVXPSSVSGRQNKXVGRPGXGAPIXEPKSVFQKPVGVSSYVRYNSRGRGRGRGRGQSHPITKFTEDFDFMAMNEKFNKDEVWGHLGKRIGQLNDEPNGYEDDVIEDDEISPRKPEAKAVYVKDDFFDSLSCNQIDNGGRNGRVKFSEQRKIDTETFGDSARHRPMGIRGRGPRGGARGRGYYGIRGYGYTGRGRGYSYPNHQP

SEQ ID NO: 343633 - protein, 81 aa, Zea mays
  Clone ID: MRT4577_76555C.1.pep
CNCCSSVPPRLSLIVPRRLRFASPATMSSFAGPLAGSSYLPANKSGCHTTRWLTGWKWVRRRNSCKRPGAQRRRRLCRVAL

SEQ ID NO: 343634 - protein, 214 aa, Zea mays
  unsure (1)..(214): unsure at all Xaa locations
  Clone ID: MRT4577_76556C.1.pep
MAAAAAAAAAAPESYIGSLISLMSKSEIRYEGVLYTINTEESSIGLKNXDLQVKSSPPSQSATLHNDPAIIQSHYPHPASLSTSLPSAASTIGANPTSQNAPSLIQMPPPFQGNLPPYQSGTSLQSWNSAPMPSSANGTGLTMPPMYWPGYYTPPTGFSHLQPPLFLRPPHSLAVPQVLQLPVQYPGLGSLPAGFPNMPELPSFLQPGNSNSLN

SEQ ID NO: 343635 - protein, 183 aa, Zea mays
  Clone ID: MRT4577_76557C.1.pep
MAAAAAAAAAAPESYIGSLISLMSKSEIRYEGVLYTINTEESSIGLKNVRSFGTEGRKKDGQQIPASDKIYEYILFRGSDIKDLQVKSSPPSQSATLHNDPAIIQPVGVSSYVRYNSRGRGRGRGRGQSHPITKYTEDFDFMAMNEKFNKDEVWGHLGKRIGQLNDEPNGYEDDVIEDDEISP

SEQ ID NO: 343636 - protein, 68 aa, Zea mays
  Clone ID: MRT4577_76558C.1.pep
EHKKHKHRHKDRSKDKDKDKDKDKKKDKSGHHEKKRKHEGTEDSVDVHKHKKSKHKSSKTDEMGNGVS

SEQ ID NO: 343637 - protein, 148 aa, Zea mays
  Clone ID: MRT4577_76559C.1.pep
VVGRPGNKEPLLPEPKSVFQKPVGVSSYVRYNSRGRGRGRGRGQSHPITKFTEDFDFMAMNEKFNKDEVWGHLGKRIGQLNDEPNGYEDDVIEDDEISPRKPEAKAVYVKDDFFDSLSCNQIDNGGRNGRVKFSEQRKIDTEVFTDRH

SEQ ID NO: 343638 - protein, 80 aa, Zea mays
  unsure (1)..(80): unsure at all Xaa locations
  Clone ID: MRT4577_7655C.1.pep
GPGGAARAARGGGRGGGRRGGGGGGAGQEGDHERAPEAAGRSGEQGEDSHPPPPKISQCAQLVRNKHXXSKSFKINQDCA

SEQ ID NO: 343639 - protein, 252 aa, Zea mays
  Clone ID: MRT4577_76560C.1.pep
MPPPFQGNLPPYRSGTSLQSWNSAPMPSSANGTGLTMPPMYWPGYYTPPTGFSHLQPPLFLRPPHSLAVPQVLQLPVQYPGLGSLPAGFPNMPELPSFLQPGNSNSLNQTSGVPTSVSTPASLSTSQTESSRSQLPNKFSSDSASVFSVGFTPPSVTPSVSTVEPSIPVSAVLPSLVNSKPVALPDSTMPSLSTAKPVIVPDASVLTYLSSQPPSANDVSPVNAAEQVPFGNPWATSVNYFLYNISSHALQT

SEQ ID NO: 343640 - protein, 84 aa, Zea mays
  Clone ID: MRT4577_76561C.1.pep
ETYTDNNVLKTTRLASRREAGASTSANLKSRRFTLRAMQHLHCHCNQKKGLPESLIAPSGFLGEFSQKKMQKNQQNCDSFHVLN

SEQ ID NO: 343641 - protein, 61 aa, Zea mays
  Clone ID: MRT4577_76562C.1.pep
LHWLYISKEVYWLQDLLLMKNQGSTMQMSGLERDIDMLRGAVLEVDMKIKKGEEESEDVCN

SEQ ID NO: 343642 - protein, 42 aa, Zea mays
  Clone ID: MRT4577_76563C.1.pep
LIRDLTEGTTDHGLLVERCWVCQNKGRPTPAIEAAGKQWSQA

SEQ ID NO: 343643 - protein, 105 aa, Zea mays
  unsure (1)..(105): unsure at all Xaa locations
  Clone ID: MRT4577_76564C.1.pep
YRNGSQKLRILMLLVLSASAVTXTIXPQCSQAPITCLLPPYLSPWVYSVRENQSVKPYRIQQAIGEQLLPXITMEHGNKPSNLVQRWHLVLLLITKKIEYCHPIQ

SEQ ID NO: 343644 - protein, 63 aa, Zea mays
  Clone ID: MRT4577_76565C.1.pep
LETKPPMDCLLHELCLASNKFWRSGEKSNERVAEFHLLRQVWRYASLTKRLWALAATNISTEL

SEQ ID NO: 343645 - protein, 107 aa, Zea mays
  Clone ID: MRT4577_76566C.1.pep
AACCQAAPLSGLLPRADAVCVACLAACSPGVLSLLAGGAGLVRLALFACVHDVACQLARLSPSLSRAPRLPPSPLLVRAALGLLSGAAGRGPGLTSAALGSPGCGSI

SEQ ID NO: 343646 - protein, 72 aa, Zea mays; identical to SEQ ID NO: 337031
  Clone ID: MRT4577_76567C.1.pep

SEQ ID NO: 343647 - protein, 154 aa, Zea mays
  Clone ID: MRT4577_76568C.1.pep
QHLGLVAERIKRAVACVAEARVRSVVYYVQLESGKGYQAACGQFMPESDLCGRQMARHAHAATLSSARTRQVRPHPRAIRARARVPEHLQEGLLRGVPVTRPRPAMLRSPIAMEWDCEAIVMPRRCGISRGVPCNTKSYCMFRECKSMLSWVCY

SEQ ID NO: 343648 - protein, 72 aa, Zea mays; identical to SEQ ID NO: 337031
  Clone ID: MRT4577_76569C.1.pep

SEQ ID NO: 343649 - protein, 159 aa, Zea mays
  Clone ID: MRT4577_7656C.1.pep
MSTAQELSNISSDLIWEIVRDNNCFSAKSKKNGGVQFSRDPLNLTNKTSRKHAGFVNDKALGISSGEKGAIVVTSKKAQPNKPAQNLVKTSYSGSKSNRKTYQAVANQAAKNGYRADLRSAAVERASALKKSNKPVKPEPEQKLRGNKAKKAAAAAEEN

SEQ ID NO: 343650 - protein, 82 aa, Zea mays
  Clone ID: MRT4577_76570C.1.pep
EGGEMEQPSPLVSTPSCRAGQVSVARLRSSSIHAGRDVVKIAGFLNSSPELQVHLLIKRPRALRHLLVAELRRHRQPRPKTS

SEQ ID NO: 343651 - protein, 76 aa, Zea mays
  unsure (1)..(76): unsure at all Xaa locations
  Clone ID: MRT4577_76571C.1.pep
VKYCELSLTIVAHKKLGPRPNPPTEIWEYNKYVKIDLLHLVILLTKTEFIFSFLLGHLTHMTMRHQIFCLEGXVTQ

SEQ ID NO: 343652 - protein, 116 aa, Zea mays
  unsure (1)..(116): unsure at all Xaa locations
  Clone ID: MRT4577_76572C.1.pep
GRSSCSLARPSPVAWCSSPPSFXLSPSWSSCLSVFFRALPFRLFPVVPFLCCLVVLGLVLSVASXVRPSPVSLVVARPVLWCRGVPSAGVSSLRAGFLSRLLPAGVRFPCVFCRRS

SEQ ID NO: 343653 - protein, 108 aa, Zea mays
  Clone ID: MRT4577_76573C.1.pep
ADIPMDEQHAARDEDFPLSTRTRAVAKCLHQLFLDQKSQEQSNVPVTLGQALEGSKRKTTARFFYETLILKSRGLIDVNQEKPYENITISATPQLNAMLQNPAPPSTS

SEQ ID NO: 343654 - protein, 101 aa, Zea mays
  Clone ID: MRT4577_76574C.1.pep
YASVNKESADGADAPKEGTRRTTTKAGTPVPSTTTQENLTTIQGGHRRRGHCCCLCRLHLAWLSYETPKTLLMLAAMPQRTQQQPRIAGVTGVALNSQCRG

SEQ ID NO: 343655 - protein, 119 aa, Zea mays
  unsure (1)..(119): unsure at all Xaa locations
  Clone ID: MRT4577_76575C.1.pep
MACGTLSLLALLALFVSATNAFIIPHCSLAPSAIFPHFLPTFSXLGFEHPCVQAYMLQQALAVCVLDQPIAQLQQQSLAHLTIHTIASLLQHALFHLSVLNPIAYLQQQMLASYPLALA

SEQ ID NO: 343656 - protein, 122 aa, Zea mays
  Clone ID: MRT4577_76576C.1.pep
EKRGKALYKIVVDHRLQTSASTTQQILQQHRGNKERKPNTSHVKAVETTIVERRLALRLKITYSSTNLGLCSSRPPLVATRVPLTYGHEQGLKEVRGIATITYRKRRSPFEKTETPDGASGL

SEQ ID NO: 343657 - protein, 108 aa, Zea mays
  Clone ID: MRT4577_76577C.1.pep
QRLKGWRRGYLTTIQGGHRRRGHCCCLCRLHLAWLSYETPKTLLMLAAMPQRTQQQPRIAGVTGVALNSQCRGWRLRSCSNQGSSAGYGGQLWRHNLEDVEATRGRGC

SEQ ID NO: 343658 - protein, 79 aa, Zea mays
  unsure (1)..(79): unsure at all Xaa locations
  Clone ID: MRT4577_76578C.1.pep
PSRKDGGKVITGEIIIAHSGPMLETHLLFXLGIMTLPKGRQRDPKFWSGLFAKAGFSQIPSSLKEIWIQVLPSKSNGEM

SEQ ID NO: 343659 - protein, 54 aa, Zea mays
  Clone ID: MRT4577_76579C.1.pep
GVGDCRMRVWVRQTYLSVRLCRAVVVTVSGGWSMEASAGTQDPGLRVAETLRSA

SEQ ID NO: 343660 - protein, 93 aa, Zea mays
  Clone ID: MRT4577_7657C.1.pep
LQIKRFNQEGAHTATHGEGRQEVANPPLMRKPTSEEKRERAPYIRTTEQKLPNRTPRRGETPKARDPGERKCMAEMAGRRCATWAAKTAASSP

SEQ ID NO: 343661 - protein, 135 aa, Zea mays
  unsure (1)..(135): unsure at all Xaa locations
  Clone ID: MRT4577_76580C.1.pep
PPPPPPPPPPPPPPXXPPPPPPPPPPPPPPPPPXPPPPPPPPXPPPPPPPPPPPPPXPPXXXFLFFXXXXXXXXXXXPXXXGAPGXSPPPPLFFVFVPAPLWCVVRARGSPPRPFLGPVRRRLSFGPPRLFPRRS

SEQ ID NO: 343662 - protein, 105 aa, Zea mays
  Clone ID: MRT4577_76581C.1.pep
MLALLDVIQRVESSETTWPARRQVVACAAVCWSWREVTKEVVKTLKECGRITFPMSLKQVFTFAEAYDFEDLESMVEEIAKAFKTKIMFIYVDTAEENLAKTIPH

SEQ ID NO: 343663 - protein, 53 aa, Zea mays
  unsure (1)..(53): unsure at all Xaa locations
  Clone ID: MRT4577_76582C.1.pep
RCXRGPCKNHSSLFMALNQKRPTGPGLERVGMCPRRQRHRPGNSSLQIKTGLG

SEQ ID NO: 343664 - protein, 132 aa, Zea mays
  unsure (1)..(132): unsure at all Xaa locations
  Clone ID: MRT4577_76583C.1.pep
CVYTPLALYTIRAQKNPRDTVRVLLGALSLLSLCESATYTHTSGGXCAXHTPPSFYIPAAAHVTPAVHLTSAEYLTPGVHLPARVHLPPGAYVPPPFYVPATLCLYYIKPPGSDSYPDTHICXCQNRHIKPR

SEQ ID NO: 343665 - protein, 120 aa, Zea mays
  Clone ID: MRT4577_76584C.1.pep
RARHYGVGYHLLGHLQERVHVVVVPAILPHSYGCCSPGQVSSSLTHSLLLIVGPVAIMSRMARPSYSSSDLVECSSIEPTSICKYPRACAACLFLHRRSSPGLGGPIDDGHDGAAQPTPT

SEQ ID NO: 343666 - protein, 42 aa, Zea mays
  Clone ID: MRT4577_76585C.1.pep
MGSLVNNIMVVGAVLAALVAGGSCGPPKVPPGPTIETNYNGN

SEQ ID NO: 343667 - protein, 50 aa, Zea mays
  unsure (1)..(50): unsure at all Xaa locations
  Clone ID: MRT4577_76586C.1.pep
YISSQKLCKAXVMLDGLNRGSQKLGIVSPKPGAISCSDGNQRPKRSQRNT

SEQ ID NO: 343668 - protein, 94 aa, Zea mays
  Clone ID: MRT4577_76587C.1.pep
VHLVTSQFQTWQAQVRLVSRRQVQKVELMYPSWFVVAHQELPEHVSPEIPFGRHSPILGIPSNPFRDNLPNVNKCRIGPFVHTPPYVGHEHGAL

SEQ ID NO: 343669 - protein, 58 aa, Zea mays
  Clone ID: MRT4577_76588C.1.pep
NGISGARYVMDSTFQYAQAPMKNTEPIQFNNVWSHYSKKDRPEKMDQKTSNQLKAEYR

SEQ ID NO: 343670 - protein, 80 aa, Zea mays
  unsure (1)..(80): unsure at all Xaa locations
  Clone ID: MRT4577_76589C.1.pep
MTRSGHPPDINKYMYKKPHIKLDANSVVIGTLGGFREFINMVRVRTVXVNVNVKAXIGMVVRRVNSVVMIEAVEPVAKYQ

SEQ ID NO: 343671 - protein, 112 aa, Zea mays
  Clone ID: MRT4577_7658C.1.pep
RNNPGWPPFRGFMGGQNNREKPFPKKRGGGFLFKFGDPQKSKNFGWETPQGVGTWGAPMLAVLKSRENSPRLIWPFLKRAPPPRGGKKKPFFPGGLQRPKGGRDPSLATSNL

SEQ ID NO: 343672 - protein, 70 aa, Zea mays
  Clone ID: MRT4577_76590C.1.pep
NGSLVFIALQNTPLQTDLVKKDPSSLRARQKRSRVILGHLTGESVNPCADSTLRSQAQRMPSVSHFSSFS

SEQ ID NO: 343673 - protein, 111 aa, Zea mays
  unsure (1)..(111): unsure at all Xaa locations
  Clone ID: MRT4577_76591C.1.pep
MRAPPPKKVFKTGPPPPPPXPPQGGRPPXPGPPXGRPIFGGSVPPKRAPRRGGAPXVKREPEPPPPGNGVGCTVIPPQKKKGGHPPPPGGVVKRGPGPFGPRQGGAKKPSV

SEQ ID NO: 343674 - protein, 258 aa, Zea mays
  unsure (1)..(258): unsure at all Xaa locations
  Clone ID: MRT4577_76592C.1.pep
LGTSRPAGEPFRTDVGAENLLPTNRVHGEERRGWVWNTLAPMKLHGAELAWNVTRCPTPLGEAGSDYQIVPLCFASGELKSPDHLLRNPLGQAPLLQDGDLYLFXSRAICKHPARKDQPHLLRERCLHEAAMGDGCIEVEGNXYTAALNPILFQVLICPMLGGSTDHKCAXDNLEKLXNELEVYKARLTQCEYLAGDFLNLTDLNHVSVTLCLIATPYASVLDAYTHVNAXRSALMERPPDLEVADLMKHLLERLPCQ

SEQ ID NO: 343675 - protein, 205 aa, Zea mays
  unsure (1)..(205): unsure at all Xaa locations
  Clone ID: MRT4577_76593C.1.pep
VAVVGAAVYEQLARAKXAIGRRWDAVGDLQRALDLKTLFLEAGSAELGNAYRDVAEAYAGVLDFDKALPLCSKALGIAERRFGEDSAEVAKLRRLLMSVYTGLGRHEEALAQIELAKVVYERLGLNVELSQAEIDGANIRILLXEXEEALNNIKRVMQRADKESEERALAYVTMAKILMSEDTVLDSKRCLGDRSGDHRCKGFHR

SEQ ID NO: 343676 - protein, 111 aa, Zea mays
  unsure (1)..(111): unsure at all Xaa locations
  Clone ID: MRT4577_76594C.1.pep
IVLAGRAGVAGPLVWVLVHRELPVTGAYVGVVGVLADAHERVVAACRCAAAVAGGVAGSSSVYGVASSAAGGTLVFLPRCLGCSASWALXWXGAPPTMYGPIRWGSGQIKS

SEQ ID NO: 343677 - protein, 180 aa, Zea mays
  unsure (1)..(180): unsure at all Xaa locations
  Clone ID: MRT4577_76595C.1.pep
MAESEDATAAEPGSGPPHEDEDALLARAHTVISRIIDRELDPNPRLLHTLATMCELHEARYLEXVSSGHNAEYAGQGAHXIGKLASLLRDNDEFYELVFCKFLSDTSYSVAVQAAAARLLLSCHSAWTPPYPHVFEDSIIDNIKKWVMKDPEASNECEWKYLGKKKKKKKKKKYSALLPL

SEQ ID NO: 343678 - protein, 48 aa, Zea mays
  Clone ID: MRT4577_76596C.1.pep
GGGFLETSALTPNRLLRDQSRVICTDKLAPHQVKIIMRRLFGDPHEIV

SEQ ID NO: 343679 - protein, 42 aa, Zea mays
  Clone ID: MRT4577_76597C.1.pep
LYFLYGIAVLWKCILQFHTYTVSINVTWVLMRTTNNCVATAV

SEQ ID NO: 343680 - protein, 71 aa, Zea mays
  Clone ID: MRT4577_76598C.1.pep
MGSTAGDVAAVVDEEACMYAMQLASSSILPMTLKNAIELGLLEVLQKEAGGGKAALAPEEVVAKMHEAPSD

SEQ ID NO: 343681 - protein, 72 aa, Zea mays
  Clone ID: MRT4577_76599C.1.pep
GCRGARGLVVTGVEEHHGTITAYIMSLVLDKKSVCISLYKDSVTSTGHVPAFWPVSLSVPAWHGLECGGFGK

SEQ ID NO: 343682 - protein, 132 aa, Zea mays
  Clone ID: MRT4577_7659C.1.pep
TNFGKKSHIQMPVSRGMGGVFFRTPPWWIALNPPHPRKTLTRPPPIFQFGNHNTNPLPVALDRFGQKKTGLFFWDTQTQDLQPRTLWGRALPGGRRRKKPGLALNGRTMFPPPGQCAFSTGETALGARGFTV

SEQ ID NO: 343683 - protein, 154 aa, Zea mays
  unsure (1)..(154): unsure at all Xaa locations
  Clone ID: MRT4577_765C.1.pep
IFKQNLEARQGGPGRRGGGRPRGRAPTPPAKRAKPQSGPPPPPXTKGPARPNKQPGNGGXRSQPTDQPRPPPNRPTPPRGPPTSPGGGGPATRTRLPGRGEPKGPGGRGQKKDGVLQGGHGQRGGRRKQTPGPHETQKRTNHLGWPKGGGQKQG

SEQ ID NO: 343684 - protein, 116 aa, Zea mays
  unsure (1)..(116): unsure at all Xaa locations
  Clone ID: MRT4577_76600C.1.pep
KKKNSNVPAGLFFQHAGHRXCLCQMQKLTLHTHASIFTMHFIIHVVHLGRDKIVDFHWNSSDPWTIVSVSDDGESTGGGGTLQIWRMSDLIYRPEDEVLTELENFKAHLASCAPRN

SEQ ID NO: 343685 - protein, 453 aa, Zea mays
  Clone ID: MRT4577_76601C.1.pep
MKERGGSRAAVDERYAQWKSLIPVLYDWFANHNLVWPSLSCRWGPQFEKATYKNRQRLYLSEQTDGSVPNTLVIANCEVVKPRVAAAEHISQFNEEARSPFVKKYKTIVHPGEVNRIRELPQNSKIIATHTDSPDVLVWDVEAQPNRHAVLGASESRPDLILTGHQENAEFALAMCPAEPYVLSGGKDKFVVLWSIQDHISALGDSSSSPGASGSKQSGKIANEKESPKVDPRGIFHGHDSTVEDVQFCPSSAQEFCSVGDDACLILWDARTGTDPAVKVEKAHSGDVHCVDWNPLDVNYILTGSADNSVRMWDRRNLGSGGAGSPIHKFEGHKAAVLCVQWSPDRASVFGSSAEDGFLNVWDHEKVGKKKNSNVPAGLFFQHAGHRDKIVDFHWNSSDPWTIVSVSDDGESTGGGGTLQIWRMSDLIYRPEDEVLTELENFKAHLASCAPRN

SEQ ID NO: 343686 - protein, 519 aa, Zea mays
  Clone ID: MRT4577_76602C.1.pep
MLSSPCSQSEAQSTGTASGDRSRPQASRFETPARSRSTAALSGSVPWEWEVPQVLSSRRRRPPVSEMKERSGSRAAVDERYAQWKSLIPVLYDWFANHNLVWPSLSCRWGPQFEKATYKNRQRLYLSEQTDGSVPNTLVIANCEVVKPRVAAAEHISQFNEEARSPFVKKYKTIVHPGEVNRIRELPQNSKIIATHTDSPDVLIWDVEAQPNRHAVLGASESRPDLILTGHKENAEFALAMCPAEPYVLSGGKDKSVVLWSIQDHISALGDSSSSPGASGSKQSIKTANEKESPKVDPRGIFHGHDSTVEDVQFCPSSAQEFCSVGDDACLILWDARTGTAPAVKVEKAHSGDVHCVDWNPLDVNYILTGSADNSVRMWDRRNLGSGGAGSPIHKFEGHKAAVLCVQWSPDRASVFGSSAEDGFLNVWDHEKVGKKKNSNVPAGLFFQHAGHRDKIVDFHWNSSDPWTIVSVSDDGESTGGGGTLQIWRMSDLIYRPEDEVLAELENFKAHLASCAPKN

SEQ ID NO: 343687 - protein, 36 aa, Zea mays
  Clone ID: MRT4577_76603C.1.pep
VGRLVCILCKRRSDLPTCMSQSQRFTSTVLPLHISI

SEQ ID NO: 343688 - protein, 157 aa, Zea mays
  unsure (1)..(157): unsure at all Xaa locations
  Clone ID: MRT4577_76604C.1.pep
MNTTRIVPTPDPYRFSPAAAMTTSEVLSTDVNPTQFYRSRASLRKTSKSVVLMMRLERAQSFIVRQLTGTISGERVLDMKNSXLMNLLLLGVISLFIVGMGVPYGDFFFADGSXNAGEDTYAKDKLGNDITVEAWLNTHGPNDRTLAXGIKGDPTYL

SEQ ID NO: 343689 - protein, 76 aa, Zea mays
  unsure (1)..(76): unsure at all Xaa locations
  Clone ID: MRT4577_76605C.1.pep
RNVQALHRAFNLCLHKGAARIFCGARALHGFTQGHGXSKQLVLHVSVGLFHFILQNHKFMRFDTLAHKLGHFFFFI

SEQ ID NO: 343690 - protein, 29 aa, Zea mays
  Clone ID: MRT4577_76606C.1.pep
TKGLSKESNLTLLKFCPCWVYLTIVTNIS

SEQ ID NO: 343691 - protein, 51 aa, Zea mays
  Clone ID: MRT4577_76607C.1.pep
TQKAAAYLVGGTCGPRHTKSRPTSTLRPKKTRHEHCILYLMFGLFHIIYTF

SEQ ID NO: 343692 - protein, 193 aa, Zea mays
  Clone ID: MRT4577_76609C.1.pep
MAKDGAGGGPDWNGLLKWSLAHGSDGTNPPRALSEEDRKWFMEAMQANTIDVVGRMKEIAQVMKTPNDVLQSHGVTPENIEDMLDELQEHVESIDMANDLHSIGGLDPLLGYLKNSHAGIRAKAAEVVSTVVQNNPKSQQLVMESNGLEPLLTNFRSDPSTTARTKALGAISSLIRNNQSGLAAFRLGNGHAA

SEQ ID NO: 343693 - protein, 291 aa, Zea mays
  unsure (1)..(291): unsure at all Xaa locations
  Clone ID: MRT4577_7660C.1.pep
GPSRPAGQARADDALKLLKSMLCKPDTISFNAVLKCLCKAKRWYDAVELVAKMLKKDCRINEMTFNILIDSLCQNGQVKDAIEVFELMPKYRCMPDIVTYSSLINGFSEQGLDEMAFDLFRSMPCRADIFSYNATLKGLCMAARWDDAGELIADMVTEDCLPNEVTFNILISSLCQKGLVNRAIDVYEQMPKYGITPDIFTYNALINGYSEQGRLDDALKFLSTMPCEPDTISYNSIXXGLCRAERWKDAEKLVTEMLXKDCTPMXSTFKMLIIIYFNRVVDGILNSWSYA

SEQ ID NO: 343694 - protein, 33 aa, Zea mays
  Clone ID: MRT4577_76610C.1.pep
RLLIQAICDTLRRFFHYARANNDGQCCCSPIAP

SEQ ID NO: 343695 - protein, 358 aa, Zea mays
  unsure (1)..(358): unsure at all Xaa locations
  Clone ID: MRT4577_76611C.1.pep
MNVLNVDCYCXKKQTAMNMFNDKTKGRFIFLIDSRACGPSIKLSSVDAIIIYCSDWNPMNDLRALQRVSMESQSEPVPIFRLYSSFTVEEKALILAKHDHILDSNIVNITPSLSHCLLSWGASFLFNRLEELQQHSYSNVSGDELFMDNVDLEFLTKLLSKVELRTESGNTAISQAYLCGSFYSRAIVVAGEREGIPSVDGDLPKFWAYWVSLLNGRSPQWQYISEPVQRSRRKINNMEQQLKNTDKQLKITTEETDEARVKRRRIGEIMDSSAIDSPGKNKDTILPGNNTPPSSHQISVEDTWQELERSNLHATQKGLHVQLKPEISKLYKLLQLPVLLHIFNSIAPSMTSCSLFIF

SEQ ID NO: 343696 - protein, 91 aa, Zea mays
  Clone ID: MRT4577_76612C.1.pep
VNQFKELLHGMYGRTLSLVMQIDPFTPSCPCHASVGISSSGRAGESSYCGCTCAWRALQCVDPQIKTPKHMASATGLKQSPNKARDRRKCV

SEQ ID NO: 343697 - protein, 131 aa, Zea mays
  Clone ID: MRT4577_76613C.1.pep
ANIRDVSKHRIRVTCNYRIISCCGNIRTQSMAGSYNPGRIIKRVVIIHRSSIRSDSITIKTRAIRSVHEQDPCARGLMVSSCRGLAVAEHLTMIAQQTPFFIFFCTNYGFEDMIGASRYRDRGRQKGTQAY

SEQ ID NO: 343698 - protein, 130 aa, Zea mays
  unsure (1)..(130): unsure at all Xaa locations
  Clone ID: MRT4577_76614C.1.pep
HASGKXKKNXSMAAAHNASTXXPXXSTRRXARRLDNRXWNPGXADYVXGXNAXXXRPXEESRXSXQDSLPEENHDSGNEEAGRXRSRPNPARSEALXRXSARRKKKSPEXRRGASTPRADXGRKPERARG

SEQ ID NO: 343699 - protein, 43 aa, Zea mays
  Clone ID: MRT4577_76615C.1.pep
CSTLIDFRSLHCPHSFAYLAKHAVIGARCVSFPGSKSVTFPFY

SEQ ID NO: 343700 - protein, 467 aa, Zea mays
  unsure (1)..(467): unsure at all Xaa locations
  Clone ID: MRT4577_76616C.1.pep
MSDRQPSEEPEEQVDLEGDDDGMDDDDAGYRRRGSRDDSEEPEEDDDNDERHGEADXRRRDGAGAXGSKGGDDTGKGPDVAGGGPEDEEERSKWDDMLALPPHGSEVFIGGLPRDITEEDLRELCEPLGEIYEVRLTKDKDTKENKGFAFVTFMDKEAAQRAIEDVQDREFKGRTLRCSLSQAKHRLFVGNVPKGLSEEELTNTIKGKGPGVINIEMFKDQHDPNRNRGFLFVEYYNHACADYARQKLSSPNFKVDGSQLTVSWAEPKGSTDASSAAAQVKTIYVKNLPENVSKEKIKDLFDKHGEVTKIVLPPAKAGHKRDFGFVHFAERSSALKAVKGSEKYEIDGQVLEVSMAKPLADKKPDHSHRPGGGPNYPLPPYGGGGYMGDPYGAYGGGGPAYNQPMIYGRGPAPAGMRMVPMVLPDGRLGYVLQQPGGMPPPPPPRRGSDRRDSGRGGEGHSRRYRPY

SEQ ID NO: 343701 - protein, 141 aa, Zea mays
  Clone ID: MRT4577_76617C.1.pep
KGGKKKIHPFPKGKKGASGGGERRKLAVPEKKGEEKNLWDKTTGEPATGMYKPEQKSIGFTSKRKRRNPPKKPKGVTRTKNTGENIYRLKKPLQGFKNRQGVFQPEKIGGPEGGPPNSGYLGEKKGGTLKPGGKNPEERVS

SEQ ID NO: 343702 - protein, 114 aa, Zea mays
  Clone ID: MRT4577_76618C.1.pep
MRRQFFSDDKPDHSHRPGGGPNYPLPPYGGGGYMGDPYGAYGGGGPAYNQPMIYGRGPAPAGMRMVPMVLPDGRLGYVLQQPGGMPPPPPPRRGSDRRDSGRGGEGHSRRYRPY

SEQ ID NO: 343703 - protein, 467 aa, Zea mays; identical to SEQ ID NO: 343700
  unsure (1)..(467): unsure at all Xaa locations
  Clone ID: MRT4577_76619C.1.pep

SEQ ID NO: 343704 - protein, 148 aa, Zea mays
  Clone ID: MRT4577_7661C.1.pep
MMLATHHSITHRLHSIPPPGSGHRRRLHSTARGAVRRDDATTESAGEGTSSSESLRVSKPTATTAPAGFSLPKDYRHTLFSSECLEVLGLVDLESLRKRPRLTIGVTVKASVVLPVLVVLAVLYLSDVTKGVVDWTHHHLENDDDVGD

SEQ ID NO: 343705 - protein, 106 aa, Zea mays
  unsure (1)..(106): unsure at all Xaa locations
  Clone ID: MRT4577_76620C.1.pep
AANPQQFLPCTQLAALNFGAQXQLFQLLPFSQLAYVSPAAFLTQQQLLPFHLHAMPTAGTLXHRQQLQPFNRRALTNPTVFPQQPIIGGAHFRLLMSNSSKMKFLE

SEQ ID NO: 343706 - protein, 72 aa, Zea mays
  Clone ID: MRT4577_76621C.1.pep
AAPFFFFFLEYASSVLDPAAATAAEERKKSRCTCGHQVHHHHSCLPYQQQYPMLLLTFLSPPGYHKSTEFWY

SEQ ID NO: 343707 - protein, 58 aa, Zea mays
  Clone ID: MRT4577_76622C.1.pep
NSVCFFSNIVAFHIYICRQLEIWILRYLICLSLVYVVCAILINAIVLVQEKAHRALFS

SEQ ID NO: 343708 - protein, 39 aa, Zea mays
  Clone ID: MRT4577_76623C.1.pep
GVAVRFCDRVRGRSAFGLGVGPLLFALAAPAIKPDYIRK

SEQ ID NO: 343709 - protein, 88 aa, Zea mays
  Clone ID: MRT4577_76624C.1.pep
SPGLRTGGFPPNLTPRGSSGGGAPPPGAGEFWKRGFKEFPPLFKKKNICFPGISNKWGFGGEFPPRFSPPVTWAQPKNYHCYNNGFSP

SEQ ID NO: 343710 - protein, 60 aa, Zea mays
  Clone ID: MRT4577_76625C.1.pep
PNLAAETTLAGRDRPVWVARFSQLAAQPGRDRAVAVAVAPAPGPARVAVAAGGIAKLGEK

SEQ ID NO: 343711 - protein, 42 aa, Zea mays
  Clone ID: MRT4577_76626C.1.pep
VLLQWRIVARTHWYGCLPARVDPVYLWLTFLHLDNTLQIFFL

SEQ ID NO: 343712 - protein, 84 aa, Zea mays
  Clone ID: MRT4577_76627C.1.pep
SIMPLSSCTMLPIISSSSIMLADESYLDIVPRSQYHLRAPCSASLISLLALPQQLALLPSPAAPGPAHATKVSPLVTLDEQHLG

SEQ ID NO: 343713 - protein, 105 aa, Zea mays
  unsure (1)..(105): unsure at all Xaa locations
  Clone ID: MRT4577_76628C.1.pep
AALFRSWVRLPVGSNFRLWLKNLLVCPTPKHGSKARPWLWSFSQGLRCRCVWVEQGFGGFLDLCEKVFFEHTGQXVYHFIKERRTEHYKRGKHSPHKQTLNTGYL

SEQ ID NO: 343714 - protein, 183 aa, Zea mays
  Clone ID: MRT4577_76629C.1.pep
LARLPGARHPPAVAPSSWHGACAPPRSSTSNAAGSQRPWSWIPPCSTLLLPQAPPAVLLILLPPENTTGTSCRSAEAISGRALCYSSSRSCLGSSLCTTCSAKCVNQLSTPPWSTSVPPISPRRAASSAWSLLWLASVFPSSNLARPKLNSIHGQLSILPRRSQAPSPPVVSACRRLSLPHMI

SEQ ID NO: 343715 - protein, 113 aa, Zea mays
  Clone ID: MRT4577_7662C.1.pep
SNHTQQHCGSFSAAYFRWPNSSCRKYFFLKTVGPFFSIFSLLSCLHQRPPTRRSPLPCPLACAHRPLARAAEPSYNHSVVVVEPPHQEIIFLRILFLIFGGCYLVAAEISIYS

SEQ ID NO: 343716 - protein, 63 aa, Zea mays
  Clone ID: MRT4577_76630C.1.pep
EDLPPVLRDVFLKKWLVFLKKTILAFETASFDYQLFFVAPDANVSLFHSGFFVRIDLLMTTNY

SEQ ID NO: 343717 - protein, 69 aa, Zea mays
  Clone ID: MRT4577_76631C.1.pep
SWSPSVLLMMVLHAILTKYVSCVVIDHRPKLCPSHPTYVSFLYITFLVVRWPPFLGQKSVGVSIRYFYK

SEQ ID NO: 343718 - protein, 67 aa, Zea mays
  Clone ID: MRT4577_76632C.1.pep
GDGPASSLTVTLELSKPQIIYACTYMPSGLACTLASRLEMTRLIHPVALISICRSGLSVCNVFQAPT

SEQ ID NO: 343719 - protein, 84 aa, Zea mays
  unsure (1)..(84): unsure at all Xaa locations
  Clone ID: MRT4577_76633C.1.pep
MITSAAGAGMKAKKGADGHKDGWPKKNYATRSVMGALEXRIRRIEQCLKNGRYSQHVCTDANVYLVVVLEYLVCKVLVLHMYTC

SEQ ID NO: 343720 - protein, 75 aa, Zea mays
  Clone ID: MRT4577_76634C.1.pep
MVTFRFHQYQVVGRALPTEADQHPKIYRMKLWATNEVRAKSKFWYFLRKLKKVKKSNGQVLAINEIFEKNPTKIK

SEQ ID NO: 343721 - protein, 135 aa, Zea mays
  Clone ID: MRT4577_76635C.1.pep
MHDKAGLNWNNALLATVLESMPPEPLAAEKNRKFSVRNHTPLPMEDALNDYKRLDYIQRHIATLKESIDLGSNVQGYFAWSLLGNFEWFAGFTERYGIVYVDRNNNCTRYMKESAKWLKQFNAAKKPSKKILTPA

SEQ ID NO: 343722 - protein, 66 aa, Zea mays
  Clone ID: MRT4577_76636C.1.pep
SHSVFYNQLWILESRSSALLYCEHRQTPVEVAPHGPWQRAKKGDSVLLSGIILGLGNGRFRCTCCR

SEQ ID NO: 343723 - protein, 132 aa, Zea mays
  unsure (1)..(132): unsure at all Xaa locations
  Clone ID: MRT4577_76637C.1.pep
NKNLDGCVYDRCYYTVALAVNSIFICAGIGDVDTKETPLPMEDALNDYKRLDYIQRHIATLKESIDLGSNVQGYFAWSLLDNFEWFAGFTERYGIVYVDRNNNCTRYMKESPKWLXQFNAEKKPSKKILPPA

SEQ ID NO: 343724 - protein, 283 aa, Zea mays
  unsure (1)..(283): unsure at all Xaa locations
  Clone ID: MRT4577_76638C.1.pep
AQVSSLVRYRCFWRTVRCSSLTPTCYRNRRASPRTRGRTRGRTRGRTRGERSWDINQGWFXEPVDRGDXPFSMRSLARERLPFFKDEQKEKLAGSYNMLGLNYYTSRFSKNIDISPNYSPVLNTDDAYASQEVNGPDGKPIGPPMGNPWIYMYPEGLKDLLMIMKNKYGNPPIYITENGIGDVDTKETPLPMEDALNDYKRLDYIQRHIATLKESIDLGSNVQGYFAWSLLDNFEWFAGFTERYGIVYVDRNNNCTRYMKESAKWLKQFNAAKKPSKKILTPA

SEQ ID NO: 343725 - protein, 72 aa, Zea mays
  unsure (1)..(72): unsure at all Xaa locations
  Clone ID: MRT4577_76639C.1.pep
SPARSCXSRWPRSPXALAPCCLXPWAPXAFPFLPPARXLCPLSAPPXFSXXSALXLFXPRSCXXPXXXXWXA

SEQ ID NO: 343726 - protein, 198 aa, Zea mays
  unsure (1)..(198): unsure at all Xaa locations
  Clone ID: MRT4577_7663C.1.pep
MVLVAAVENDHRRGAKVTSAQSNSIGPALRPSSRARLHDFSFLTVSWGTHRVLRCSKSGPVSSPAPASPETLSPDKERAHRXXEGGGSLRQRQRFAQRPWNLRTRRSATAAPTRQAGSDEESEAAERAPPPTVEAKKRALSIALSKQEIAEDFAAIRGTRPPRRPKKRPRTVQRQLDLLXPGLCLADVAPGSYMIEQR

SEQ ID NO: 343727 - protein, 256 aa, Zea mays
  unsure (1)..(256): unsure at all Xaa locations
  Clone ID: MRT4577_76640C.1.pep
FLAYGELLXTFHSPMPSPPSLPLFGGLSPDNILTPHEFRTSLYESSAYPTPPNSPTSMSGIHASQVGPPPASYDRTDRQPSLPLAPRLVESSLAVPHVDVPFQWAVASYAGDSAKFLTDDLSGSSHLSRLTIGYRHAELISAELEFAPLAAAFAKPISVTAVWTIASIAPATTTELQYYGGRLLTLGGPVLMGSVTRIPADLTRLNPVIKTAVGFTDCPRFTYSVYANGGSXNTSLITVMVRGVIXLSGLSGHTVT

SEQ ID NO: 343728 - protein, 86 aa, Zea mays
  Clone ID: MRT4577_76641C.1.pep
PTSANTDGPGPRENHTLVFSCNATLHVASSWPCPFTAGSSGQLHLNGTHDFSLIHFLTYKSIGLSTKTLPVSPSASEDSTPLHSTC

SEQ ID NO: 343729 - protein, 55 aa, Zea mays
  Clone ID: MRT4577_76642C.1.pep
PTFNKRPKTVARIRHTFVAHLRRVEPSRMICNRLLEWIAVTIPRLTMGKGSSLHD

SEQ ID NO: 343730 - protein, 73 aa, Zea mays
  Clone ID: MRT4577_76643C.1.pep
RPFAQLVCSPSSRIETQDAVALSVDRGDTSILCCPAQAVYTTYYGRITTHWFHLAEMKCHVWVMCRRRRIKHA

SEQ ID NO: 343731 - protein, 49 aa, Zea mays
  Clone ID: MRT4577_76644C.1.pep
MSRITNRGVTSITTAEGLSDTSGRIRGPNAATKSVGAALEDSSLPIPGG

SEQ ID NO: 343732 - protein, 96 aa, Zea mays
  Clone ID: MRT4577_76645C.1.pep
KRIQSYHQSIFKCCFGVYRYILLLFQNQFGCYYFSAGTIETFECKTILQPYSSSSIMYSAHSLPLEDVRQKGELPPGAPLLGLCAPTRLLCPLWLG

SEQ ID NO: 343733 - protein, 43 aa, Zea mays
  Clone ID: MRT4577_76646C.1.pep
LFWFKPEAINMISGGSFDQSTQFKVPVRIRENSLRLSLNRVCD

SEQ ID NO: 343734 - protein, 104 aa, Zea mays
  Clone ID: MRT4577_76647C.1.pep
MAGKRPRAGRRNSDEGFWPRGEGLRRAKAWDSFRRARGNPGTNAGALGRANLAGHRAGVADRHGRTPVKPKLADDKAKLGKLSTRTGVSPQGRARGGLARSPTS

SEQ ID NO: 343735 - protein, 134 aa, Zea mays
  Clone ID: MRT4577_76648C.1.pep
GPRLWGSALVRVARLRSVASPASLGLAGGLLPGLGGLSSGGAGGAAVFLAAVAVAVLGVAPPCPWSPPPPPLSPCPRWPGPSACCSPAAALAVGAPAVLAVASSASCFRRGGSCGCARLAAPLGALGRLALRGG

SEQ ID NO: 343736 - protein, 534 aa, Zea mays
  unsure (1)..(534): unsure at all Xaa locations
  Clone ID: MRT4577_76649C.1.pep
PIYPDPPPTAPREPRARSLGSRVGSLLWISAASRCLRPPSPPGGGPAARRRRSTPTTGSPSARWATPSSSPAAARASSPTGQTPPPPHXFIKFVNVTFWRTXSCGITRKNXHSTGLVQAILFEVVDRDNIGGSAYGGQRSICCTPDLAKLEGCKQGEVIRRPSSDDPDWPFVLDTHFSANHLSVKLEDEPVRITKTGMYNLFFISCDPKLRGLTMSGKTIWKNPGGYLPGRMAPLMKFYVLMSLAYLLVMIVWFSQYVRFWRDILPIQNWITLIIALGLFEMTLWYFEYLNFNSSGVRPVGITTWVVTVGAIRKTVSRLLILSISMGYGVVRPTLGGLTSKVLLLGLTYFLASELLDIAENVGTINDISGKARLFLVLPDAFLDAFLILWIFTSLSRTLEKLQARRSSVKLDIYRKFTNALAVSVIASVAWIGYEVYFKATDPFSERWQSAWIITAFWDVLAFVLLLVICYLWAPSQSSQRYAYSGEAADDDDEESQSLTKGDGAVRMGKIDQDRNAXQEGFRLXDEAEEDKRE

SEQ ID NO: 343737 - protein, 59 aa, Zea mays
  Clone ID: MRT4577_7664C.1.pep
TPHSGIDRSHPAATPRNTTTTAPCDTAIRLLALARTGTREHAPGPNPGASPATPFNTTH

SEQ ID NO: 343738 - protein, 198 aa, Zea mays
  Clone ID: MRT4577_76650C.1.pep
MKCWCVHSPRGAMATPLSSPLAPTALRSPLRHRALLLLLPFPPRAASSGEDTAAAADQEPAPAATKTATADDDFEERVLRIKSRVGPKKRGARKKKAAASASASAVTLPPVPLREPRSALGAPVELGFTAYSERLNGALAALGLAAVLLVELGSGQALVKYHQPATLFLQAYTVAAAAALFVKYEKERISTWPGPPAK

SEQ ID NO: 343739 - protein, 64 aa, Zea mays
  Clone ID: MRT4577_76651C.1.pep
VVRLFLPLLSRTHMLTETYCSTALTPPMPCVQYRRSVNGLGRANSTKHYGECFNLLRAISSTTR

SEQ ID NO: 343740 - protein, 48 aa, Zea mays
  Clone ID: MRT4577_76652C.1.pep
IFAYLQSISNSSKPLLHTIIYPLPYLINLFTIILSLNYSYFQTFPLLF

SEQ ID NO: 343741 - protein, 96 aa, Zea mays
  unsure (1)..(96): unsure at all Xaa locations
  Clone ID: MRT4577_76653C.1.pep
HIKALFRSKSEGGEGFKQKRGGLLTWTIFPDPVGSPRLHLLGLEGAGASLGPQAFPFWARLALXPFGPLAPPWGGPAGPSPFWLASCVVGGGPPPL

SEQ ID NO: 343742 - protein, 101 aa, Zea mays
  Clone ID: MRT4577_76654C.1.pep
IYKTLFFFFFFFFFFFGQEKKVIFGFVQPPIMEIKLDFPLFLHVLLNTHTHTHTHPYLGHKRKRTKRPHIIPRMHKAFLFFFPLFQESRLIFFLAMFLVCG

SEQ ID NO: 343743 - protein, 40 aa, Zea mays
  Clone ID: MRT4577_76655C.1.pep
PHSIIRNDIIINSCQITCIHNITILTVFITILRSYKPNIS

SEQ ID NO: 343744 - protein, 48 aa, Zea mays
  Clone ID: MRT4577_76656C.1.pep
KLPSWSGQWPIYMEPRGSERNKKYISFTSHLPTLSLKPTAEDYLPGED

SEQ ID NO: 343745 - protein, 87 aa, Zea mays
  Clone ID: MRT4577_76657C.1.pep
MLKTSLFFPPKCRLNSEYPVRDMFKLFACAICQIDLESGQGISIHEGSSKTGKLRPWDGPFLCHSCQEKKEAMEGKRHSRGINFLFL

SEQ ID NO: 343746 - protein, 158 aa, Zea mays
  unsure (1)..(158): unsure at all Xaa locations
  Clone ID: MRT4577_76658C.1.pep
PRGRPGNQSPCSRDLLTGVPPVSRDPHDHTDPPSCESAMDAVPPTITKSPSTLCPPASPTPGGCLPLSSINXTAAVRVSVNFIQAFSAPTSPKEDCSPSSAIACMRXDAFAKRSCRIYPIAERIAKTEPGEPEIDRSGHTGRACLLVAEICSLNEART

SEQ ID NO: 343747 - protein, 80 aa, Zea mays
  Clone ID: MRT4577_76659C.1.pep
RNNGLQLVARAHQLVMEGYNWCHDQNVVTIFSAPNYCYRCGNQAAVMELDEKMQHTFLQFDEAPRRGEPHVTRRTPDFFL

SEQ ID NO: 343748 - protein, 44 aa, Zea mays
  Clone ID: MRT4577_7665C.1.pep
AVLIGCTGYRLADDYHRRQRDVPLLGEPNALAVHPAFGSWLLRQ

SEQ ID NO: 343749 - protein, 85 aa, Zea mays
  Clone ID: MRT4577_76660C.1.pep
YKDFSLKLVGSKPRKKKENATHSCVFFFKEGNCPSMMCSLKDFLSLFSDTVSSFPESDESLPHFTAQTSKMICCNKLGFRYDINS

SEQ ID NO: 343750 - protein, 84 aa, Zea mays
  Clone ID: MRT4577_76661C.1.pep
QSSLVSASRLITARLESSLLRASMLYQNAVPSAEVVHASRSRRRVGFSSRLPYECTDPAPMWPASSLACPSSQDCVRHTDTSVH

SEQ ID NO: 343751 - protein, 139 aa, Zea mays
  unsure (1)..(139): unsure at all Xaa locations
  Clone ID: MRT4577_76662C.1.pep
MIGWGDVYKVVAATVPLYFALFLGYGSVRWWRIFTREQCDAVNRLVAFFALPFFTFEFTLHTDPFQVNYRAVAADVISKAVIVGVIGCWAGSRVSSAGKGKGAVGWSITGFSLSTLTNSLXVGVPMARAMYGEWAQQLV

SEQ ID NO: 343752 - protein, 62 aa, Zea mays
  Clone ID: MRT4577_76663C.1.pep
RQVVVFNSSLALIRWEQLFETCIQKMYIFSNMVFVWCVNFKPPFIYLWGYGSVIFRLFNGCC

SEQ ID NO: 343753 - protein, 131 aa, Zea mays
  Clone ID: MRT4577_76664C.1.pep
QTKDGSAAGCSRRSGRRRVEPGGGPAGRSGRHQRGAAVGIIIIITAAGAGFASAPPDQQGQGVQVQAQLFQQEGRRRLLPHVFARLGGLRPLPLMVIKKLLLTLAAPACNYPPCDAMPHACQSVASETFAM

SEQ ID NO: 343754 - protein, 78 aa, Zea mays
  Clone ID: MRT4577_76665C.1.pep
YVCSEFGSCINDTLSPNNFLFGIIPGYYLTCALFNLFRPYAIGNILTLCFLVLSLRMVYIFRRDWVIFIITCSFISTF

SEQ ID NO: 343755 - protein, 76 aa, Zea mays
  Clone ID: MRT4577_76666C.1.pep
RSNDSIHLLPQTIDSILFPPYGMHLHTDLVDEIYGNTLGPSGEEEHTGYSVLLQPAEKDWSMMYTLLLYLSGLPLQ

SEQ ID NO: 343756 - protein, 784 aa, Zea mays
  Clone ID: MRT4577_76667C.1.pep
MQFPFTTGFSSSPALSLGLDNAGGGMVGRMLPVGGAPADGGMARDAADAENDSRSGSDHLDAMSAGAGAEDEDDAEPGNPRKRKKRYHRHTPQQIQELEALFKECPHPDEKQRGELSKRLGLDPRQVKFWFQNRRTRMKTQLERHENALLKQENDKLRAENMAIREAMRSPMCGSCGSPAMLGEVSLEEQHLCIENARLKDELNRVYALATKFLGKPMPVLSGPMLQPNLSLPMPSSSLELAVGGLRGLGSIPSLDEFAGGVSSPLGTVITPARATGSAPPPMVGVDRSMLLELAISAMDELVKLAQVDEPLWLPSLSGSPDKKLLNFEEYAHSFPPSVGAVKPVGYVSEASRESGLVIIDNSLALVETLMDVRRWSDMFSCMIAKATVLEEVTSGIAGSRNGALLLMKAELQVLSPLVPIREVTFLRFCKQLAEGAWAVVDVSIDGLVRDHNSGTASNAGNIRCRRLPSGCVMQDTPNGYCKVTWVEYTEYDEASVHQLYRPLIRSGLAFGARRWLAMLQRQCECLAILMSPDTVSANDSSVITQEGKRSMLKLARRMTENFCAGVSASSAREWSKLDGAAGSIGEDVRVMARKSVDEPGEPPGVVLSAATSVWVPVAPEKLFNFLRDEQLRAEWDILSNGGPMQEMANIAKGQEHGNSVSLLRASAMSANQSSMLILQETCTDASGSMVVYAPVDIPAMQLVMNGGDSTYVALLPSGFAILPDGPSSVGAEHKTGGSLLTVAFQILVNSQPTAKLTVESVETVNNLIFCTIKKIKTALQCDA

SEQ ID NO: 343757 - protein, 122 aa, Zea mays
  unsure (1)..(122): unsure at all Xaa locations
  Clone ID: MRT4577_76668C.1.pep
GPAGSXTCHEIRDMXIHSHGNSSATLTRTCPVHINVYAHVARSHFCALSSGLYSSCVRWSSAADRPVGMGAPAALVEREPGPPGVPASEPSSSGIRWQDAPSRGGVPSLFDTQRHATARDCA

SEQ ID NO: 343758 - protein, 76 aa, Zea mays
  unsure (1)..(76): unsure at all Xaa locations
  Clone ID: MRT4577_76669C.1.pep
LDYNPRRLLITRWVSKGQTDRQPRSPRSRTLLPPCRGGWCSAHMATAAAAGPQGRTALSRTDTSYLSLSLSLHLXL

SEQ ID NO: 343759 - protein, 79 aa, Zea mays
  Clone ID: MRT4577_7666C.1.pep
LGSWPLCVAKALASLCEHAYSAYKSKTFFFFRFVRSSNRPCALDGGLLVSAPVPGFSNSALANDVNVSVFTCSFSGWCI

SEQ ID NO: 343760 - protein, 89 aa, Zea mays
  Clone ID: MRT4577_76670C.1.pep
PTKRGVPPIYVRGRGVETVCSYIQGPCPGLKFSSGNPMPWTGHGQGKGKGVPIFTGLKWEAWAVPILNGGHFFGLAGHQLRFGVDRFGP

SEQ ID NO: 343761 - protein, 69 aa, Zea mays
  Clone ID: MRT4577_76671C.1.pep
TPTNSSAQKCSPTLDYHSKIAMFILSFTSHLQKHGSADQARATIASKKMKHTQLNKELPYSMGSKNEDD

SEQ ID NO: 343762 - protein, 110 aa, Zea mays
  Clone ID: MRT4577_76672C.1.pep
AAQPWRIYDFLNTFYERSPHAERRGVPAMPHSAVGEQPLSQKYLGPPRSRLRRWRRRYQKQRRGPKRPGARPAASRARAGWQEPPATGDMQRGRRGCGGREDKEGRGLMK

SEQ ID NO: 343763 - protein, 163 aa, Zea mays
  unsure (1)..(163): unsure at all Xaa locations
  Clone ID: MRT4577_76673C.1.pep
MADPPASDAQPEQAPAAAAASNDPAEDATVEKPLAAPPTPKLDAAAAADGSAYEVEDDEYVSDPNDEPFPTMRRREASDDEGSEDGRPRARIGPDQDDDGQGAPEAYDDEVDEEDEEYYDEEEEDLGEGFEEYEGRAAPXMEDGGGGGGGGQVSRGEDGVPGE

SEQ ID NO: 343764 - protein, 56 aa, Zea mays
  Clone ID: MRT4577_76674C.1.pep
RLVLGFFFFFGETHGPMGHHWNTGSLKFSLPPNSEKKMHAGFLTPYTKVLTGHINI

SEQ ID NO: 343765 - protein, 86 aa, Zea mays
  Clone ID: MRT4577_76675C.1.pep
TVDPLWVEMFCLLHERLFCVHISRSVDPPYEADPSVCYLPAALMVSSLHVCSPYLSSGGHPFLRSFPPLRAFRMRWWVLPCWACEC

SEQ ID NO: 343766 - protein, 70 aa, Zea mays
  Clone ID: MRT4577_76676C.1.pep
EELGFSSPPRGGCGPGPIEVSGICDSRFGSVWEDVLQIVFFDSFPPTEKAHRIFVNVFFQNWGQVLFSKI

SEQ ID NO: 343767 - protein, 191 aa, Zea mays
  unsure (1)..(191): unsure at all Xaa locations
  Clone ID: MRT4577_76678C.1.pep
FFFHFNCSLRPRSCCSATMVPXCSQAPQASLLPPSLCPRRVAVVQNPILQRGGGHQALAAGLLPLSPLVLQHSSPLLQQLPLVHLSAHNIRAQHLQQLVLAHLAACSQQQQFLLFAQLAALHSASYLLHPRLPFSPLSAAYPARFLSFSHLAALDSPASFLLLQLLPFSLLAGGSPATVWAHPPVLPFYQH

SEQ ID NO: 343768 - protein, 46 aa, Zea mays
  Clone ID: MRT4577_76679C.1.pep
VLKGALFRTATEQKEQTRYFSKSEIQELFSLPQQGFDVSLTHKQLL

SEQ ID NO: 343769 - protein, 952 aa, Zea mays
  Clone ID: MRT4577_7667C.1.pep
MPLLLYPFSACVPPPRALLRRLSPPPPMAVVAPLPSAVRIIPSVGTLDLPALPPPPTDDFHWLDLFAFLNSPADTYHQIPAQGEEELEAGLELELELELEKHAEVERQRGRARRAQLRRLRQRQVKAETEAWARAAEEYREIEREMLDRRLAPALPYVKALFVGWFEPLRDAIARDQDVQRRKRVKHVYAKYLLLLPADKVAVIVMHKMMGLLMSSKDGTGSVRVVQAAHCIGEAVEREFKVQSFFQKSRKKKIQGENDPALEKEQAKCRKRVKSLVKRRKMSEAQRLVQQELELEEWGTEAQVKLGSRLIELLLDSAFVQPPADQTPDSSPDIRPAFKHVLRQPIIENGRLKKKHWVIECDHLVHEGFESTARHVDIPYLPMLVPPKKWKGYDKGGHLFLPSYIMRTHGVKDQKDAINSVPRKQLRKVFEALDILGSTKWRVNRRVHDVVETIWSQGGGIAGLVDKANIPLPERPESEDPDEMQKWKWSLKKAKKTNRELHAERCDTELKLSVARKMREEDGFYYPHNLDFRGRAYPMHPHLSHLGSDLCRGVLEYAEGRPLGKSGLCWLKIHLANKYGGGIEKLSHEGKLAFVENQLFDIFDSAANPVDGNCWWTNAEDPFQCLAACMDLSDALRSPSPYHAVSHLPIHQDGSCNGLQHYAALGRDYMGAVAVNLVPGEKPADIYSEIASRVLNVVCEDSMKDPATNPTASLARALVDQVDRKLVKQTVMTSVYGVTYIGARQQITKRLQEKGLITDDKLLYDVSCYATRVTLDALGQMFQSARGIMAWLGDCAKMIASKNQPVKWTSPVGLPVVQPYKKYKNYMIRTSLQCLALRREGDAIAIQRQKAAFPPNFVHSLDSSHMMMTAIACKESGLHFAGVHDSFWVHACDVDQMNQILRQQFVELYSMPILENLLEEFQTSFPTLEFPPCPPQGNFDVREVLTSTYFFN

SEQ ID NO: 343770 - protein, 141 aa, Zea mays
  Clone ID: MRT4577_76680C.1.pep
IRHAELRWCMCRRWYRLLTCDVMTMSHTTELSPSTVQAVNTLMIVTASTLAAVAPELATPTGSAVTYRWGPSVQAILFATEMFALAPSIYLRSSPMLEAHSCFSQQGRFVPHVNTVFNHRAQIETHCIQAMQRVCCHIIEC

SEQ ID NO: 343771 - protein, 67 aa, Zea mays
  Clone ID: MRT4577_76681C.1.pep
STKVLKFGKIQPVTFSWSPITPRSLTNNSLPKGLDPSPGLVRFGVKPRPKTPLKALRLWSKRSRLGS

SEQ ID NO: 343772 - protein, 69 aa, Zea mays
  Clone ID: MRT4577_76682C.1.pep
LARAPIASRYAFTIHHLSSGTRTILTGSCIPTSDAQPTDLSSNATAILTTTTRTHRSTCSTSQIQSTNF

SEQ ID NO: 343773 - protein, 239 aa, Zea mays
  Clone ID: MRT4577_76683C.1.pep
MVKTAASSSSDDAAAAKRRTYKGVRMRSWGSWVSEVRAPGQKTRIWLGSHATAEAAARAHDAALLCLRGSAADLNFPLRLPFDLPPAATMSPKAIQRVAAAAASASSSSSCGGGGGLRAPPPFAPRAENNGTSACSDGDGDATPASSTTSSPTSHADDVSSPDSTVSSAGDVDYYTSLADIDAFFQSPKCVVDYALMDPCSAFFAPDSTAADDDGGCCWAWEEDGGGIALWSFSATLDC

SEQ ID NO: 343774 - protein, 36 aa, Zea mays
  Clone ID: MRT4577_76684C.1.pep
WTPNTQHINSIFYYKHLWPLTYNDYLTYYNNNPLYI

SEQ ID NO: 343775 - protein, 68 aa, Zea mays
  Clone ID: MRT4577_76685C.1.pep
SSQGCPPGFLCGRGPLCFRVKTHVGILGKARSPGSNEKILTDPKWSHKRGSVFFRVICPLDQKFWVVK

SEQ ID NO: 343776 - protein, 80 aa, Zea mays
  Clone ID: MRT4577_76686C.1.pep
VCLRRLLAFTYRGVLLPLPSSLVMVTMFKYLFLCDGVPDAVVVRAGWRGIAHTYHGALPVFDLEGERQVEVDVVVRTGRC

SEQ ID NO: 343777 - protein, 40 aa, Zea mays
  Clone ID: MRT4577_76687C.1.pep
FWLYYVCIVLMRVDEQPTVEPELQQVEVVEQELIAGKLCP

SEQ ID NO: 343778 - protein, 137 aa, Zea mays
  Clone ID: MRT4577_76688C.1.pep
MISRFSGRISPSCIWKVGRATVFMYWMHSWCVTVLELGCVGADKAVGHIIGVVAALELVRVQTSRVWVALRCTSPSLCVVTIDDGSTTARITMVINLVAVIDIGSTSSEICVGADLRAWNSIEPFYPPDSSDILAII

SEQ ID NO: 343779 - protein, 113 aa, Zea mays
  Clone ID: MRT4577_76689C.1.pep
PPASRSPFLPPFPPPRNRPPRFFPNPQMEKKTGGAPCWVVVPFSSRPFFVVPPFGRTFLAGPGPGGPFFIGEFWGGCQAPPLFFGQGRAKKKKKWCWLVSERLESFCTYFSTF

SEQ ID NO: 343780 - protein, 52 aa, Zea mays
  Clone ID: MRT4577_7668C.1.pep
KNQLLKLLVGVDPDCLRNTCCWLGDGSLVIVAPYVAVSSYCAMARFDFFQHR

SEQ ID NO: 343781 - protein, 84 aa, Zea mays
  unsure (1)..(84): unsure at all Xaa locations
  Clone ID: MRT4577_76690C.1.pep
RHSTVNLSELYNYETTINDDKLETASTISTILTFNDVFPSTKTIASYKLPDHHSGTFEIXYFHDHAMIPAAVALEHYPAIDVLA

SEQ ID NO: 343782 - protein, 52 aa, Zea mays
  Clone ID: MRT4577_76691C.1.pep
GGRYPSVPNGVHIKSSVLSPKSRVSYSTRPRYFRAIRDEVPAGHWPMSNVLT

SEQ ID NO: 343783 - protein, 266 aa, Zea mays
  Clone ID: MRT4577_76692C.1.pep
RPRRSRSPSSPPPCTAAPPPTSPPSTRRHPPPTTPAGPATPDAASTRSSSSTTSARARPYSPRCAPLPGTGRGSAAADCGGAGAPGGAAVPRQGPRDRPPRLRLLHRGRRQERPRGPAWRSSRPRLWPRWTRSTRPWSTSSPGNALFLRNYAQFLHEAKGDTARAEEYYSRAMLADPSDGEIMSQYARLVWEVHHDPERCLGYFQKSVQAAPLDSHVLAAYASFLWEQDDDEDNDDCGDQGTAGGAAAQERAAGTGQAMELASAAV

SEQ ID NO: 343784 - protein, 109 aa, Zea mays
  Clone ID: MRT4577_76693C.1.pep
PAWGGLVLHLVEQLQNSPHLVTHLFVGMTAAHGEWYMLLTLVTLSSSKIGVARPPVALANTAVQVCLMAQSPPGVGLKSMSAIGMSFVIVSILYETHRPNGCDLAGSRY

SEQ ID NO: 343785 - protein, 106 aa, Zea mays
  Clone ID: MRT4577_76694C.1.pep
GRAIREEPPAAPSILADPSTLLPLIAATINDAEQACDFRITGSYHDGACTVSLGDSDTIITKIDRRFSVVSALLGKNSYNVTVNLGIDYAFIVALVVILDEMHYQR

SEQ ID NO: 343786 - protein, 58 aa, Zea mays
  Clone ID: MRT4577_76695C.1.pep
IILFSSYGVFFKKCNPIQFSKIFITLMDHSTFHFCYILILLAYSAYPQINPYTCNFHY

SEQ ID NO: 343787 - protein, 70 aa, Zea mays
  Clone ID: MRT4577_76696C.1.pep
PFAMRLDLGRSWETDAARRSLTRIRTSASRTYQDPPRHGALAGLLVLLPHHLTGALHRARRHQCHSHHRR

SEQ ID NO: 343788 - protein, 74 aa, Zea mays
  Clone ID: MRT4577_76697C.1.pep
AGFLPLHSHHTLSSAACHLYRFFLQSTLLQLSSLTSPMVFHHIWSINSSLTNLSAPRRAEGEGRSIGRASCRIQ

SEQ ID NO: 343789 - protein, 78 aa, Zea mays
  Clone ID: MRT4577_76698C.1.pep
LDARVLIVSMNLIIATTGHCQVPDPDGWGTRRSDTGGDHHYQPTRTICMPPQWPTAPDTLMLLLMLSSYRGTCNTHTH

SEQ ID NO: 343790 - protein, 85 aa, Zea mays
  Clone ID: MRT4577_76699C.1.pep
GMLPDARGDRLAHGLSKKWNEPYCRTCVMRTKRRSRTTLYHDQDKGRLNNDEIEMMMHDTKNYCAKTRSTGKNEESKNYLENYSY

SEQ ID NO: 343791 - protein, 386 aa, Zea mays
  unsure (1)..(386): unsure at all Xaa locations
  Clone ID: MRT4577_7669C.1.pep
MWHVCLHPSATTTAVAFAASDRSEVIAMVASTASRLSPPRFSTPSPSLHPPNRRSRFSPVRAAKLEAVLSIGAHLIPHPRKAASGGEDAFFANSDAGGVFAIADGVSGWAEKNVNPALFSRELMRNSSNFLNDEAVSLAKPQHYLXIIFFTLCACNXHVTWKLQVSHDPQILLMKAHAATSSIGSATVIIAMLEKTGTLKIASVGDCGLKVIRKGQVMFSISPQEHYFDCPYQISSEAEGQTYKDALVCSVNLMEGDIIVSGSDGLFDNIFDQEIVSIISESPSVDEAAKALAELARXKHSVDVRFDSPYSMEARSRGFDVPWWKKLLGGKLIGGKMDDITVVVAQVKTVVVPEDEVQGGDTEEQKGNEQGAAAVVAYKMNDEEVA

SEQ ID NO: 343792 - protein, 49 aa, Zea mays
  Clone ID: MRT4577_766C.1.pep
RATIVVAVTWLSGQPQTAGTKAASDAATRRKLSLLKLTDQCFIINTATV

SEQ ID NO: 343793 - protein, 113 aa, Zea mays
  Clone ID: MRT4577_76700C.1.pep
KMGAQKKPDKYGYRKSFQRPPPQKLKRGVLMGLPWLGPYAVQGPNKGPLIPTLEMGAPLFPIMSRPPLGGGRNPHQGVAPGGGKIKLFSLKRTTFPPVFFFPPVKTFFSHPVQ

SEQ ID NO: 343794 - protein, 236 aa, Zea mays
  unsure (1)..(236): unsure at all Xaa locations
  Clone ID: MRT4577_76701C.1.pep
MAQLPPKIPTVAPAWPEFGGGHQQQRSPSVGTFLAAAPMQPSWVDEFLDFSAAKRGAHRRSVSDSVAFLXSPSDHNSINDEKTDRGDAEEAQSKCHGAAAATAVDPKRVKRILANRQSAQRSRVRKLQYISELERSVTSLQTEVSALSPRVAFLDHQRSLLTLGNSHLRQRIAALAQDKIFKDAHQEALRKEIERLRQIYQQQSLKSGREPDAAPSVRDDKDMIGSEGTAAPGPPS

SEQ ID NO: 343795 - protein, 78 aa, Zea mays
  Clone ID: MRT4577_76702C.1.pep
VQKCQVNSPPPLETKLLPFRVSLNVSRLLIYARNVLTVVLSVREPVNVNSKPSVAPVQLSLVDPCIFLCDQSQFWESL

SEQ ID NO: 343796 - protein, 287 aa, Zea mays
  Clone ID: MRT4577_76703C.1.pep
MAQLPPKIPTVAPAWPEFGGGHQQQRSPSVGTFLAAAPMQPSWVDEFLDFSAAKRGAHRRSVSDSVAFLEPEPGPGDGNAGAHDFDRLDDDQLLSMFSDDLQPPPPQPQTQAAPAPVASSSSPSDHNSINDEKTDRGDAEEAQSKCHGAAAATAVDPKRVKRILANRQSAQRSRVRKLQYISELERSVTSLQTEVSALSPRVAFLDHQRSLLTLGNSHLRQRIAALAQDKIFKDAHQEALRKEIERLRQIYHQQSLKSGREPDAAPSVRDDKDMIGSEGTAAPGPPS

SEQ ID NO: 343797 - protein, 80 aa, Zea mays
  Clone ID: MRT4577_76704C.1.pep
RQPPWKATKHGQEEWWWRSSTRPWWSGRRSRWRRENRRRRLPEVVSLMTQQRGPRQRSVLLGLLGTSSSLHNQYDMKFGK

SEQ ID NO: 343798 - protein, 538 aa, Zea mays
  unsure (1)..(538): unsure at all Xaa locations
  Clone ID: MRT4577_76705C.1.pep
RRRRHTIYHGHRRASPHRPTVRGGLFTDLRFPSTIHRPSSSPSTATAFRLRDWDPHSXLPXSARSPSSPSASSSSSSTSASARRLSPLARFLLDALRRHQRWGPPVVADLSKLRRVPPSLVAEVLTAXSPAAXLALPFFLWAGRQKGFRHCFPAFHALASLLSAAGLPAAADQLPDLMRAHGRPVSHPQLTLLVRLHTAARRPLRALHALRRFRHEFDVQPQVHACNRVLGALAAAGHVEDALKLFDEMSEGGVQPIPVTFAIMVRALAHAGMVDRLLEMIGRMRNEVCRPDVFVYTALVKTMVRRGYMDGCIRVWDEMEKDGVEPDTMAYATMVGGLCKAGMVEEAAELFKEMRSKGLLVDRMVYASLIDGYVAVGRVGDGCRLLNELVDAGYRADLGIYNTLIIGLCGIGREDKAHKLFQIVLQEDLMPSSDTVSPLLACYAEKGEMVMFFGLVNKLAEMGLSVVEMLVDFMKLFAGKDGRVLKAVEVFDALRQKQYCSVGIYNILIENLLKIKDRKKSLLLFEEMQSSGXRPDSV

SEQ ID NO: 343799 - protein, 196 aa, Zea mays
  Clone ID: MRT4577_76706C.1.pep
APPSTLTPRYSPPLATGVYHRWYQTSAFPRPRSTRGSIRSWCFPLFSTTAPPPVKPSKQTQLLLDAMADATHKEDVRLNKMQESLDLLFAQIRSMDTSQQQMAAQIDLTAKAMNQSTQDQILLSQQLKATGDAVARLTMWQMKMDAVSSPVSNRSDAEEENWFASAPTGRPRHPHHRLRPEGRHHHDDQLPGLVFG

SEQ ID NO: 343800 - protein, 81 aa, Zea mays
  Clone ID: MRT4577_76707C.1.pep
VSKMRNAATSRTSSSTYRWSRRKLYVLIRYYLCDPILCYKCIARVQLHMKDDDALLSYMKISATALTLLVLYLDSTTRYLP

SEQ ID NO: 343801 - protein, 73 aa, Zea mays
  Clone ID: MRT4577_76708C.1.pep
LPMFSYTNLASQWSFVKHFKLEEMFCHNSEFSKAAGIDDSITDQGESFTDTGLVFYGDNLFFTDTETGTTASD

SEQ ID NO: 343802 - protein, 135 aa, Zea mays
  Clone ID: MRT4577_76709C.1.pep
KFSPPRPLVVETFSQFPPLGRFSVPTIKQPVSVGVLQSVEKKAPPGPQVPKASPKKKFFPPSFFQGLLFPYVAEMFPFAQSFLSWGCCFPFDLLSPPIGGPFFCFCSPLFFPPFPSQNAFFPFFLPFGPCLMVFS

SEQ ID NO: 343803 - protein, 103 aa, Zea mays
  Clone ID: MRT4577_7670C.1.pep
LRHGITAGRMDHHPGLHQEHLDYRSTEPGNHTLRGLDSPLSPAHTLTGAERGQNHPKARSRFARPQSQGIKRSDLFLGSGPGYIHHKSGNVFICQGKTRTSAI

SEQ ID NO: 343804 - protein, 59 aa, Zea mays
  Clone ID: MRT4577_76710C.1.pep
SARGDLVLKLPYAAYLLKWTWIGLRMHWGVASCGSASACCFGARGVLALLRVALRVVPV

SEQ ID NO: 343805 - protein, 76 aa, Zea mays
  Clone ID: MRT4577_76711C.1.pep
RGPSPGVNPGVVGERRRLCAHTDQPATRSGPSGVSVEKNPLLPQVVDCPVLGRGSSMLSQRAPPPIHLAVIDAQIN

SEQ ID NO: 343806 - protein, 710 aa, Zea mays
  unsure (1)..(710): unsure at all Xaa locations
  Clone ID: MRT4577_76712C.1.pep
MADADDAPPTPPPEVVAPEEHPAVAESAVAAQQEGAATAQVDNKRKLEEAGADAEANGTGEDAKRPRVDGEPDAATGIEQQNDGSSVNVSVNVEEPAAAEEDKVAPTDGAATDGDNDTAAPATDSQAGSDDKPLEAAAEAPQPESDAAAVAQEISRMIEVPNSRVGVLIGKAGETIRNLQMSSGAKIQITKDADADSNALTRPVELVGTLGSVDKAELLIKSVXIAEAXEAGGSPALIAAXSLEVDSLGQSNFEMTVPANKVGFIIGEAVERTKCMETQCGARSRXIPQDAXSSYGRLTEQHPLLGQTSGVDMGPXDKVSYVTDIXSRHTNQSGGYGPQGYRPQGQGAASQWGPRSQNHGYGYPPRGMPPPQNYNTPYGSYPPQQGPPRGGMGWDQRQGPPTHPSYQGGASDYYKQGSQPYDSQPPSYPPGMREVQHXYGKSQGPNYGXLRPATCTXQQNYRHGYGDPSYNAPPPIQQYYGQPPMGPQQGYPQQPDPYARPPYSGPGQWTPRGAPAADGSYQAPAASYGAAVSAPXAYGQTYGAATGSDGYGQQGYPQQGGQAPASYGQSAPAAPGYPQQQGGYAQYPQTQPAYGEQAAQTNASYGYQGAPADPNYGSAYPQPGYGPPGQATGQAGYASSAASQPAYGQAGYTQPPTNPPGYEQSAAPATTQSGYAAPPANPQQPAAAKGVSPQPGGGAAAYGAGGQWTA

SEQ ID NO: 343807 - protein, 93 aa, Zea mays
  unsure (1)..(93): unsure at all Xaa locations
  Clone ID: MRT4577_76713C.1.pep
QLIQIDVAKKNKKKKKNKKKKKKKKKKKKKKKNQKKKKKKKKKKKEKGGGLLKEKKLTSGGLKKKNXKKGNKNKINGRGFKKRGNGKNRGFTK

SEQ ID NO: 343808 - protein, 50 aa, Zea mays
  Clone ID: MRT4577_76714C.1.pep
PPLKRANNFLWPLNFKAPLGGLKKKRTPFLEGGNPGTPENSPNELLKRMN

SEQ ID NO: 343809 - protein, 99 aa, Zea mays
  Clone ID: MRT4577_76715C.1.pep
PLKPTARMSKDGIWAMGRISCGGHPRVHASPGPYLSLAELPPRAPCLPWRPSGCSVAIFIASPTPLFTMRHRSGSSSPELHDSCVYSVAPNFFRARELL

SEQ ID NO: 343810 - protein, 132 aa, Zea mays
  Clone ID: MRT4577_76716C.1.pep
MGGPFFGSPFLRPFISFFMSLILFPLGGGLHRFFCGNPWVTPLVPLFFHPVFHTCFTTCWARPEGPSERFFSLFGEWYGPCGAPFFAAFLGVVPGVSPSFTTPLAPALFPFFFAFFPTFSGLPPEFFLRGFL

SEQ ID NO: 343811 - protein, 71 aa, Zea mays
  Clone ID: MRT4577_76717C.1.pep
VGLAAYRAVLRAARRTFSGDQLMLTESAVEIRRRFEDHRGLAPGSEDAVRALSEARQAADFIANMIVQAKR

SEQ ID NO: 343812 - protein, 47 aa, Zea mays
  Clone ID: MRT4577_76718C.1.pep
GTATSPASHPSSTKRQMSEIVCSHQGHELKDQHGPILYPSYQNRIIS

SEQ ID NO: 343813 - protein, 135 aa, Zea mays
  unsure (1)..(135): unsure at all Xaa locations
  Clone ID: MRT4577_76719C.1.pep
MALAATSSSKVDPSWYNDTGATDHITSDLDCFALREQYHGGDSVQVGNGAXDRATQALLLEGKCEGGLYPIKPSDVESLHQAFVSYWARPQQWHARFGHPSPQVVCFILRLNNFPCLKDTSLISICKACQLAKSH

SEQ ID NO: 343814 - protein, 61 aa, Zea mays
  Clone ID: MRT4577_7671C.1.pep
RSSFSTLPPCFNERKGPVPVITSGLRYHQSCLSISSICRSVSPSEKPLSQLLPMVSSRYQV

SEQ ID NO: 343815 - protein, 66 aa, Zea mays
  Clone ID: MRT4577_76720C.1.pep
NLYIFKTQRCEHKAQNKAGYTKRRATHIDLHIFFGWLTIDLLLPQHVWFQSNLFKLKGLPPSFLGT

SEQ ID NO: 343816 - protein, 64 aa, Zea mays
  Clone ID: MRT4577_76721C.1.pep
LEHGSLAIMGKRLTLRVREKMFSAILRNEIGWFDDTRNTSAMLTSRLEADATLFHTVVLPPLHH

SEQ ID NO: 343817 - protein, 95 aa, Zea mays
  Clone ID: MRT4577_76722C.1.pep
MGITGPTPDILGRRQSGQDVRTQNVLAGGAVANYGNSWLGPVGLDRMLGDDLVEVPFTMVGAPILKRLEVEHPAARVLVGLAELQDRGVGDGTTS

SEQ ID NO: 343818 - protein, 104 aa, Zea mays
  Clone ID: MRT4577_76723C.1.pep
NRGSFAPPICLYLGPPKNKWGGFGPPPVILIVQGKWKPPPPPKLKGPFFPFPRVSFLGPLSFCPKGVGPTPMIPSFRVAPNSPSQFFFGKKAPRDPFWPGLIGF

SEQ ID NO: 343819 - protein, 63 aa, Zea mays
  Clone ID: MRT4577_76724C.1.pep
SFVYCKLKRLVLNQESVFTLWWRVILVYNDEEQLCTYQDRLFVMLIVNSKMFLSSCSSRSHQT

SEQ ID NO: 343820 - protein, 132 aa, Zea mays
  Clone ID: MRT4577_76725C.1.pep
GFPGVHPGSGGAKGTPGLVLPKGIPGGPARPPVATWVVFVSPLVGKSLEPLPAFGFWGQRAAFLCRGIPRVGRRAGPPPPPNWVRPFPNPPSVGLFQKKKKKKKKKKKKKKKKKKKKKKKKKKKKKNTHHPP

SEQ ID NO: 343821 - protein, 170 aa, Zea mays
  unsure (1)..(170): unsure at all Xaa locations
  Clone ID: MRT4577_76726C.1.pep
MTIAAQQQQQILPGLIQLDVVNAVAYLQQKVLASNPLALANVVAYQXQQQLQQFMKTLSELAMGNPGDYLQEXTALXSSPLDEGNAPTYLQQQLLQQIVPSLTQLAVXNPADYLQQMLTFNQLTESNXGVYLQQRQQLLNTLAVPNPLVTAFLQQXHLLPYRQXSLMNPD

SEQ ID NO: 343822 - protein, 43 aa, Zea mays
  Clone ID: MRT4577_76727C.1.pep
LLYTSILESLLEDVFEIDSERALTHDASTSCRRLGAATIKSAL

SEQ ID NO: 343823 - protein, 90 aa, Zea mays
  Clone ID: MRT4577_76728C.1.pep
FLYADLEGSYNCELETNTCREREQDGGTVVRGFIKHITIKELNYIYREYHIMHRSLFFILLNHNNINPMFVPVFIMLSCVCMTVVTEIFF

SEQ ID NO: 343824 - protein, 91 aa, Zea mays
  Clone ID: MRT4577_76729C.1.pep
LLYNASLVVYHGRVYCDTVLIVEQVIELVVLEVLRVEEIGNVHDRHTSSVGVSPVDQVVVAAVDRSVLAVLGGIIGYVLHHNPDYRMSHNP

SEQ ID NO: 343825 - protein, 145 aa, Zea mays
  Clone ID: MRT4577_7672C.1.pep
NIQFSYARFYASQNGRCEIDLFAVQSDGKKILDQHRQRALCCRLRMELLRPLRVALVNRGPDTELLVANPVEVSGKGRPLVFYDITLALKNLQKRIFLAEIGRHVVEDREWEVYRLHFGEEHELSSALRSKIVDEVTNMLMGWDS

SEQ ID NO: 343826 - protein, 66 aa, Zea mays
  Clone ID: MRT4577_76730C.1.pep
SHYLREVDDSNRVLTLKHEPGHTTCRDSPSPHTSIVPVAEPYKLLGPHAPALVSKTSDDYACATDN

SEQ ID NO: 343827 - protein, 41 aa, Zea mays
  Clone ID: MRT4577_76731C.1.pep
IRLGFRSKIVTHICKLLRIKNLSCIGWMRSGLVPKLAAGIH

SEQ ID NO: 343828 - protein, 84 aa, Zea mays
  Clone ID: MRT4577_76732C.1.pep
MREIIFLWGGPGLSGFYPGITHGNNPHQRQLRGAGPSFKQPGKRPPIQLNTGWLGIPGKLWGLGQPPIWEIGPVESGGQIRPEE

SEQ ID NO: 343829 - protein, 118 aa, Zea mays
  Clone ID: MRT4577_76733C.1.pep
SSACSSTSTPSTTGQTIIEATPTMLLLLMLLLLLLAKPLMFCMFETPLILLFATPLILLLFATPLMLFLLFAASEFAATNLPAPPLLILLIPEAEPPTLFLYTYLLTLTKFLWSSLYP

SEQ ID NO: 343830 - protein, 48 aa, Zea mays
  Clone ID: MRT4577_76734C.1.pep
PQCKMYIPFPFYFSFRNRQKPSKSHNLRSTTSKMLKLIFYYFFLVDIQ

SEQ ID NO: 343831 - protein, 197 aa, Zea mays
  unsure (1)..(197): unsure at all Xaa locations
  Clone ID: MRT4577_76735C.1.pep
LLVQXAIQXSIXRSLALTLQQPYRIVXGYRNASVVTGNGVDRLHRRLLFFINQLAAGGXGGGVQQHXFLSFNQRGGVNPAIYLQAHQLLPFNQLVGSPYAFLLQQQLLPFYLQAAANIVAFLTHQHFLPFYPQFVANINAFLHHHHLLPFYPXNVAYIVAFLLHLQLLPFXSYFLFLNPTTLXLQPPTIXGALFYFF

SEQ ID NO: 343832 - protein, 165 aa, Zea mays
  unsure (1)..(165): unsure at all Xaa locations
  Clone ID: MRT4577_76737C.1.pep
LLCTSCALLVHVQVLKDVALAFLTRGDCRDPPKDPPPTNXITAKYASDWLYAKATXYGKPTGAGPDYNGGAXCGXRTLNNAPFNTMAXCGNVPIFKDGLCCGSCIQIKSDKPAXCSXKTVVVHITDMNYEPIAAYHFDLEDTAFGDMANKGEQEKMRKASIILCD

SEQ ID NO: 343833 - protein, 72 aa, Zea mays
  Clone ID: MRT4577_76738C.1.pep
WKRKCLAAFGIVTQCLAPLRVNDPDLLNLLMKINAQLCGLNSLLPVESSSALPHVWRAPNILSGLVGDPADA

SEQ ID NO: 343834 - protein, 175 aa, Zea mays
  unsure (1)..(175): unsure at all Xaa locations
  Clone ID: MRT4577_76739C.1.pep
NSARGFQDSVVVQSSEITRTIPSLASLLKSDDIINKYFAAQALASLVSTGSRGIQLAIANSGAVLGAVALIGQVESDMPNLVTMAEEFKLSDNPCQIMLRSLFELEDVCTGASARRSIPLLVDLLKPMPDRPGAPLIAXXLLTQLAEGSESNKIAMGEAGALNALTKYLSFRPED

SEQ ID NO: 343835 - protein, 279 aa, Zea mays
  Clone ID: MRT4577_7673C.1.pep
MSGGSQPKGNLNNENWNRNYYQYQSQSQEFRPSGNAYTGSGNTGNSEGNINGSRGESTYHEANFEKRSYYNSGYSNNGYWSSDNNNSNNAWSDNSNYNNNNAWSGNNSYNGCIRNDNTSCNSNRDYNYNDTWSASSNSAWSSSNNNNQSGPFADNSNATRSSSSVNANHSVHSSGYGGNSNRGYTGKSLEGSAVKDPDPLDMSEEAKAERWFRRAAQIKDISELANIPDEDFPEIMPMRKGVNRFVVSKRKTPLERRLTSPQYRRNLPIVSSETDKDAN

SEQ ID NO: 343836 - protein, 65 aa, Zea mays
  Clone ID: MRT4577_76740C.1.pep
PSFSAGDFALHRVIQEIVEAIIRRFHPKFFMSCMHYRAVGANSGLGVGTSVPCLKRSWCGLNSID

SEQ ID NO: 343837 - protein, 64 aa, Zea mays
  unsure (1)..(64): unsure at all Xaa locations
  Clone ID: MRT4577_76741C.1.pep
GGGTKVLYLPNISIESPVHAHLGEKKRSVXYVAILIDIPPSILREVHSKKKSSSRLVHFCHSFV

SEQ ID NO: 343838 - protein, 79 aa, Zea mays
  Clone ID: MRT4577_76742C.1.pep
PFLSPSGYIFTLYVFAIREDLYAEAEAPCNNPYTSLTTPGSCTFYHLGLPNVRQLTVGNLNGSFPAGCPCRAWPGGRVG

SEQ ID NO: 343839 - protein, 503 aa, Zea mays
  Clone ID: MRT4577_76743C.1.pep
MLHGAQQASASSTAGPRPKSTAILQSDQPPRAAAAREGGRGGTGPESLVRGSVVAPCVSCGICGGLLRDATAFTECLHAFCRKCIYDKVAKDNIKCCPKCGIFMGNPLEKLRPDHSLEHIRPLIFPAKRRKVVTMKKRKERVSSESTLPSVVGTTAEESTALIPAASESKAQKDLTPVGRDALSRIRGRDFDSACGLTEDTGALIVWQAPPILEETAAHNQLDSKQDPDSFRPPATSDIEYQRQGPTAQMTNISFMVGNSSHARPTDQDDENMRGDILTLINESNARIMEMYDAHISKLKAGNIKLIEQLENERAAALERTRILEERLQQELENERTVAAERTRLLEKKLQRELEHEREAAIERTRVLDERLQRESEIARTAASRNEALKEEIFKLQEELEHGRAYNQALMSDILEKSEELATLTYYSNLLESEKTYLENQVDHLNEELKCTRKEHAAYVRKVLDAARAIPNDLEPINSATPMLCRDRGARRGSVSQPQAGHG

SEQ ID NO: 343840 - protein, 74 aa, Zea mays
  Clone ID: MRT4577_76744C.1.pep
VLQKYFTVQVQPISHVVHSLIPEYEKKKNTETLILCNQVTLRYNTSAHFPKRLFPLTHLKKSHENLSTKSIIAM

SEQ ID NO: 343841 - protein, 48 aa, Zea mays
  Clone ID: MRT4577_76745C.1.pep
PSRVKPDLPPSLTRKRCTNPLRDEHLNRRGAEDSHGWARLKANEGSCC

SEQ ID NO: 343842 - protein, 112 aa, Zea mays
  unsure (1)..(112): unsure at all Xaa locations
  Clone ID: MRT4577_76746C.1.pep
MDELVSVALEEVCARLAPGIPVVDLWPALRGTLDATGLPLGPAVKRALWARILALRVVNLVEGDGDXVPISCRDPAEKDFEEAERRCMRLVASAXIRDNFLGLYERRFAKSE

SEQ ID NO: 343843 - protein, 103 aa, Zea mays
  Clone ID: MRT4577_76747C.1.pep
RPGPEASVQRGTNARTSRRRFRMISTAPYRDRLSRARVVRNVPKAPPPPVVEATTKITYRCSVLIRHVHLLFPNFRPPTSPPPAEYYCLMNNSLNIRPRAHHR

SEQ ID NO: 343844 - protein, 116 aa, Zea mays
  unsure (1)..(116): unsure at all Xaa locations
  Clone ID: MRT4577_76748C.1.pep
LAGWSXSVGAXGRLVXVGCPLVWVGXAXPWAPXGLFLWSLVXPVLFPXRGFCVRRAWRRVCGFFAVAAPPLAPRCLPPVVRFVSLVACGFWRCAFFVAVCCLCVSPGAFFVLRAPP

SEQ ID NO: 343845 - protein, 113 aa, Zea mays
  Clone ID: MRT4577_76749C.1.pep
ASGDSDQVLVEANGSTRTLVLNRPKQLNALSSAMVTGLLKCFTSYEEENTVKLLIVKGKGRAFCAGGDVAEAAQSINTDTCKYGADFFHTEFLLNYIIATYTKPQVSLLTGIV

SEQ ID NO: 343846 - protein, 69 aa, Zea mays
  Clone ID: MRT4577_7674C.1.pep
ARNEAKALLNTIVLQLRQKAAADGSKIRRPQSHLSRTMAQLEGRVPVALHRGLQLHNANPLGNMIKNCD

SEQ ID NO: 343847 - protein, 87 aa, Zea mays
  unsure (1)..(87): unsure at all Xaa locations
  Clone ID: MRT4577_76750C.1.pep
IRHEAHMASLPSVSLAAANARRTRTPTAMTRHFSCWVRGAGKRXDHVDGVRADAEXGGRGGCCAGGLRFLCPAGGXXXXXXXXPPPP

SEQ ID NO: 343848 - protein, 54 aa, Zea mays
  Clone ID: MRT4577_76751C.1.pep
LKRIHRRPYITFKIKKFFLNHIIHISYYMNLRYLIQRLCTLYLCLDKYNSRVMR

SEQ ID NO: 343849 - protein, 74 aa, Zea mays
  Clone ID: MRT4577_76752C.1.pep
RGPLGGGEGGAGGRASRPSAQRDGAAVVAHLPAQASVPPAPGLQRLGQRWERPRLVQQLEVTFACKPNRPQVTG

SEQ ID NO: 343850 - protein, 103 aa, Zea mays
  Clone ID: MRT4577_76753C.1.pep
PRSFCPFFFSPFTMVLPAGWVQPSGPKRFLLTVWGGEKNQIPEFYPWPTGAPFSQFWPGPGVFYKKLALINKKKWALPPHKSGERALNPFCSFFSPLAKFWDP

SEQ ID NO: 343851 - protein, 81 aa, Zea mays
  Clone ID: MRT4577_76754C.1.pep
FVKLRGKGGQRKRGQKGCRIKKHAHPLECAQPCYFFSPLFFSWPPGAPAGLLNVVGEKRGDGGPKGGAHGGRHGGRTPCGG

SEQ ID NO: 343852 - protein, 145 aa, Zea mays
  unsure (1)..(145): unsure at all Xaa locations
  Clone ID: MRT4577_76755C.1.pep
TVALVFWGLVGTGGFKTSRGWGWQKPTVHLXPLPFIRPLPXFWPPNKKPKPGNNPINPPKLTRGQKFESWGVGRAGSPFLGXCGKFLRHQCSPAATPYSSPQCQALQQQCCHQIXQVEPLHRYQATYGXVVLQSFLQQQPQGELA

SEQ ID NO: 343853 - protein, 305 aa, Zea mays
  Clone ID: MRT4577_76756C.1.pep
MAGRYDGNPFEEEDVNPFSEQARGKAGGQSNFGGGAFYMPNTRNMPPASNSRLSPLPPEPADFSATVDIPLDSSKDLKRREKELQAREAELNKREKELKRREEAAARAGIVIEEKNWPPFLPLIHHDITNEIPSHLQRMQYVAFASFLGLVCCLFWNVIAVTTAWIKGEGVKIWLLAIIYFISGVPGAYVLWYRPLYNAMRTDSALKFGLFFLLYVFHILFCVFSAVAPPVVFEGKSLAGILPAIDLISVNALVGIFYFVGFGLFCLESLLSIWVIQQVYMYFRGSGKAAEMKRDATRGAMRAAF

SEQ ID NO: 343854 - protein, 63 aa, Zea mays
  unsure (1)..(63): unsure at all Xaa locations
  Clone ID: MRT4577_76757C.1.pep
PSLALFGXLLGSAFCPLCXSGPFASPFFLSXXFLNVAXLSVVPGFRLVSVLTYVFXWAXLXLL

SEQ ID NO: 343855 - protein, 165 aa, Zea mays
  unsure (1)..(165): unsure at all Xaa locations
  Clone ID: MRT4577_76758C.1.pep
MPNPQNVPPTSNSRLSPLPPEPADFSATVDIPLDSSKDLKKREKELQAREAELNKREKELKRREEAAARAGIVIEEKNWPPFMPLIHHDIINEIPSHLQRMQYVAFASFLGLVCCLFWNXVIAVTTAWIKGERWLEIWLLAIIYFISGCPGAYXVLWYRPLXNAM

SEQ ID NO: 343856 - protein, 120 aa, Zea mays
  unsure (1)..(120): unsure at all Xaa locations
  Clone ID: MRT4577_76759C.1.pep
MAAMNEKVLAKCGQNIVSLKRKRDSPAAYHADACHTSQSHQHPTGNSDIRLYVGEDRKANIACHFNKQILQSYQNYMTSASPKRILLRQSGNWXKEFPXKIVKLAQVDFRTKXTITEVGY

SEQ ID NO: 343857 - protein, 92 aa, Zea mays
  unsure (1)..(92): unsure at all Xaa locations
  Clone ID: MRT4577_7675C.1.pep
MPHKRTPAIWVKTDTTEALEGGTKAFNKFQMPTQIGVMIRDQHGIPLVKSVTGIKILSILKAHVLLLEILEGLYLLIKKAFXLIKNVEGNRK

SEQ ID NO: 343858 - protein, 54 aa, Zea mays
  Clone ID: MRT4577_76760C.1.pep
ARSPRGHSQSGQVSRPQTQKARRGSSPASTQARQRQNTPRTRPKEKEASTGPHT

SEQ ID NO: 343859 - protein, 48 aa, Zea mays
  Clone ID: MRT4577_76761C.1.pep
LLGVNSKENSGNYNPFSNQASSKQCNSSDRKQIHITIQESTPTSTVLY

SEQ ID NO: 343860 - protein, 55 aa, Zea mays
  Clone ID: MRT4577_76762C.1.pep
TFKDGSMFLKADCPTIKLIKEQASHESNVLTVQCAEYQENQEFQQYVQNYTAGCY

SEQ ID NO: 343861 - protein, 46 aa, Zea mays
  unsure (1)..(46): unsure at all Xaa locations
  Clone ID: MRT4577_76763C.1.pep
MALPNQGTVDYPIFKLCIVSDGGTFXTTFLNRHLTVXFEKKYEPPI

SEQ ID NO: 343862 - protein, 66 aa, Zea mays
  Clone ID: MRT4577_76764C.1.pep
KNSAVLARKARCQSAIGMAVYLAMVCMLILLAHRSPTRQCTHLSEGIKRWTDRTFEEGCLPGDGSV

SEQ ID NO: 343863 - protein, 176 aa, Zea mays
  Clone ID: MRT4577_76765C.1.pep
PTLGGSSTPRGAREDGFLLGPACSAAITAPFTFEPLSRAGFVPVIHTRMRKSDTGASLDGNLYDLPFGRLGPVQGTPPMEAAIGGWDSVVSRLKLSRFVVASVLVHILHVFGLALGLGVEWRLLYLPWDGAYGLCVGVAHTTVVGYPDWIEPELNLLFISAATEGALMWLIIAIPG

SEQ ID NO: 343864 - protein, 69 aa, Zea mays
  unsure (1)..(69): unsure at all Xaa locations
  Clone ID: MRT4577_76766C.1.pep
MADSKATSAVTIRTRKFMTNRLLARKQILLDVIHPCRAYVXRQSCKKRLTRRTXVNDPCTILVYKGRTH

SEQ ID NO: 343865 - protein, 94 aa, Zea mays
  Clone ID: MRT4577_76767C.1.pep
KDAWADAWGVPATLLLMFEHPIHESADTVKTALSRALVYYHPFAGRIAAGADAHADGGKLHIWCNREGATFVSAHASCGVQEVIGLDRSGAPTT

SEQ ID NO: 343866 - protein, 169 aa, Zea mays
  Clone ID: MRT4577_76768C.1.pep
CSVAAEGCKHEFCTRCALYLCSTSYTSASPAGAIPCPLCRHPIISFNTLPGTSPIRELPRNSLSLSFCTACPAVSSDSSAPVGAHPCRSEFQCVRLPPMGSSSFRSLSCQRIPAMKLHPSFCMGSMDTNPCLIRCSRFGSGLGRSASQREGATRRAWPVTFSPIAATGS

SEQ ID NO: 343867 - protein, 184 aa, Zea mays
  unsure (1)..(184): unsure at all Xaa locations
  Clone ID: MRT4577_76769C.1.pep
MRKIWCILAVYXGGPTMGGIVLYRPHIEDSALEISKRRIQDCNTETVPIYQHDLHDDVNELRGMKLLFSSDAVNHGHDVDIILAPVNIPMKTGVLGAGKAGELTYCESAARMSLHESESDNIVAEKSSDRDNSAEAMREYLDYTSEGXNYQILSNPEFLAEGTAIEDLFXPDRVLIGGRETPEA

SEQ ID NO: 343868 - protein, 65 aa, Zea mays
  Clone ID: MRT4577_7676C.1.pep
ILLNLTKLIWFKQFTMCLKTGKGDFIYSDLKHRLCGRSYLINLPILYLHDTTCSYFYEPPLTYHW

SEQ ID NO: 343869 - protein, 42 aa, Zea mays
  Clone ID: MRT4577_76770C.1.pep
GYIMVRKRRRPCSEEVAPTSLASFGSCKKKSSRGVRDCARVG

SEQ ID NO: 343870 - protein, 158 aa, Zea mays
  Clone ID: MRT4577_76771C.1.pep
VILDLLVAVPRRHRSSTMEHQDAAIRKLLDEMRLMEARLSERISGHCDDVEHYLDEHCEEPCDETFQEEPCDETSQGSHLRRGALFPPPHPQFGSNLSLRLGRSAFGRPCRGPELPGFASSTGHPCCAEQLRRERASTGGGRRRRPSRHAEGSFPASP

SEQ ID NO: 343871 - protein, 76 aa, Zea mays
  Clone ID: MRT4577_76772C.1.pep
ATPRLHKRHTGGFFNVFCVFPAHPQTLLIPVWWDSNAVGGLGPMFIITHIKEHCSRGLERTEPDEPTMYYLWLAGV

SEQ ID NO: 343872 - protein, 329 aa, Zea mays
  unsure (1)..(329): unsure at all Xaa locations
  Clone ID: MRT4577_76773C.1.pep
ASLSGTSRRRWTRTPRWRASWVPQVCWDIKGVQVACADGRSICLDAFCDSNPSTMTKCKHDYHLQCILVWCQRSSQCPMCWQHISMKVPMSQELLEVVEQXRNIRANPSRNXAVFNHQXLGNFEIPIGSDDAXLEERIIQHLAAAAXAVRRSHRHHNRRDGHQSRSEASSHPQFLVLSADERTISGQEGDYEQASAVASGRPLRTLVEQERTRGLADASSPSLRCSTPADSTGRSNNRISGIESTPVDQDGTGPSAVQSMVQGFHNQSASGWRERWFSRSNSLLDLGSEVRREVNAGIAAVSRMMEWHDARDGTGAGPSPTSASRSGSQ

SEQ ID NO: 343873 - protein, 132 aa, Zea mays
  Clone ID: MRT4577_76774C.1.pep
PPRGRFFLLRSPKSPPSEAVGTKGGGPGPSPQGIGVRAWRGFFRGGTWQYNTGFFFSEPPGNGGPPGGGGVCFERTPVRNKQFFSGERFRCGLQITWAKKNLRRVEMVVGPGFSAPGPPSPPRLHLFFSFFG

SEQ ID NO: 343874 - protein, 121 aa, Zea mays
  unsure (1)..(121): unsure at all Xaa locations
  Clone ID: MRT4577_76775C.1.pep
MDEKATMESKLSSAAAFVEGGVQDACDDACSICLDAFCDSNPSTMTKCKHDYHLQCILEWCQRSSQCPMCWQHISMEDPMSQELLEAVETERNIRANPSRNTAGFHHQMLGEFEIPVXADD

SEQ ID NO: 343875 - protein, 94 aa, Zea mays
  Clone ID: MRT4577_76776C.1.pep
ALSAASASTAPTARKSPSATRGRTRGGAHGWCSTPVPMGHRPSQAALPYIYMRPWDSVSRRPEQLDRVVAARPSETSVSLGWVRCFSFYLCFTN

SEQ ID NO: 343876 - protein, 87 aa, Zea mays
  Clone ID: MRT4577_76777C.1.pep
SPCSAAKGNQILLVDNTRKEAQGSLTCIAQGSKQLSLHFIWKSLILIRSKFLILYFITDFVIPDLLTSSQIGYNLIVVLLTNSRKKS

SEQ ID NO: 343877 - protein, 141 aa, Zea mays
  unsure (1)..(141): unsure at all Xaa locations
  Clone ID: MRT4577_76778C.1.pep
MDEKATMESKLSSAAAFVXXGGVQDACDDACSICLDAFCDSNPSTMTKCKHDYHLQCILEWCQRSSQCPMCWQHISMKDPMSQELLEAVEQERNIRANPSRNXAVFHHSNAGXDFEIPVXADDAELERRIIQHLAAAAAVR

SEQ ID NO: 343878 - protein, 145 aa, Zea mays
  Clone ID: MRT4577_76779C.1.pep
HASAHASEQVYVKGGQKLQQVLVEQERTRGLADASSPSLRCSTPADSTGRSNNRISGIESTPVDQDGTGPSALQSMVQGFHNQSASGWRERWFSRSNSLLDLGSEVRREVNAGIAAVSRMMEWHDARDGTGAGPSPTSASRSGSQ

SEQ ID NO: 343879 - protein, 88 aa, Zea mays
  Clone ID: MRT4577_7677C.1.pep
KGRVKNLECLVPGRFRPHHCFRGGGNCCCVRSFLKGLGIASRGEGEALYVNASPRHGGFFCGGGEVWPSFCSLGGGFFVFPRNQWFGF

SEQ ID NO: 343880 - protein, 180 aa, Zea mays
  Clone ID: MRT4577_76780C.1.pep
MDSGSDSDGAPEELTAVQGVAKHEEISKVEKDSVLRVTREGKERRKRWAQRRTSSKPDKKAPKEVEDEDTKKSEEHEETNTMPGMLPTSVIEILAAREKQTFASDSEEENVKQKVQRRKKRMKTDGPETILLKDVRSTQHVKNALDFLEHRKNRVPRSNAVLKNASKALRLLSSKGNFLS

SEQ ID NO: 343881 - protein, 66 aa, Zea mays
  Clone ID: MRT4577_76781C.1.pep
ATGFPWSPWPMQVVTPPQKRVGRCPLCQGKPKFFCLVRPPPPTVIIIMGIIIINRVGLAPLVYLNQ

SEQ ID NO: 343882 - protein, 183 aa, Zea mays
  Clone ID: MRT4577_76782C.1.pep
IAETEQLLKKMYIADYLDKNGRTVFVAMPSIKSLVPAKEQVKLLVYNLESCTMSSENAQENVVWVVDFSGWTVSSTPLAESRQSVHIIQNYYPGLIDVAILCNPPKMFESFWKILNYFIEPEVKEKVKFVYTNDSECQRIMADMFDLDKLESAFGGCNTSGIDIVKYSERMQRRDQTRNLHIP

SEQ ID NO: 343883 - protein, 87 aa, Zea mays
  unsure (1)..(87): unsure at all Xaa locations
  Clone ID: MRT4577_76783C.1.pep
MRIAEQNSRKMAIGLVACLALSAAIAYVMQMPCPCSGLHGLYCAGSRLTTMMGARXLYPYAEYLTQTHCSPLAAAPYYAXCGQTSAM

SEQ ID NO: 343884 - protein, 79 aa, Zea mays
  unsure (1)..(79): unsure at all Xaa locations
  Clone ID: MRT4577_76784C.1.pep
FPQSXQAPYRFPILPPYLXPSMXIATVXENPPLQPYTLQHAIAPSIIPLSPLFQQYPTLSFVQTLVQTIMAHYLYQLLL

SEQ ID NO: 343885 - protein, 93 aa, Zea mays
  Clone ID: MRT4577_76785C.1.pep
ASPRTPWLRRAGVAAAQRSIRVQVSLLSLRGLVGWAAMLFLCLALAVRSYRVRALLSQSTGRGGGVAGDEGRARESRQQPACRERRRPGVRGP

SEQ ID NO: 343886 - protein, 50 aa, Zea mays
  unsure (1)..(50): unsure at all Xaa locations
  Clone ID: MRT4577_76786C.1.pep
SXPCDTXEDLXIXXMIXTQLLLMPSVXQXDATDKHLRPDTSPRHANRHSX

SEQ ID NO: 343887 - protein, 101 aa, Zea mays
  Clone ID: MRT4577_76787C.1.pep
FQPWKNILLAFGGGGGSTFPQTFFKKFREDIHLGPQLDTIGGIQIPGGGTSGPLLLFYTILGGGGGEGSWGVQVLFYHIRPRGRKPPSVRSPHSTRPFIVT

SEQ ID NO: 343888 - protein, 72 aa, Zea mays
  Clone ID: MRT4577_76788C.1.pep
NFGLIYRERYGSVHHVEEVQVDKEDVVLGRGALSVVRVEVVPRMVIVVRGKRIVLLQCYGGLWKDQYESVSR

SEQ ID NO: 343889 - protein, 173 aa, Zea mays
  Clone ID: MRT4577_76789C.1.pep
VGGHALKTNITTLGPLVLPFSEQLLFFAGVLFRHLFPSKASTPAPPTTPGDASAAAPYIPDFKRAFEHFCMHAASRDVLEHLQSNLGLRNADLEASRAALHRFGNTSSSSIWYELAYLEAKGRVRRGDRVWQLAFGSGFKCNSAVWRAVRRVRRPARSPWLDCIDQYPARMDA

SEQ ID NO: 343890 - protein, 126 aa, Zea mays
  unsure (1)..(126): unsure at all Xaa locations
  Clone ID: MRT4577_7678C.1.pep
GVKTGAPGPETGAGGTPPWSPQTPPWGMRPPPGPAPPPGKGGPXPGXKKNKGPGVPPPQGKNPGPGPGEAPLVDPPXGPPGLXQKRPPEGGAHGAQWPALSPPXGPPPWGPEKKDNPPGLGGPPQP

SEQ ID NO: 343891 - protein, 67 aa, Zea mays
  Clone ID: MRT4577_76790C.1.pep
SGSYSTNGSVFVPTAGPTLFECSLSYLKSGGEKDTRRAGSGEEIDTGLSLRICLECDVALFSNRLPQ

SEQ ID NO: 343892 - protein, 110 aa, Zea mays
  unsure (1)..(110): unsure at all Xaa locations
  Clone ID: MRT4577_76791C.1.pep
RAFEHFCMHAASPDVLEHLQSKLGLRNADLEASHAALHRFGNTSSSSIWYELXYLEAKGRVRRGDRVWQLAFGSGFKCNSAVWRAVRRVRRPARSPWXDCIDQYPARMDA

SEQ ID NO: 343893 - protein, 180 aa, Zea mays
  Clone ID: MRT4577_76792C.1.pep
VDPLPSDDRALPLRVPGGGRAADQGPVHQQLLFFAGLLFRHLFPSKASTPAPPTTPGDASAAAPYIPDFKRAFEHFCMHAASRDVLEHLQSNLGLRDADLEASRAALHRFGNTSSSSIWYELAYLEAKGRVRRGDRVWQLAFGSGFKCNSAVWRAVRRVRRPARSPWLDCIDQYPARMDA

SEQ ID NO: 343894 - protein, 146 aa, Zea mays
  unsure (1)..(146): unsure at all Xaa locations
  Clone ID: MRT4577_76793C.1.pep
QYWGLGADLGNVHHPEHLIVYENSLQETMPSELRELXKIVSSDLDKNNIPRRLPXHLQRLNNXACLPLMVQQGSADTPTEVYGISTVHLLDASMNDLCVTIRPSGPYEHRALIICDNDAHLDGADVQGVVIYEAECLRADLPRHNL

SEQ ID NO: 343895 - protein, 125 aa, Zea mays
  Clone ID: MRT4577_76794C.1.pep
MVDAWWPLLGAAIPALVAGQFVRIKRRRDEEQRLKAARGREKSSDEVFVCERVCTSKRMLKKVGAFSKDPIPETCVTVCGVSELDACADACARTVCVNQHQVPNWNDVCLKRCQSECLKLSSNLM

SEQ ID NO: 343896 - protein, 110 aa, Zea mays
  Clone ID: MRT4577_76795C.1.pep
QMHTQTRTASDAVDLPAWHGLASTVLAVGSRVETALGRKLHGVLGIDVVNAHLRRVLVTAQALEVRPRQRVSASLGRRDRRVRRLGLFELARHELLVAHVENIRRALEPN

SEQ ID NO: 343897 - protein, 50 aa, Zea mays
  Clone ID: MRT4577_76796C.1.pep
HYSKKKGQEPLRNRHIHTDCNIDIYVFIQISSLFSLVILINTTRKFSVEV

SEQ ID NO: 343898 - protein, 49 aa, Zea mays
  Clone ID: MRT4577_76797C.1.pep
QSGVARQYCTSGRWRRLVTAVSNSSVIALNLIYSLDVTEFAWRELGMFN

SEQ ID NO: 343899 - protein, 125 aa, Zea mays; identical to SEQ ID NO: 343895
  Clone ID: MRT4577_76798C.1.pep

SEQ ID NO: 343900 - protein, 125 aa, Zea mays
  Clone ID: MRT4577_76799C.1.pep
MVDAWWSLLGAAFPALVAGQFIRTKRRRDEEQRLKAARGREKSSDEVFVCERVCTSKRMLNKVGAFSKDPIPETCVTVCGVSELDACADACARTVCVNQHQVPNWNDVCLKRCQSECLKLSSTLM

SEQ ID NO: 343901 - protein, 439 aa, Zea mays
  Clone ID: MRT4577_7679C.1.pep
MAAATEKTAEDIRRELQELQRQHREVHLFLCPAHLEAPSLRAVCPDPRVVPSQITERLRDPRGLRRGAPGPGPGPGPPRPLRGFVRPHVGAEVADQAPQKRRLLSAVVKVDGAENNEEGTKDANGEGQEAGSGATEGSDRRTFNTGGFRRDGSLWMQRRVDYNSLPEPAPRELPRNEDPSLVRRNKRMLGQLLVGTLEKFQQEDKKLSNSEAFLRRSETQRKAEQKVREESERLRQQEREQIAEKRKRDMTLRARVAAKAEEKRLELLYIQWTEHHKRLSNFLRTKAEPPIYYMPTKPIIDDPAIVEQNKEKVFEEWKSMRRDELTRFQKQVEEQYLSNVERQLERIQNARNARKANGHANMQEMDKELDTHRAEHGPKTRRVPEEGGNDDDEDAEDMAAEDEVMDEVLGINDGINEDPSKPSEEATTEGGEPAPEEAQ

SEQ ID NO: 343902 - protein, 51 aa, Zea mays
  Clone ID: MRT4577_767C.1.pep
PSYKVDLKYYSPVRYINKFTFNSHVLCVLLAFIVGQNQAHPILKNIIIYYI

SEQ ID NO: 343903 - protein, 69 aa, Zea mays
  Clone ID: MRT4577_76800C.1.pep
KRPEQSQRAKENPQKPTYCPWEKIPLGPSNIPQFRHGKVKWAPNYLKKKGPPVGTKKEGHPRHPFGVCF

SEQ ID NO: 343904 - protein, 76 aa, Zea mays
  Clone ID: MRT4577_76801C.1.pep
FVDIDECARPHMYPCYGGKCKNTPGDYECSCPAGTKGNAKQAPCTDLFPLPAKISVGEILQRKEKKQTIKGKCKIN

SEQ ID NO: 343905 - protein, 71 aa, Zea mays
  Clone ID: MRT4577_76802C.1.pep
STVLVLSLAGAASRLMAADEEASGLPCHTDGDHRMRLHYADMRYADGHLLNGLALAFSVEVTLTEVLMATK

SEQ ID NO: 343906 - protein, 71 aa, Zea mays
  unsure (1)..(71): unsure at all Xaa locations
  Clone ID: MRT4577_76803C.1.pep
PSLDHYTCLXDLLGRAGRLKEXDELMEDIPTEPDSVLXTPLLGACRHDKNVEVGERTAAKVVELDPENSGP

SEQ ID NO: 343907 - protein, 46 aa, Zea mays
  Clone ID: MRT4577_76804C.1.pep
VGRASSLELRAALGLVLARVRRAHSPAQPGAAPRLWIWRTVLHARV

SEQ ID NO: 343908 - protein, 83 aa, Zea mays
  Clone ID: MRT4577_76805C.1.pep
KVRNPKTLSCRLCLLCPGGPQLRWSSAPVTVCSLLPCSGARLCSAPALASAHCSTPATVCSQSILNSVQSSVLTSVVNLRTRG

SEQ ID NO: 343909 - protein, 240 aa, Zea mays
  unsure (1)..(240): unsure at all Xaa locations
  Clone ID: MRT4577_76806C.1.pep
NFDGDSEXKDASTSXDKVNSTQLASIGSSSSTGKKKQPVISDNNVPIERTPQLIADHFQLKEDQGSSSRASSSAQNKGSMETLSSDISQLSIERNNVNVAQPLPEEYKPEGWMLADQESGVLSQLNLAIVGHVDSGKSTLSGRLLHLLGKISKRDMHKNEKEAKEKGKGSFAYAWAMDESTEERARGVTMTVAVAYLETKKYRVVLLDSPGHKDFVPNLISGATQADAAILVVDASTGSF

SEQ ID NO: 343910 - protein, 85 aa, Zea mays
  unsure (1)..(85): unsure at all Xaa locations
  Clone ID: MRT4577_76807C.1.pep
NKNKNTLSNPPPPFNIINSKITQFKKYLPFNFFLFLFFIFFFFFXRRPNPNIXIAPRTITIPCHFHLPPPXCGPPNHQVVVDIHQ

SEQ ID NO: 343911 - protein, 75 aa, Zea mays
  Clone ID: MRT4577_76808C.1.pep
CMWPTRNKKLHFQKKKRVIHKGEQCLGATYRITVPTDHLCTKNGGGELTLFSPSLALTSRSRLKRVAQWIFDVRL

SEQ ID NO: 343912 - protein, 64 aa, Zea mays
  Clone ID: MRT4577_76809C.1.pep
RWKNIFFVNLKVCFLLPTRTTSQLGSDSVNKGQYPVSTAHTVPGICTMLPVKYNFRQVYAQCGT

SEQ ID NO: 343913 - protein, 191 aa, Zea mays
  Clone ID: MRT4577_7680C.1.pep
PLAAAAVIHVAGTKGKGSTCTFTESILRSCGFRTGLFTSPHLMDVRERFRLDGVDISEEKFLKYFWCCWNKLKEKTDDDIPMPAYFRFMALLAFKIFSAEQVDVALLEVGLGGKFDATNVVKSPVVCGISSLGYDHMEILGNTLGEIAGEKAGIFKKGVPAYTAPQPEEAMVALKRRASELGISLQVVDPL

SEQ ID NO: 343914 - protein, 88 aa, Zea mays
  Clone ID: MRT4577_76810C.1.pep
KGGGDGKKDTRREGAFCVKRGKRRGGTKAVWNTKPDRFAPPQILYIKRGPSMQGWFGMDPAGAKKTRNLRGPFFKKGAWTKKIEKFFL

SEQ ID NO: 343915 - protein, 54 aa, Zea mays
  Clone ID: MRT4577_76811C.1.pep
GGGVFPKKNGHHPCLLNVKPHTPGANQLFSLPPTPLPFQWFIQANAHTATHGDG

SEQ ID NO: 343916 - protein, 118 aa, Zea mays
  Clone ID: MRT4577_76812C.1.pep
PTEREHRTAAAAAMVNVPKTKKTYCKNKECKKHTLHKVTQYKKGKDSLSAQGKRRYDRKQSGYGGQTKPVFHKKAKTTKKIVLKLQCQSCKHYSQRAIKRCKHFEIGGDKKGKGTSLF

SEQ ID NO: 343917 - protein, 655 aa, Zea mays
  Clone ID: MRT4577_76813C.1.pep
VAHASAHASDSSYLTGSLSSRFTKPPPPQVHSPPPSRLVGGFEFELNERRLAPAVSLLSVPELVHLQHLRPLLALSQQQYQKPRPPHPPATMPSGDDSDPLLAPADGIRFAALDYRDHPADRGATGGWRSALFIIAVEISERFTFYGVSSNLINYLTGPLGEGTAAAAAAINTWNGVAQLLPLLGGALADKWLGRYRTIVVASLLYVIGAGMLAFSTLLSSGSGHQCTTAGGQTCAPSTIKVTFFYVSLYIVAVAQGGHKPCVQAFGADQFDQSDPKETVSRSSFFNWWYFGMCAGTAVTLLLLSYVQDNIGWGLGFGIPCAVMAAALAVFLLGTRTYRYYVTAGQGLFARAGEAFAEWRSRRKAGQLVRIPRLDPPAADAPRFSAGVDVEEQAAVRNNGGLVKEAKAIIRLFPIWAACLLYAVAYSQSSTFFTKQAATLDRRIGRHVQVPPAALQSFISVTIVVIIPIYDRVLVPVSRRYSGKPSGITMLQRIGTGMFLSLLSMVIAALVEKHRLRVAGDAGLVDKPKVPVPMSLWWMVPQYVLFGAADVFTMVGLQEFFYDQVPDKLRSLGLALYLSIFGVGSFISSALVSVIDRVTTDRGGSWFSNNLNRGHVDYFYWLLAALSAVELLAYVFFAVTYKYKNRGAVHATVDG

SEQ ID NO: 343918 - protein, 104 aa, Zea mays
  Clone ID: MRT4577_76814C.1.pep
KTQKAATAGGMGHRANDTGPHHHYHPTHTLFSPRYLQPGPDTSTRKELVATDRASFETPPPPGGGPRNNRSGLNKKIPGNTAMYPREGIPRHGRTPIPWALAPP

SEQ ID NO: 343919 - protein, 613 aa, Zea mays
  Clone ID: MRT4577_76815C.1.pep
IGYLEAGRGLGLQSLRRRKSTPPVVQPAVTCSEPTTVPIKPRLPHPPATMPSRDDSDSLLVRAEGIRDAALDYHGRPADRGATGGWRSALFIIAVEISERFTFYGVSANLINYLTGPLGEGTAAAAAAINAWNGVAQLLPLLGGALADKWLGRYRTIVIASLLYIIGLGMLAFSTLLSSGSGHQCTTAGGQTCAPSTIKVTFFYVSLYIVAVAQGGHKPCVQAFGADQFDQSDPKETVSRSSFFNWWYFGMCAGTAVTLLFLNYVQDNIGWGLGFGIPCAVMAAALAVFLLGTRRYRYYVTAGERGLFARAGEAFVEWRSRRKALQHGDRPVAEGAPGFSAGVDEEEQAAVSHDAGLVKETKDILRLFPIWATCLLYAVAFSQSSTFFTKQAATLDRRVGRHLQVPPAALQSFISITIVVFIPLYDRVLVPVARRYSGNPSGITMLQRIGTGMFLSLLSMVIAALVEKHRLRVAVDAGLVDKPMVPLPMSLWWMVPQYVLFGAADVYTMVGLQEFFYDQVPDKLRSLGLALYLSIFGVGSFISSTLVSIIDSVTTARGGSWFSNNLNRGHVDYFYWLLAALSALELLAYVFFAVTYKYKNKATVHATVVGQSL

SEQ ID NO: 343920 - protein, 52 aa, Zea mays
  unsure (1)..(52): unsure at all Xaa locations
  Clone ID: MRT4577_76816C.1.pep
LFWSFVAFRCASAWKCEGPRPLPVRGQASDMADGXAATVAGGRQRDGNLRRR

SEQ ID NO: 343921 - protein, 116 aa, Zea mays
  Clone ID: MRT4577_76817C.1.pep
RLRTRGRERRPLFFFFFLCFFLIIPIMQKRPDFGFVSFLDSESVKQILSERGPHFICGNEVHVKAYREKHELEYMMLTEKDIHCNCGVRDVSDVGDLQFCHHWQWTSLICYRTHKS

SEQ ID NO: 343922 - protein, 166 aa, Zea mays
  unsure (1)..(166): unsure at all Xaa locations
  Clone ID: MRT4577_76818C.1.pep
MYKKKKKKKKKKNQELDPPAADAPRFSAGVDVEEQAAVSNNGGLIKEAKAILRLFPIWAACLLYAVAYSQSSTFFTKQAATLDRRIGRHVQVPPAALQSFISVTIVVIIPIYDRVLVPVSRRYSGKPSGITMLQRIGXGMFLSLLSMVIAALVEKHRLRVAGDAGL

SEQ ID NO: 343923 - protein, 102 aa, Zea mays
  unsure (1)..(102): unsure at all Xaa locations
  Clone ID: MRT4577_76819C.1.pep
MLVWTVVLLRTLRRKVVVKAAATPTWACDVVTIXARAIELAATMXNAGAALTLEAGRTTNDSTVDAATSVSAFSRKILILLMLSITSXANAASSKKVIDKTA

SEQ ID NO: 343924 - protein, 111 aa, Zea mays
  unsure (1)..(111): unsure at all Xaa locations
  Clone ID: MRT4577_7681C.1.pep
MIQPLVEQNREKVFEEWXYAQNARNARKANGPGNMQEMDKELDTHRAEHGPKPRRVPEEGGNDDDEDAEDMAAEDELMGEVLGINDAINEDPSKPSEEATTEGQPATEEAQ

SEQ ID NO: 343925 - protein, 98 aa, Zea mays
  unsure (1)..(98): unsure at all Xaa locations
  Clone ID: MRT4577_76820C.1.pep
PPSVGPTGLGTCFPSFGIFRAHPVARKGPPPSPPPSVWDGSMVQIWXCPPPPKWEQRTASPIRCHVLGFWVCSLFGFSRGFFFFNNKKKPNKKKKKKY

SEQ ID NO: 343926 - protein, 43 aa, Zea mays
  Clone ID: MRT4577_76821C.1.pep
NKLSVYPPNKLKSHTSFDKESCKRSFKKICIQKNCHDNITQSE

SEQ ID NO: 343927 - protein, 59 aa, Zea mays
  unsure (1)..(59): unsure at all Xaa locations
  Clone ID: MRT4577_76822C.1.pep
FSFTVSHFTSLYQLFRGRYISLYLKDHHLXSLXERLLKDLINKHSYFIIYPISLFIHNT

SEQ ID NO: 343928 - protein, 55 aa, Zea mays
  Clone ID: MRT4577_76823C.1.pep
ESFESSLNSFINLISNKYTFIPYSDSNFIVEAVRNRVYMLRNPLSMICRILGFRH

SEQ ID NO: 343929 - protein, 71 aa, Zea mays
  Clone ID: MRT4577_76824C.1.pep
PRVRKKKKKKKKKKKKIKIRQSSETKLSFPYNFNSYILPFFYIPHCVHLLPYPLLIIFFIHPLFPIYPLST

SEQ ID NO: 343930 - protein, 141 aa, Zea mays
  unsure (1)..(141): unsure at all Xaa locations
  Clone ID: MRT4577_76825C.1.pep
GASLVGLSFRASSLKMAVSWGLPWLYAFGAAKSMLVYEVSLIIFWVLSLGPMRRAFLEPMRNFFDPRGHFVYAFGVHYDFRXKLLILCPLPGYLFLGDGLGRIRWQGFGFATQEDLLSFAAGPSLFLGFLMSLGWVFFAIL

SEQ ID NO: 343931 - protein, 112 aa, Zea mays
  Clone ID: MRT4577_76826C.1.pep
ASMPIRRNTLNMRRIRLIIGTKRSLRGANKIKSRTRNALRLNRIATKSSTKELMISSTLRTDQTPIRRLSNTLNLSYNRDDIRILKGRVAAMRRTTYRMLTVTKITLNRRTQ

SEQ ID NO: 343932 - protein, 409 aa, Zea mays
  Clone ID: MRT4577_76827C.1.pep
MAPSGIEAGGVRLPHVEMVCRPSGGPRLPRSLRAASTPAGSASPYHYAACPCRTPPRHQGRRRVAPPPRPRLRARRRLVLLRPPPAVPSPRRPRRLPPPRPAAAAASDAADPRHRELPAAVSSVFSEFRDPAPSPVTPDDAEAAPDEPRDLGFNDDDGFDADSILCGVDQSAAEGIDGIMGKLSMENNGASGSGSSVDSNMPESKMHPYLRNLMVLGLSFRQDQNIIINQALKRHSVDPEWWMCPAIPVKDITPAPPPSVAMAKVTDKKKTKKKSLGTIYEEGSPEPANGDDDGALALPETGLGLSLNTDGVLKAWCGRGSAFADGNGPDLPLSPAHVVVKHEDNDLFPKNGTGAVIREGNILKMQRKQKPCTPLPSNKQSRYYRPRVKGRFVSKACFLQRQQALEKES

SEQ ID NO: 343933 - protein, 254 aa, Zea mays
  unsure (1)..(254): unsure at all Xaa locations
  Clone ID: MRT4577_76828C.1.pep
QPWRRRASRPAASGCRTWRWSRPRRRRRRPARRTPRRPPRSRRHPTRPQPPPRRWRRCRSSARARRESGPARRTTRRRRCSRPCTPPYSPSPGAGGAPRRRHPASSASPPRLATTRPAPTSSLRSPFPEATPPSSSATCRRRRRAPPASPRAARRPRPSAASSXFRDPAPSPATPDDAAAAPDEPGELHFDVDDGFDADSILCGVDQSAAEASTASWVSSLWKTAGRPCQAQASTPTCPYPRYTLTSGTLWSSG

SEQ ID NO: 343934 - protein, 57 aa, Zea mays
  Clone ID: MRT4577_76829C.1.pep
RVTKLSWLLSAGEGLPRFAWHGKGLILWLDGDPFTAKAQLPGRRTGFNLYILESLFF

SEQ ID NO: 343935 - protein, 197 aa, Zea mays
  Clone ID: MRT4577_7682C.1.pep
SSTDLVGHRIKVWWPLDKRFYEGAVQSYDSSKKKHRVLYDDGDVEVLNLAKEKWILIESNDSSVKKQKKDHLGTNPGRALEITSSSKSPPSQTKSKKRSLPSKKKGQPTNKRRKTAGRNNSVEEGSGAGGNDSDSSSSLARSDVDKDVNSDGHMEEVVVSSAEKENARKDSKDVKIKEKSAKDFKGLETKEKARKDS

SEQ ID NO: 343936 - protein, 128 aa, Zea mays
  Clone ID: MRT4577_76830C.1.pep
RLLSLEKTSLADKPPLDPRPVVPTLLVGWEGSAWLLLALHLQNVAFPDNSAGTILWEEIIVFMFNYHMSRGQWQVPAYSALLPLLSATPRLEHPISIQAKPQSCLWQCQSSILVAIGRLRTPLLIYCP

SEQ ID NO: 343937 - protein, 72 aa, Zea mays
  Clone ID: MRT4577_76831C.1.pep
VSKQALRPAIKTFFLGSIKFEPWKRLWKSWAPPKCKVFIWLTIRDKCWTAEKIEKGCLSHPEHCPLHDQADE

SEQ ID NO: 343938 - protein, 594 aa, Zea mays
  Clone ID: MRT4577_76832C.1.pep
MAAPLAPLTAAAVLRLGSRGLRHRILLASLRPCSSATPPHRSALPAAARRAPPPPRRCAHTLAASAATAISEGQADLVPGSTTSTKGRIYHETYGCQMNINDMEIVLSIMKNEGYDEIVPDPESAEIIFINTCAIRDNAEQKVWQRLNYFWFLKREWKANVAEGRAKSMRPPKIAVLGCMAERLKEKILDSDKMVDVVCGPDAHRDLPRLLQEVDYGHKGMNTLLSLEGNYADITPVRISDNSITAFVSIMRGCNNMCSFCIVPFTRGRERSRPVSSIVREVGELWKVGVKEVMLLGQNVNSYNDTSEVEELEPGKNWQLSEGFSSMCKVKNMGLRFADLLDRLSLEYPEMRFRFTSPHPKDFPDELLYLMRDRYNICNLIHLPAQTGSTAALERMRRGYTREAYLELVHKIRDVIPDVGLSSDFITGFCGETEDEHAETLSLVRAVGYDMAYMFAYSMREKTHAHRNYEDDVPEGVKQRRLMELINTFRETTKKNYDSQVGTVQLVLVEGPNKRAPKTEVIGKTDRGHKVSFARVPVPHTFEGEEAREPAVGDFVEVRILRSSTATLFGEPIARTSLSAFHRNVSPGAQAAAA

SEQ ID NO: 343939 - protein, 190 aa, Zea mays
  unsure (1)..(190): unsure at all Xaa locations
  Clone ID: MRT4577_76833C.1.pep
GVRFLPLLDPLTDRSAEPPWRRRASRPAASGCRTWRWSRPRRRRTPRRPPRSRRRPARPQSPRRPPRHRWRRCRSSARARRGSGPARRTTRRRHCSRPCTPPSSPSPGAAPRRAASSASPPRSPTTRPAPXPPPAVPSPRRPRRLPPPRPDAAVSASDAADPRCRELLVARCRQQRLQRVPRPGAVFCDP

SEQ ID NO: 343940 - protein, 253 aa, Zea mays
  Clone ID: MRT4577_76834C.1.pep
MAVVRLRVSPRLRSIPLLLSQPDAATVRRSFACASASQAPAPARAMAAPSSSSATPSPYTTLVGRVSCEREIKRSKFIAIAAPVPNERAAMAFLDQVKDPRATHNCWAYKLGDQFRYNDDGEPSSTAGKPIYSAIISSGIDKVMVVVIRYFGGIKLGTGGLVRAYGGVASECLKDAPTCLVKPKARVGMEVPFNLLGTVYHQLQHFEAEDIKQDYDTGKDGTVMVMFEVEYEKIENLGNAVNSACSRKIELYL

SEQ ID NO: 343941 - protein, 177 aa, Zea mays
  Clone ID: MRT4577_76835C.1.pep
RCRCRYPWGWRSSRPRYDVAEVNRLPVVQPIGLDEDISVPPSPRVSSGRSHNRWAACHVCRREIHWCVYHSCLSTPCLDGVLELVARVMGSYLADDVDAADYKGRRSRSPFERRTELTIDQTLMLLPYWSYCTTFLRSCTRTSCPGSLALYTQFECRGPQKKRQEKILFPGRPRGTQ

SEQ ID NO: 343942 - protein, 39 aa, Zea mays
  Clone ID: MRT4577_76836C.1.pep
KHLTETKPQNILILRSNLGNHYALELEILTGLYQTLTFL

SEQ ID NO: 343943 - protein, 69 aa, Zea mays
  Clone ID: MRT4577_76837C.1.pep
MENRPAPFFVFSTIPPPPLWIGKTIFFCWVGGGQIFLKKKKKKKKKKKKKKKKKKKKKKKKKKKKSRSR

SEQ ID NO: 343944 - protein, 76 aa, Zea mays
  unsure (1)..(76): unsure at all Xaa locations
  Clone ID: MRT4577_76838C.1.pep
PDHALRHQRRIRSPAANAPNPREWAGEEGDGSRLHLQPLRRGEGGRERRGRPAATRGREGGEDWXREAPRELAGTG

SEQ ID NO: 343945 - protein, 113 aa, Zea mays
  Clone ID: MRT4577_76839C.1.pep
LRSAQSRMSCIPCCVGSVASFLQNDVDSKRKTDTNQGPSVVRRAHKPILFKNEIRDAIFASVKVTRRCAERRYHPDPRLLPSPLSPVKGELGSQDRRRLFIWYTLGFHHVVLN

SEQ ID NO: 343946 - protein, 155 aa, Zea mays
  Clone ID: MRT4577_7683C.1.pep
LTKAEPPIYYMPTKPIIDDPAIVEQNKEKVFEEWKSMRRAELTRFQKQVEEQYLSNVERQLERIQNARNARKANGPGNMQEMDKELDTHRAEHGPKPRRVPEEGGNDDDEDAEDMAAEDELMDEVLGINDAINEDPSKPSEEATTEGQPATEEAQ

SEQ ID NO: 343947 - protein, 96 aa, Zea mays
  Clone ID: MRT4577_76840C.1.pep
PDDSSKFMSSVLELASQASWYCTPTRFVLIVGARTANKNIFFRYPLLQTQVYDGLMNLYVRHGIYLQLQTKLRMYSWKYYFLSLVAAKVILHPHFL

SEQ ID NO: 343948 - protein, 203 aa, Zea mays
  unsure (1)..(203): unsure at all Xaa locations
  Clone ID: MRT4577_76841C.1.pep
CWFFREKQRENTFCRPFERXLPLTFRLMRVQGLPSWTNTSTVTIPDVIQGEVLLAVLSNYMVDMDWLLTACPSLRKVPHVLVLHGEDGASLERLKKTKPANWILHKPPLPISFGTHHSKAMLLVYPQGIRVVVHTANLIHVDWNNKSQGLWTQDFPWKKANDTSTKXIGFENDLVDYLRALKWPEFXGNLPXAXDVNINAAFF

SEQ ID NO: 343949 - protein, 206 aa, Zea mays
  Clone ID: MRT4577_76842C.1.pep
MGNILKCFRGDEEEDHYPYYHPGSRPHYPQQQQQQQADGHGVASLAHDLLNFESASMVPEGLKQHVTASKKAQIKWYQNMLEAYKNARTPPRTPEEAAQLVVSALNWIQRADLEVHNQNIGDGDGFTAYVATTDPRESGNVPIEVHEMVIARTEARNRRDYKSADALQSRLKEAGYKIIVCSDEEILARKYRIRMRGIDAPELKMT

SEQ ID NO: 343950 - protein, 71 aa, Zea mays
  Clone ID: MRT4577_76843C.1.pep
SSLVGGRPFFFFFFFLGCSKILHAPKNILGVHITYCGRIKSVTGLLEIAGNHRGAIFGFFEGKNEGLTSLN

SEQ ID NO: 343951 - protein, 77 aa, Zea mays
  unsure (1)..(77): unsure at all Xaa locations
  Clone ID: MRT4577_76844C.1.pep
GSWXLYGSDVXSSDYSLQSKFLEXWAASFSKRGFLVKFLLLGGGSLLSSVSASLSMFLLPVKAGPQESPQLGPLGKI

SEQ ID NO: 343952 - protein, 68 aa, Zea mays
  Clone ID: MRT4577_76845C.1.pep
GTLGSFRLITYFITRVEDSRSAAYVQRILLEDGNHTAALRERSDCRLSSTVSGEVLLVPGQERAPPGT

SEQ ID NO: 343953 - protein, 57 aa, Zea mays
  Clone ID: MRT4577_76846C.1.pep
PQIFPSPSGFAKGPEFGWNFCHRLNQKGKTRVQFGKFFPGNQFYSQPKFVLKPRVEG

SEQ ID NO: 343954 - protein, 52 aa, Zea mays
  Clone ID: MRT4577_76847C.1.pep
KLVKSTFVKRLTQWKSNKKRGGPSMGEGFYSVEFQLLIFFLGAQKYIFWEGV

SEQ ID NO: 343955 - protein, 98 aa, Zea mays
  Clone ID: MRT4577_76848C.1.pep
GAASPLLFGPSATSFLFGVYLGLLFFLGSVVFPPPGFLERAPPGDMGPVKHPPPLFPDFVAVLVRVLVFLFKNAAAQSGAKKRKKGFLASKTEPLPPA

SEQ ID NO: 343956 - protein, 139 aa, Zea mays
  Clone ID: MRT4577_76849C.1.pep
HQQQQQVFDPFPLTGSFGGGFDDAAGAALYGHMGGGGKQQDAAAFVDYSSVLDVSENLGYGESSSNSSNNWNCAPEVNNNNNALDGGDAPLHWASESKAAPFAGYGAEEQSLLEHKLLPHFDFDIGRGAVVGDFSLDFF

SEQ ID NO: 343957 - protein, 467 aa, Zea mays
  unsure (1)..(467): unsure at all Xaa locations
  Clone ID: MRT4577_7684C.1.pep
MAAATEKTAEDIRRELQELQRQHREITERLRDPRGLRRGAPGPGPGPGPPRPLRGFVRPHVGAEVADQAPQKRRLLSAVVKVDGAENNEEGTKDANGEGQEAGSGATEGSDRRTFNTGGFRRDGSLWMQRRVDYNSLPEPAPRELPRNEDPSLVRRNKRMLGQLLVGTLEKFQQEDKKLSNSEAFLRRSETQRKAEQKVREESERLRQQEREQIAEKRKRDMTLRARVAAKAEEKRLELLYIQWTEHHKRLSNFXVIFISGPKVSILTIXEGRYILIVCRPDVXTISVSIYIVYXNNICSMFDSYLITPLCXRTKAEPPIYYMPTKPIIDDPAIVEQNKEKVFEEWKSMRRDELTRFQKQVEEQYLSNVERQLERIQNARNARKANGHGNMQEMDKELDTHRAEHGPKPRRVPEEGGNDDDEDAEDMAAEDEVMDEVLGINDGINEDPSKPSEEATTEGQPAPEEAQ

SEQ ID NO: 343958 - protein, 95 aa, Zea mays
  unsure (1)..(95): unsure at all Xaa locations
  Clone ID: MRT4577_76850C.1.pep
FGSRGSQFLRCGSAIPTRGVSNDGLPKLVETSDEWIAGRTGIPDTRALLRHEXIAAXLSIKAPETALELXKVEPEDXDLVLLCAYPPDDLAGRAT

SEQ ID NO: 343959 - protein, 142 aa, Zea mays
  unsure (1)..(142): unsure at all Xaa locations
  Clone ID: MRT4577_76851C.1.pep
MRHMSSXTTPSAASAADLRGAGTSGSQSSGPSDPEPNPLFQLHRPPPSPPPEPPRPGPSLPEKXSPASAGGLDRPVRGRVRARRRTVAVADEDGRRRMVVEEDVAGWGDDEANGRRTSGLAGGEEAAGAAEAEISMGGPEGW

SEQ ID NO: 343960 - protein, 120 aa, Zea mays
  unsure (1)..(120): unsure at all Xaa locations
  Clone ID: MRT4577_76852C.1.pep
MTKHGCEWECYVVGFGAPGSNGCAFGVFGKRPLGRPSKSPPSQNLTGTYWQGLLDPXTTLYCKATGARPHYHRGRFRYQDLNQAPFNNMGACRNIPIFKDWLGCGFCFENKCHKPVECSG

SEQ ID NO: 343961 - protein, 987 aa, Zea mays
  unsure (1)..(987): unsure at all Xaa locations
  Clone ID: MRT4577_76853C.1.pep
MQLHTLEDGFRALLLISHVIVSAGLTLFDEGASGGGVPRGVVPVGAAPDGRAEWMGMKLDTFDGSGTPVEATNWLTYVEDNMNVFEIVYGDCVRFGTQLLKGEAQNWWRGVQAAHSSSPRVLSWDVFIKQFERRFYPVTFLEKMKIYLQSYKQEKKSVTEYEVGFNKMVRFVPHVAYNEMEKGTVNMMSSVEQQFSVPLPLQEFYVPETSQFVPMQGFPQYLAAPTPAPTTPLSSQFGAPRLPHPTAQWGSSVNFTLGASSSADRRSRKSGILFSMVVEGEAALRVRDIRVVCDFADVFPAELPGIPPERDAAFEIKLILGTQPIHKAPYRMAPKEQVELKRQLDDLLAKGFIRPSRYGHYEFVVMSFGLTNAPVAFMEAMNRMLHEFLDDFVVVFLDDTLIYSKTKEEHERHLCLVLSALRKNQFYGKLKKYAFWLSEVAFLGHVISQQGIAVDPKNVAAMVEWKRPSSVSEIRSFLGLAGYYRRFVPNFSSIAKPLTRLLEKGVLFVWSSDCEVIYQTLKNKLVSAPILALPESGKANVVADALSRSGVPKVALPLITDLDRLGXFVXVGTASEETRMFIQSSLMERVRVTQQQDRLLQEARKRVGDGKPREFTIDENDLVHFRGRLCVPQKSEVKMDILREVHKTPYTVHPGETKMYRDLKQNFWCKRMKVDVSKDAIWVVVDRLTKSAHFIPMKTTNSASELVPLYMKEVVRLHGVPKSIVSDRDSKFVSKFWESLHSALGTKLSLSVTFHPQTDEFSYNNIYQASIKMAPFEALYGRRCISPLCWETLGERSLVGPDWVQQTSKKVREIRQNILAAQSRQKSYADVRRRDLEFAVGDQVLLRVLPTKGVVQFGVSRKLSPRYIGLFTILARVGSLAYRLQLPDSMAGVHPVFHVSMLRKFLRDPDHQIEMEPIAVQQDLTLECRSVRILEFSERVLRKRSIKYVKVLWTNQSEREATWELEELMRQKYPELFVVGGGLPDRS

SEQ ID NO: 343962 - protein, 85 aa, Zea mays
  Clone ID: MRT4577_76854C.1.pep
AEWTVMTVLAACSVPASPLPVPEIDKFFPVNPLGPEWRVPSEEHQIAHLPLSGVPLMILDEERELEKLFQLGPPSPVRMPSPPWE

SEQ ID NO: 343963 - protein, 566 aa, Zea mays
  unsure (1)..(566): unsure at all Xaa locations
  Clone ID: MRT4577_76855C.1.pep
SWEDHLALAEFAYNNSYQASIXMAPFEALYGRRCISPLCWETLGERSLVGPDWVQQTSEKVRKIRQNILAAQSRQKSYADVRRQDLEFAVGDQVLLRVSPTKGVVRFGVSVKLSPRYIGPFTILARVGSLAYRLLLPDSMAGDLTLECRPVRILEFSERVLRKRSIKYVKVVWSNQSEREATWELEELMRQKYPELFGVVRHDLIVRPYRYIEHHMLPEKGYDAASYPQRYEGRSHYCICSHVHSWRGQLGSASGSTTNTLRHEEWHHIMLYMLTNLHEVMPYMQQFLDDFSCRSRDPTPQEYDTLLRKGVGNGFPISFPGSNRRVRTFLGMTLMDTVFTQQATTKVSPIEKLHVLEFLYQGLMRLSIMEELKKIYELNFHGSKPLTLVIFKCHWFYPEVTRWTHSNIALVEIRQVSILPGDNVYIMAQQATQVYYLSYACQMKEHLKGWDVVYKISLHGKLPVPNDEDYNLDPNTYDIVFFQEDGLEGRFEIDLTEAIGMEVDIAMVVDEEDNEVQNENDLEMLEGLHLGNDNDKLAPLDSVDYEMVDSDDETYDPANPDHEDYF

SEQ ID NO: 343964 - protein, 673 aa, Zea mays
  Clone ID: MRT4577_76856C.1.pep
KGVPFVWSGDCEISYQSLKSKLVDAPILALPESGKRFTVYTDASRIGLGCVLMQEGRVIAYGSRQLRKHEGNYPTHDLELAAVVFALKSWRHYLYGEACDIFTDHKSLKYIFTQKELNLRQRRWLELIKDYEVSIHYHPGKANVVADALSRSGVPKVAVPLIADLDRLGIALCYVGTASVETQMLIQSPLMERVRAAQQQDRLLQEARRRVGDGKPREFTIDENDLVRFRGRLCVPQKSEVKLDILREAHKTPYTVHPGETKMYRDLKQNFWWKRMKVDISKYVAACEVCQRVKAEHKRPAGLLKPLEIPEWKWEHITMDFVVGLPRSPRGRDAIWVVVDRLTKSVHFIPMKTTNSASDLVPLYMKEVVRLHGVPKSIVSDRDSKFVSKFWESLHSALGTKLSLSVAFHPQTDGQSERTIQTLEDMLRACVLSWKGSWEDHLALAEFAYNNSYQASIKMAPFEALYGRRCISPLCWETLGERSLVGPDWVQQTSEKVREIRQNILVAQSRQKSYADVRRRDLEFAVGDQVLLRVSPTKGVVRFGVSGKLSPRYIGPFTILARVGSLAYRLLLPDSMAGVHPVFHVSMLRKFLRDPDHQIEMEPIAVQQDLTLECRPVRILEFSERVLRKRSIKYVKVLWSNQSEREATWELEELMRQKYPELFVVGGGLPDRS

SEQ ID NO: 343965 - protein, 103 aa, Zea mays
  Clone ID: MRT4577_76857C.1.pep
PGKKNKPPGGPRPREDPTKSFRFTGPFGKTPPLYPRGGGVLETGPFPGFFPQMRGPFFSPRRRPGVFPPGGRKISPPKKGWAPLVKRDQKEPRFPVTAPLFPG

SEQ ID NO: 343966 - protein, 59 aa, Zea mays
  Clone ID: MRT4577_76858C.1.pep
ARPSWFPYIGIFFFFKKKKKQSFSVCYLSLCIFGVSFFAHVPPPPCILFDPIAFPLTIY

SEQ ID NO: 343967 - protein, 211 aa, Zea mays
  unsure (1)..(211): unsure at all Xaa locations
  Clone ID: MRT4577_76859C.1.pep
MGSLTRVPAEDPAAAEEEWSDEAVIYVNGVRRVLPDGLAHLTLLQYLRDIGLRGTKLGCGEGGCGACTVMVSCYDRITKKSLHFAINACLAPLYSVEGMHIITVEGIGDRQRGLHPVQECLAKAHGSQCGFCTPGFVMSMYALLRSSKQPPTEDQIEDCLAGNLCRCTGYRPIIDAFRVFAKTDNLAYTNSSSEDAKDQAFCPXTGKPCSC

SEQ ID NO: 343968 - protein, 50 aa, Zea mays
  Clone ID: MRT4577_7685C.1.pep
INRYKVRSWHPFRAIRIRTTMAVVSTVSLYLDRCRCQVPPPPPLCPLTAA

SEQ ID NO: 343969 - protein, 56 aa, Zea mays
  Clone ID: MRT4577_76860C.1.pep
KTRITRRVCVRPSTYFFSTLPSWRIFSLSLSLGDKFFVTSRGYTLALRCFFNCIFF

SEQ ID NO: 343970 - protein, 77 aa, Zea mays
  Clone ID: MRT4577_76861C.1.pep
NPSIKGTRIALVLIARICREISRVFSILSFLSFQRPRSPPAGVADSRPSIFDGWFQHVVSKPRGEVYGGSSGPSRET

SEQ ID NO: 343971 - protein, 65 aa, Zea mays
  Clone ID: MRT4577_76862C.1.pep
PQASLPKTERGSPWTITSALFFWPGTQFLGGGCLKKKKKKKKKKKKKKKKKKKKKKKKKKKKKAA

SEQ ID NO: 343972 - protein, 57 aa, Zea mays
  Clone ID: MRT4577_76863C.1.pep
RNDITYLCKSNSIYDLTNVLPNSQYLSNLLGFTSYSISLLGVCQWFEQAIEKETSML

SEQ ID NO: 343973 - protein, 65 aa, Zea mays
  Clone ID: MRT4577_76864C.1.pep
ACGSTIGPILSSGVGIRTVDIGAPQLSMHSIREMCAVDDVNYSYEHLKAYFEEFTELDNKVKVDC

SEQ ID NO: 343974 - protein, 262 aa, Zea mays
  Clone ID: MRT4577_76865C.1.pep
GPGANATAGVPPYVYVSLGWQLKDPLFFCGEHQLVLGKVNWQLLYSDLYFSLSLYAVAEFQDELRRLFPAKESVGHLLSRYLFHPTNPVWSLTTRYYRSYLATAKRRIGVQVRMFSYGSISADDMYSQILACSQQEHILPETDDGDEDEVVAATRNGDNADGSNSTAILVASLYADYYERLRSRYYDHGAKGGERVAVFQPSHEERQATDNMAHNQRALAEIYLLSFSEELLTSGRSTFGYVSSNLAGVRPTIMLPLMADSN

SEQ ID NO: 343975 - protein, 48 aa, Zea mays
  Clone ID: MRT4577_76866C.1.pep
IEKRVVENVELNCVTVFTRKSHGSSQVFLWLPDMIRLTAKKNTTRAAN

SEQ ID NO: 343976 - protein, 77 aa, Zea mays
  Clone ID: MRT4577_76867C.1.pep
MGGGNAQKSKMARERNAERNKGGKGSQLEANKKAMNIQCKICMQTFICTTSEAKCKEHAEARHPKNDLYQCFPHLKN

SEQ ID NO: 343977 - protein, 77 aa, Zea mays
  Clone ID: MRT4577_76868C.1.pep
MGGGNGQKSKMARERNAEKNKGGKGSQLEANKKAMNIQCKICMQTFICTTSEAKCKEHAEARHPKNDLYQCFPHLKN

SEQ ID NO: 343978 - protein, 47 aa, Zea mays
  Clone ID: MRT4577_76869C.1.pep
SFFSDITGITILNEIATMKRFLENDFAFIYVGTCSGSEPYILCCSCI

SEQ ID NO: 343979 - protein, 197 aa, Zea mays
  Clone ID: MRT4577_7686C.1.pep
SGCFFLHACRRSPLQSCSSACPVPLSPRPWSPPVAVPSSSSMPSAHPCSFHTPSSCSQCPSARSLSVHCVQLRSRLLQLAAPMAELAPARAFSCVQPWRAKLSARRLLLPASASPANCSRSSLLSYGVLLAGFQSPIARSRSAPSSLAPATRPGRLPAALAQVAAVEPSNPAHPLPAVVLWSVCWSVSLSFVWSARR

SEQ ID NO: 343980 - protein, 77 aa, Zea mays
  Clone ID: MRT4577_76870C.1.pep
MGGGNAQKSKMARERNAEKNKGGKGSQLEANKKAMNIQCKICMQTFICTTSEAKCKEHAEARHPKNDLYQCFPHLKN

SEQ ID NO: 343981 - protein, 99 aa, Zea mays
  Clone ID: MRT4577_76871C.1.pep
SCRSASKPKQMCGGMESPRIRVWILPFLPFLQESSKGRLPSLRDSCIGRTRTIQFQYSGGREQRELRCSQQYRTSRHYCCCSCSGDQCCWRSLAYRRNS

SEQ ID NO: 343982 - protein, 83 aa, Zea mays
  Clone ID: MRT4577_76872C.1.pep
FVMSCTTFLSLAISPWLQYPFIIRCVHVNIIGESFLRNISCNQVAVHHQDSLLATVHQSILCNRSHQVRCPCLSDSSAMPYDL

SEQ ID NO: 343983 - protein, 76 aa, Zea mays
  unsure (1)..(76): unsure at all Xaa locations
  Clone ID: MRT4577_76873C.1.pep
EGNNKVHDLLLIDFTPMSFGLETAXXLLTELIPKNTNIPTNKEQVIFNYSDNQPGXLIQVYQGXRTLTRHNILLHK

SEQ ID NO: 343984 - protein, 77 aa, Zea mays; identical to SEQ ID NO: 343977
  Clone ID: MRT4577_76874C.1.pep

SEQ ID NO: 343985 - protein, 77 aa, Zea mays; identical to SEQ ID NO: 343977
  Clone ID: MRT4577_76875C.1.pep

SEQ ID NO: 343986 - protein, 41 aa, Zea mays
  Clone ID: MRT4577_76876C.1.pep
PLIPVLVTLLWVHLMVMPTCCVRSSALYEPTFHRVALFVGS

SEQ ID NO: 343987 - protein, 77 aa, Zea mays; identical to SEQ ID NO: 343980
  Clone ID: MRT4577_76877C.1.pep

SEQ ID NO: 343988 - protein, 38 aa, Zea mays
  Clone ID: MRT4577_76878C.1.pep
DLLGLLHEARPCSCGVRPVTSSHPTLQSMAVTGGAASS

SEQ ID NO: 343989 - protein, 104 aa, Zea mays
  Clone ID: MRT4577_76879C.1.pep
TRPVRCWCRGSHTLRWIEWTNTRLKNMPWISQTGQRTSHKLQRSSVNVSYETGLLMAQDENEVGELEIIETIHRVTSDNLYMTWVDNIRFPHAETVGYTVTTTV

SEQ ID NO: 343990 - protein, 290 aa, Zea mays
  unsure (1)..(290): unsure at all Xaa locations
  Clone ID: MRT4577_7687C.1.pep
MAAATEKTAEDIRRELQELQRQHREITERLRDPRGLRRGAPGPGPGPGAPRPLRGFARPAVGPESGDQPPQKRRLLSAVVKVSSFSASISLLFPHAXNGLLVETXNYVWLLDITTGGGXAENNEEGTKDADAEGHGTGSGATEGSAGRGFNNGGFRRDGGLRMQRRVDYNSLPEPAPRELPRNEDPNLVRRNKRMLGQLLVGTLEKFQQEDKKLSNSEAFLRRSETQRKAEQKVREESERLRQKEREQIAEKRKRDMTLRARVAAKAEEKRLELLYIQWTEHHKRLSNFL

SEQ ID NO: 343991 - protein, 44 aa, Zea mays
  Clone ID: MRT4577_76880C.1.pep
FFIIFQPTIQDCYIKAMVHHNIIYYKARICIFRLIMALSQILVV

SEQ ID NO: 343992 - protein, 84 aa, Zea mays
  unsure (1)..(84): unsure at all Xaa locations
  Clone ID: MRT4577_76881C.1.pep
RDLHTHKHIPYFEIQNLTGTTRYGNINTYLGIXQSMIDDLESVGYLLLYFIRXNGLKAGTKKQKYYKISEKKMLTSADILCKSY

SEQ ID NO: 343993 - protein, 85 aa, Zea mays
  unsure (1)..(85): unsure at all Xaa locations
  Clone ID: MRT4577_76882C.1.pep
ACLGLRVACXGLVRVLRAGPGAPLGVACLLGGGAVGGFVVGGAFGRVGAPVLVRVVGPLVTALAGAGVAAGGVPVVGVVGSGSRV

SEQ ID NO: 343994 - protein, 115 aa, Zea mays
  unsure (1)..(115): unsure at all Xaa locations
  Clone ID: MRT4577_76883C.1.pep
DGVQYXIXEYQXXTTNVVLQXXPEPPTIWAXXSXPRSXXKWXVXXMXXIWXXLRLGLWVVXXVLXXIXLXXRWXGHXLXLPLVXPLYXTMXXGWLGXXVFXIDXTLXQPLSGAXR

SEQ ID NO: 343995 - protein, 60 aa, Zea mays
  Clone ID: MRT4577_76884C.1.pep
EILVVDDHRRRLVVCIMSTYTQSNVGGLSQEVTVASQTCCAASGVTAAVVCSLSLFPLVV

SEQ ID NO: 343996 - protein, 53 aa, Zea mays
  Clone ID: MRT4577_76885C.1.pep
TQRRLVYNDQILRQQLQRNHMTRTILLRNRHQTQQLMVITTATTTTPLTAIPP

SEQ ID NO: 343997 - protein, 39 aa, Zea mays
  Clone ID: MRT4577_76886C.1.pep
QRLISAGKQMADGRTLADYYIQKDCTLHLVQRLSCGLRI

SEQ ID NO: 343998 - protein, 84 aa, Zea mays
  Clone ID: MRT4577_76887C.1.pep
PGGGNISKSGITLLAQPFHPFAKHNSRTKKNIGGHSPLVSLNCHGSSHPTIGNPEGKKFCSLKTYPLILGGGAIICSPHKTVPI

SEQ ID NO: 343999 - protein, 109 aa, Zea mays
  unsure (1)..(109): unsure at all Xaa locations
  Clone ID: MRT4577_76888C.1.pep
GSPVLGPPRWPSSGRPVLCARWPCPALPPVRSPPARRGRLGFCCGGCXRSPASRFVGFGRXRVPAWWRALLPAARXAGRPPPAPAAVSFRSAPRLPGADRLSPXXXPPR

SEQ ID NO: 344000 - protein, 69 aa, Zea mays
  Clone ID: MRT4577_76889C.1.pep
TLSFTSLWGAVLVHYATNLIVSRSKARMVLLLTLVLIFMHLWIDNTHTVNQLNPLPYRAQLATLYPSFS

SEQ ID NO: 344001 - protein, 46 aa, Zea mays
  Clone ID: MRT4577_7688C.1.pep
RTRGKEPEPRPTTHQTWRTGGGGEALFCVDRCTDIGSGPGFGCPPL

SEQ ID NO: 344002 - protein, 503 aa, Zea mays
  Clone ID: MRT4577_76890C.1.pep
MASPAKRAKPSSPAKPSSAPPQEEATAAAVSEDPVVLLRRRWELASVLHFLRVFEPVIEANLGLSADEIEMALASNNRDLARIHIALLKGIPPVNKHLKDEDGWIIVTAKKLTDWWSWVAEGANPFRNNSGKEVEMYKQQDPIKRLLILKALCEVRSEQDDAVWYVNDEMKKGTHISNFRKDKLGSGSSGTTYWYDGDSTIGHRLYTEVESVNFKQNWMGKGGRLTKPVTNIYWETVATNLDEFLEISEKLSKKGRAESAIADYLKTEVIPAVENFQKKKERRLKRQEKKDKLLAFTNTFQTRSLRERRPVSYNYSDFDRSIEEAIRAVQKGKVQGSREAGTEEKPASHHGDKGADGRSDINSENNKNGGQEDAKYLSDLSSGDEEDGDYSDRGVSSADSDGDNNASDSYKSDMEEDVSVPRKRTRLAARLANDKPRPGLRRSQRNMKNDEETMHPGQVTPPPMAKKTLRQRPTPVSKQPDITFSSSEDDLAQVVADSEDESG

SEQ ID NO: 344003 - protein, 56 aa, Zea mays
  unsure (1)..(56): unsure at all Xaa locations
  Clone ID: MRT4577_76891C.1.pep
ALKGEAHPGHERTGTAVRARCRRVQSPGSLVIRPRSSARPWAYDLCERVREXXXEK

SEQ ID NO: 344004 - protein, 96 aa, Zea mays
  Clone ID: MRT4577_76892C.1.pep
TPDRPLPAGGRPKGCSAGAAVPRRGLDHQGSHGPRRRLAAVPHNRAGARRCPPVVAHVPTRSPSGCGAQHPGSERSSPHVRLASTRVSYHIHNRSS

SEQ ID NO: 344005 - protein, 56 aa, Zea mays
  Clone ID: MRT4577_76893C.1.pep
VMVGSGLGPIGHEWGSDLGPVGHEWGQTGSSSCRVLMPGVVNAVCPILMAIAVLWS

SEQ ID NO: 344006 - protein, 176 aa, Zea mays
  unsure (1)..(176): unsure at all Xaa locations
  Clone ID: MRT4577_76894C.1.pep
MVIALHLCSSQPSSSRRARKLDMEGLEEKSPEYVAVKKASSTPQKSSSWLGRRAGSSLGGLGHRRAASAAKVDDLSSRSAGDLVMVNESKGVFGLTDLMKAAAEVIGSGGLGSAYKAVMANGVAVVVKRXRDMNRATKDAFESEMKRLGANADAKLLPPLAXHYRKDEKLLVYEYI

SEQ ID NO: 344007 - protein, 44 aa, Zea mays
  Clone ID: MRT4577_76895C.1.pep
TASSSSPYASLVCEAAAGYWSSFAHGEAVIRCRAPPPDACTIRS

SEQ ID NO: 344008 - protein, 50 aa, Zea mays
  Clone ID: MRT4577_76896C.1.pep
KKKKKKKKKKKKKKKKKKKKKKKKGKKKKKKKKGRPALMEPTFLFAWCAP

SEQ ID NO: 344009 - protein, 203 aa, Zea mays
  unsure (1)..(203): unsure at all Xaa locations
  Clone ID: MRT4577_76897C.1.pep
MAGYKAQGGALGVVLAVAALLAAAAAMAVDDEHMYHWKCFKSCTGNCRDEDAFDDVVARHSEGSSHVVVAAVSGGKCKDRCLSECFEDLPALCYHQCVATNCLCYPPCXASSAXVKQLIRPMDRIQFCFWNESXSGLLXSLSMPWPPMPIPPKPPAPVKPKPPPTPTPRSPAPKPPTPRAPPPPKKPCPCPPGSDELKASENN

SEQ ID NO: 344010 - protein, 42 aa, Zea mays
  Clone ID: MRT4577_76898C.1.pep
GDIVRVRSGPGMASVRVPEYGGGRRRSMLSVGGYSRPSAATL

SEQ ID NO: 344011 - protein, 194 aa, Zea mays
  Clone ID: MRT4577_76899C.1.pep
MAGYKAQGGALGVVLAVAALLAAAAMAMAVDDEHMYHWKCFKSCTGNCRDEDAFDDVVARHSEGSSHVVAAVSGGKCKDRCLSQCFEDLPALCYHQCVATNCLCYPPFSNEKVMCLKSCCNKCFHHGPPAPKPRPPMPGPPKPPAPAKPKPKPPPTPTPRPPAPKPPTPRPPPPPKKPCPCPPGSDEVKASENN

SEQ ID NO: 344012 - protein, 85 aa, Zea mays
  Clone ID: MRT4577_7689C.1.pep
LTVVWSQHQKAKTTTLKHSLTIGGRLTKIHAQTAPNKTATKHMECRNGTPTLCEQRILLCFLGCWLTFSCSFFGRLGWVLIDCIR

SEQ ID NO: 344013 - protein, 222 aa, Zea mays
  unsure (1)..(222): unsure at all Xaa locations
  Clone ID: MRT4577_768C.1.pep
MEYRRVKDQEIYDDLSQKDVESLSGRTLSSANTTAIGPASAGGAKANSSWKLKLTTSFDEVGVYPIPAVLYMVKNLLQYYIFVYVDAPAYQILKNLNIISTGVLYRIILKKNFPPVPFRLSEIQWAAFVLLCAGCTTAQLNPSSDHVLQTPIQGXALLSGFAXVYTEAIIKKRPSRNINVQNFWLYXIWVIXHLVVICGQDYDAVMNKGFFHGYSFITVLMI

SEQ ID NO: 344014 - protein, 74 aa, Zea mays
  unsure (1)..(74): unsure at all Xaa locations
  Clone ID: MRT4577_76900C.1.pep
LGFPPPVWMPLPKGLPVKVGETPRFPVSGFSKSPLGQFSPPIKKWGPPSPPKGKGFPFLDXVVPRKEGKPGKKK

SEQ ID NO: 344015 - protein, 169 aa, Zea mays
  unsure (1)..(169): unsure at all Xaa locations
  Clone ID: MRT4577_76901C.1.pep
MDPVAGTAEHRGPLEVRARAPGKIILAGEHAVVHGSAAVAAAIDLYTNSSLLLRPAGPGEGGXRWLRRGGADQLVAIARLLQDQEIPEAKIWLSAGLSAFLFLYASILGCRPGKAVVSSDLPMGAGLGSSAAFCVSMSGALLTAVGAVSIGARRGAEGWEVLEESALEL

SEQ ID NO: 344016 - protein, 405 aa, Zea mays
  Clone ID: MRT4577_76903C.1.pep
MDPVAGTAEHRGPLEVRARAPGKIILAGEHAVVHGSAAVAAAIDLYTNSSLLLRPAGPGEGGGAGSGAVELDLRDSGLTFSWPCSRLRGALGEEISANPGAPAPCSPDQLAAIARLLQDQEIPEAKIWLSAGLSAFLFLYASILGCRPGKAVVSSDLPMGAGLGSSAAFCVSMSGALLTAAGAVSVGARRGAEGWEVLEKGALELVNQWAFQGEKIIHGKPSGIDNSVSTFGKMIKFKKGELTNLESWNPVKMLITDTRVGRNTKALVAGVSERASRHPDAMASVFHAVNSISEELSSIVELAAEDEIAITSKEDKLAELMEMNQGLLQCMGVSHSSIETVLRTTLKYSLVSKLTGAGGGGCVLTLIPTLSANTVLEKVTTELESHGYRCFKVEVGGRGLQVFRV

SEQ ID NO: 344017 - protein, 108 aa, Zea mays
  unsure (1)..(108): unsure at all Xaa locations
  Clone ID: MRT4577_76904C.1.pep
GMNFKGKKKKDMYLKGKGXGKLEXKERGGXFFFFFFFFFFFILYFSPEQKPFFFFFWVTSFDXQRRXPXHRKVWGAXPXXLGGGGGGGMLSFVISVQXQLSXQQSLQT

SEQ ID NO: 344018 - protein, 125 aa, Zea mays
  unsure (1)..(125): unsure at all Xaa locations
  Clone ID: MRT4577_76905C.1.pep
TELKNEIQDNGPPPGPLSLKRGEDGFNTFFRETGSGKHNPRGGFVDLEPTVFEEVRTGTYRXLLGGEXLFTAPFYEDKSLEQAPPPFVYEIVDLCLDRVGKVAHNCSVLQGLLFLGVXGGGTRSG

SEQ ID NO: 344019 - protein, 150 aa, Zea mays
  Clone ID: MRT4577_76906C.1.pep
GTLEAGRDSFPTMIFQAWNAPSRGLLAIHLCLPGHSPLSPPPSASSQHLPAGADPFPRGAAAPSHTAARRGVFPHADATPFPNFGETRFTHADGRPSAAPDRIGLRERHAPHMPECVGRRNSPVAALATTYWQHPMLATNWSQQPASATN

SEQ ID NO: 344020 - protein, 89 aa, Zea mays
  Clone ID: MRT4577_76907C.1.pep
YDHFFLCILSHRRSVGSRIQMDLEDTSFPEAKTLVHENYDSLIAPEVMHGTVERALFNLDDKMQIMGMVNLILPETTLQVMDLEMGLLV

SEQ ID NO: 344021 - protein, 72 aa, Zea mays
  Clone ID: MRT4577_76908C.1.pep
KTRGGGPPFHLGRKVPPQGGPLLFSPPQGVGFFPPPKKKKKKKKKKKKTKKKQKKKKKKKTKKKKKKKKNTP

SEQ ID NO: 344022 - protein, 56 aa, Zea mays
  Clone ID: MRT4577_76909C.1.pep
PTGDGNSTEVAYGNGLKTKHWRVLIVPCTECQLMLTDTAWTTETHSYEDIEPTLSY

SEQ ID NO: 344023 - protein, 83 aa, Zea mays
  unsure (1)..(83): unsure at all Xaa locations
  Clone ID: MRT4577_7690C.1.pep
VWSQLMKTLPMMFHTPGPIHSAKKKKKKRTLSTPRSPRGAGDPYHSYRNRGPRGGARGPQIGSPLERGKCALEXKHVHGVKKE

SEQ ID NO: 344024 - protein, 117 aa, Zea mays
  unsure (1)..(117): unsure at all Xaa locations
  Clone ID: MRT4577_76910C.1.pep
QTGREXCRVGRSGRELDQAETGKHRGTIXTARAGSMSATXEACXQLGDDXAEAQGQGQHTEQPPPPTQLYAXANTRRGFLASQESAGTRRRLRVWRRXASDTDRLPLSPLSXXPPPP

SEQ ID NO: 344025 - protein, 57 aa, Zea mays
  Clone ID: MRT4577_76911C.1.pep
KYIFIYLNTSVRPLNPRFPLHQYGMHDLVCCPALLGLMLRTLAQVPAFIRFIHFLLS

SEQ ID NO: 344026 - protein, 62 aa, Zea mays
  Clone ID: MRT4577_76912C.1.pep
PTRPLTHGVTIKPYIESVGYCNINAQYHANEFHIINTKASLLHAFDLHVIATHQYFVTQIIC

SEQ ID NO: 344027 - protein, 38 aa, Zea mays
  Clone ID: MRT4577_76913C.1.pep
MNPLLIILLAGPCGVRVLTSSCKHGHYKSCLLCGLSRD

SEQ ID NO: 344028 - protein, 75 aa, Zea mays
  Clone ID: MRT4577_76914C.1.pep
VWIKTPFMGGSTTVIYNQRTMDNQHMLREKIFNTASARLWGGKFLLEQALYRQMSTSWVPNRIRSTSLWKNKNVS

SEQ ID NO: 344029 - protein, 189 aa, Zea mays
  unsure (1)..(189): unsure at all Xaa locations
  Clone ID: MRT4577_76915C.1.pep
TTTHRRVLCDGVASVIKEXHKSFPSGHSSWSFAGLGFLSWYLAGKVKAFDRRGHVAKLCVVLLPLLLAAMVAVSRVDDYWHHWQDVFAGGILXPAAGLVVASFCYLQFFPPPSGEQGFWPHAYSEHILNPEREGQAQSTASSNQHRRLSSRGHVAVEMSTAIATATASQDASSLGPMEEMEMEEGRGAR

SEQ ID NO: 344030 - protein, 155 aa, Zea mays
  Clone ID: MRT4577_76916C.1.pep
MATATAAPASVARRRIWGHARDGGSLRRDGGSGDTLAMADSCGATANLGTRRGIGSRGHARGGGPMRVRQTFDTREEAYLFYLDYAKLAGFSVRTKRCNCWSGSKIVAFCRERAGGTKTKRRFGLGGTIGSNQVLLARRFDLGAFSILNAPRCNI

SEQ ID NO: 344031 - protein, 48 aa, Zea mays
  Clone ID: MRT4577_76917C.1.pep
VACSASCFDPPTCSDIHNIEYYSTVYYVCVACSASCFDPPTCSDSLMV

SEQ ID NO: 344032 - protein, 57 aa, Zea mays
  unsure (1)..(57): unsure at all Xaa locations
  Clone ID: MRT4577_76918C.1.pep
MAVFSELHTAEXLKSLEAHLAGKTYVSCDSITTDDMKVFDAVTSKSGAEFPNAARMY

SEQ ID NO: 344033 - protein, 153 aa, Zea mays
  Clone ID: MRT4577_76919C.1.pep
LVELLVEQGAAVNMQNFVGETALFIASSLGLNLICLFLLENGGDTRISTLEGSSPLHAASACGHLSVIKSLVSHGAFVNSTDEEGDTPLHYAVREGKKEAVGLLVQLGAQLIKNEDLESPLDLAEEFDETWMVDLLSNHFPSLRSDSEHGFCF

SEQ ID NO: 344034 - protein, 39 aa, Zea mays
  Clone ID: MRT4577_7691C.1.pep
SYNIKVGTGQDLFISSRQPFPELLSLPELDSLLRWLSIS

SEQ ID NO: 344035 - protein, 128 aa, Zea mays
  unsure (1)..(128): unsure at all Xaa locations
  Clone ID: MRT4577_76920C.1.pep
GYHGMELMDREVQAEFMKTYSLFDXYKFNGHILWISGQINRVRFGELDRYIRETKGXAFVHXAFYEAVELTXIESMTCGLPTIEICHGGPADIIVDGVSGLHIDLYDMDRAADIRRNFFVRCKGDPSY

SEQ ID NO: 344036 - protein, 78 aa, Zea mays
  Clone ID: MRT4577_76921C.1.pep
KKLENSHYLNNTLKSKMPKINNVCNACKVSFSTEGTIYQEMLERIHALLDDIRPVDVGLHNEAQNARNYSNTTPPSNG

SEQ ID NO: 344037 - protein, 110 aa, Zea mays
  Clone ID: MRT4577_76922C.1.pep
WARCCDMQHLRRMLLALTMLNRLSSRPVMLLSQLQVACRCGSGRRVAVEVAHRVAAVAGGLCRSAHCVVEARRRHDVTCCSYARCRRLGPRRQQQQQLPPPPPRPAAGSR

SEQ ID NO: 344038 - protein, 89 aa, Zea mays
  unsure (1)..(89): unsure at all Xaa locations
  Clone ID: MRT4577_76923C.1.pep
MADVDVEPEVAAGAPKKRTFRXYSFRGVDLYALFDMSTDYLVQLFPVRAFVRFQRGLYRKPMALIKKLRMAXKRXALAVELPVPVKTHF

SEQ ID NO: 344039 - protein, 45 aa, Zea mays
  Clone ID: MRT4577_76924C.1.pep
IGFLVSPRIWNGDIKPLLAFGESKTEEAPFFESKISEGVNKVLDE

SEQ ID NO: 344040 - protein, 110 aa, Zea mays
  Clone ID: MRT4577_76925C.1.pep
ADHACVQTSNLILKLIPQQNTRNMGVFLFVCLALAAVNSLCIAHALPPRRATGLVLYSRPALYDDGGTTAVPLRGVPEAAHMHTRWRAEPYYAGCGQTISMYHHVRHQCC

SEQ ID NO: 344041 - protein, 157 aa, Zea mays
  unsure (1)..(157): unsure at all Xaa locations
  Clone ID: MRT4577_76927C.1.pep
MAWLSELRSVSNPCGMAVPAPGEAGRLLAGCGVVLVLMRCVHFRGGLSLGSPTNKGLIFNMHPVLMILGFMILWSETIXMSYKIRTWXHDTNRMVHMLLHAGALFQGSDVIYAAFKFHNESGIDNHDRLNSLVGLGTICLLXYSSYMRVATFFLPGA

SEQ ID NO: 344042 - protein, 143 aa, Zea mays
  Clone ID: MRT4577_76928C.1.pep
RRTTCPLADGCCRPCGANIGGRVAPSRLVIRARSCSATRCTTRENYPYTYCIRLCLWRDRDPATLLRDLLPPRHRGHASNGSLESYLIAHTEDLPVASPDLIVQRSKDFASHACFTDMRYHLAQPGHFPEKGVLQHAKPSDLY

SEQ ID NO: 344043 - protein, 70 aa, Zea mays
  Clone ID: MRT4577_76929C.1.pep
VPGLKWPFGPGPTFFFALLLRAPPAVFARVLFKGGWPRRPSICISPGSCGVSPMGCAPTYFRPGGGPFCV

SEQ ID NO: 344044 - protein, 63 aa, Zea mays
  Clone ID: MRT4577_7692C.1.pep
PRRLIVVHIQLAGAHLCFGLQGPFSSEGIVGFASGSTIPRLQPPRLMDQWSGCPPSGVIIGSL

SEQ ID NO: 344045 - protein, 114 aa, Zea mays
  unsure (1)..(114): unsure at all Xaa locations
  Clone ID: MRT4577_76930C.1.pep
MGLIPHIEDSXLTRIQPHAGGDAVYWETTTSSALEDYRAVEGVMVAHSGRSAVTLFRFGEAAMSHTKTRMEEAWSIEEXEVAFNVPGLSADCFISSADIQSGPVGEACVLSSSQ

SEQ ID NO: 344046 - protein, 147 aa, Zea mays
  unsure (1)..(147): unsure at all Xaa locations
  Clone ID: MRT4577_76931C.1.pep
EEHYFFPFTPLXSLDPWVFLQPPLFPFARVVPAHFFQQQFFPFTQWAALTPAVFLPPQIFFPFSQLVAATGVSFLPQHRLLPFSPRFGGTPAPLFQLHQLLPFVPLVLTNPAASSQQPILGGALFWVGFWPHPHNKVFWVRLGAPPK

SEQ ID NO: 344047 - protein, 195 aa, Zea mays
  unsure (1)..(195): unsure at all Xaa locations
  Clone ID: MRT4577_76932C.1.pep
KALGMWGGVYIPPGQCVGKLKGERXITLGFVDFLGDVFFXKSWFLGFFFFRGWVSMPGVLRVVFGGFFFWDLPALPEIFGDVSVLQFGGGIFGHLWGNAPGAAAFCVVFKACVQACKKGGVFVCEGFXIFKAACKWGVEIAPPPPPWRGVNFFGFKGLGPILNKKKKKKKKKKKKKKKKKKKKKKKKKKKKNTPP

SEQ ID NO: 344048 - protein, 89 aa, Zea mays
  unsure (1)..(89): unsure at all Xaa locations
  Clone ID: MRT4577_76933C.1.pep
MASPSTEAPLPPPTIRDVMGHDDDDYDDYGDHTIAEEEEGDEEEEEWDMSKRMSRLSLEGSDGGDADDEAGGDEEEQEEDGXEGPEGRK

SEQ ID NO: 344049 - protein, 108 aa, Zea mays
  Clone ID: MRT4577_76934C.1.pep
AATTPTENGKNGTGKFQMKFPYTLQFLILSKPWPKTENLKGWRPPGKTKAKGCWAFTLGPHTTRPFSLDGGGPNQKLRAEKRLGVGKNIDWGKEPWATFEMCQGYLEV

SEQ ID NO: 344050 - protein, 81 aa, Zea mays
  unsure (1)..(81): unsure at all Xaa locations
  Clone ID: MRT4577_76935C.1.pep
FLISLVRPVPFFQHQFLASFPLSLSNIFSYQQQPLLQHLLPXLIHTILINPISYLHXHQLISSIPLXFFNSPTYLQHHFLQ

SEQ ID NO: 344051 - protein, 96 aa, Zea mays
  unsure (1)..(96): unsure at all Xaa locations
  Clone ID: MRT4577_76936C.1.pep
HELPEMSSTVRSMHDSTAYTMKPLYMTXIXVISGIIMLXGSIAPILELKLRLSTPCYEDGTRSLYXPLQSTYVNPIPASYAGGASAVISAYTDGRS

SEQ ID NO: 344052 - protein, 90 aa, Zea mays
  unsure (1)..(90): unsure at all Xaa locations
  Clone ID: MRT4577_76937C.1.pep
PAADAXSSTYKTNRRSTHATHSLYCLSPSSSPSEKGRHPSIHPSMELFAAAEEKPCRLFKKRSGGGGKGGMGVRADGSGKGGSFSGRRAR

SEQ ID NO: 344053 - protein, 119 aa, Zea mays
  unsure (1)..(119): unsure at all Xaa locations
  Clone ID: MRT4577_76938C.1.pep
DXCSIRKYKATAATRNGAAARRSKELGMGTGTDRDCAAIALCSGQRLATSSNRPSRRRRRRFCYRSTVRAEARGELSLSPSLSFDAPRGWCSKEVYLCDANANASDGLEGKRTKVGAGI

SEQ ID NO: 344054 - protein, 134 aa, Zea mays
  Clone ID: MRT4577_76939C.1.pep
QACMHASLPLVVSPSSSFPDPWIYMHTPPCTRPAGLNNNYIFFRFHHQVQVKLLVPIAFRSSLSFCFALLCFGCVFSRICYHRHGHACMHASSIYLFFGGVFLCLCWIDPRWMFDRSCQKGLAGRTPPADGFPL

SEQ ID NO: 344055 - protein, 57 aa, Zea mays
  Clone ID: MRT4577_7693C.1.pep
FIKVFKNLVDRVIMVDKYVKLGLVDYIWLNPKEIYNEISLVYDKGINRIADQGSLFS

SEQ ID NO: 344056 - protein, 64 aa, Zea mays
  Clone ID: MRT4577_76940C.1.pep
PSQCESFGFWGGVLFLITAPWIPFSTPFFKAPQCFNKGFRFLKNKKTHCNPNKSSNLKNYMDQH

SEQ ID NO: 344057 - protein, 125 aa, Zea mays
  Clone ID: MRT4577_76941C.1.pep
QWGSPLAASWVLGDAPMCHDDRSAGARGRGTLGGCRMSAGVSAGSRSWPVGGCGSAIEVRISSSILNSNPISQATIPIPHHVKLRFHIRFNYPYGLHGAISIQNVCGNRPYTSLLFTLRMSLLAV

SEQ ID NO: 344058 - protein, 165 aa, Zea mays
  unsure (1)..(165): unsure at all Xaa locations
  Clone ID: MRT4577_76942C.1.pep
LHPPHSPLLRPRPSAGSPGPQLLQQRLPAAAIPSGRNXAPAPAPAPXPQPPAAGKGAKEPSPRANSAINRPPEKRQRVPSAYNRFIKDEIQRIKAGNPDISHREAFSAAAKNWAHFPHIHFGLMPDHQGPKKTSLLPQDHQRSDGGGLLKEGLYAAAANMGVAPY

SEQ ID NO: 344059 - protein, 130 aa, Zea mays
  Clone ID: MRT4577_76943C.1.pep
YDGLIFGPIVDNAIVEPGFGSGDVVPALGPDVDSHARGSSSPQPRLPPLPAPAVLSLIDPSCRSLVLLPSIGLSANTIACVLDTSGALWVPLAPSYGPRGRLEPYATRGSVLGLAIRLGDARRVQQLEAS

SEQ ID NO: 344060 - protein, 61 aa, Zea mays
  Clone ID: MRT4577_76944C.1.pep
FMRRYMGGPISDSVCGTVCNSYWWGPNRYLASLRMPYVCARPLIFVNAWFSQSRAFRTKSN

SEQ ID NO: 344061 - protein, 72 aa, Zea mays
  Clone ID: MRT4577_76945C.1.pep
SHRSRGSPPRTCMLPASLSKASLDIGSIKMNASQPSSKQSWMSRQSSPAPAQESPFTRFSTQPMMMHHGVRA

SEQ ID NO: 344062 - protein, 123 aa, Zea mays
  Clone ID: MRT4577_76946C.1.pep
LILKDRARRLLSKPIKFFNEMQELFINSSADGSLAMEATTCMNETHPGDDSDFNDDVCSDFSNYPQPVHDLGDDSDTLQSPNHHPSQSVDHSSSSSGLKRPQGEGVPAKRNVEPKSRTTKECI

SEQ ID NO: 344063 - protein, 68 aa, Zea mays
  Clone ID: MRT4577_76947C.1.pep
PNHLFSHLFFLLKPLFSSFYFLFRPVHVETIATKGPAKFEVGDEFSICIGFGPTLFLSVQTSKMLKGT

SEQ ID NO: 344064 - protein, 120 aa, Zea mays
  Clone ID: MRT4577_76948C.1.pep
KRARYKKMIRRHMDFRMLHSKIKSGAISCTKELLRDVLIFINNVITFYPKATLEHMAAVELRESACKTVKQSASLFLKSHGETGTAGAPVVKNTRVLQPRCGPGDARPSKVFFKDATAKE

SEQ ID NO: 344065 - protein, 173 aa, Zea mays
  Clone ID: MRT4577_76949C.1.pep
MGVKEMYLQYYNSYIQYLRRRRVLIYITICVVFLWYKLNRLHRKSVKYGPLLQRDLERERRLNRLYNGTEANCISELRMRKFVFHRLCSHLRSRRLLEDNVNVSVEEQVAMFLKFVGHRWTNSSVGFEFMRSGETVSRYFNLVLDALCVMSRDLITMRTTENHRDTTKGLVGC

SEQ ID NO: 344066 - protein, 69 aa, Zea mays
  Clone ID: MRT4577_7694C.1.pep
PDVRIWSALRKFRKVLYLNFLYLRVGLLVIYFIVYIWHHLKPALVLMYVGHGFLDHLPSVGFLCLEAHS

SEQ ID NO: 344067 - protein, 94 aa, Zea mays
  Clone ID: MRT4577_76950C.1.pep
NFSAPDPCLEETTRRSVLGGGDDERSTSGMRGREGGEVRRVAVLGHRKRAPQMRRKKVWQAQGTSPHFLWLPKVSHEPNTCPQKCGILLSRTGR

SEQ ID NO: 344068 - protein, 59 aa, Zea mays
  Clone ID: MRT4577_76951C.1.pep
FFFFFFFFFFFFFFWGKKNIISLLISCLFSGQENSGALFYNNHEKYGSRDRMKLNGSQN

SEQ ID NO: 344069 - protein, 208 aa, Zea mays
  Clone ID: MRT4577_76952C.1.pep
LILKDRARRLLSKPIKFFNEMQELFINSSADGSLAMEATTCMNETHPGDDSDFNDDVCSDFSNYPQPVHDLGDDSDTLPSPNHHPSQSVDHSSSSSGLKRPQGEGVPAKRNVKPKSRTTKVVDELSATLVELRNDLKKPPPPVPMPFVNPDAILWQRLENMTITTDQKLMVGTYLAHKDQKGMRGFLSAASDITFESWVLKHLSDLDL

SEQ ID NO: 344070 - protein, 98 aa, Zea mays
  Clone ID: MRT4577_76953C.1.pep
PGAKYGVPPCLRPTDRLHKHNGLSRVLLIYQMSTYSAYNRSPVPLGTFPPPILQSLHTAGLSSRDPKQGIDVPRDERTELPGGYTDTRHDGKETAKSP

SEQ ID NO: 344071 - protein, 124 aa, Zea mays
  Clone ID: MRT4577_76954C.1.pep
DQLQLSLLARCQQAPAVIHQEIPLLLPWRTGLLICLRRVKLLGLSRTPTSASCTSVLCYRDAITSRYVIHELAEPPPRGHNPTTSSSFGRRRSCLGSIMAFSRPSIPTNTVSTSTAIFVFILEL

SEQ ID NO: 344072 - protein, 104 aa, Zea mays
  Clone ID: MRT4577_76955C.1.pep
KTTNPPGGFILRHNNRRETDQSSRTPWSNWAQPPGEVIQDPKGPLGSTHKKIRSLNPTKIPTHNPSLPFSITGINWDSFIIKTTPRPKLGCKPEILSNKSKILM

SEQ ID NO: 344073 - protein, 105 aa, Zea mays
  Clone ID: MRT4577_76956C.1.pep
VFFFFFFFFFFFFFFLGPTGAVYFTTGGTPKGAYPPGPFGPPPYMSPPQSRGGGGARGGFWAPVQGSGPNWSACRAPTLPFLPGGLNPSAGVGPLASGPFFMAGP

SEQ ID NO: 344074 - protein, 116 aa, Zea mays
  Clone ID: MRT4577_76957C.1.pep
MCWSSSPFSYRPGWCGSMDLAYLARRLLIALSYHLHRSCTQEAEMLKRYHLSAARASGPTPRLLAVKDMRTRKPHEVKGFEYGTVRTTDFKTITTGKDDQGLKIHDPYYLNTGPVL

SEQ ID NO: 344075 - protein, 74 aa, Zea mays
  unsure (1)..(74): unsure at all Xaa locations
  Clone ID: MRT4577_76958C.1.pep
AGACHPRGLHKFGANCGPEAVWLKTGPLFLNGTTLNXYFGNSFPINLLGTVIAKAILLGGAKPYRITKELDLED

SEQ ID NO: 344076 - protein, 81 aa, Zea mays
  Clone ID: MRT4577_76959C.1.pep
SLALKCQLFKRFSFDLFLSFKNNHCLLSTTSKDISLITDSNIIKYSQTFTLFLTPAPVPQFIIIMCKLESTTLPVRTYQSR

SEQ ID NO: 344077 - protein, 155 aa, Zea mays
  Clone ID: MRT4577_7695C.1.pep
DLEKLNNLPFFVVGGRTTDHSGVCPTPHYERKLGIKKKRKNAHLVVCHETQDPKPCPLKGRRPETLNLLRKTPKARGNENGDRGGPGPLKLLRRTRDNPGSWHIGLGIQNPQKGQRAERGNPSTQKPRTLLGGGSTHHLNLHGARGEGPFLLRQT

SEQ ID NO: 344078 - protein, 119 aa, Zea mays
  unsure (1)..(119): unsure at all Xaa locations
  Clone ID: MRT4577_76960C.1.pep
HAFVHASGGVLPLPVLDHSVQACIVTGYWEDVASFKPLFAALLPLAVHPSQLXFYDPREXWVSGPRCSPATHWDTCTILCAFISYGCLLLRRLVHLSVLGVWSRVLSGCDLGDFAVMGA

SEQ ID NO: 344079 - protein, 43 aa, Zea mays
  Clone ID: MRT4577_76961C.1.pep
LPHTSFFAKPLNVYSFFPLPFMECRISLHPNLLRNLNKERTYS

SEQ ID NO: 344080 - protein, 70 aa, Zea mays
  Clone ID: MRT4577_76962C.1.pep
ALTSGGHFSASLASVSLSGGAACRRQGLGQGDARRRFLPAASAPRRRSRWRAAAAAVPARHGITRSASLS

SEQ ID NO: 344081 - protein, 55 aa, Zea mays
  Clone ID: MRT4577_76963C.1.pep
ADRRRPTLQLTHLSLGLTTLRRNAYTEREDIPIHHQDAFIEVPSIRQDGAKGGLA

SEQ ID NO: 344082 - protein, 95 aa, Zea mays
  Clone ID: MRT4577_76964C.1.pep
SASCLPLAAPISCAAATPTTVGSSCHTQDGRYSSKTPLDGWVPSPDSTPPSHHCWIWGLRSDWIYWISLETHAISNRRHVYAFILEVDQVPEVVH

SEQ ID NO: 344083 - protein, 154 aa, Zea mays
  Clone ID: MRT4577_76965C.1.pep
PRKRKRAQNPNPLSPGVAKKIKQRGPPVFPPEKRPVGPPQLIWVGPPFRPPRFYLFCSRFFFFVEFWGENIFPQEPTLPLISPNLVPTRDPLLTPPRVLKIPPPPPPAKVKKKKKKKKKKKKKKKKKKKKKKKKKKKQKKNKKKKKKKKKKLVP

SEQ ID NO: 344084 - protein, 123 aa, Zea mays
  unsure (1)..(123): unsure at all Xaa locations
  Clone ID: MRT4577_76966C.1.pep
KQTEQLKQTHRYTQPQNPPEPHPNLHPPPTTAHTQSPXSRFGKTLXQHVVEHMARIQHRGAGTTARVAVRRCRVHAXSHPXXPFFENFKTXDXGFXVXXPGTSPPPNXXRCSVTRXNXRTRPP

SEQ ID NO: 344085 - protein, 41 aa, Zea mays
  unsure (1)..(41): unsure at all Xaa locations
  Clone ID: MRT4577_76967C.1.pep
CMCRAWADDXFRGISPWCMDIXHISYXSWSRTKXYIMMFDS

SEQ ID NO: 344086 - protein, 113 aa, Zea mays
  Clone ID: MRT4577_76968C.1.pep
PPSLFFSSPPLLSLSLGWVLNLVVVSRQLLPVSHRGEPGKADQTWRKDGEGGGQTAVMRGNEPPTEEQTEKQTGSKKEEAWGAKREKKGEKKKKTTGGARGGGKGVKKRGDKK

SEQ ID NO: 344087 - protein, 36 aa, Zea mays
  Clone ID: MRT4577_76969C.1.pep
QVASQRTFNVLISLLYEEQAFNCLLPTLCVNSCFES

SEQ ID NO: 344088 - protein, 49 aa, Zea mays
  Clone ID: MRT4577_7696C.1.pep
VCIFKLMSGMRLIRPETRGTWANVAAGSYQHLGESGLLLSNELCERTRG

SEQ ID NO: 344089 - protein, 123 aa, Zea mays
  Clone ID: MRT4577_76970C.1.pep
PRGRPGGQGRWFNSGRGRRLSRPGVGTRFNLHYISKQFPADELATSVFDDIYSCSCSRLWTSICIWRASLMCIDLPDSRTVSPSEGSGAAAAVVAAVKHSLGMGRCLLPSGSLPTLHAKQRQA

SEQ ID NO: 344090 - protein, 80 aa, Zea mays
  Clone ID: MRT4577_76971C.1.pep
YIQVVVLLHYVYITGTLRYLNKTRELLLVFNLYIPLAAHAAVSGLRSASGGLHLCALTCQIPEPCHLLKVQVRRRRWWRR

SEQ ID NO: 344091 - protein, 118 aa, Zea mays
  Clone ID: MRT4577_76972C.1.pep
IRFPVCTQKRKDVRPAVLLQLQGFCLLLPEKIGTTLCGLLIDGDMHARIVGWLVASAGCSLAVTSYDWNKDVLTTIVSRYQSSALEISKSDRRNDQLVAAHLYTVTSLHILSCRACSI

SEQ ID NO: 344092 - protein, 60 aa, Zea mays
  Clone ID: MRT4577_76973C.1.pep
QNFARHGSISFYILRKWRRLLNRLQILYQKFQPFKRNFLNPKARALNTKKKIFARKKIWN

SEQ ID NO: 344093 - protein, 112 aa, Zea mays
  unsure (1)..(112): unsure at all Xaa locations
  Clone ID: MRT4577_76974C.1.pep
MAARRPGSATSRWLGPTALVLQAASAVLSTRXQPARALRVHLXYGHTKCVCDXIKDNAMGAXKYHRDGADPNXPNSQIPETDHISLMVTCPNRNRMHYSENVQSGHFDLHGG

SEQ ID NO: 344094 - protein, 124 aa, Zea mays
  Clone ID: MRT4577_76975C.1.pep
KAQTKPSMETLKKLKKKRANPWGKDGSQTGAEGLGGPKVVLPKGGKQVEKPGPLHLIKALGELQKAGAAVVTKRTGQGNVGTTGPQPINGNRIMARGGNPRRRAKTRGRCRCPRPRRAGRWGQP

SEQ ID NO: 344095 - protein, 91 aa, Zea mays
  Clone ID: MRT4577_76976C.1.pep
STSALPTHAMITSATLKSPIGVAAAGSRALPPSLDLPLGFGQSPSLRRPQRRGGRGTPPSSGIWAARQRWVQEERQVAAVYQQHVSPTRPA

SEQ ID NO: 344096 - protein, 64 aa, Zea mays
  Clone ID: MRT4577_76977C.1.pep
ALYEVLEVVALASAGQCPPGFCPPRVSVTPPRGPQFPRILVVPFCAAGLSVSRQEVTVPKKKRK

SEQ ID NO: 344097 - protein, 109 aa, Zea mays
  Clone ID: MRT4577_76978C.1.pep
PVRGPFSKGGMASSHPVMPRSKLVPMGAPIWGLGEPLENCFFSGKRAFFLASPRFCFAWIPKWFGMPVDQIPKMERQTDILLKKPFKKAGTKPRGPRKPLKTKLVPVGS

SEQ ID NO: 344098 - protein, 69 aa, Zea mays
  Clone ID: MRT4577_76979C.1.pep
QVFFFFFPHVGGLQTRPLKNSSPKEAFFCAGLTPIISLAHIRGSDEQNAAPKEQPPLLGWLSTHFKRVF

SEQ ID NO: 344099 - protein, 95 aa, Zea mays
  unsure (1)..(95): unsure at all Xaa locations
  Clone ID: MRT4577_7697C.1.pep
LVFLADLSRSQVGGHWREASSVSNNLLQSTVKAAWISWTTFLVLVVPLIIVMDREQQLNDLXLHQQTLLGCASTSTATKLIDPCIDPFASTPLDL

SEQ ID NO: 344100 - protein, 185 aa, Zea mays
  unsure (1)..(185): unsure at all Xaa locations
  Clone ID: MRT4577_76980C.1.pep
MAEPXPASSGLTDETAFSCCSDPDPSTKDFLLQQTMLRIKDPKKSLDFYTRVLGLTLLQKLDFPAMKFSLYFLAYEDKNDIPKDKSEKTAWTFSRKATLELTHNWGTEDDETQSYHNGNSDPRGFGHIGIAVPDVYSACKRFEELGVKFVKKPDDGKMKGLXAFIQDPDGYWIEILNPNKIATII

SEQ ID NO: 344101 - protein, 240 aa, Zea mays
  Clone ID: MRT4577_76981C.1.pep
GRVGETERQRALGLFRRAARLGSAAAMVDAGLMCWEDGRREEAVGYYRSAADLGHPIGMCNLGVSYLEVLLNVSAADPPKAEEAIRWFYPSASAGNARAQYNLGLCLQNGKGVKRNQKEAAKWYLRAAEGGNVRAMYNISLCYSYGEGLAQDPVRAKRWLQLAADCGHKKALYECGIKLCAAGDKVKCLMYLELATRRGEAAAAHMRDVILESLSVVNAQRAMSDADKWKPRTLHPRPRR

SEQ ID NO: 344102 - protein, 112 aa, Zea mays
  unsure (1)..(112): unsure at all Xaa locations
  Clone ID: MRT4577_76982C.1.pep
HILVSCVFIRVFWFNLLKPFGFERLAPRPGLSPFMIWWEQISGAITGLPGKGINSLVALGAWTIWKLXNFCVFDGCTPSLALSLRLARDEXTIWEVAGAKGLSYLAALLPED

SEQ ID NO: 344103 - protein, 41 aa, Zea mays
  Clone ID: MRT4577_76983C.1.pep
MGSRNSSSAGTGSGDPSEGLPRRGAGLRRSEEEEEEDEDVD

SEQ ID NO: 344104 - protein, 88 aa, Zea mays
  Clone ID: MRT4577_76984C.1.pep
FPHVGRLTTDPNELSTLIRHSLTLLVVYRVAGDQLNLADVFNTLRHLEHCCHVDVVKRARDPRNVTAYPHAVTSGEHPLVEKSIRAAD

SEQ ID NO: 344105 - protein, 159 aa, Zea mays
  Clone ID: MRT4577_76985C.1.pep
MAEQTEKAFLKQPKVFLSSKKSGKGKKPGKGGNRFWKSIGLGFKTPREAIEGTYIDKKCPFTGTVSIRGRIIAGTCHSAKMNRTIIVRRNYLHFVKKYQRYEKRHSNIPAHISPCFRVKEGDHVIIGQCRPLSKTVRFNVVKVIPAGSAAAGKKAFTAA

SEQ ID NO: 344106 - protein, 77 aa, Zea mays
  Clone ID: MRT4577_76986C.1.pep
MLSFLTILLLGDGVNDAPAPKKADISIPVVDAIDAARIASDFVMTKPSFNVIISVVLTSQTISQMMKNYTVCEKETY

SEQ ID NO: 344107 - protein, 209 aa, Zea mays
  Clone ID: MRT4577_76987C.1.pep
MQSLSQPISPCYIIRLVPRVFAAAPHDFRPSLSSSPRAQPPPPLDAHRAAMAEQTEKAFLKQPKVFLSSKKSGKGKKPGKGGNRFWKSIGLGFKTPREAIEGTYIDKKCPFTGTVSIRGRIIAGTCHSAKMNRTIIVRRNYLHFVKKYQRYEKRHSNIPAHISPCFRVKEGDHVIIGQCRPLSKTVRFNVVKVIPAGSAAAGKKAFTAA

SEQ ID NO: 344108 - protein, 61 aa, Zea mays
  Clone ID: MRT4577_76988C.1.pep
SNSFPNTPNITGCVSNISMTLTHANRHIKKTLIQRQYTTTGYQTFYSSNAETNISHHQRSK

SEQ ID NO: 344109 - protein, 39 aa, Zea mays
  Clone ID: MRT4577_76989C.1.pep
ARRIQLMHGTTSRTHVHSWISDRRAMAAVRACGYHSLFL

SEQ ID NO: 344110 - protein, 185 aa, Zea mays
  Clone ID: MRT4577_7698C.1.pep
MVKTAASSSSDDAAAAKRRTYKGVRMRSWGSWVSEVRAPGQKTRIWLGSHATAEAAVRAHDAALLCLRGSAADLNFPLRLPFDLPPAATMSPKAIQRVAAAAAAAASGSASSCGGLRAPPFAPPDENSGTSACSDGDATPASSTTSSPTSDFTPAWSTTSLPTSHADDVCSPECTVSSAGDEDYY

SEQ ID NO: 344111 - protein, 71 aa, Zea mays
  Clone ID: MRT4577_76990C.1.pep
EKPSDDCAEAELDPAYRESGKGKIFLGVTSNPGSFGGREIIRVPGQHCMGDGGGTTGGRIKEDPIKCPGPT

SEQ ID NO: 344112 - protein, 71 aa, Zea mays
  Clone ID: MRT4577_76991C.1.pep
HPHGRECDACGYYSQMCCSGFTLRSSTCVHLAFQKAQLYGDRLTHRMVSCDVGGHITHRTTAERGYNSSRP

SEQ ID NO: 344113 - protein, 169 aa, Zea mays
  Clone ID: MRT4577_76992C.1.pep
KKNPKTGILYQRSPPPKKLGKTISPKTGGSNPRPNIFIRPGYPPPKAPKFQNPAILSKKDSHNKPSHFRAPGAPIYCPNPPNPQPFKFYVTGNFSLQSVSQEFGPPEKGVFRGGAKFVFPIWGNRPTIGGPGIPPPLLDPFVFRVIKKNLGFWKKKKIPKGRNDRILNI

SEQ ID NO: 344114 - protein, 283 aa, Zea mays
  Clone ID: MRT4577_76993C.1.pep
ARSAPGHPLPPLPRTSSSIPVMGSASSDGLREHLLDVDGGGAAAVPKIRVRGLRRRADATGEEILRGVHLDVPRGAVMGVIGPSGSGKSTLLRALNRLWEPAPGAVLLDGADICALDVLALRRKVGMLFQLPAMFDGTVADNVRYGPQLRGKKLTEAEVKSLLHLADLDPALCSKPASELSVGQAQRVALARTLANDPEVLLLDEPTSALDPISTQNIEEAIVRLKKTRGLTTVIVSHSVKQIQRIADLVCLVVAGEVVEVLAPSDLSDAKHPMARRFLELSG

SEQ ID NO: 344115 - protein, 135 aa, Zea mays
  unsure (1)..(135): unsure at all Xaa locations
  Clone ID: MRT4577_76994C.1.pep
MDSHVGKKIDSGGWVYLCSDVLPCPDPDIISHFYSYISXXGVMKXVGYXXXXLSXTLVHSTQPEDVNRCIGMLEASLDRSSSPXETREKLYXLAVGQYRTGEDTRIRHLLERCLKIQXDWRQAITSQRLVEEKTK

SEQ ID NO: 344116 - protein, 48 aa, Zea mays
  unsure (1)..(48): unsure at all Xaa locations
  Clone ID: MRT4577_76995C.1.pep
TLFXYNFSFFSFFYNMGARVMYLCFVRCIEFISWFNTGFSRHFEGLVT

SEQ ID NO: 344117 - protein, 111 aa, Zea mays
  Clone ID: MRT4577_76996C.1.pep
SRYDLLLTWRSYRCFPSRSLREGLNSPLARRLRCGHALSPTSYERGRIMCLEVYGCGVVGAQAMKRELPPQWMAGERWLDDRCLLTPAHRPGDPPAHPPHIHKHINQPKGS

SEQ ID NO: 344118 - protein, 105 aa, Zea mays
  unsure (1)..(105): unsure at all Xaa locations
  Clone ID: MRT4577_76997C.1.pep
SRRAEPTQNPRPRRGREGKAAGGGGGAAKPERHQXGDAQXRXXAPGKXXEXDKXXEXDAXXXDRXXDKXQDREXPHQREXXQEXNEXXGENENDREEXRXGEXGS

SEQ ID NO: 344119 - protein, 44 aa, Zea mays
  unsure (1)..(44): unsure at all Xaa locations
  Clone ID: MRT4577_76998C.1.pep
GRPVLFFLLKTXLIYASYHNIHTRSKYIEFTNSHNVQMHNAHKF

SEQ ID NO: 344120 - protein, 125 aa, Zea mays
  unsure (1)..(125): unsure at all Xaa locations
  Clone ID: MRT4577_76999C.1.pep
TPHVKKLVGPVDLVWVFLQFRANTTRSPPFCSPYPGNIKKKKVLKREIPPPLWVYKKKRKNCFXAPPPRKKKNKKSIDXHPPQKKKKNRSMGLEPPKKKKKKKKKKKKKKKKKKNKNPGRSRSKT

SEQ ID NO: 344121 - protein, 63 aa, Zea mays
  Clone ID: MRT4577_7699C.1.pep
FPLLQLCSHPLVPATTFSQAKSQLCAWHGQSQPAIAPRSVVWRPRVQQALAYSGYLSTSATAP

SEQ ID NO: 344122 - protein, 357 aa, Zea mays
  Clone ID: MRT4577_769C.1.pep
MEYRRVKDQEIYDDLSQKDVESLSGRTLSSANTTAIGPASAGGAKANSSWKLKSVVTLALTLLTSSQAILIVWSKRAGKYEYSVTTANFSVEALKCLLSLAALFRTWNCHGVTDDNRLTTSFDEVGVYPIPAVLYMVKNLLQYYIFVYVDAPAYQILKNLNIISTGVLYRIILKKKLSEIQWAAFVLLCAGCTTAQLNPSSDHVLQTPIQGWMMAIVMALLSGFAGVYTEAIIKKRPSRNINVQNFWLYIFGVIFNLVAICVQDYDAVMNKGFFHGYSFITVLMILNHALSGIAVSMVMKYADNIVKVYSTSVAMLLTAVVSVFLFNFHLSLAFFLGSTVVSVSVYLHSIGKLQPQK

SEQ ID NO: 344123 - protein, 622 aa, Zea mays
  Clone ID: MRT4577_76C.1.pep
MAASLRWWWSAVVFSVVVGVIPVVANTEGDALYSLRQSLKDNNNVLQSWDPTLVNPCTWFHVTCNPDNSVIRLDLGNAQLSGPLVPQLGQLKNMQYLELYSNNISGPIPPELGNLTNLVSLDLYLNNFTGGIPDTLGQLSKLRFLRLNNNSLSGQIPKTLTNINTLQVLDLSNNNLSGGVPSSGSFSLFTPISFANNPNLCGPGTTKPCPGAPPFSPPPPYNPPAPTSSKGVSSTGAVAGGVAAGTALLIAVPAIGYALWRRRKPEEQFFDVPAEEDPEVHLGQLKRFSLRELQVATDNFNNRNVLGRGGFGKVYKGRLTDGSLVAVKRLKEERTPGGELQFQTEVELISMAVHRNLLRLRGFCMTPTERLLVYPYMANGSVASRLRERAPNEPPLEWETRARIALGSARGLSYLHDHCDPKIIHRDVKAANILLDEDFEAVVGDFGLAKLMDYKDTHVTTAVRGTIGHIAPEYLSTGKSSEKTDVFGYGIMLLELITGQRAFDLARLANDDDVMLLDWVKALLKEKKLEQLVDPDLQGRYVDQEVESLIQVALLCTQGSPMERPKMSEVARMLEGDGLAERWEQWQKVEVMRQEAELAPRHNDWIVDSTYNLRAVELSGPR

SEQ ID NO: 344124 - protein, 48 aa, Zea mays
  Clone ID: MRT4577_77000C.1.pep
FWVVFSLRESYTIGSQEVKQRKQVWRIGSICDWPFIHNISSYSLGAIR

SEQ ID NO: 344125 - protein, 28 aa, Zea mays
  Clone ID: MRT4577_77001C.1.pep
CNSLPIPIAAYVQQFYAPSIISNRNIVK

SEQ ID NO: 344126 - protein, 162 aa, Zea mays
  unsure (1)..(162): unsure at all Xaa locations
  Clone ID: MRT4577_77002C.1.pep
LINWLVTSPLXTEVXQTQKGGDGIPLVHIYXGPKIKYERGAAVAFNVKQNDGTFVNAEVVQKIAEKNGISVGIGFLSHIKVDMKQKQLNGTLDIPEASFYKNGRRDNKKVTIRVEVVTASLGFLTNFEDVYKMWAFVAKFLDPSFLESERLTIAADHSEGQT

SEQ ID NO: 344127 - protein, 103 aa, Zea mays
  Clone ID: MRT4577_77003C.1.pep
GREAGEWARISHCLQTCCRGVAMLVCFCRGVARAQILPHCASPQCVFISASPWPGKPENEEEVVVEEEAAPQAKIPPVENNFYLISVGQTLSLLQHKKTKKKW

SEQ ID NO: 344128 - protein, 65 aa, Zea mays
  Clone ID: MRT4577_77004C.1.pep
FTHLAATSNVVSPITMGGSVSNDSVEPFTWGGGGGESSLSRREAGPGGGRSSAFSLPCSLRSVAR

SEQ ID NO: 344129 - protein, 107 aa, Zea mays
  Clone ID: MRT4577_77006C.1.pep
PSYIILLCLIVLLVCIFNVSRIYFWCVRIRTPSFGNFLLKKYSLARTFTGSHFLGVLLRLLLASPSFFLLYQSLIFALSIADNSLIPPHPLPSLTARAPPCQYSVWC

SEQ ID NO: 344130 - protein, 46 aa, Zea mays
  Clone ID: MRT4577_77007C.1.pep
MKMPAGHGLRSRPRNLFARPFRKKGSFQLTRYLATYKIGDYVDVKV

SEQ ID NO: 344131 - protein, 238 aa, Zea mays
  Clone ID: MRT4577_77008C.1.pep
KDLPSMELEAAPDDEVFCSDDEMQTLWPLGQVDPKSVRFPCCIVWTPLPVVSWLAPYIGHVGIAREDGTVLDFAGSNLVSVDDLAYGSVARCLQLDRAKCCFPANPAAHVCSRSHEHSEAGTAISWDDALRSGSRRFEHKCYNLFTCNSHSFVADCLNRLAYGGSVGWNVLNLAALVWLRGRWLDPMAAVRSFLPFAVVSCVGVLMAGWSFLLGMTAFTLLLLGWFVLGVYCMKGLVV

SEQ ID NO: 344132 - protein, 76 aa, Zea mays
  Clone ID: MRT4577_77009C.1.pep
IISCSTFILICSGCSSTIIHVRSVIIPIHPSVIIVISSRIFTIIVLSILLALIAFSTLIRNHVTHHLYRSQLMNCP

SEQ ID NO: 344133 - protein, 98 aa, Zea mays
  unsure (1)..(98): unsure at all Xaa locations
  Clone ID: MRT4577_7700C.1.pep
MAPTAEKKPAEKKPADEKAEKQPGADMRAPSKEGGEKMGQKKAMKSVETYKIYICXVLSHVHPDIGISTRAMSIMNSLMNEIFEKLGAAAVNLVRSSR

SEQ ID NO: 344134 - protein, 102 aa, Zea mays
  unsure (1)..(102): unsure at all Xaa locations
  Clone ID: MRT4577_77010C.1.pep
MTVHGKACKFLGKDCGNGNRKVLRDNIQGIWRPHIXRRLAWMCGPNRISTLIYEKTRXVIKIFLQNIIRDSATYTDYVLQNSVTIMDVFNYLEHHSHNIYKM

SEQ ID NO: 344135 - protein, 216 aa, Zea mays
  unsure (1)..(216): unsure at all Xaa locations
  Clone ID: MRT4577_77011C.1.pep
MAASARGSVWEIQPRDVEAAGLAAADAAAFHAALRSAAGSAAASGDAVWAAVAAAGVLRPEHPHALHQLVYYSAYAGWDRAARGPPPYWFPSPTDCKQTNLGRLMEANGPKLLGSSYRDPISSFNHFYRFSVENQEVYWSMVLKQLAVKFKQEPMSILSTXGSKKGGTWLQGAVLNIAECCLLPCLSLKRTDDSTAIIWEDEGLDDXPVNRMSLKE

SEQ ID NO: 344136 - protein, 50 aa, Zea mays
  Clone ID: MRT4577_77012C.1.pep
MPGIVELPTLEELKVDEVKISSAVLKAAAHHYGAQCDKPNKEFMLCRWEE

SEQ ID NO: 344137 - protein, 154 aa, Zea mays
  unsure (1)..(154): unsure at all Xaa locations
  Clone ID: MRT4577_77013C.1.pep
NPSAIHPATHSWRAPPPRGQAGGDRXPAGHGXRXRTRDXXARPXRKKGXXPXTTXXRTXKNGXXAXXKGNGGGHKXPSYKXXHGRTGRGGNGTKRAPRXEXNKQGKGRXTRKXNQEREEQEQPXRXTEEXRPRKAKKDQXKADAKKRGXGXRTK

SEQ ID NO: 344138 - protein, 111 aa, Zea mays
  Clone ID: MRT4577_77014C.1.pep
MASGSKPDSVETDHPGGGLSIAVEHNPPESRLQQLGVRSWPKWGCPPGKFPVKFDARQTCYLLKGKVRAHIKGSSECVEFGAGDLVVFPKGLSCTWDVAAAVDKYYKFDSS

SEQ ID NO: 344139 - protein, 109 aa, Zea mays
  unsure (1)..(109): unsure at all Xaa locations
  Clone ID: MRT4577_77015C.1.pep
XIINLGEALGQKTTTKRRRLRKMNQLSLLHHLHRLSPGRGHGLTAVVRAGLSSCEPPTPQEGGGGLLAIAPHESIGGAREEESHLREELGEGGNNNEDVGGGRTCALTT

SEQ ID NO: 344140 - protein, 33 aa, Zea mays
  Clone ID: MRT4577_77016C.1.pep
IAGDDAALVRGVQVHSGVRGDRTIELTDDVVGV

SEQ ID NO: 344141 - protein, 71 aa, Zea mays
  Clone ID: MRT4577_77017C.1.pep
KKRERSKMKLSGKKKNRALELCSEAAAESPSHLPRVHEDGLTRGRSGPVPAVRVAATTSAEPLHAPQVLGA

SEQ ID NO: 344142 - protein, 111 aa, Zea mays
  unsure (1)..(111): unsure at all Xaa locations
  Clone ID: MRT4577_77018C.1.pep
GVKDVGGFFCWNPVEIPLCSVDAAYLVEYTGVFTDQHKAAHHLTGGGTKVVISDPSKDSHMLVVGVHQRVLKHDIHIVSHASCXNNCLCAVCXVNNDKLGISLGMITTVHA

SEQ ID NO: 344143 - protein, 65 aa, Zea mays
  Clone ID: MRT4577_77019C.1.pep
CMFPINSNGWGTAFGHLCLPVGCNPFWGPPLSGVYERFCIKALRGRRLGCWSKGSVWAARYVTNY

SEQ ID NO: 344144 - protein, 73 aa, Zea mays
  unsure (1)..(73): unsure at all Xaa locations
  Clone ID: MRT4577_7701C.1.pep
XRRPPXXRQXTQTLWSPVLSSSTASXSPSLXPXTHRYIXXPXGLHSPPXLECIXQXLEAESXAXTPXWXPXPF

SEQ ID NO: 344145 - protein, 129 aa, Zea mays
  Clone ID: MRT4577_77020C.1.pep
NPNTPGDPDAQVSGQRGLLAPAARAGAALGARRGADGRPPVPIVLLFGRGPGTPLTGARMWMYISCGELQTSNGCRACSAPCTSWPAAPTASDSNGYLRVLCNGGLSQQRSPVRNRCCCCRAHEGYTGA

SEQ ID NO: 344146 - protein, 78 aa, Zea mays
  Clone ID: MRT4577_77021C.1.pep
GKKKKTKKKKKKKKNKKKKKKKKKKKKKKKKASSASRCTRALGTGSTRSGWSSRSPSSSLRSPSGSGPDFGVMGALAA

SEQ ID NO: 344147 - protein, 406 aa, Zea mays
  Clone ID: MRT4577_77022C.1.pep
LHYVPCTQTRSEIAKECRSKVGNHHTSGSKSFACSAHELANKLRRSPRRDEVYIKTHTRKNGVPSRHAEPIINKLKAIVEAHPELKQRTIQEGDAFAAACGEKEPRGRVRALGLGPTPQDVGTPGLKCYTPTRLQMEGLARKKAECEKVALQQRITELEQQMQEERAARELQDVELISNNGSNSRDNGSRRYEEHDVEAYHDAKFVEDEDCAENHINHHCDDGEQHHQNSPVGAAPTVQRHQNSPVGAAPIVQRHQNNHVRAAPTIQRHQNSPIGAVPPKQPRRCITTSLAHPVPPGNEAPSRIQHDELVGKDVILYAIIGPEQPVAKGTIVSTNPNTLLGGVPLGKEYCEVIVNTVLKRDAILPCPYGYVETMADAHQMSVAWLYKRMKISKASGSPQGIGGGWH

SEQ ID NO: 344148 - protein, 78 aa, Zea mays
  Clone ID: MRT4577_77023C.1.pep
MGMGPLENAAAVVEGGVAAPVVPVVTAAAAGGGSYALLQCGEDSAYVRDAYGGYFEVFRALLAEDGERWQVYRAVRGE

SEQ ID NO: 344149 - protein, 118 aa, Zea mays
  unsure (1)..(118): unsure at all Xaa locations
  Clone ID: MRT4577_77024C.1.pep
MTVRPLVGALRPGVACXASSPGGQGSNXQTPAHRRAARPSGRGSCPDLGPTRAGAGPPAAARRSASTPVVRGAGPGARPPGGSXGQTAQARGRAXPGGGAGRPGARGRGRAAPRGGAG

SEQ ID NO: 344150 - protein, 49 aa, Zea mays
  Clone ID: MRT4577_77025C.1.pep
NVRTFPEHMHNQAYHSKKLSSGRRIGYQVVNIRPALAQSRLQGNFLQIH

SEQ ID NO: 344151 - protein, 238 aa, Zea mays
  Clone ID: MRT4577_77026C.1.pep
MDTHRPPHFDDTNFAYYSARMDCYLQSVDLGVWRVTHDGMKPPKNPEKLTTSEEKIHLNARAKKCSYESLSVEIFNQVFTLKTANDIWLKLHELHDGTSNVYNELVRDMYSRLNMIINELNSIGINKLGDVDIVRKIISLLLQQRYGSTITILHDMDDLSTMTPTIVIRKIATFEMTQKMGQEEPTSSRPYSFACDEKKGNKKAPTPSSSSEEEKEEEYDDDEDGQPSTSSSEDEETI

SEQ ID NO: 344152 - protein, 96 aa, Zea mays
  unsure (1)..(96): unsure at all Xaa locations
  Clone ID: MRT4577_77027C.1.pep
VXLXGXXXVXGLXCFPXAPXPXXLLFXVSXAXRSVXRXXFLVXXPXXXXXXXAXLXXXXSCPPPXRLXVXGFLRXVXXRXVXRSXXPSXXGCRPLG

SEQ ID NO: 344153 - protein, 190 aa, Zea mays
  unsure (1)..(190): unsure at all Xaa locations
  Clone ID: MRT4577_77028C.1.pep
PSASPAASXPSLSPPPPPPPQXPNGSXPWSPPSSPSSPSSRXAQAPTTAPKAAPRMAPLPPPPXGPRPQPRRRPPSRRPPSRRPPRRRHRWPLLRPRPPRAPPPLRRPRRLRPRPSPPPRPAPPPSRPPAAPPPRAPPPSASSPSPARSQPPSCSRRLPGASWWAVLFILSCFTFVCVCVCVCGSWVNLS

SEQ ID NO: 344154 - protein, 77 aa, Zea mays
  unsure (1)..(77): unsure at all Xaa locations
  Clone ID: MRT4577_77029C.1.pep
RVECXSPARVCTCVSCGSWQEGKTWRRAPGSLWPICSPYARLYLMSSPVNKSAKKYVFVAGEXXPSPRVRGRVXGRV

SEQ ID NO: 344155 - protein, 50 aa, Zea mays
  Clone ID: MRT4577_7702C.1.pep
KAIELEQVQLLSIPSSIPHHQYYLLTGPRTYNNYQDIIPGDLLYCLRSIA

SEQ ID NO: 344156 - protein, 558 aa, Zea mays
  Clone ID: MRT4577_77030C.1.pep
MKEVEEVEGHGYGAATPMTPPPSSLGLPSPSVSTLTSAAAARVLARPMPASVPSLRAPSPFVRAMRTRVDPPPPQPLTAPPLLRPRPVLPPPPIPEKQRRGRPRNCDRLLPPPPGFHLAPSARAPLPARGQPSSRGLPFRGQLGGLQLHVLKIHVGEDIVSKIVQVSKITGKAVCVLSVFGAVQDCYLLHSAVILNHKGPLEIIHVFGSILTSDSPGFGCLSATLACGDCSLVGGIAVGPLIAATPVQAIVGSFHNDAFQANKKPKLVACYPSSHVTAGTGGMCCVNSKITIGSLRKHDTSSWFPIGNGSTNHPNSHVTVGSGNTHHPNSQVTIDSRSMCCLSFEDGIGSWSKDDPSSWFPIGTGSTDHSNFQVTVGTGSTQYPSSQVPTGIGSAYQSDFHVTLGDRSASIPDSQATVHYGIKHQPNSCVSVGNGSTGSVNSQDIVGHGSTYNPESLPAIGDRSMHNTNFEVVVGVGSTDKGNSQDTLVDGNLNRPSSMVSVDNGSSCYPNCKDAVGDTCAPSSEGSNPEYASCTVVVEQSRLSRDRCESLASDGFLT

SEQ ID NO: 344157 - protein, 234 aa, Zea mays
  unsure (1)..(234): unsure at all Xaa locations
  Clone ID: MRT4577_77031C.1.pep
GRVGGRVGGRIGYLEAGRDNSQIESKHSPENPKSHSPXPPASPAASXPSLSPPPPPPPQXPNGXSPWSPPSSPSSPSSRRRRPRPPPRPQLPRPRPXAPLPPRPXRSPGPPPRRRPAKPPXPAAAPSPLASPPAPPXPRAPPPLRRPRRPRPRPSPPPRPAPPPSRLPAAAPPRAPPPSASSPSPARSQPPSCSRRLPAASGGAVYTIVFYFCACVCGWVVGDSFLDTERAEVM

SEQ ID NO: 344158 - protein, 112 aa, Zea mays
  Clone ID: MRT4577_77032C.1.pep
GGSPGSRAARRVSRPPRRRKSLNAQKARIGTSVTDGQAPAAEHHAVSARARGTEAHSVLAEQRKKGGQAAPAARHRAEGERDEHARDEEGDGSGESRAREQRGRQAPAGRAR

SEQ ID NO: 344159 - protein, 174 aa, Zea mays
  unsure (1)..(174): unsure at all Xaa locations
  Clone ID: MRT4577_77033C.1.pep
IKSPGLGSHCNPRRSTHRIDRRTGLLRSASDQNASPAPIRFPPDNFKHSLTLFSESFSSLPRGTCSLSVSRPYLALDGIYRPIGAAFPNNPTRRQRLVVRQGPGTTGLSPSLAPLSRELRPGPSLRTXSPDYNSNAEDVRFSSWALPRSPAVTKGIQLVNFLRLLICLTQRVVR

SEQ ID NO: 344160 - protein, 37 aa, Zea mays
  Clone ID: MRT4577_77034C.1.pep
RKKLVLVIKKHFSFFFRCAKFPPLKKWQQMVLHLVSP

SEQ ID NO: 344161 - protein, 35 aa, Zea mays
  unsure (1)..(35): unsure at all Xaa locations
  Clone ID: MRT4577_77035C.1.pep
LSDCVIYVNLRLYDHKVSDLCSTAGNDLSXSLKSE

SEQ ID NO: 344162 - protein, 81 aa, Zea mays
  Clone ID: MRT4577_77036C.1.pep
GPFEDPPHPQKTREGKNMLAQEGSSTNPQTKGPEWFFGDGPQIPNKFLGPFPVPFLGQNKKMPGGLGLPPYARKLKWAPPP

SEQ ID NO: 344163 - protein, 84 aa, Zea mays
  Clone ID: MRT4577_77037C.1.pep
LMKRTNLQFNNKKSTFTTGTKWNDQGRTYQLMGSAYLATDKMEKSRTAYYPCRSITLTGRQLYTNGLILNGTLMTGEGRRPPLL

SEQ ID NO: 344164 - protein, 113 aa, Zea mays
  Clone ID: MRT4577_77038C.1.pep
TTEATRTTRLRRGSPCRPPGPAAPLASSCPRRLSRRNPRSTSIPPPGSSAPASASPPTGSAGTPRRRQPSTSTSITATTSSPKGRLPTGIASSDKVLARVQKETPSPAEAPRR

SEQ ID NO: 344165 - protein, 112 aa, Zea mays
  unsure (1)..(112): unsure at all Xaa locations
  Clone ID: MRT4577_77039C.1.pep
GRVGDYRVSELRVVELLDGLCDKMQDYTLXRIGIRRKGWVKVTDWNXFNTENKAAAXTADPQVRAHSKKLSTFCGRLLEETEDELSEWIKTSSTESENVSKALCEDISYHPY

SEQ ID NO: 344166 - protein, 56 aa, Zea mays
  Clone ID: MRT4577_7703C.1.pep
NPGLTHAFYTTCETRTPRRVLKSDFFLRHQSSPADSSGIQTNQKVWWATEPEGQLA

SEQ ID NO: 344167 - protein, 81 aa, Zea mays
  Clone ID: MRT4577_77040C.1.pep
QHSKMCLVISIGLAQCCPPPDSCTGGSRTVCRYLGGGRCHVNLKVLVHVVDQHPEAAPSGSWCRFSSLDRERGKDLRAPST

SEQ ID NO: 344168 - protein, 192 aa, Zea mays
  unsure (1)..(192): unsure at all Xaa locations
  Clone ID: MRT4577_77041C.1.pep
MEPRSAIYRSGALLLLAAILAEVVIPASAIGDKCAACKAVAAELEIGISSEKPRNHLDLRNRLNSKGQREGKVIDYRVSELRVVELLDGLCDKMQDYTLKKLESGEKGWVKVTDWNSFQTENKAAARAHSKKLSTFCGXHLLHRLLEETEDELSEWIKTTSTESEYVSKALCEDISKHCRSTSATIQIDDEL

SEQ ID NO: 344169 - protein, 81 aa, Zea mays
  Clone ID: MRT4577_77042C.1.pep
GVTPQLDWYCCSISRWKQLTSLAGSLRRALSLLPKVVEMRGSPKKMVLTYWKRSARWWKTPNKNNSKKNSAQEETPSAGVL

SEQ ID NO: 344170 - protein, 138 aa, Zea mays
  Clone ID: MRT4577_77043C.1.pep
TCPSGSKNTKTLFPTLSLIPGAAVGTTDDRIQRPRRPRGGPATRSAARTTVTEVAPDSLRGWCCWLYLLITFLVLLDLAVMLVLGLVENPFKRRIHLIQVDELHLLVVKTYRSPADCALADAIIYLNITVLYTDMNPI

SEQ ID NO: 344171 - protein, 30 aa, Zea mays
  Clone ID: MRT4577_77044C.1.pep
MATAEVQTPTAVATEEATVVETPAPPAVVP

SEQ ID NO: 344172 - protein, 274 aa, Zea mays
  unsure (1)..(274): unsure at all Xaa locations
  Clone ID: MRT4577_77045C.1.pep
KRFDVVTDCLDHHFVKENGHESVTRGWLKKVRLEWNILQNDLPDGIHVRVYEERMDLLRACIVGAPGTPYHDNLFFFDIFFPPDYPHEPPSVHYHSGGLRLNPNLYESGKVCLSLLKTWTGTGNEVWNAESSTVLQLLLSLQALVLDXRXYFNEAGVDKFVGKADGEKNSITYNENAFLLSCKSMMYVLRKPPKHFDTLVKEHFTCRAPHILDACEAYLGADLLRSPPAPRNLETLMHTCILKVMVQIVLKHLLLPRQRALLMFCGRMELYLLV

SEQ ID NO: 344173 - protein, 101 aa, Zea mays
  Clone ID: MRT4577_77046C.1.pep
SMGAATAIVANAGRSGTIACVMSMMMRQLGPRSSIRRISSAHASTVLRALVVVRVARVRTAAAAQGEGHGREDQRDEQGAAHGDGLLLVVVRAGRGRPEMS

SEQ ID NO: 344174 - protein, 56 aa, Zea mays
  Clone ID: MRT4577_77047C.1.pep
LKAFHTCNCDTDCETYAPSLYVLAPSRRICPENESTNHGLKTRTICLFYDHGGPKY

SEQ ID NO: 344175 - protein, 44 aa, Zea mays
  Clone ID: MRT4577_77048C.1.pep
PGRGMLFTCKFQKLNECLLTPPPMPVPRRPLPSASTASSSRLPP

SEQ ID NO: 344176 - protein, 585 aa, Zea mays
  unsure (1)..(585): unsure at all Xaa locations
  Clone ID: MRT4577_77049C.1.pep
MALEDGSPATFTPQVIANAFVKQYYQTLRYAREDAYKFYNDKSILGRTDSNGKMICVTTIDDIKEQLVSTDCADCLIEIETVDAQPSHVDGVIILVAGYFTTAVVKQKFIQSFFLAPQENSGYYVLNDTFRLTGISFEVKVVAANHDNKSTQITTLPNEPEIDSFKESEVPGVPPAGNILVNDGVISTSANVVSPVKNDPVVETYVKVVNEDVVKIPVAAPASTPVTAEEVVNKDFVKIPESAPALPSSVEKAAPAPXHQLRRLLQHLXSVEKGAPAPRAPVEKADPAPSAPVEKGAPALRAPVEKADPAPRAPVEKEVTRKTYASVVKIPREDTQPAPAARPSKPNLNIKMVQNTEKNVSSPSKPAHATVNALPGDKGVPKNKSPDEPGYSIFVKNLPFEATVEMVEQEFSKFGAIKSGGVQVKCQPDQFCFGFVEFESQQSMLAAIEASRVYFGTRESYVEEKRTKTRVVDGVITRGDDNGNGGGGRFHSGRGGGYYGDGYKRQWGGQNNGYYNGGDNMRNDYSGRVRGPQGNGHPQNGHGYHQNGHGYYSGNGYQQRRPNSNGNGLRVERNNGFRQQGPASA

SEQ ID NO: 344177 - protein, 87 aa, Zea mays
  Clone ID: MRT4577_7704C.1.pep
SNPTGDTDEFSRFSDLYLWSVYDAALYQGFILLSLQAHLPQLKPAPCDMASTDGGCEKASGFKSTVFFLALYLVALGSGCLKPNMIA

SEQ ID NO: 344178 - protein, 97 aa, Zea mays
  Clone ID: MRT4577_77050C.1.pep
MEFSSKQLNLATKKIFSKAPPDSLFLARGSPRGMIFLPRSKGSPPHPGGFSSPRDMANGVRVPPFPMGTPSLEFLFSVLRKQIPPAPKGKNKPLGFF

SEQ ID NO: 344179 - protein, 271 aa, Zea mays
  Clone ID: MRT4577_77051C.1.pep
MDEPSPLELADGDAVLWLPEPAAVDLAPQLPDEVDVEPDGVDPASPLLVVSPSLVVDPAPPLPLDCKVDRHRDDPFQPAVETTLAFQSDTERILLLRSLSIPRTQVTAMTDRHTCTSSARRRTTTPTSSWVAGLALPILMKKPNMGAKELQKELQDKWKCTISYDTVWKGREKAFLDLHGAWEDSFRLLFSWKEAVLEKMPDSVIEIDVQEEDGKVFFSRFFCAFGPCIKGFLQGCRPYLSVDSTALNGNRHHSPCLMHWKTPVHRSLLQG

SEQ ID NO: 344180 - protein, 70 aa, Zea mays
  Clone ID: MRT4577_77052C.1.pep
GRGQKLRNSVLMQPRDSTEILKSYHSLFYDKRESSGGSNKRSELAPQKWDEGNREKGRRGRGRCKTKGAP

SEQ ID NO: 344181 - protein, 51 aa, Zea mays
  Clone ID: MRT4577_77053C.1.pep
NSDLIGVTGDTRPSFDGRLIFYAVLIANVTHKYGPSTVNTLAKKKKRAKDQ

SEQ ID NO: 344182 - protein, 123 aa, Zea mays
  unsure (1)..(123): unsure at all Xaa locations
  Clone ID: MRT4577_77054C.1.pep
MIIPXKNRNEICKNLFXEALLDGKNDYNLCKHXTIDATNLQXVIKLVQRFKYQGSMYRETFSWQNYYWNLTNHGNEQLPNYLNLPTNMVPGTLKNSDTPXGVQFGSGPPGDRPRCPGQFENRP

SEQ ID NO: 344183 - protein, 50 aa, Zea mays
  Clone ID: MRT4577_77055C.1.pep
MSAWTGSSNRAQTASESAAALKAGDTADEWHASPGVVSEMAYATHSSGSR

SEQ ID NO: 344184 - protein, 78 aa, Zea mays
  Clone ID: MRT4577_77056C.1.pep
KNSLAPKLGIFKRNWAKKHLQLPLHQTGFCFRSRLFQPFWGGGGFPGSPKPAKVQAPFFTILKRGRILREAVRKPHFI

SEQ ID NO: 344185 - protein, 191 aa, Zea mays
  unsure (1)..(191): unsure at all Xaa locations
  Clone ID: MRT4577_77057C.1.pep
LGTSRPATRDCLFSDTWRDGARLLNIWNLNNCGGVMXVINCQGAGWSRMTKRTRVYDPSSRTLTATAHADYVDTITRFSXTAAXHRQTAPHAHXRTRHLVRLLRLVALPVTVRPLQHDALHVSPLLSVLPPVSFAPVGLLHMFNCRXAVEECDVITDADGKGMVLRCRVCGRFLSYCSRYAPRRLLNYFGT

SEQ ID NO: 344186 - protein, 84 aa, Zea mays
  unsure (1)..(84): unsure at all Xaa locations
  Clone ID: MRT4577_77058C.1.pep
QTLENNKNQSPRKQFVRTVIATSEQGASLNLKEGQNLVTFSFSTRVLGKQQVXDVLGQVMPLVGRDWSHSSVARLLYVPTYPCQ

SEQ ID NO: 344187 - protein, 392 aa, Zea mays
  Clone ID: MRT4577_77059C.1.pep
RLRGVFQQNLAYEEDFKSSGSTMIKNANLIVKVDNNYFPWNKVSHVILGKAVYGSKFPLEPTDAVPVEQQETPKSREDSLRMSPSSRRWRLWLNPFRITRSLQRSNSDSSEDIFLDSESVLSPMDDQTLENNKNQSPRKQFVRTLIPTSEQVASLNLKEGQNLVTFSFSTRVLGKQQVDAHIYLWKWNAKIVISDVDGTITRSDVLGQVMPLVGRDWSHSGVARLFSAIKENGYQLLFLSARAIVQAYLTKNFLFNLKQDGKALPNGPVVISPDGLFPSLYREVIRRAPHEFKIACLEDIKALFPSDYNPFYAGFGNRDTDELSYKKMGIPKGKIFIINPKGEVAVNSSVDVKSYTSLHTLVNDMFPPTTLVEQEDYNNWNYWKVPLPDVDL

SEQ ID NO: 344188 - protein, 89 aa, Zea mays
  Clone ID: MRT4577_7705C.1.pep
MAKVLQAAVALLLVEALLLLANCDGRELKASGAAASGGAAANGGGSSGGDEKATGLPLIPPLPPVLGPVVPLPPVVPGIPPARESDKFP

SEQ ID NO: 344189 - protein, 60 aa, Zea mays
  Clone ID: MRT4577_77060C.1.pep
AAGSVIPSSFDVDLVSSPHTSYLIVCVPLGTCCLDTLLQVGDTRCQFTIPPPLCTCPRVN

SEQ ID NO: 344190 - protein, 112 aa, Zea mays
  Clone ID: MRT4577_77061C.1.pep
STQVGRTLWGLLVIGTSPPSPIGETRPSPLKVAQLPVPVRGSGELQGNFFFQIFTAPTNKAKMGDNGFINHQFNWGNFPRMRAGWGALGGGWAPPWAKAGKAFKKSPLASPG

SEQ ID NO: 344191 - protein, 151 aa, Zea mays
  unsure (1)..(151): unsure at all Xaa locations
  Clone ID: MRT4577_77062C.1.pep
GERERNLRNTGSADRPARRPTAPPPRPHXPPPTSGPQRRRPAGAGPPWAAAPRPRRCRPGRSSAGSRPRRAAAPPPRAGPPASTTATPVAPATPVLPSARPRPRPLKRSAEGYGLRGDGSAGGTCRRSRANRSTGIVWSGTQDARVWPDAR

SEQ ID NO: 344192 - protein, 193 aa, Zea mays
  Clone ID: MRT4577_77063C.1.pep
KLEPSLQTSMEAEARNILERAAESSFPPLHAVHHLLSVGVCVRCILRLLGAYSSACSYACLTASVLHSFLEEHDESIKGGSCPCLSMNDAYCSVCLGVLLPTFHRNEGLETPNGISHIDNMSSVISQAVHGESYQVDEFSLEISLPPVIAANERAVRLYMKQKYGNENWFKDKMFAQQTMSVKEALRLLIAPA

SEQ ID NO: 344193 - protein, 288 aa, Zea mays
  unsure (1)..(288): unsure at all Xaa locations
  Clone ID: MRT4577_77064C.1.pep
AGAGETKPNQSKAKEKSVARTLSSPLLPAAAQNPSAGSFSPLPTVNPSMMGEAKENDVYEEELLDYEEDDDKALDASSNANAKPAADASQPKKGYVGIHSSGFRDFLLKPELLRAIQDCGFEHPSEVQHECIPQAILGMDVICQAKSGMGKTAVFVLSSLQQIDPTAGQVAALVLCHTRELAYQICNEFERFSKFLPELKVADSYGGVHIKKHQDLLKNDCXPHIVVGTXPGRILALARDKDLSLKNVRHFILDECDKMLESLDMXRRDVQXDFQMTPHDKQVMMFFA

SEQ ID NO: 344194 - protein, 58 aa, Zea mays
  Clone ID: MRT4577_77065C.1.pep
SFSGPSNVTAILEKGGQLTMFMPLMNETQNDTLLNSQLNISYSSSGGVYTEVEPTDNA

SEQ ID NO: 344195 - protein, 126 aa, Zea mays
  unsure (1)..(126): unsure at all Xaa locations
  Clone ID: MRT4577_77066C.1.pep
EEKGSERTRIQDLLMEARNKHKGNNPYTTKRYYLSQTLVLGAAKKERPLAPATIHFSLSSAVASKIVVIYGGXGASNTTLFLNFQIIQALRIKVNLPPSWSCLTQYQQYVSTTAGSLCHPGEGKMW

SEQ ID NO: 344196 - protein, 70 aa, Zea mays
  unsure (1)..(70): unsure at all Xaa locations
  Clone ID: MRT4577_77067C.1.pep
MGGGPQGSSQKKKSALREANKKKKLLPLDPPPKKTRPTPPGLTKHHLFLKPEREKKRXKSSPMRKYATKA

SEQ ID NO: 344197 - protein, 74 aa, Zea mays
  unsure (1)..(74): unsure at all Xaa locations
  Clone ID: MRT4577_77068C.1.pep
YPXGPAGXPNLIGAARVEHSHRRLLVVLAVPARHIGTKATEAVMAGVDGILHLRQTHVHESLAMSDLPGSRSSS

SEQ ID NO: 344198 - protein, 106 aa, Zea mays
  Clone ID: MRT4577_77069C.1.pep
DSSKRNPLPCAVVFNLESVLAAHRPFFVEVNTAAAAVEVEASAPEDAPSGDGAPAEAHPAADLCRGDPVRGSRGSRQHPRYLPPLRRSRVCYLIGQANLWPLNYHP

SEQ ID NO: 344199 - protein, 37 aa, Zea mays
  Clone ID: MRT4577_7706C.1.pep
SSYCTLTSMGRGVSIAVFNPSLMLMAELFTPENSCHC

SEQ ID NO: 344200 - protein, 544 aa, Zea mays
  Clone ID: MRT4577_77070C.1.pep
TKLKLWYQQHLACLASTLSGLAHGTPVRNNVDSLLNQMFRKANKGGTSIGSLSGSSSISNSSGPGGDDSHLWPQLPAWEILEAVPFVVDAALTACSHGRLFPRELATGLKDLADFLPASLATIVSYFSAEVTRGVWKPASMNGSDWPSPSVNLSMVDEHIKKIVAATGVDVPKLVTGGSSSGTLPLPLAAFVSLTITYKLDKASECFLNLAGPALENLAASCPWPSMAIVAALWTQKVKRWSDFLIFSASRTVFHHNNDAVVQLLRSCFAATLGMSSTSVCSCGGVASLLGHGYCPGGFSPVAPGILYLRIFRCIKDCSILAEDILSLLMLSVKDIAETTVPRQRPDKLKKTKYGMRHGQVSLSAAMTQVKVAASLGATLVWLSGGTALVQSLIQEMLPSWFLSAQNLDQGGASGGVVYKLGGHALAYFAVYSGMLAWGIDQTPVSRRRERVMRSHLGFLASALAGKIFLGCDLSLWRAYVSGFLGLVVECTPCWVQEVDLRVLKRLSSGLRHWGEDELAVALLRRAGPEAMGTAAEMILGREL

SEQ ID NO: 344201 - protein, 40 aa, Zea mays
  Clone ID: MRT4577_77071C.1.pep
ACFLCARRSHVINSCCCSVTPVCVINVTCQSMYSESVIFI

SEQ ID NO: 344202 - protein, 93 aa, Zea mays
  unsure (1)..(93): unsure at all Xaa locations
  Clone ID: MRT4577_77072C.1.pep
AQLNLQTVGSYQQQQVLPSLSHLAVVNPVSYLQQQXLLASNPLALANVAAYHQHQLLQQFMPALIQLAMVIPVAYLHQQQLLSSSPLACGHCT

SEQ ID NO: 344203 - protein, 258 aa, Zea mays
  Clone ID: MRT4577_77073C.1.pep
MAGAAEGAGAEAVERAHGLYRGGRHREALELYSAALAAARSPAQRIALHSNRAACYLKLHDFHKAAQECTSVLELDTEHAGALMLRAQTLVTLKDYQSALFDVNRLIEINPSSEVYRNPPGGRTVLKSLAPIPECEEESLCREEEEEELPPRVQKTDTSSIAKPDQPATKLVLENKPSAGPILHRKPATEPLKAVVPSTSPSKPQGWEAIPKPKSHSGLDYSKWDKIEEDSSEDEDDEEDELPQYKFKVRSVGVRSVK

SEQ ID NO: 344204 - protein, 56 aa, Zea mays
  Clone ID: MRT4577_77074C.1.pep
CFLRSASFPGDGPDQDLDLCFLKISDCQYPKNNCPATIVHSLPSMITKTITTTLST

SEQ ID NO: 344205 - protein, 575 aa, Zea mays
  Clone ID: MRT4577_77075C.1.pep
TNQNLKRLNEDVIDFDLLEDLICYIDENCPQGAILVFLPGVAEIDLLIDRLSALVRFGGASSDWILPLHSLLGPSDQRKVFQSPPDNFRKVIIATDIAETSITIDDVVYVVDTGKHKENRYNPHKKMSSIVEDWISRANAKQRRGRAGRVKPGLCFCLYTRHRFENVMRPFQVPEMLRMPLTELCLQIKSLHLDDIKSFLLKAVEPPNEEAISSAVDLLYKVGAFEGHEELSPLGYHLAKLPVDVLIGKMMLYGAIFGCLSPILSVAAFLSYKSPFLSPKDEKQNVEKAKATLLNENLDGSSSVTDNKQSDHLLMVIAYDKWSRILLQNGDKSARQFCHSFYLNSTVMHMIRDMRLQFATLLADIGLIDLPKDTLRHKVGSRKNNLESWFSNMSLPFNAYARCTSVIKSVMCAGLYPNVAASLEGVDPGALGGRKPSDVLFSKDRPRWYDGRREVHIHPSSVNHSLKAVQYPFLVFLEKVETTKVFLRDTSVVSPYSLLLFGGSMVIQHQTGVVVIDGWLRLSAAAQTAVLFKQLRMTLDAVLKELTRKPEMATFVDNEVVRSIIHLLLEEDKAR

SEQ ID NO: 344206 - protein, 84 aa, Zea mays
  Clone ID: MRT4577_77076C.1.pep
CLFHHCATCHQYSISVESNTYRIVLSFFKEVQRSCTPKQQQHPIEDQDFEESITNQEADHYDCWYESRRSGGTTKSMLRAQMYC

SEQ ID NO: 344207 - protein, 156 aa, Zea mays
  unsure (1)..(156): unsure at all Xaa locations
  Clone ID: MRT4577_77077C.1.pep
LSTDDPLYPXAELIDDLKNDDIQLRLNSIRRLXSTIARXLREERTRNELIPFLSENNDYEDEALLAMIEELLELIPYAGGEEHAHDVLRPFANLCTEEXACVRDTECESLRRIGELLQVTDIVHWIIPVVKXLADXDXCTSRVSSCDIFHILYPSV

SEQ ID NO: 344208 - protein, 576 aa, Zea mays
  Clone ID: MRT4577_77078C.1.pep
MAPLSCRDLPARLPTLPHHASTHPHLSFLSGGPAPRRWRSLTTSNTLRLRLAATKDDAVASLVGRLEHDVANAQYRDDVLEEEDEEQREEEEEEQQFLDDDNARRRGAGKHRDELRSRWREIHGCDDWAGLLDPMDPLLRSELIRYGELAQACYDAFDYDPSSRYCGSCKYSRRDLFERLGMADAARGYVVSRYLFATSNIRFPNLFPQSRAGARIWSQSASWIGYVAVSTDEESARLGRRDIAIAWRGTVTRLEWVSDLMDFLRPVAEEGIPCPDREVKVLAGFVDLYTDRDPSCRFCKYSAREQVLTEVRRLVGRYTAAGEDVSVTVTGHSLGSALAMLSAYDIAETGANMEAAPVCVFSFGGPRVGNTAFKRRFEEELGVRALRVVNVHDNVTRMPGILLNEGAPEVVRRVAEGLLRVPWCYAHVGVELPLDHKRSPFLKDTLDPACYHDLEAHLHLIDGYHGRGERFVLASGRDPALVNKACDFLKDHHGVPPCWRQDENKGMVRARDGRWVQPDRHGWHLDDHDHDHGDHRHHHHHHHHDGHHHRHHKKHSTEGARHHHRHGHGQDMQSHA

SEQ ID NO: 344209 - protein, 81 aa, Zea mays
  Clone ID: MRT4577_77079C.1.pep
DAWYMKHGTRLWADIDKERMDGQQETDRLLRPEYACLSQKDPWRARDDCNVGALVYPHQAAPAREVHDVRDQHAGLAERAN

SEQ ID NO: 344210 - protein, 773 aa, Zea mays
  unsure (1)..(773): unsure at all Xaa locations
  Clone ID: MRT4577_7707C.1.pep
DPRGRPGRVINKKSSSAHCNLGSKSFGNSSMPGNDSHGIDESXTKSSSLVQPCGSENLLDFLTGDFDMSESHITQNTFGAGEQTNFLDDGFDVNPFAPALEVPVPVAKVNKEVEECGSTQLYIKFFESLSGYNKGKGLDFEQTMKLEIKRPRLGLSAAERDQALLSIGVIPATLDPNRLIDYSYLLKLSSLADNLALLGHTVLEDRANASIGLEKGSEHAIDFWNISENDEFCYGGACEVHALSSLQALASRENQSVFMECFQCEKTVCKACCAGKGAFLLLNTYRELKIYGGSQSGGYSALTDSFVCKSCCSEIIKRALYVDYVRVLHSLRRKDRSEKAALSAVNQVCQLEYKKASDLSQSIQFGQRQLKQILDGEESLAEFPYANFLQMVETANDSEPLLSLLAPFGTGEYTSYWKAPQGITSVEFSIVLGGLSDIAGVSIIVSSCGYSASDCPIVEIWASNKIHREDRTFIGKWDVQDIISSSPQLRGPEKSSRLSEEPRHIKFHFPNPIRCRIISIKMTLSHRGSHSTKFSEEFDLLSLNDSSSYESKPTNLHNSFIHAKRIVVFGSLLRKEMEPDTSGGIMRMKSYLDRSPALGRFRIPVEAERLRDNDLVLEQYLLANSPGIAGFRLDSFSVIRPRVTHSPSSSELDMREFSLTRMEDRFINPAILYIQVTVVKESGKLVVEEYRLPEVKANTPLYFDFPDLQQDARCVIFRLLGDVTAFVDDISELENLNLRNLPLASGLSLSNKIKLYYYADTYEMGKIGSLSAV

SEQ ID NO: 344211 - protein, 250 aa, Zea mays
  Clone ID: MRT4577_77080C.1.pep
SVSVSFKAQFLLFFCTEQPLCVTDILKDPGEASETSQSAVRDCRISSAGPDPDASHSPTHRAPTREAEIKDEIGLLLLSDKPFLSRAAELIGVDVYGDLSNQCDRISKARTRNRRLYLDAAGEQLELKHRQQNILWPYARPLGRRWRSSSSAYLSLEELLRDVSDGVRNLEDGYCSGDARRGSKDSLDVKLERDLTSSADALISSVWDMGWQGLACVEAECFVRDAGEEILSLLVEEAALDMCLHCHSAM

SEQ ID NO: 344212 - protein, 171 aa, Zea mays
  Clone ID: MRT4577_77081C.1.pep
PAGPGSSISLLLPFLATPLSSSLPQILASVSYPQHKHLQLKAASQKPRSRSRRDAASRRRAWRAGECASGGFSPVQSTPAKTQKAYEIEKEILHALDQTDGPSTEHSATPSDEACPSADWDEASSVGDILKDPGEASETSQSAVRDCRISSAGADADAIHSPTHRAPTREA

SEQ ID NO: 344213 - protein, 119 aa, Zea mays
  unsure (1)..(119): unsure at all Xaa locations
  Clone ID: MRT4577_77082C.1.pep
LLHSLALDAMSSASTLTCDSIPFSQLSAASVYXFLPFSCITALILXAYSQQPIQLPISYLPGVISSTFLTHSQLLSFFQPAAPNAGTLSHMRRELPFIHHAFTDAAVFXHHAIIGGALF

SEQ ID NO: 344214 - protein, 206 aa, Zea mays
  unsure (1)..(206): unsure at all Xaa locations
  Clone ID: MRT4577_77083C.1.pep
GSSSTLALPPPLLXPTXTVTVIPMASTATTRRRPRRGSKGPNADLSRTLTDCTRRGDAAAAMAAFDAAVDADADAVPRLSAHQYNQLLHLLAAADRSSFPSPPAAAARRVFAHMLQAAAPPSEATITSLARVIAADPASAADEAFELVATMKDKYSLSPRLRSYXPVLAAFRRAGEAAKAYAVEAHMTXXGVSPEEPELAALLDVS

SEQ ID NO: 344215 - protein, 130 aa, Zea mays
  unsure (1)..(130): unsure at all Xaa locations
  Clone ID: MRT4577_77084C.1.pep
PPPHPVAPSPPPSPKVWMDKPPKPRSPVRKVTNNPPGPNPSAPDPGPNDPXPPPNKKILNFPXGPGAPPPPPXPGPAPGPXVQKPVSPPNPFGKPPPPPPPPPXPLPPRSLKIVVMFSSLFFPHVSSPLY

SEQ ID NO: 344216 - protein, 219 aa, Zea mays
  Clone ID: MRT4577_77085C.1.pep
VRSFMFSGFIKSLPSLLKYCLVRVLILHVWSDDQGKTVVLDLSPVGNMLHVRYLKVVSNMIVKLPLIIRGLRHLETLEVDAEEVAVPLDVFILKSLLHLRLPSKAYQPDSDIQRIDLTNTFPLRFLPFVRALSMLGRFLLSHGHRIRHLTSLQSLGYFDLSTCSRYTVWQLGKLTNLRDLHLTCSAVRSRHRISNIQCLASVLGKCTSLESLTIRGEAS

SEQ ID NO: 344217 - protein, 39 aa, Zea mays
  Clone ID: MRT4577_77086C.1.pep
ASNWMSLTSLYTRALTSYQRSCPTRLIFHVRDLLSCTSK

SEQ ID NO: 344218 - protein, 457 aa, Zea mays
  Clone ID: MRT4577_77087C.1.pep
MADSPVTMDDAFRVLQDGAVAVAGDRIAAVGPSADVLAAFPCAVQTLDLGGRIVLPGLVNTHVHTSQQLARGIADDVDLMTWLHGRIWPYESHMTEEDSYASTLLCGIELIRSGVTCFAEAGGQFVSEMARAVELLGFRACLTKSTMDCGDGLPPNWSCCSTDDCIQSQKELYEKHHNTADGRIRIWFGLRQIMNATDRLLLETRDIAQKLNTGIHMHIAEIPYENQLILRTKGIDHGTVTYLDKIDFLRSNLLAAHSVWLNVPEIGFFSKAGVKVSHCPASAMRMLGFAPIREMLDSGVCVSLGTDGAPSNNRMSIVDEMYLASLINKGREAYISGTTNPTALPAETVLKMATINGAKAVLWDNEIGSLEVGKKADLVVVNPFTWSMVPLHDSIANIVYCMRTENIESVMCNGRWIMKDHKIMNLNEEEVISSAVKRANDLLARAGINLPRRMNYV

SEQ ID NO: 344219 - protein, 67 aa, Zea mays
  Clone ID: MRT4577_77088C.1.pep
NFNITLKTIHYYNPFLLLVQFDTSMVLLLLKPHVQLHIIFYSTLVETASDDYDPANMSPGQHASLQL

SEQ ID NO: 344220 - protein, 240 aa, Zea mays
  unsure (1)..(240): unsure at all Xaa locations
  Clone ID: MRT4577_77089C.1.pep
MADSPTIDAVFHNAVIVTMDDAFRVLQDGAVAVAGDRIAAVGPSADVLAAFPCAVQTLDLGGRIVLPGLVNTHVHTSQQLARGIADDVDLMTWLHGRIWPYESHMTEEDSYASTLLCGIELIRSGVTCFAEAGGQFVSEMARAVELLGFRACLTKSTMDCGDGLPPNWSCCSTDDCIQSQKELYEKHHNTADGRIRIWFGLRQIMNATDRLLLEXRDIAQKLNTGIHMHIAEIPYEKSLI

SEQ ID NO: 344221 - protein, 91 aa, Zea mays
  Clone ID: MRT4577_7708C.1.pep
RTPETHRPPITKRRRHSKMLSRAQRLHPAVRRFLLPNTPAPSRHPPLPPQHSASAKTSKPFSILFRRHLCSSPPATPPPTSPPPAVVSSDL

SEQ ID NO: 344222 - protein, 247 aa, Zea mays
  unsure (1)..(247): unsure at all Xaa locations
  Clone ID: MRT4577_77090C.1.pep
MSSAMESSYLPATTESIEKAQEAKDASESISILYRVIQDPSSSADALRTKELAITNLTNSLTKENRAEDLRNLLTQLRPFFSLIPKAKTAKIVRGIIDAVAKIPGTSDLQISLCKEMVEWTRAEKRTFLRQRVEARLAALLLENQEYTEALTLLTGLIKEVRRLDDKLLLVDIDLLESKLHFSLRNLPKAKASLTAARTAANAIYVPPAQQGTIDLQSGILHAEEXDYKTAYSYFFXAFEAFNALDD

SEQ ID NO: 344223 - protein, 121 aa, Zea mays
  Clone ID: MRT4577_77091C.1.pep
GPTHPSPSPSGLSGLPRPLVGAIAGPTLLPMLSLPFRVSPVARAQITGPQPTAPDAYDERREAVVTRDNRLLLTRLEEAYGSGDRPFRRGHRVHTSAGSCSRRTPVTRPTSGVPSSTRATT

SEQ ID NO: 344224 - protein, 119 aa, Zea mays
  unsure (1)..(119): unsure at all Xaa locations
  Clone ID: MRT4577_77092C.1.pep
LLFINFSLGQLLTFVRPHTHXILPPYKATSSTSSMPPLSHSHPIXIKNPRTAAYKLPLTPKCLITNYLLRSFDPPLANQSRADNSPPSSFAPPNSIIHKFPPFCLNTTNPLFLSRPHTI

SEQ ID NO: 344225 - protein, 189 aa, Zea mays
  unsure (1)..(189): unsure at all Xaa locations
  Clone ID: MRT4577_77093C.1.pep
SPPGRGPGQSPHKCPDPNLDHGTTPPRQEEEKRKEAPMRVRPTIKREAGLCNGXSQGLPRTADXKSSSSSFXGHRTAKXDXRSPERKRARFYPLRGASPPRRXXXXXATPHMEDEMMKRGWXXXXRXKXREGXRVKERICALGPPPPPLPAXPXCHPLSSLSLXLSLSLSLSLEXWKXHRQMIMGAKSX

SEQ ID NO: 344226 - protein, 167 aa, Zea mays
  Clone ID: MRT4577_77094C.1.pep
MYDSRNANKVLHQPMGSFPSNVADEYEEEGYSTLMESLTHPEVTHKVKTLVRVVAFYPFEAYELHLLLRSNYDYSIRLTLEDPTARIDAYVHKQNLVQFFGDSLTEVVVMKKLNKLLGIPESEDGDEVVPMSWNSPWIWCVMSSYYCEKTDPWGSRRYRIVDTTIRD

SEQ ID NO: 344227 - protein, 66 aa, Zea mays
  Clone ID: MRT4577_77095C.1.pep
LNQSRGITSASSSQCNGNSRVFCSFFFKYISASFVCMHVIPLSVCLPVGAKELFCKKKGNRYGRPL

SEQ ID NO: 344228 - protein, 189 aa, Zea mays
  Clone ID: MRT4577_77096C.1.pep
RFVSDGRGRYDNRRGFGDKGRDRSYSRSPDRGRSRGYDRRSDGRSISRSRSRSRSWSRSRSRSRSWSRSRSRSSSRSHSRSRSRDHGAAPERRPRARSGFDVLPPATGAAGPASVPVPGPAAPPVPAPAPEQSLANTSSMSPMSPGGLVQPAAAPAGGQPSQGTGAAFPSSPAGETFPGAAAQHPAPDV

SEQ ID NO: 344229 - protein, 191 aa, Zea mays
  Clone ID: MRT4577_77097C.1.pep
EQSLLSFLLEYSGQSRGCLDPERVPESMYKYLQPLVYIMLHSQIKNIRDQAYILVKAAMASSGAFDHNFTEIDAWLVFLPGYEAKWCVRENLRIGAPNKLSHIVIPFLCDAISVVGNNLYKYQEHTHKLISKSGQLEGRSPDFSPLIICVLQKCLRLLDTASGSTKLHEKSTISLYVCNTVHLILQSQVLF

SEQ ID NO: 344230 - protein, 184 aa, Zea mays
  Clone ID: MRT4577_77098C.1.pep
MGFWEAFLNWLRSLFFKQEMELSLIGLQNAGKTSLVNSIATGGFSEDMIPTVGFNMRKVTKGNVTIKLWDLGGQPRFRSMWERYCRAVSAIVYVVDAADRENMAIAKGELHDLLSKPSLTGIPLLVIGNKIDKPEAFPKQTFTELMGLKTITDREVACFMTSCKNSTNIDSVIEWLVKHSKKKN

SEQ ID NO: 344231 - protein, 184 aa, Zea mays
  Clone ID: MRT4577_77099C.1.pep
MGFWEFFLNWLRSLFFKQEMELSLVGLQNAGKTSLVNSIATGGFSEDMIPTVGFNMRKVTKGNVTIKLWDIGGQPRFRSMWKRYCRAVSAIVYVVDAADRENMAIAKGELHDLLSKPSLTGIPLLVIGNKIDKPEAFPKQTFTEIMGLKTITDREVACFMTSCKNSTNIDSVIDWLVKNSKKKN

SEQ ID NO: 344232 - protein, 68 aa, Zea mays
  Clone ID: MRT4577_7709C.1.pep
QMESRYPGRDRAPEKTRGDTSLLGGGRPKKKGAFKKNGGQTHKWKDGNDSWTGSTTKAQTRKTKHDAR

SEQ ID NO: 344233 - protein, 144 aa, Zea mays
  Clone ID: MRT4577_770C.1.pep
MTDSKPDPVIPDTNSKSSFTFKRKLYTGQGKSQSATRKDDDSLAHDVHPGFYPIMILTDGLESWYAQVEKRGGVDSGNTDVIKGNRETIGVRSYEKAEKVEPPGKGKAVHPSSKKATQTGVCKLLRSSSSHLWLLVTDWRESEF

SEQ ID NO: 344234 - protein, 424 aa, Zea mays
  unsure (1)..(424): unsure at all Xaa locations
  Clone ID: MRT4577_77100C.1.pep
MKNRYSSEVRDETSICAPAGDYEQVPTNSEKKTSHGRELASEATTSNNHGGRSQGVKSGLMGEDFVPSWQEFLPDGLEGKEAILLADCTSVLRNYKETKRRLSELERRNQEHLEETKAVIRELRNANSMKYVEIRSLRDLLDSSEVPPSKAGGNSNGFLSLKSFREIDRSIATLGRDISAVEENSSSNIETPNNTSLHKMTRFRNDIDALVEENLQFLVRYSMACYRMQEFDRRYQEAQDEMEDNKSREPDTPAEPGPAEKKLRELRTELXVWFEQSALLDQEVQLKSASLCRMQEEIAEALRGSLEMDRARFTPYEAAKFQGEVLNMQQSTSKIEGEMQAASEHMRGLQAKVSHALEGLRESFEISSQRLSRPETESSHEKQFKHFPSRTRVPLRNFLFGTKRKKKSIFACINPTFQKQFSDL

SEQ ID NO: 344235 - protein, 40 aa, Zea mays
  Clone ID: MRT4577_77101C.1.pep
VSSLEEEYISDSCLRASDRKNKVYGVDVKEHFVLKVGRPS

SEQ ID NO: 344236 - protein, 91 aa, Zea mays
  Clone ID: MRT4577_77102C.1.pep
MECSSLVCTYIISVKVCLGKASGLSILLPITSNGIPVKDGKPEAFPKQTFTEIMGLKTITDREVACFMTSCKNSTNIDSVIDWLVKNSKKN

SEQ ID NO: 344237 - protein, 213 aa, Zea mays
  unsure (1)..(213): unsure at all Xaa locations
  Clone ID: MRT4577_77103C.1.pep
MDARCLGYPASRWMRPSALLLLVASALISVPSPVRALRFDLXSGHTKCISXDEIKDNAMGVXMYHIVRPYPKFPDAHVPESCRISLRPMTTQVNMMHXYAQNVQTAHFHFTARVAVDYLXACFCSPDHKPCVLHRHXFNWRRDVSARDYARAAKKGXADMMXLELKKIXGTIICIPAEMLYLRERKEEMHDLNRQTXNSRMAWVGLLSLDDCL

SEQ ID NO: 344238 - protein, 96 aa, Zea mays
  Clone ID: MRT4577_77104C.1.pep
ETNLESHPHFMLFGGGARMCPGKEVGTVEIATFLHYFVTRYRSVPLTSFWYYNLYNNLHSSFLIYYFLSFLFYYFIIFFIFFFYFFFIFFFYFFFF

SEQ ID NO: 344239 - protein, 105 aa, Zea mays
  Clone ID: MRT4577_77105C.1.pep
FLLWGRSPAREIWVIDGSRGDRTHGCLFYRPHPSYYINTSRDRFIWGGGLLTRDRSHLFFFHTLASRGEILGGGGPCLFTYLKRVALYTPRMGLPQRNPLEFLAK

SEQ ID NO: 344240 - protein, 182 aa, Zea mays
  Clone ID: MRT4577_77106C.1.pep
SSGVGSTIGAGIYVLVGTRAREHTGPGLTLSFLIAGVAATLSALCYAELSCRFPSAGSAYHYSYICIGESVAWLIGWALILEYTIGGSSVARGMSPNLALFFGGQDKLPFFLAQVHVKGLDTPVDPCAAILVLIVTALLCLGIKESSSVEGIITTANIIVMLFVICAGGWLGFRNGWVGYKV

SEQ ID NO: 344241 - protein, 106 aa, Zea mays
  Clone ID: MRT4577_77108C.1.pep
PPLFKPSTKNEGKINPLEEGLITYRAQLTTHPTTGITIKRGQTPHWGGKKKKEKSTPLLLTPSKQYTLLWARPHKIPCLAGGPVQNPPLRARGGKKNKDPPPRPQS

SEQ ID NO: 344242 - protein, 53 aa, Zea mays
  Clone ID: MRT4577_77109C.1.pep
IHELIPNPYLFYITGPKFKKRVETGGEAASKNRPIKQGCLELGPKTFPGNHLP

SEQ ID NO: 344243 - protein, 222 aa, Zea mays
  Clone ID: MRT4577_77110C.1.pep
MFDLAREVATKLNGNDTQSPENLSIVSSSLSLSTNLELYMEAVSLENLRTRAMRSENRKELELAEEMIPMVNYMHERLLRETQLLNINGVPIPADFCCPLSLELMSDPVILASGQTYERVYIKLWLDEGFTICPKTRQRLAHSNLIPNYTVKALISNWCESHDIKLPDPVKSLKLNFPSAASSLQDLSATGNSPLHPSAGRGNIPGSPEADLYMKSLNRASP

SEQ ID NO: 344244 - protein, 49 aa, Zea mays
  Clone ID: MRT4577_77111C.1.pep
DSHPLHCPKNKPVSNNQNPSSQHISTILKSINNLQSLQIHRPRSHGVKV

SEQ ID NO: 344245 - protein, 82 aa, Zea mays
  Clone ID: MRT4577_77112C.1.pep
SLILRLSQRSLGGKKLIHVRTLTLIYVLKYLKDFSCGNSKRKLLSWLRFTGEPKFLYSTMNTLPQVTCIFTVMTIKKKKKDL

SEQ ID NO: 344246 - protein, 63 aa, Zea mays
  Clone ID: MRT4577_77113C.1.pep
HIILPKRCQPAIATYEQKQDAIMAPRGDEMPGLFYNLESTLTTWYQNNHVKVGSVQPLRLPFS

SEQ ID NO: 344247 - protein, 130 aa, Zea mays
  Clone ID: MRT4577_77114C.1.pep
MGCCGSSAVDDEEHLDYSSGKVTIIPDLKCWEQKLEEANELGQTVVVKFSATWCGPCRNAAPVYAELSLKHSDLLFFSIDVDELPELVTQFDVRATPTFIFMRDKKEIDKLVGGNHEDLQKKFDPYCQCQ

SEQ ID NO: 344248 - protein, 223 aa, Zea mays
  unsure (1)..(223): unsure at all Xaa locations
  Clone ID: MRT4577_77115C.1.pep
MVVLAGSPAVDHIPLLRSPDPGDNFSGMPVVDLSSPGAPRAIADACERFGFFKLVNHGVPADTMDRLESEAVRFFSLPQADKDRSGPAYPFGYGSKRIGLNGDMGWLEYLLLAVDAASLSAACAVPSCALFRAALNEYIAAVRKVAVRVMEAMAEGLGIAPVDALSAMVTAEGSDQVFRVNHYPPCHALQGLGCSATGFGEHTDPQLISVLRSXNGTSGLQIA

SEQ ID NO: 344249 - protein, 133 aa, Zea mays
  unsure (1)..(133): unsure at all Xaa locations
  Clone ID: MRT4577_77116C.1.pep
MSTSAPTTRPPTXTMMSFAKKTSCGSAHYTTDGXRGLIRVNGVPIVLIGSXMVRLIVFQPILLAARSRFQDIDMMIRIRRGGKTSDIYSVRQCSDKGLVCYYLKYCDDAALKDVKDIFARDXRSLLVCDPIRC

SEQ ID NO: 344250 - protein, 243 aa, Zea mays
  unsure (1)..(243): unsure at all Xaa locations
  Clone ID: MRT4577_77117C.1.pep
YDKTRHMANNDDRQHPQLEPFLGVKTPSPVFDDDTSKSRLVKHFEGMGLSPELVAKRQGETRTKWKSEFIVGEKVLNHEQYMKKRAEHSYTRETMLQFGTTAALLSKPVLPVLSCTVPEEYQRPQEDELRRSGNLRISSSGRRNLKSSSSGIGNGVIPLSMLPPNPNVPASAIPPAQLENNLVPTGFISPRLVNRAAELTSSRSALTGSRGEIVSSGRDIPPSVXQPLRSSGAPPGFEXQSLL

SEQ ID NO: 344251 - protein, 345 aa, Zea mays
  Clone ID: MRT4577_77118C.1.pep
MGSGMSSARRRRFGLEASRGMLPLLALQVLIEYGRAGASRPPVTAALLAANSLVYLRPGALDGVLPSLARVSFNPQLIIEYGDLTRFFLSPFYHLSESHLFYNMTSLLWKGIHLETSMGSAEFASMVAVLLGLSQGITLLLSRGLLLLGDDTMYYDQHAVGFSGVLFAMKVVLNAWSDDFVYLHGMVIPAKYAAWAELILIQVFIPGTSFLGHLGGILAGLVYLWLKRASNGQDPITLLISSVANVETWPVRFAQNLLRSARSQGRVTGRGRVGRRISARDSPRGFWRCPTCTYDNSVSTDICEMCSTARDNHAFLRRQHHQAVGNTVELPVDEMRRRRLQRFDR

SEQ ID NO: 344252 - protein, 354 aa, Zea mays
  unsure (1)..(354): unsure at all Xaa locations
  Clone ID: MRT4577_77119C.1.pep
MGASARDRQIEQLKRCEPLTEAEVKALCLKAMEILIEESNVQRVDAPVTICGDIHGQFYDMKELFKVGGVLLLFIVGLHLALGCLLERTYSEHGCFXLLSWRSQSSLSGGKRLLILNFHYITVDHTNRELIFLNGICITLEHRSDKXVRYPDRITLIRGNHESRQITQVYGFYDECLRKYGSVNVWRYCTDIFDYLSLSALIENKIFSVHGGLSPAITTLDQIRVIDRKQEVPHDGAMCDLLWSDPEDTVDGWGLSPRGAGFLFGGNVVSSFNHSNNIDYICRAHQLVMEGYKWMFNSKIVTVWSAPNYCYRCGNIAAILELDENLNKQFRVFEAAPHESRGVPAKRPAPDYFL

SEQ ID NO: 344253 - protein, 61 aa, Zea mays
  unsure (1)..(61): unsure at all Xaa locations
  Clone ID: MRT4577_7711C.1.pep
IPDTKRMPFPVRRSLCGGVCXNSPNLWASCQPWXXXEGRRXWFAALVLEGVGNTDGVCGVT

SEQ ID NO: 344254 - protein, 307 aa, Zea mays
  Clone ID: MRT4577_77120C.1.pep
MGASDLDRQIEQLKRCEPLTEAEVKALCLKAMEILIEESNVQRVDAPVTICGDIHGQFYDMKELFKVGGDCPKTNYLFLGDFVDRGFYSVETFLLLLALKVRYPDRITLIRGNHESRQITQVYGFYDECLRKYGSVNVWRYCTDIFDYLSLSALIENKIFSVHGGLSPAITTLDQIRVIDRKQEVPHDGAMCDLLWSDPEDTVDGWGLSPRGAGFLFGGNVVSSFNHSNNIDYICRAHQLVMEGYKWMFNSKIVTVWSAPNYCYRCGNIAAILELDENLNKQFRVFEAAPHESRGVPAKRPAPDYFL

SEQ ID NO: 344255 - protein, 121 aa, Zea mays
  Clone ID: MRT4577_77121C.1.pep
GLAALRESGWLDTRIQTHPCDLWNYNPLLHDPCWPNVFCIWFPFSLHLIAGACRLLLLHCLSFFVAATLTALRPVPPRARAPPPPPSRRPPQASSPPPSRGSPNWPSHFIQLDVANFCAAS

SEQ ID NO: 344256 - protein, 84 aa, Zea mays
  Clone ID: MRT4577_77122C.1.pep
YLILKKHNYSSIFYTNIISNKTPCFYFVFLFFFIFFFLLFFFKFLLFFFVFFFIFYFYFFFFLGNRHRFIYNRPPTLSHRRAFT

SEQ ID NO: 344257 - protein, 44 aa, Zea mays
  Clone ID: MRT4577_77123C.1.pep
PSHLTILCTAAENAPPLLPRTLLQAGLIQKASMSGRKLLEMLSC

SEQ ID NO: 344258 - protein, 39 aa, Zea mays
  Clone ID: MRT4577_77124C.1.pep
MQLVTVWMSKKKKKKKKKKKKKKKKKKKKKKKKKKKKKI

SEQ ID NO: 344259 - protein, 171 aa, Zea mays
  unsure (1)..(171): unsure at all Xaa locations
  Clone ID: MRT4577_77125C.1.pep
TLNVLMVDLALLAHCASADWRTSRGXGCQTPPTNVPGTXYMPPSHYLXPRXQPQPWTHPTEPPQGNPPQLLXSWGDSSVSSPALGQRVKVLRHHCSPGGTHDCSTQRHALQHQCCHHIMHEEPLHLYQETHGLVLASLLQQQXSGALGXLIAVHQEQDVTAICGLELQQPG

SEQ ID NO: 344260 - protein, 57 aa, Zea mays
  Clone ID: MRT4577_77126C.1.pep
SRGGPAVRHLKRPIRVLLWEPKYFGPRMPPEASGKAASGTIFPKCPQAPIGFLFSPV

SEQ ID NO: 344261 - protein, 112 aa, Zea mays
  Clone ID: MRT4577_77127C.1.pep
HDSTIPRLPSHLSSRGSTSPRRFLTRPTKPGTSTSLECTWTSTSIDLWRGYHDGAIHNCPTHGTDPLRRSRHSSSFYITSSPTVKRQRSITRIRRHDSRRQCQPRRLRVYTI

SEQ ID NO: 344262 - protein, 327 aa, Zea mays
  Clone ID: MRT4577_77128C.1.pep
KCLRDAKMDKSQIHDVVLVGGSTRIPKVQQLLQDFFNGKELCKSINPDEAVAYGAAVQAAILSGEGNQKVQDLLLLDVTPLSLGLETAGGVMTVLIPRNTTIPTKKEQVFSTYSDNQPGVLIQVYEGERTRTKDNNLLGKFELTGIPPAPRGVPQINVTFDIDANGILNVSAEDKTTGKKNKITITNDKGRLSKEEIERMVQEAEKYKTEDEEVKRKVEARNALENYAYNMRNTVRDEKIASKLPADDKKKIEDTIEDAIKWLDGNQLAEAEEFEDKMKELESICNPIISQMYQGGAGAAGMDEDVPGGGAGNGGGSGAGPKIEEVD

SEQ ID NO: 344263 - protein, 86 aa, Zea mays
  Clone ID: MRT4577_77129C.1.pep
GAPRVRLPTYLLTRHCSTRVRRQGGAHFHWLDRSRPSAPHAWPQGEEAKAADGNGASRDTKEAFARIYKTLNEELLTDPSFEFTAE

SEQ ID NO: 344264 - protein, 33 aa, Zea mays
  Clone ID: MRT4577_7712C.1.pep
IIQVYPQRVNGDFFWLANGWANWEGKNPGESGP

SEQ ID NO: 344265 - protein, 34 aa, Zea mays
  Clone ID: MRT4577_77130C.1.pep
RYLKGFHRPLGSANPCESAVHMEPFTCSAFKVLI

SEQ ID NO: 344266 - protein, 212 aa, Zea mays
  Clone ID: MRT4577_77131C.1.pep
DAITSYTHSYTDPISADRDLYLKSRSGPYSFASQTSAFWDFIKQGNETIGCQGTIDSSGANDFLENGTITLNVYGTSGLRSFGRVGLDEKGIATPSGGFFYSDKRDAEAVAQFVYNIFQALPSNLKPLNIAGNSTLEEITTWISTPSAYTLGNVQHWSSSCRFDACVDVDTKVVGTDNVHVVDASISAPLTTNPVFGTMVIAERAVEKILAL

SEQ ID NO: 344267 - protein, 132 aa, Zea mays
  Clone ID: MRT4577_77132C.1.pep
FRVIQSSLDSMDGDSSNNGAAVQGPVAITQKELIAMSYIYWCFTRTVPCFFFTFAAVIPGAASPRWLPLLGRFGPLVLACYASGRPPPPYHMAAGLVLTSPRSLWAAVNGVSFVTMSAWEMLDSSDFCVLCS

SEQ ID NO: 344268 - protein, 123 aa, Zea mays
  unsure (1)..(123): unsure at all Xaa locations
  Clone ID: MRT4577_77133C.1.pep
MADERHSVIRLRRMVTLRVYSTTSLSAEKMYNIDSHLVCAVEGIMTHDNILINRRSLPRXLYGLSYQDSMPVEQLGQSLCDTKHGYTQDCGRRPFVVSLLFAVCDKXHGFQLYMSDPSGNYVP

SEQ ID NO: 344269 - protein, 204 aa, Zea mays
  Clone ID: MRT4577_77134C.1.pep
VEGVSWLGAQLGVLYGESNGKLFMLASVKEAVLQMAYCLALCAGDGAASVGGSDAGDVVAGPVFLSQVAASIVALHERFYLEKTKALQAQRPSKYQLLLEYSQALERGILERSNRPNYRAVLEYDGILSRRVENKESARAKTKEELLAEERDYKRRRTSYRGKKVNRNPTEILRDIIDEHMEEIRQAGGIGWLVEAPADIAWNE

SEQ ID NO: 344270 - protein, 150 aa, Zea mays
  Clone ID: MRT4577_77135C.1.pep
MRRPRHRSSSGDVWDEGYTINHMTTGHHMPLGPCEVAGSGPDRLLKTEVLDIPLFSQLLEAVRVPVITKTTNRRCRLFLNSQTTTKKNEPDHTLEKRKQQAAKILNVSIGHRNQSTKKSCKRPYAIITENLALKIRTMTSTQHLSHILGP

SEQ ID NO: 344271 - protein, 155 aa, Zea mays
  unsure (1)..(155): unsure at all Xaa locations
  Clone ID: MRT4577_77136C.1.pep
MRASQDHAPQPPPLPLPPPPLSLPSPPAPPRRGRHRSSYSSSSSSSISSASSTFCPSPSLSPRASTATSXCHFRGSASRACPRTRPASGWPRPLALXPLPPPPLRPDPRRRRARAPAAPSCDARDDDPFVAAFAECTRDDDDDSIIKLWPVTAKP

SEQ ID NO: 344272 - protein, 139 aa, Zea mays
  unsure (1)..(139): unsure at all Xaa locations
  Clone ID: MRT4577_77137C.1.pep
LLFSPAGPESGSRSKKSSGFGSWDPWRPPRASSTSPPPAWPRRRRASPPRRAERNCSNEMHGSLKQTRGGGEAXKDELRDEKQKLKLEKESLEHQMKLMASAPAYMPHPTLMPAPFAQAPLATFHAQGPKLQGSKLMMP

SEQ ID NO: 344273 - protein, 112 aa, Zea mays
  Clone ID: MRT4577_77138C.1.pep
MSSSGPLPAGTHQTRNRAGNRRKSGDRADKANYSYNNDGEKSNVPSLKNLPPIVHHETFFSNVQNDYNQTGLVPLEGCSASEASQLLSDRWTAAINMYNDQTIDPSAHHGVT

SEQ ID NO: 344274 - protein, 102 aa, Zea mays
  Clone ID: MRT4577_77139C.1.pep
GDRRRPTPYVQLPMSSSGPLPAGTHQTRNRAGNRRKSGGWTAAINMYNDQTIDPSEKPVMYSGSSSSSWGHLKLPHQMNFLEELRRAVDAHTEFASPVVTWN

SEQ ID NO: 344275 - protein, 89 aa, Zea mays
  unsure (1)..(89): unsure at all Xaa locations
  Clone ID: MRT4577_7713C.1.pep
GGGPSRTARGMPXKGQAIQNTDGAGRPHNGNGEGTWEKGIVDYKDLPLQALEDTNDQTTGPRYCDNPQTRKHVTHDTPHAARDKAGHSE

SEQ ID NO: 344276 - protein, 102 aa, Zea mays
  Clone ID: MRT4577_77140C.1.pep
GDRRRPTPYVQLPMSSSGPLPAGTHHTRNRAGNRRKSGGWTAAINMYNDQTIDPSEKPVMYSGSSSSSWGHLRLPHQMNFLEELRRAVDAHTELVSPVDTWN

SEQ ID NO: 344277 - protein, 122 aa, Zea mays
  unsure (1)..(122): unsure at all Xaa locations
  Clone ID: MRT4577_77141C.1.pep
MSSSGPLPAGTHQTRNRAGNRRKSGDRADKANYSYNNDGEKSNVPSLKNLPPIVHHETFFSNVQNDYNQTGLVPLEGCSASEASQLLSDRWTAAINMYNDQTIDPSEKPVMYSGXAAHHGVT

SEQ ID NO: 344278 - protein, 254 aa, Zea mays
  Clone ID: MRT4577_77142C.1.pep
MSCAPNIAAIVQANSKVDDEVSKYLHITPVGSDDFDFDNLEPEEKEFENQNISEKGLSDAYQNVLNRLAQLQKLGKVGKGTDRRKRLKGGLELEPCMDTVNNGWRKDMLLEDVVDIDVGYDAPPPSFTAGLELQKQRRARIEAAKQRIDATRKAPAAPAAKANNSEDVVRKKLTMKNRGGKKKDDIDHILPSDNMTGCSGARKKRRRGSCDSIDWEDCIIELLLLHGANEAEIEQGQYRRLLELHVFSAVSGEN

SEQ ID NO: 344279 - protein, 61 aa, Zea mays
  unsure (1)..(61): unsure at all Xaa locations
  Clone ID: MRT4577_77143C.1.pep
KWGKKYLALEKKSPPGRAPLVLGGAPKKKPAPNFVKPRGKSGKPPHGXKLGGKMKXDPCNC

SEQ ID NO: 344280 - protein, 69 aa, Zea mays
  unsure (1)..(69): unsure at all Xaa locations
  Clone ID: MRT4577_77144C.1.pep
SGYGGQTKPVFPKKAKTPKKIVFKLQCQSCKPFSQPALKRCQPFXIGGDKKGKGPFFFLGFCPPVWLFS

SEQ ID NO: 344281 - protein, 67 aa, Zea mays
  Clone ID: MRT4577_77145C.1.pep
KTMCLSFSHNTLYKSYVWESAKPRSLLFNHQHKLDRYYSYPWPGIDAITTNMGFTCSRYRICTQGGT

SEQ ID NO: 344282 - protein, 93 aa, Zea mays
  Clone ID: MRT4577_77146C.1.pep
MGGGLNGKQKKILGVISKANFCGGFFCFWGKIGVVFGENLKTPSPVCPFLLGCQGPNAPRFFFKKKKKKKKKKKKKKKKKKKKKKKKKKKKSR

SEQ ID NO: 344283 - protein, 75 aa, Zea mays
  Clone ID: MRT4577_77147C.1.pep
RALRGAVSSGIEPDPLFQSTHAQTSAAIGSCRGAHSTSMPTPCASNEAIMRIALIMVHVMRGHRKKCCDKPPGTE

SEQ ID NO: 344284 - protein, 85 aa, Zea mays
  Clone ID: MRT4577_77148C.1.pep
LLGELLGSGGVSVDGAIESEKNFIGFVEGASYSDEAFEVNSGLLELGPAVSYGNEAAQQKQDRQGLHCLVFSSNICSNRVTECVA

SEQ ID NO: 344285 - protein, 72 aa, Zea mays
  Clone ID: MRT4577_77149C.1.pep
YMVLLRSTDVQILRWSSYIELGSVVFLPASYSEGKYLLKLIRKTVELLAPAIIPVPLGLLPPETAPVFTRVV

SEQ ID NO: 344286 - protein, 109 aa, Zea mays
  unsure (1)..(109): unsure at all Xaa locations
  Clone ID: MRT4577_7714C.1.pep
MVAATAMATAASAASPLLNGSRXAARLRHRGLXYSVRCAAVAGGXAEAPASTGAQLYADCVVVGGGISGLCTAQALSRRHGVGDVLVTEARARSGGNITPVERPEEGYL

SEQ ID NO: 344287 - protein, 52 aa, Zea mays
  unsure (1)..(52): unsure at all Xaa locations
  Clone ID: MRT4577_77150C.1.pep
MDEAEEMQVVCRLHEVGRCGGSHHMTSIXYHIFLILREQVPASIYANVRAQT

SEQ ID NO: 344288 - protein, 61 aa, Zea mays
  unsure (1)..(61): unsure at all Xaa locations
  Clone ID: MRT4577_77151C.1.pep
VRNIVEHADRIDVHEACLHDGYLLPKSYAKLHHCVXCAIHAHIGRVRSRENKRNRELPQCF

SEQ ID NO: 344289 - protein, 88 aa, Zea mays
  Clone ID: MRT4577_77152C.1.pep
IWQLVLAMGQIKTVEPSRSERLAKYDQLLRNEEELGAIAYKQMPNSVHQSSPTKRAESPRLYVCTSPVNRLLRLASFTFVSATSRFYQ

SEQ ID NO: 344290 - protein, 102 aa, Zea mays
  unsure (1)..(102): unsure at all Xaa locations
  Clone ID: MRT4577_77153C.1.pep
QIGKQLCSCSELPLNRCLEDPKHESPTISTNPQLILPQDSRIYHTPRLSSSAHGHLLRNTSTVPAARSPPPPPPLDXXXSAATSPIQPRLGSLQQRRLELWI

SEQ ID NO: 344291 - protein, 129 aa, Zea mays
  unsure (1)..(129): unsure at all Xaa locations
  Clone ID: MRT4577_77154C.1.pep
MEAASNGTLLYREAQEVKLCSVHCVNTTMKGPLFFKFDLVSLAADLYQLERLMMLDDSLSLCAHIATVGDLFNVYEGSNNVSLYIDFSIHALQNALYVRHLHDMHLDYPAAXSRQFDPEHEVAFICQLH

SEQ ID NO: 344292 - protein, 110 aa, Zea mays
  Clone ID: MRT4577_77155C.1.pep
NAPGPQACKAEGLKGGKVDSTSAAHKTGTVGVASSFVFAPAAGCFILPVVRRLVGSSSFFPWVVLVLPPPPTLYFVLNGVDEVIALGHNVGSPLGNHLKHFLSVTLTYLS

SEQ ID NO: 344293 - protein, 56 aa, Zea mays
  Clone ID: MRT4577_77156C.1.pep
MSGHWMGIGSSDEEDDDDENDDGSNDDDSGDEDNDDHDMPPSKHRRLHGSLFWKRK

SEQ ID NO: 344294 - protein, 119 aa, Zea mays
  unsure (1)..(119): unsure at all Xaa locations
  Clone ID: MRT4577_77157C.1.pep
WGLTPSISFSLNLKITNTFIYKQRTQKKNQQHFTPKTLTTSTKNTLRRLGPFSXTQNSKTKKSIHLLPXPLIHNHXKITPLYPYPLLPXSSYSFPTQDXLIMXSRCPPTXLLNFFSQTP

SEQ ID NO: 344295 - protein, 167 aa, Zea mays
  Clone ID: MRT4577_77158C.1.pep
MAGAEGERWVGLATDFSEGSRAALRWAAANLLRAGDHLLLLHVIKEPDYEQSEAILWESTGSPLIPLSEFSDPIIAKKYGAKPDIETLDILNTTATQKDIVVVVKVLWGDPREKLCQVIHDTPLSCLVIGSRGLGKLKRVLLGSVSDYVVNNATCPVTVVKSTSTEG

SEQ ID NO: 344296 - protein, 88 aa, Zea mays
  unsure (1)..(88): unsure at all Xaa locations
  Clone ID: MRT4577_77159C.1.pep
MIKPDGLHRGLIGEIITRFEKKGFYLNAFKLXNLERXIAXEFSTPDHASKPRLQGLVDYIISGPVVAMVREDKSVGTTDLKIIGATNP

SEQ ID NO: 344297 - protein, 76 aa, Zea mays
  Clone ID: MRT4577_7715C.1.pep
RGHDPVHKPNLNKYFWGLCLNISCINNFHMHALPNMKAEIPREHYRDTKPSNGRKLTVLQGHSYILAKTLFLDLIL

SEQ ID NO: 344298 - protein, 97 aa, Zea mays
  unsure (1)..(97): unsure at all Xaa locations
  Clone ID: MRT4577_77160C.1.pep
WLRNLSLLSYLSAGGVIATITVIVCLCWVGIGEGIGFRFSGAVVNVTHLPVALGLYGYCYSGHSVFPNIYSSMKERSQFPFGLMFCFTVVTLXYAGV

SEQ ID NO: 344299 - protein, 67 aa, Zea mays
  Clone ID: MRT4577_77161C.1.pep
MEGLLPFLYRAILHLASGGQSPTGNPFFRNDSPPESPLAAHYYVRLAAGADVPAFLSSAARGYYDRG

SEQ ID NO: 344300 - protein, 59 aa, Zea mays
  Clone ID: MRT4577_77162C.1.pep
PPTSSTIRPPSKVLTFLNPNAQLSSHQHPYRQRQHTQRDLHHCSFLLIRSAICPKPLHH

SEQ ID NO: 344301 - protein, 119 aa, Zea mays
  Clone ID: MRT4577_77163C.1.pep
QEMETIDHLLVSYVFARNYWFKLLTKVNLQNFTPYVYEENTMLWWKRCSDQLHGIARKGLNSLISLDLWILWKHRNACVFDGLSPCLNEAIKRTEEERDLWVLGGATNLDLLTAPIPGL

SEQ ID NO: 344302 - protein, 306 aa, Zea mays
  Clone ID: MRT4577_77164C.1.pep
METIDHLLVSWVFARNYWFKLLTKFNLILVKQNMYRRAAEFWAELRLELLSASELFADGNSNQIWRLYWASHQRFFRHMCMSAKVPAVVRLAKEALAENKCVVIGLQSTGEARTEEAVTKYGVEMEDFVSGPRELLLKLVEENYPLPPKPDSFQQGEETVTEIQRKRALDVSFKGRVRKVAKVVDVSDDDTDDYSPSESDHESTESDEEFHMCQICNTEEEQSLLLHCSGCSRHVHPHCLSPPWTGTITDDWACYTCKIVEDEEKKQDAHVADCLKRISLLMSMKRIPCSGGKDVVISCMELPEKD

SEQ ID NO: 344303 - protein, 126 aa, Zea mays
  Clone ID: MRT4577_77165C.1.pep
PAMTRAGCLTASQMATYDEAKQALMKWTPLEEGFQLHLISSFIAGTAGTLVTAPVDMIKTRLMLQQESKGARVYRNGFHCASQVVVTEGVKSLYKGGFATFARVGPQTTITFVVCEKLRELAGMTA

SEQ ID NO: 344304 - protein, 119 aa, Zea mays
  Clone ID: MRT4577_77166C.1.pep
PPRLLVWLPRSLWVSEPVSFPRLGCMCQRSGVWAREVHCLFERSGCEVCRSAPRGGSWFICRHVSACHGATGQTGNGFSDESPRALVHRCVGRGASGVMAAAMGNSRRSRRDACRQARA

SEQ ID NO: 344305 - protein, 58 aa, Zea mays
  Clone ID: MRT4577_77167C.1.pep
VGNYMFLQVAPSTMTITGGCTVVPSRITLRLYGRRALTATYERTYETATCTNSVSATR

SEQ ID NO: 344306 - protein, 266 aa, Zea mays
  unsure (1)..(266): unsure at all Xaa locations
  Clone ID: MRT4577_77168C.1.pep
GTIFTQMVEREGTRSLYLGLAPALARAVVYGGLRFGLYEPCKHVCSYAFGSTNFAFKFASGVIAGGLATALTNPMEVLKVRLQMSKSSTSTIREMRKVIAHEGFKALWKGVGPAMTRAGCLTASQMATYDEAKQALMKWTPLEEGXSYISCTVNSLFLYYDVYPLMRXWMANLYLLGSSSFIAGTAGTLVTSPVDMIKTRLMLQQESKGARVYRNGFHCASQVVVTEGVKSLYKGGFATFARVGPQTTITFIVCEKLRELAGMTAI

SEQ ID NO: 344307 - protein, 153 aa, Zea mays
  unsure (1)..(153): unsure at all Xaa locations
  Clone ID: MRT4577_77169C.1.pep
MQPRYGEARQPLPGRYALYHFGTSGAAVAAATAVTHPFDVIKVRLQMQLAGQRGNLVGMVLKVTAPTGXYFTLLLMLNSFPSICVLXYVRXIFTQMVEREGTRSLYLXLAPALARAVVYGGXRFGLYEPCSMSXSYAFGSTNFAFKFASGVIA

SEQ ID NO: 344308 - protein, 354 aa, Zea mays
  Clone ID: MRT4577_7716C.1.pep
GNDDDNDSSSKLMPLELAIAESVSRGKLVAGSAVTASSVPTFANPPWTEVWVLIKRSFTNTGRMPELFVMRLGTIMVTGFILATIFWRLDDTPKGVQERLGFFAMAMSTMFYVCADALPVFVQERHIYLRETAHNAYRRISYVLANAVVAFPPLVFLSLAFAVTTFWAVGLAGGAPSFLFFVLIILASFWAGSGFVTFLSAVVPHVMLGYTVVVAILAYFLLFSGFFINRDRIPDYWIWFHYLSLVKYPYQAVLQNEFRDASRCFSRGVEMFEGTPIGHMTEPVKLKVLQAISRTLGSNMTATTCVTTGADVLAQQAVTDIGKWKCLLVTVAWGFFFRALFYVVLLVGSKNKRK

SEQ ID NO: 344309 - protein, 244 aa, Zea mays
  unsure (1)..(244): unsure at all Xaa locations
  Clone ID: MRT4577_77170C.1.pep
MQPRYGEARQPLPGRYALYHFGTSGAAVAAATAVTHPFDVIKVRLQMQLAGQRGNLVGMGTIFTQMVEREGTRSLYLGLAPALARXVVYGGLRFGLYEPCKHVCSYAFGSTNFAFKFASGVIAGGLATALTNPMEVLKVIYLDMNSLQKRDLFYVLDLNXQHTVGEAADXKAVPXIREMRKVIAHEGFKALWKGVGPAMTRAGCLTASQMATYDEAKQALMKWTPLEEGFQLHLMYSEFSISLL

SEQ ID NO: 344310 - protein, 41 aa, Zea mays
  Clone ID: MRT4577_77171C.1.pep
KKANLNGAEELPVRQRGHQPVRHCAVQPARLAPCRLRGIGG

SEQ ID NO: 344311 - protein, 53 aa, Zea mays
  Clone ID: MRT4577_77172C.1.pep
CDINTRHHNASTVIPIRVKYVNQLIGPHELDSSGAHCIVSVFSVTKAGLLHFS

SEQ ID NO: 344312 - protein, 110 aa, Zea mays
  Clone ID: MRT4577_77173C.1.pep
APKSEDDPLWGLIAAAPPKSAAKPADIKPSTSHNDEDDLWGSIAAPPPKSSGKPLKPAAANSDDLWGAIAAPPPGTKARPLASSGKGRGTKPAQPKLGAQRIGRTSSTGM

SEQ ID NO: 344313 - protein, 80 aa, Zea mays
  Clone ID: MRT4577_77174C.1.pep
MADDSGRPLPKFGDWDVNDPASADGFTVIFNKARDEKKGGNGQDTESPSKDTRTERVESYAAKPSTKKWFCCVTASPTQS

SEQ ID NO: 344314 - protein, 80 aa, Zea mays; identical to SEQ ID NO: 224569
  Clone ID: MRT4577_77175C.1.pep

SEQ ID NO: 344315 - protein, 80 aa, Zea mays; identical to SEQ ID NO: 224569
  Clone ID: MRT4577_77176C.1.pep

SEQ ID NO: 344316 - protein, 74 aa, Zea mays
  Clone ID: MRT4577_77177C.1.pep
TRAFLKPPPGVGTPLFPPCYFPPPHIIPPGWPLANFKKASPPGCNWEGTIPPKEEILNPVYGALCPGRAPDFFF

SEQ ID NO: 344317 - protein, 170 aa, Zea mays
  Clone ID: MRT4577_77178C.1.pep
MGSRDDDGQSAEGQGYAADINSIREAQARIAPYVHKTPILSSTSIDAIAGKQLFFKCECFQKAGAFKIRGASNSIFALDDNQAAKGVVTHSSGNHAAAVALAAKLRGIPAYIVIPKNAPACKVENVKRYGGQVIWSDVTMESRESTAKKVQDETGAILIHPFNDKYTISG

SEQ ID NO: 344318 - protein, 101 aa, Zea mays
  Clone ID: MRT4577_77179C.1.pep
EISDEDDDDGDGEADDDDDDDGDDDDDDDEDSDDEEEVDGEDVRRYNFLVSVCAARSVFTSPSGTVSSQRNWICLDYYLCFHARVRAFLVSSMVKNHLQKF

SEQ ID NO: 344319 - protein, 68 aa, Zea mays
  Clone ID: MRT4577_7717C.1.pep
TKHPNHLQPSLSTITPPINESEDPRAFLTVHPMWQSHSGTQGNPRSKTPLGLSPPSVTKTPRCTGPRP

SEQ ID NO: 344320 - protein, 105 aa, Zea mays
  unsure (1)..(105): unsure at all Xaa locations
  Clone ID: MRT4577_77180C.1.pep
ASPVSTALLPPTPTSFRPLIPTVPALPFCVKEKLCPSGFPSPTSKQPRVXVRTPREGREVNIHMLCARRPGVLLATIRAIKGVGVDVQQTVASCFNGFSLDIFKV

SEQ ID NO: 344321 - protein, 146 aa, Zea mays
  unsure (1)..(146): unsure at all Xaa locations
  Clone ID: MRT4577_77181C.1.pep
GSAAALALFRRLSSRPDMRRLMRLYATAATAFVARGNLPMAHEAARAMVAAFAEAGRLREAADMLLELRSHGLPLVVETANWVLRVGLRHPGCFTHAREAFDGMARAGGGVRPDHRSLRALVLXGCCREGRFEEXATRWWRAMWAQ

SEQ ID NO: 344322 - protein, 80 aa, Zea mays
  Clone ID: MRT4577_77182C.1.pep
LRLVEPIGGVSRLGDRPWNTQLLTGVLYSQQSRYLPWAALWASNPSQEKNMWSRRSLTTMSTSLSRWRLPVSLMAPRNNT

SEQ ID NO: 344323 - protein, 219 aa, Zea mays
  Clone ID: MRT4577_77183C.1.pep
MPKQDSGNVNNTAQGIMLDKVTSSPPEVVKQVVLESSPPVPQKPSTVDVLRKKITSVERGSEGFLFVQDLFLSGMNPFATPNNILHVHRYSPNDITAQCRFEAFERQMKSTKEARGDANVKYGWLGSRKSDIVRILINGLGTTANPVEKAGLSAGVYLSPENRAFTSVGLCDVDEKGVQYMLLCRMISGNVEAVEPGSQGSFPSSEIYDSGVDDCSNPK

SEQ ID NO: 344324 - protein, 254 aa, Zea mays
  unsure (1)..(254): unsure at all Xaa locations
  Clone ID: MRT4577_77184C.1.pep
MKLSSILSVWVFTLVSTVFGAELVPRSTLKEVTGYGNNPTGTRMFLYVPKNLKANPAVVVGLHYCTGTAQAYYQSNKWASNAEKYGFIVIYPQTPYTPGNCWDVSSKMTLTHEGGGCSTSVANMVKHVLKNYSGDSKRVFVTGDSSGAMMTNVMAATYPDIFAAAIVYAGVPAGCFMSQANQAAAWNSTCSQGQSRYTQQQWGXVVKNMYPXYNGPRPKMQIYHGTADPTLKRQNYYEENQQXWPGVFGYSATP

SEQ ID NO: 344325 - protein, 148 aa, Zea mays
  unsure (1)..(148): unsure at all Xaa locations
  Clone ID: MRT4577_77185C.1.pep
APGFFLGYPPVLGKPGSPPLGRVNPPPPPEGPGPPSPLAGKGKGAQYPTPPPPGVGRFFKPGGPPGFPPGNGPGGPPPLMGGGPPLGPPGVSPXPPGRMLGGIGGGTPFPXRGPALPLIPPRWGPGRAPPGPPPRGGGSPPSGAPPGG

SEQ ID NO: 344326 - protein, 180 aa, Zea mays
  unsure (1)..(180): unsure at all Xaa locations
  Clone ID: MRT4577_77186C.1.pep
FLEEMARRFAESDAKWDRRMAEQEARWDASFAESSKSRAQAPEKNAGQIEDWHASMEGVVDDLRLEVGKISKNWERVVVDNSTTMTGVLAPSPPAVARPSAGVTADLPHGHRVELITGEDGILGRSPPFSIPRSRVRTLLHPSISCVRVLNSICRVLLMSRVILLGLMVLEERLEVXCLK

SEQ ID NO: 344327 - protein, 80 aa, Zea mays
  Clone ID: MRT4577_77187C.1.pep
LIASSSYAEFGGQIRTAHQACELMGIDFTTAWCCPSDSIFGLFVKNVTKFRQVVFMEVEIQQLKDVTGSYEVDAMPNFDI

SEQ ID NO: 344328 - protein, 85 aa, Zea mays
  unsure (1)..(85): unsure at all Xaa locations
  Clone ID: MRT4577_77188C.1.pep
EPFNQRINLLGAGSASISRACSRVLRTLGGCVSXVNITPGGGGGXSXXXXSLXPLLLPXLPXSXXPPGGGPXGSWRLLAGLRRLG

SEQ ID NO: 344329 - protein, 91 aa, Zea mays
  unsure (1)..(91): unsure at all Xaa locations
  Clone ID: MRT4577_77189C.1.pep
AERGRGPRQTYRGGGRLGGCSDRHAGNELRPTHRAYERHSGTGRGYWMNCERCARRNRGTXTXDKCLANNTGRAVNSEETTRRSARHKKSW

SEQ ID NO: 344330 - protein, 40 aa, Zea mays
  Clone ID: MRT4577_7718C.1.pep
VLWEINGICGTAWEAFEFLMEWQGMRTESSASLPSSSRGR

SEQ ID NO: 344331 - protein, 149 aa, Zea mays
  unsure (1)..(149): unsure at all Xaa locations
  Clone ID: MRT4577_77190C.1.pep
TEQYPKIHIRISLCRDSXFSASTPHTSHXSSHXSSISILLDRGTPWEPRSCGLGAPSLRTESCSWPQMSPCISRERHPLLHSGVVLLPASSANPCTPPCDGASLEGGRVITFRIPAFRRPLGCPGGPLRDPXLXTCTRTXXAXXPCXXA

SEQ ID NO: 344332 - protein, 64 aa, Zea mays
  Clone ID: MRT4577_77191C.1.pep
KKKKKKKKKKKKKKKKKKKKKKKKKKKKKKRGAKYKGGASFFSRALLSFPFFAPALYFLWPGLN

SEQ ID NO: 344333 - protein, 108 aa, Zea mays
  unsure (1)..(108): unsure at all Xaa locations
  Clone ID: MRT4577_77192C.1.pep
VFPAARKVCVQDFSLASHCARMLLQCFRRCVYGCFFPMPFXGFGIERGEHNVFFHGPVLPKPVRHGVLCLVYLNASFSIVHSAEYVPEVILAPEGSILVQYTKYWGFL

SEQ ID NO: 344334 - protein, 143 aa, Zea mays
  Clone ID: MRT4577_77193C.1.pep
RSTTVICTILSNLVFTKLQHVISTAHEIKEEFVARKRRRSDLIAQKHTLLSNEGHTKRLRPAVCSSRSSPTTTTHQGRRETLASKEWRYDAYHFFFRRHAHGRGHSMPWSARQLLAWAACPVLRRGRGRAGAARSRWLWPHLA

SEQ ID NO: 344335 - protein, 275 aa, Zea mays
  Clone ID: MRT4577_77194C.1.pep
MRVLAYGLPSDAVDEYIQIGESTARECLHHFCRGIIAYFIGWYLRTPNEADITRIMHHSESRGFPGMLGSIDCMHWEWRNCPTAWRAQFCGRNGTNNDVNVLHRSPVFDPMTSGRMPPVHYTINGNAYNFGYYLVDGIYPNWPTFVKAIRHPYEQKKVYFTQMHESCRKNIERAFGVLQARWAVLRGPVYGWDRNRLTEIITACIIMHNMIVEDEGAFAANIDFGENASTIEPPQLIAEGRAEWVINHFDLRRQERSCSLQNDLVEHLWARRGSM

SEQ ID NO: 344336 - protein, 390 aa, Zea mays
  unsure (1)..(390): unsure at all Xaa locations
  Clone ID: MRT4577_77195C.1.pep
WRDATCNDGPVCLGGLFIEIIFVARNLIHHHYFAANPVYPPHVFRRRFRMSRPLFLRILQGLQQQDSYFTQRVDATGMPGLGPLQKVCAAMRVLAYGLPSDAVDEYIQIGESTARECLQHFCRGIIAYFSGWYLRTPNEADITRIMHHSESRGFPGMLGSIDCMHWEWRNCPTAWRGQFCGRNGRASMILEAVATYDLWIWHXFFGMPGTNNDVNVLHRSPVFDPMTSSRMPHVHYTINGNAYNFGYYLADGIYPNWPTFVKAIRHPYEQKKVYFTQMQESCRKDIERAFGVLQARWAVLRGPAYGWDRNRLTEIITACIIMHNMIVEDEGAFAANIDFGDNSSTIEPSQLIAEGRAEWVINHLDLRRQERSCSLQNDLVEHLWAWRGSM

SEQ ID NO: 344337 - protein, 62 aa, Zea mays
  Clone ID: MRT4577_77196C.1.pep
QKNGGGFNQTPRKKNKSRYSPNILTIKPGGCSFKLDRKPNNPPKMERTDLSLNFQTTTGPPR

SEQ ID NO: 344338 - protein, 201 aa, Zea mays
  Clone ID: MRT4577_77197C.1.pep
PASESLSLALGDDWATAAAAAAAAAPPLSRCPGLRRHFDKYGRVANVRIKKNFAFIQFEVQEDATRALEGTNGSHFMDRVISVEYALRDDDEKGERGNGYSPDRRGRERSPGRRRSPSPYGRGRERGSPDYGRSKERGSPDYGRGGRSPDNGRGVSPAGGGRGDHARGGGRSPDYDRQRREASPPGYDRSPSRSPGREARE

SEQ ID NO: 344339 - protein, 269 aa, Zea mays
  unsure (1)..(269): unsure at all Xaa locations
  Clone ID: MRT4577_77198C.1.pep
SLYVPRNVWIVVLYYSVHHLVQHKQGFAFVYMXDERDAEDAISRLDXIDFGRKGRRIRVEWTKEDRTVGRKSSSRRSPTNTKPTKTLFVINFDPINTRIRDLERHFDKYGRVANVRIKKNFAFIQFEVQEDATRALEGTNGSHFMDRVISVEYALRDDDEKGERGNGYSPDRRGRERSPGRRRSPSPYGRGRERGSPDYGRSKERGSPDYGRGGRSPDNGRGVSPAGGGRGDHARGGGRSPDYDRQRREASPPGYDRSPSRSPGREARE

SEQ ID NO: 344340 - protein, 86 aa, Zea mays
  unsure (1)..(86): unsure at all Xaa locations
  Clone ID: MRT4577_77199C.1.pep
VCQLGCHVXLPFSSSSXRLCXNFDLIHCDLWISPVLSVXSGYKYYLVVLDECSHYXMTFPLRLKPDTFLTLLHFFAWGFTQFGRTL

SEQ ID NO: 344341 - protein, 72 aa, Zea mays
  Clone ID: MRT4577_7719C.1.pep
VMHEFNPKLSRKVFFPFEILLCSPSYWIKLLFMTTNCSFLFPFLFLLHRDDNCENILATWTSIIHNIFDIYN

SEQ ID NO: 344342 - protein, 159 aa, Zea mays
  unsure (1)..(159): unsure at all Xaa locations
  Clone ID: MRT4577_771C.1.pep
MYAYFCILYFKSSLAHTHTHIHSLTIKADFYKLCXDFFDCSVNLEGLNTSLITMIPKVSNPVTISDYRPXSLLKIAIKLITKLLANRIQRKMPSLIHRNQYGFIXHISIQDCLAWTYEYIHQCQQSKKEXVVLKLDFAKAFDTIEHNVILAMHXAAWFP

SEQ ID NO: 344343 - protein, 255 aa, Zea mays
  Clone ID: MRT4577_77200C.1.pep
TSHLFYLVQHEGFAFVYMEDERDAEDAISRLDGIDFGRKGRRIRVEWTKEDRTVGRKSSSRRSPTNTKPTKTLFVINFDPINTRIRDLERHFDKYGRVANVRIKKNFAFIQFEIQEDATRALEGTNGSHFMDRVISVEYALRDDDEKGERGNGYSPDRRGRERSPGRRRSPSPYGRGRERGSPDYGRSKERGSPDYGRGGRSPDNGRGVSPAGGGRGDHARGGGRSPDYDRQRREASPPGYDRSPSRSPGREARE

SEQ ID NO: 344344 - protein, 70 aa, Zea mays
  Clone ID: MRT4577_77201C.1.pep
MAQSTRMVALALVVLLVAATASVPTATAYGCYDDCYERCANGKKDDPACTKMCNQACGSTDKGAAAGAPA

SEQ ID NO: 344345 - protein, 84 aa, Zea mays
  unsure (1)..(84): unsure at all Xaa locations
  Clone ID: MRT4577_77202C.1.pep
DENHAIVSSSVGPEYYVGILSFVDKDQLEPGCAILMHNKVLSVVGLLQDAVDPMVSCMKVEKAPLESYADIGGLDAXIQEIKEA

SEQ ID NO: 344346 - protein, 71 aa, Zea mays
  Clone ID: MRT4577_77203C.1.pep
MAAQSTRMVALALVVLLVAATALVPTATAYGCYDDCYERCANGKKDDPACTKMCNQACGSTDKGAAAGAPA

SEQ ID NO: 344347 - protein, 38 aa, Zea mays
  Clone ID: MRT4577_77204C.1.pep
FPFLNSRGGPSYLLSLDLYLYLKRPLYNIRAGVHMHAG

SEQ ID NO: 344348 - protein, 71 aa, Zea mays; identical to SEQ ID NO: 344346
  Clone ID: MRT4577_77205C.1.pep

SEQ ID NO: 344349 - protein, 54 aa, Zea mays
  Clone ID: MRT4577_77206C.1.pep
PKFTALALTPQRLEKPCPAPTQLNCITSHFPHLSYRQRGQARSDCPSLQQPKRK

SEQ ID NO: 344350 - protein, 88 aa, Zea mays
  unsure (1)..(88): unsure at all Xaa locations
  Clone ID: MRT4577_77207C.1.pep
ICDLPRLXHFTFAYNFFTGEPPACARVVPRDSDRSNXLPNRPAQRTPQLCAVXYARAPVNCAVFLCKPFVGGVRRVFFFRGWCLFLFC

SEQ ID NO: 344351 - protein, 346 aa, Zea mays
  Clone ID: MRT4577_77208C.1.pep
MRDAEAASRRRWTLVLVNMASVLEKADEVLLPAVYKEVGTALGASPTALGSLTLCRALVQAACYPLAAYASARHDRARVVAVGAFLWAAATFLVAVSGSFLQMAISRGLNGIGLALVLPAISSLVADYTDDHTRGAAFGWLQMTCNLGSILGGSFGVLLAPVTFLGVAGWRLAFHSVAVISVALGVLMWLFAADPSPAAKCKTAASAGEEAKELLQHARRVLGVTTFQIIVAQGIAGSIPWSALNFSAMWLELVGFTNWQTSVITGLYLFATALGALFGGLVGDPVARRFPNTGRIALAQISSASALPLGAILLLALPNDPSTGVAHAVTFFVMGFAISWNASSTN

SEQ ID NO: 344352 - protein, 103 aa, Zea mays
  Clone ID: MRT4577_77209C.1.pep
CMNTTSSSPVQTHQLLHAFSGTSTPNPLAATGKQPPTRAIKATMSGCHLQEIGEKISGSRLQTASRPHGSVTLQGTTSKPSMIQTEADRKLRSEVLEHSKFRN

SEQ ID NO: 344353 - protein, 73 aa, Zea mays
  Clone ID: MRT4577_7720C.1.pep
SQLRMLLKEICMLPTHIKGPGAFQCFGPTTSIESSHLTLSSPSFLTLTTSNVTRSPKLLSSLHPFIFVLPHNL

SEQ ID NO: 344354 - protein, 218 aa, Zea mays
  Clone ID: MRT4577_77210C.1.pep
MRDAEAASRRRWTLVLVNMASVLEKADEVLLPAVYKEVGTALGASPTALGSLTLCRALVQAACYPLAAYASARHDRARVVAVGAFLWAAATFLVAVSGSFLQVRPSPRFPPNSFPLPPVADVADPLLHVSPAARGWHCTGTYLPPNVAVIRIFYFNFATQNKRWSVIFWCISDTWAHPLTSNLWLARSHTHTHTHCADGDLAGPQRHRSRAGPPRDQL

SEQ ID NO: 344355 - protein, 63 aa, Zea mays
  Clone ID: MRT4577_77211C.1.pep
LDSVILSLLSGHKRRAFYKMPGQLRDYEMIHPLPKTVPPEAPQGHQRPSSRRQQDAEPDSYQA

SEQ ID NO: 344356 - protein, 75 aa, Zea mays
  Clone ID: MRT4577_77212C.1.pep
DRLVVARGAHVHGSCAEQQSQLIDSQDGSLGGVATSLVVLRGFLNSDQAALSEISIRRSLKGRLEGKVKKKTANS

SEQ ID NO: 344357 - protein, 112 aa, Zea mays
  Clone ID: MRT4577_77213C.1.pep
FAMLFPLPDPRRSAVFPKIFESGFFDSPRGLFSVFQGIFLPPLLGWTAPAPQSPLVVVLAFQKKCLRMGLCFTFMPRNLFPPFFFCRTPRAERLLPPVEPLFFFLSKKLHEC

SEQ ID NO: 344358 - protein, 58 aa, Zea mays
  Clone ID: MRT4577_77214C.1.pep
KKKGYCLCSIQKLAHRDRSTTIGFGKTLQLLLLIFTKREPILCTQVLGASVQTSIFNF

SEQ ID NO: 344359 - protein, 220 aa, Zea mays
  unsure (1)..(220): unsure at all Xaa locations
  Clone ID: MRT4577_77215C.1.pep
GATGGGGGTTSRARPAAKLARPRPRASASAPPSDVPAPASAPRPRAPPPHREXAAATRRRRPVAAAXFSPPRPYQPRYTSNSTXPKLPAAATRRQPRPRRPIPPRXRRGRRPPRRRRRRRATSSPRCRRAPTSRRPCRGSACGTSRTPRWRRRDSRCSSRXEAPPXRPGPPPRRPCSRRSCCRRPTTQRRHARGDTGRGRPRGPSCPGSTGACSQGSESE

SEQ ID NO: 344360 - protein, 70 aa, Zea mays
  Clone ID: MRT4577_77216C.1.pep
SLPHGLGYCFCTRTPPSESATRKGACATHISHAYTTPLLALTLPGKPVITSIHSSLSRHLLYEAILASSC

SEQ ID NO: 344361 - protein, 50 aa, Zea mays
  Clone ID: MRT4577_77217C.1.pep
SGYPCLKHGRHRDASFSAPPPRNSLSGLVIFIPSPCSRQNQPGRNPCPRP

SEQ ID NO: 344362 - protein, 87 aa, Zea mays
  Clone ID: MRT4577_77218C.1.pep
KTNATHLTGLPETNRPESRREEKGRGKRTKTKAARSVPPQRRLTITSMQRAQHNSAHRFHPSEGGGLLTSLIYLDNGDHDVSDHRRF

SEQ ID NO: 344363 - protein, 56 aa, Zea mays
  unsure (1)..(56): unsure at all Xaa locations
  Clone ID: MRT4577_77219C.1.pep
SSCGCSSCLKRCLNYPDLDEMFTAAXSTVVLGVALDKNAVPQFYVALAESGEAAHS

SEQ ID NO: 344364 - protein, 838 aa, Zea mays
  unsure (1)..(838): unsure at all Xaa locations
  Clone ID: MRT4577_7721C.1.pep
MPEIKCGAAEKVKPAASPEAEKPADIAGNISYHAQYSPHFSPFAFGPEQAFYATAESVRDHLIQRWNETYLHFHKTDPKQTYYLSMEYLQGRALTNAVGNLGITGAYAEAVKKFGYELEALAGQEKDAALGNGGLGRLASCFLDSMATLNLPAWGYGLRYRYGLFKQHIAKEGQEEVAEDWLDKFSPWEIPRHDVVFPVRFFGHVEILPDGSRKLVGGEVLKALAYDVPIPGYKTKNAISLRLWEAKATAEDFNLFQFNDGQYESAAQLHARAQQICAVLYPGDATEEGKLLRLKQQFFLCSASLQDMIARFKERKSDRVSGKWSEFPTKVAVQLNDTHPTLAIPEXGRIMMDEEGLGWDEAWDITYRTISYTNHTVLPEALEKWSQIVMRKLLPRHMEIIEEIDKRFKELVISKHKEMEGKIDSMKVLDNSNPQKPVVRMANLCVVSSHTVNGVAELHSNILKQELFADYVSIWPTKFQNKTNGITPRRWLRFCNPELSEIVTKWLKSDQWTSNLDLLTGLRKFADDEKLHAEWAAAKLSCKKRLAKHVLDVTGVTIDPTSLFDIQIKRIHEYKRQLLNILGAVYRYKKLKGMSAEEKQKVTPRTVMIGGKAFATYTNAKRIVKLVNDVGAVVNNDPEVNKYLKVVFIPNYNVSVAEVLIPGSELSQHISTAGMEASGTSNMKFSLNGCVIIGTLDGANVEIREEVGEDNFFLFGAKADEVAGLRKDRENGLFKPDPRFEEAKQFIRSGAFGSYDYEPLLDSLEGNSGFGRGDYFLVGYDFPSYIDAQDRVDAAYKDKKKWTKMSILNTAGSGKFSSDRTIAQYAKEIWDIKASPVV

SEQ ID NO: 344365 - protein, 221 aa, Zea mays
  unsure (1)..(221): unsure at all Xaa locations
  Clone ID: MRT4577_77220C.1.pep
MXASXLHQTTSFLGQXLVSRPAGSXXRRIXMXXXXKXXXXXILYGFDCFKYXXLXXEXXXXXFIXEXXFFXXLXXFGFLVDLEIXXFXLELEVIYXWRVMXGXLGXCXFGELXVKNGVKFGEVERIKXGVXIFLEGGXDYXVNLIXXMXSXXVXXVCYVGXMGXXEGDCFGGGLFGEGXDKVXXGGVXXLXGXVDDLDIXXEFKVKXLRMXFVKFFXFGFL

SEQ ID NO: 344366 - protein, 54 aa, Zea mays
  Clone ID: MRT4577_77221C.1.pep
TSTFLVTRCTHSLYRPVCKTDQMIPHTCCFPLKPRERHLVFRCILFRGTEYVVA

SEQ ID NO: 344367 - protein, 91 aa, Zea mays
  Clone ID: MRT4577_77222C.1.pep
PAGPGILYRLYSIMTDGQNEAHRCSWCPYCMTLYLIVALPTVMGARSPRAAPADDSLDTTPKTTMLPATLRYYHHHLLKLWLPLSCLLLPL

SEQ ID NO: 344368 - protein, 92 aa, Zea mays
  unsure (1)..(92): unsure at all Xaa locations
  Clone ID: MRT4577_77223C.1.pep
MAAVSSQDKEGALQLKQAGESKVFSKLFTRESSAAAPSFRVXYGVASAGSVPFLWESQPGTPKNDAVSTATLPPLTPPPSYYTARRQQQQHG

SEQ ID NO: 344369 - protein, 118 aa, Zea mays
  Clone ID: MRT4577_77224C.1.pep
MLPGRRRRGAAPLRPPPPAPGPTRGAARRASSWTTAPASGPPSRSRRRRRSPRTGRSWAPPSSLQPAASAAAFAPPPTGAASPASGTRRPPCPASRCWWPAASGGSIPRRRRTPPPPP

SEQ ID NO: 344370 - protein, 81 aa, Zea mays
  Clone ID: MRT4577_77225C.1.pep
GSCPHVTVVWVVMVKTIMSTRKANLMLAHLCQQDSGLVRVVKRQLLVCMLRWHNEVCFAGALILVSTYYHGQCSVGVVRSR

SEQ ID NO: 344371 - protein, 61 aa, Zea mays
  Clone ID: MRT4577_77226C.1.pep
PVFFYSHTYTHRCCKKLMSHACMRAVYRGAFSIYYNQRAPAFLSMATDSPERGKTITLLVP

SEQ ID NO: 344372 - protein, 91 aa, Zea mays
  Clone ID: MRT4577_77227C.1.pep
RMLRIMLHWILHSSYSAAGCFNIHLHIITLRATTTLFSTVFYYISYLFFLEVFFYDLRDDITPSLTPYPAEAASTGGLNPARTAPQICATL

SEQ ID NO: 344373 - protein, 175 aa, Zea mays
  Clone ID: MRT4577_77228C.1.pep
SVSDRRAADTALVATATRPSSAPASQLVAPTNNAGGVTDNRPRSGYGRGRGRGRGRGFRYNGGGYNGGGRSTGFLPPWVSPWPAAWRAPWTGASGPGVLGARPQAQAFPMLQQPHTTFAPLQQPSWDISGLVQALQAASVQQQASAGEWFMDTGASSHMTNNSGSGHQENNHEVQ

SEQ ID NO: 344374 - protein, 108 aa, Zea mays
  Clone ID: MRT4577_77229C.1.pep
APMTCSIMFHVWSQLTWSCESNILHSSCPSTDRCHLSAESSSHCARKCNHLLSTSRWACLYNRSHHVLLIHVHMSNRTPPAVPVYVSIRSLTAIDQSAFLVVKKKKHG

SEQ ID NO: 344375 - protein, 68 aa, Zea mays
  Clone ID: MRT4577_7722C.1.pep
TWAIILGGLQVGGGINLENAMSYLNEGASHVIVTSVRAHALNLCKLYYFFSSICGVLYKHFLLLCTSV

SEQ ID NO: 344376 - protein, 121 aa, Zea mays
  unsure (1)..(121): unsure at all Xaa locations
  Clone ID: MRT4577_77230C.1.pep
GWMVDSGKNSVQAFIKPRAHEPDPSRTLYDAVKSIKPTDMIEISGVARTFTNEVVEAMASFIERPIISLLANPTSDSECTAEEAYNWTEGRIXISARGRPFEPVEYKGKDLAPGQSNHAYI

SEQ ID NO: 344377 - protein, 94 aa, Zea mays
  unsure (1)..(94): unsure at all Xaa locations
  Clone ID: MRT4577_77231C.1.pep
PLXXAGXPXXAXLGGGAASPPXLXSXXXSXAXEKKNVLSPGPLGRVXAPSGPXPVXXRGAVXXSGCLXXQPXSGGXLRPGLPXGECLLAPPPLP

SEQ ID NO: 344378 - protein, 58 aa, Zea mays
  Clone ID: MRT4577_77232C.1.pep
RFGNDRTGLIFVLDFHLSHHIRTHPMHEHCIITYYMTYMLKVDTMYWPWRNNEDKVKD

SEQ ID NO: 344379 - protein, 113 aa, Zea mays
  Clone ID: MRT4577_77233C.1.pep
MGCAGSTPKTDDNGKNLKKPKPWKHTQAITPAQLRQMRDEFWDTAPHYGGQKEIWDALRAAADSDLALAQTIVDSAGIIVSNSDMTLCYDERGAKYELPKYVLSEPTNLIRDG

SEQ ID NO: 344380 - protein, 64 aa, Zea mays
  Clone ID: MRT4577_77234C.1.pep
FAASDSVDMKQIYSIMPQLRRTCIDIDFLLVLRDDEWDLTNELIRREGVTKVTHFNVYKCANQW

SEQ ID NO: 344381 - protein, 104 aa, Zea mays
  Clone ID: MRT4577_77235C.1.pep
EHADDQPGRTTWTSASPFLTTSTACYPRKCCTARTPYMTSSSPPSPRYSLVETTGAAPPATALPPPRTTRSILKGVLRKVDLSNALSTTIYGANYLNINCKVRP

SEQ ID NO: 344382 - protein, 101 aa, Zea mays
  Clone ID: MRT4577_77236C.1.pep
MENGLALGSAHNSTRTEKLDSESNVILIDNYDTFTRYIYQYLALEGALVTDYRTDQITLKGLIADKPTQLAISPGPGHSDTDGGISTAAILESSAKIPTFR

SEQ ID NO: 344383 - protein, 194 aa, Zea mays
  unsure (1)..(194): unsure at all Xaa locations
  Clone ID: MRT4577_77237C.1.pep
MVPGVPLPPEIQLAQRLAGNEQVTRDRALRKLRKYIEARSQRATGGFTPDELLKVWKGLFYCMWMQDKPLQQEELGRTIAQLVHAFHTTEAQHQFLKAFWQTMIREWVGIDRLRLDKFYMLMRMVLSESLKAVKARXWDERQIEQLLELLTTEILNPDSQARSGVKSHFLEIFLXELAKVGAAELTADQNLQFI

SEQ ID NO: 344384 - protein, 102 aa, Zea mays
  unsure (1)..(102): unsure at all Xaa locations
  Clone ID: MRT4577_77238C.1.pep
MKSSQNLVXILCLKXAXVMGXFAXLAKENXLVERKEXEIKRGXIKCXTNXNFXFXGLXTCEXXKKXXXXVXKKXVVAVXAXYXGKKKLRXTETFXGMWGTKC

SEQ ID NO: 344385 - protein, 46 aa, Zea mays
  Clone ID: MRT4577_77239C.1.pep
QQSTMTAIIKNKRCPRSLYEAWTSFVLDYGCHRTLLLTPQGQSMVL

SEQ ID NO: 344386 - protein, 229 aa, Zea mays
  Clone ID: MRT4577_7723C.1.pep
FILSFNNIKGEIPSWLGNCRSLQQLGFVNNSLSGKIPNFIGLFSNLTYLLLSQNSLTGLIPPEIGNCRLLQWLELDANQLEGTVPEEFANLRNLSKLFLFENHLMGDFPESIWSIQTLESVLIYRNKLTGRLPSVLAELKSLKNITLFDNFFTGVIPQELGVNSPLVQIDFTNNSFVGGIPPNICSGKALRILDLGFNHLNGSIPSSVLDCPSLERLILRDNNLSGSIM

SEQ ID NO: 344387 - protein, 74 aa, Zea mays
  Clone ID: MRT4577_77240C.1.pep
ITGPGLEFPNLFPFACGLLSLCDLRLIQYFAYSLYQKTFTVSRDVPYHGFVAPNLSYSLVFKRLRIVGPSRCGR

SEQ ID NO: 344388 - protein, 42 aa, Zea mays
  Clone ID: MRT4577_77241C.1.pep
KIHFPPPHRASPTYTFLAIPHPYSQIAPPDNITPSATKTLPH

SEQ ID NO: 344389 - protein, 175 aa, Zea mays
  unsure (1)..(175): unsure at all Xaa locations
  Clone ID: MRT4577_77242C.1.pep
AAAAAHDDDGRRPEVTLPSTFSPSSSASAPQILDFXPQQLIGPARRRRRRXGPRAIRRRRPLRRRPRRRPRPQRRRPAAVHGRTAGSATGIKKTRDRELAPGGTGIRSSSCVEEYACNMGAGGVSGSDGFWCRHGHFSAFLISTHVGFFLLLLFSCHEMIFLLFISWRIFFSSLD

SEQ ID NO: 344390 - protein, 82 aa, Zea mays
  Clone ID: MRT4577_77243C.1.pep
ILRMLRISTQMTMNRGPMSPVRDMLRDDDLRDAEHHVAQQLADRVSRAGVDGVTVVGGQRRRRDVDERIGEHLPVHLSSDRD

SEQ ID NO: 344391 - protein, 71 aa, Zea mays
  Clone ID: MRT4577_77244C.1.pep
CRRPAPSDVDPSRRRRCRYSGACDLCRPVLDRRICSMLPSPGVELSSTCGGPGRSQPPGVGLAAVGLPPDK

SEQ ID NO: 344392 - protein, 1789 aa, Zea mays
  Clone ID: MRT4577_77245C.1.pep
MAGSRDSSDISPSNIIEPTWETLPADEQLQFEEHKEWMIQEAKAKFLANFKVDRNNKVVRHRATDPASLQPTQISPINYVEDQREQMQNIIGGMQSDLKRLVRAFDKSSITNFPSHEVELGGNTRNTSATGCHDQSQPLYGMPMDTYPEQPQIGSKSVDLRMPGPSARSRAQESFPAPPRRPERNDQTYEPYRANGNAPRSSNQWGERQHANMQPTPPMFDQRAGGLAPAAIDIVREEIAGAFRDKLGVSMIPGGQSYRKPYDSRFDHHPYPQGTRIPEFAKFSGDQGKNTREHIGQFLAQLGELADTEAFRVRLFSLSLTGTAFAWYATLPPNSISSWGDLEQKFHNHFFSGDYELDLDESVNDYIRRFRDTRNRCFQIHLAEKQLVGLAFNGLRYYLKERLEGIQFFTPAQLHQRALACESRSKETAKTMRHNVHIVECDQSSSDDESVEVYAAEMVWPKQAKSSACASLQPVQKKRQEEIQSVINEGRLKFQEMQVDTEPFPMNMIDFEGKKVLVRSNTADKGKGKETIIGNAKKADEDCKVSCRKVVAKKTPDGGETLKVTITASSTGGQAQTGRQLREPVLRITDSPPSRRGRSDASPDGPEDSGGRSGHAQDSQRPRTFKPRRPEIGTWKTNTFKAAGRLIKPGPTFDQLLSKYVKKKAGPSDRPPKQPRSPIHEQRQVRPIGPPHQSEEMKGPIVQLRPNMPTWTPPPPYPSMSYPYTYLPPPYVPNQMWGMPPYPFGMPQYPAWGAPQTSVFDRLATPVQDRLSAAESGHQAQAQQDCRTTRPPRPTNPAGGHMPVATQRTTKKDIIKIGTADVVIQGDNKGPMIFGESANTTEKDTATIKTADPKYSMPRWCPSRLTRSQKRKLQCLRAKESQEKEAEKTFNDTHPLYPPPQKKWRPKAVEKKQTAKEIESQPTPRADRPASAHGPSAVHQEASGHPAPGADRPAPACGPSAVHQEASNDTTTSMEEDDLLGEDLVDYEASPERSGMDVNIITFSADCTIIGDDEPVVAQFDFGPKEAAFTKPKESVNHLKPLFVRGHIDGILIAKILVDGGAAVNLMPYSLYRKLGKQDDELVKTNMTLSGVGTDSSIKARGVTSVELTIGTKTLAAAFFVAAVEGNYSLILGRDWIHANQYSSASKAGWSGLSQKSSDFKTEHISQQKDSITDDPVPGTGESAVTQRSSNSSVGNIIEEFRDLDKLGQGFTSADPLEEIDIGDGKTPRPTFVNKTLETDPRDEMIGLLKEYSDCFAWNYTEMPGLSREIVEHRLPIKSGFRPFKKRARTFRPDLLPRIKDEIHRLLEADFIRPCRYAEWVSNIVPVEKKESGKLRVCIDFRNLNRATPKEEYPMPIADTLINNASGNRIISFLDGNAGYNQIFMAEEDASKTAFICPGFIGLFEWVVMTFGLKNAGATYQRAMNLIFHELLGNTVEVYIDDIVVKSAEFSSHIVDLRKAFNKMRQYGLKMNPRKCAFGVSAAEDKVIGAVLTQETEGKEHVVTYLSRRLVDAETRCYLLSSHCTVSGQADVIKYMLHSPIMSGRIGKWAYALIEYDLAYEPLKSMKGQVIADFIVEHLVNDIHELDLSYLTITPWTLYFDGSVCNEGQGMGIVLVSPSNVSFDFSSQLKTYCTNNQVEYEALLFGLELLNCMGVKHVKAFGDSHLVVQQVLEEYQCFDGTLNSYLEKCWSIIHSFDEFSIRHISRVENHRANNLAQDASGYRIKRGRFHSTENLITSAGPNQQAADRPREGAGPSEVAWKVLLVDLADNEADASDWRTPITNYLRNPN

SEQ ID NO: 344393 - protein, 262 aa, Zea mays
  Clone ID: MRT4577_77246C.1.pep
MAGSRDSSDISPSNIIEPTWDTLSADEQLQFEEHKEQMIQEAKARFLANFKVDRNNKVVRHRATDPASLRPTPDIPNIQSAINEGRLKFQEMQVDTEPFPMNMVDFEGKKVLVRPNTADKGKGKETIIGNAKKADGDCKVSCRKVVAEKTPDGGETLKVWQIARPARLDNLHQARTVRPLRADRPSFIRRPLDNLHQARTVRPPRADRPPFTRKPPTTRQHQWKRTTYWEKTWSTTRLLQNAQFDFGLKEAAFTKPKESKIR

SEQ ID NO: 344394 - protein, 83 aa, Zea mays
  Clone ID: MRT4577_77247C.1.pep
VVLLLFSFSVRLNVVFYFFSLGVAAWKGGGYLFSKSASTGSARMARLMGFELSTPCLIVLPTFIYLSSGNTITLPRADTVLHL

SEQ ID NO: 344395 - protein, 303 aa, Zea mays
  Clone ID: MRT4577_77248C.1.pep
MASSRDSCEVSPSNIIEPTWETLSADEQLQFEEHKEQMIQEAKARFLANFKVDRNNKVVRHGATDPASLRPTSDIPNRAGSLAPAAIDIVREEIAGAFQDKLGVSMVPGGQSYWKPYDSRFDHHPYPQGTRIHEFAKFLGDQGKNTREHIGQFLAKLGEYADTEAFREMQVDTKPFSMNMIDFEGKKVLVRPDTADKGKGKETIIGNAKKADGDCKVSCRKVVAEKTPDGGETLKVTITTSSTGGKRRQGDSCGNPCCASRTVRHLDADGLTLLRTVRRTPADGPAMLRTRSGHVPSNHDDQR

SEQ ID NO: 344396 - protein, 258 aa, Zea mays
  Clone ID: MRT4577_77249C.1.pep
MSTSKPLDALLFIAGSIGFTPDRSFKRTLEKLHEADFMAEPSNWIYGKLKPETPTLKELSEPDRAGVFGVCVLLIFYVSCITHLKDLDEIMKPQSKFKNISEEVMPSTVSVVNETFGVVVDVSILKEMFEKFRTALKELNSSDIFDDIKAGYNSDEDETLVNRVRSSIAKALPSPVTGVGKSILKAKNNVFDGEKVKTLFSAEIAYVDKRYTMCVILGSSAVTIIARNVGTHVHTEEVKRKQICGYAKVVIKKKKKKR

SEQ ID NO: 344397 - protein, 88 aa, Zea mays
  Clone ID: MRT4577_7724C.1.pep
SPQQVQLYVMVNILGHQRLPVEIGVISHSLAILVDVAQEVVVLAVHDDRERLRVHNEVEERDSLVLLGHGSLGSTTSEVPLQRKTPMT

SEQ ID NO: 344398 - protein, 87 aa, Zea mays
  Clone ID: MRT4577_77250C.1.pep
MERKAVVVCAVVGFLGVLSAALGFAAEATRVKVRLARRLSPFSCARYAAGVVPYRTAYVYGLACRRRLREVDLGRSWAREIDLVLHY

SEQ ID NO: 344399 - protein, 1794 aa, Zea mays
  Clone ID: MRT4577_77251C.1.pep
MPGPSARERGPSGPTTVGPIFNELPRYAPEPPHTTRNLNYPVGPSAYNDGRPNLRLVPPYSRFKRNDKRRLSLHLMLIQSAINEGRLKFQEMQVDTEPFPMNMIDFEGKKVLTRPNTADKGKGKEIVIGDVREAGGNHKTSCRKVVAEKTPDGGETLKVTITAPGTGGQTQTGRQAFRPLPVYFPHRTFVSDVSEIPISFPVPELPFSILFLIKNMKTVMVLVFTDCFHPAQEPILRITDGPPSRRGLSDASPDGPANSSGRSGRAQDPQQPRTFKPRRPEIGTWKTNTFKAAGRLIKPSPTFDQLLSKYVKKKAGPSDRPPKRPRSPIHEQRQVRPIGPPHQSEEMKGPIVQLKPNIPTWTPPPPYPSMPYPYTYLPPPYVPNQMWGMPPYPFGMPQYPAWGAPQTSIFDRLAPPVQDRLSAAESGHQAQAQQDCRTTRPPRPTNPAGGHMPVATQRTTKKDIIKIGTADVVIQGDNKGPMIFGESTNTTKKDNTTKKDTAIVKTADPKYSMPRWCPAGLTRSQKRKLQRLRVRESQEKEAEKIFNDTHPLYPPPQKKWRPKVVEKKQTATEIEGQPAPGADRPASARGPSVPHQEASGQSAPGADCPVPAHGPSGFHQEASGQPAPGADRPASACGPYAVHQEASNDTTTSMEEEDLLGEDLVDYEASPERPGMDVNIITFSVDCTIIGDDEPVVAQFDFGPKEATFTKPKESVNHLKPLFVRGHIDGIPIARMLVDGGAAVNLTPYSLYRKLGKQDDELIKTNITLNGVGTDSSIKARGVTSVELTIGTKTLADAFFVADVEGNYSLILDRDWIHANQFHKSLVTDSSASKAGWSGLSQKGSDFKTEHISQQKDSITDDPVPETGESAVTQRSSNSSVGNMIEEFRDLDKLGQGFTSADPLEEIDIGDGKTPRLTFVNKTLETDPRNEMIGLLKEYSDCFAWKYTEMPGLSREIVEHRLPIKSGFRPFKQRARTFRPNLLPRIKDEIHRLLEADFIRPCRYAEWVSNIVPVEKKESGKLRVCIDFHNLNRATPKDEYPMPIADTLINNASGNRIISFLDGNAGYNQIFMAEEDASKTAFICPGFISLFEWVVMTFGLKNAGATYQRAMNLIFHELLGNTVEVYIDDIVVKSAEFSSYIADLRKAFDKMRQYGLKMNPRKCAFGVSAEQQEAFDLIKKYLSSAPVLKAPRAGVPFRLYIAAEDKVIGAVLTQETEGKEHVVTYLSRRCYLLSSHCTVSGQADVIKYMLHNPIMSGRIGQGIGIVLVSPSNVSFDFSSRLKTYCTNTQAEYEALLFGLELLNGMGVKHVKVFGDSQLVVQQVLEEYQCFDGTLNSYLEKCWSIIHSFDKFSIRHISRVENHRANDLAQDASGYRIKRGKFHKTENLITSAEPNSQVADRPRDGAGPSGVTRNVLLIDSADNEADARDWRTPILNYLRNPNIKTDKNIRRTTFKYVLMSDELYRRTVNDILLKCLGPDDAILAMAEVHEGICGTHQSAPKMKWLLQRSGFYWPSMIADCFKYYKGCQVCKKFGDLQLVPAAELHPIIKPWPFRGWGLDFIGEIHPSSSKGHRFVLVATDYFTKWTEVVALKNMTHKEANGQAESSNRTLINLIKKKISDNPKHWHKILSEALWAHRISKHRATKVSPFELVYGQEVVLHVEISLNAVRFARQNDLTATDYYDSMMDNIDEVTDKRMIALGAIEKDRIMVARAYNKKVKAKSFQVGDLVWKTILPLRNRDRKFGKWSPSWEGPYRVKQVMSSNAYLLQTLQGKGLPKALNGRFLKQYHPSMWQDA

SEQ ID NO: 344400 - protein, 44 aa, Zea mays
  unsure (1)..(44): unsure at all Xaa locations
  Clone ID: MRT4577_77252C.1.pep
RDRSSXVTSGPLDGANANLIPSTRLEFAPSSGPDVTLLRTDGLV

SEQ ID NO: 344401 - protein, 1969 aa, Zea mays
  unsure (1)..(1969): unsure at all Xaa locations
  Clone ID: MRT4577_77253C.1.pep
MTGSRDSSDISPSNIIEPTWETLPADEQLQFEEHKERMIQEAKAKFLANFKVDRNNKVVRHRATDPASLQPTPDIPNVVTTSHNPFMGCRWAHTLSNRKSAANQPICTCPDRPHRAGGLAPAVIDIVREEIAGAFRDKLRVSMVPGGQSYRKPYDSRFDHHPYPQGTRIPEFTKFSGDQGKNTREHIGQFLARNWENWPTQRHFAPNLRLVPPYSRFKRNGKRRLSLHLMLIQSAINEGRLKFQEMQVDIEPFPMNMIDFEGKKVLVRPNTADKDKGKETIIGNAKEADEDRKVSCRKVVAEKTPDGGETLKVTITASSTGGQAQTGRQMQEPVLRIPDSLARRRRRSGTPPDGPESSGGRLTPPVQDRLSTAQSGHQAQTQQDCRTTRPSRSTNPAGGHMPVATQRTTKKDIIKIGTADVVIRGDNKGLMIFGESANTTEKDTTTIKTADPKYSMPRWCPAGLTRSQKRKLQRLRAKESQEKEAEKTFNDTHPLYPPPQKKWRPKAVEKKQTATEIESQPAPGADRPAPAHGPSAVHQEASGQPAPGADRPAPACGPSAVHQEASNDTATSMEEDDLLGEDLVDYEASPERPGMDVNIITFSADCTIIGDDEPVVAQFDFGPKEAAFTKPKESVNHLKPLFVRGHIDGIPIAKMLVDGGAAVNLMSYSLYRKLGKQDDELVKTNMTLSGVGTDSSIKARGVTSVELTIGTKTLAAAFFVADVEGNYSLILGRDWIHANQCIPSTLHQMLIQWVGDDIEQVHADVSACIAVADAPVLWTYETATCLTRVDFSDYQFISIDKKVHESLVTXVRPPRPDGLVFHKRXDFKTEHLPQRKDSITDDPVPETGKSAITQRSSDASVGDMIEEFRDLDKLGQGFTSADPLEEIDIGDGKTPRPTFVNKTLETDSRNEMIGLLKEYSDCFAWNYTEMPGLSREIVEHRLPIKSGFRPFKQRARTFRPDLLPRIKDEIHRLLEADFIRPCRYAEWVSNIVPVEKKETGKLRVCIDFRNLNRATPKDEYPMPIADTLINNASGNRIISFLDGNAGYNQIFMAEEDASKTAFICPGFIGLFEWVVMTFGLKNAGATYQRAMNLIFHELLGNTVEVYIDDIVVKSAEFSSHIADLRKAFDKMRQYGLKMNPCKCAFGVSAGKFLGFVIHEHGIEIDPDRIKSIRNVGPLTCKVEVQRFLGKVNYLRRFISNLAGKIDAFTPILRLKNDAEFAWGAEQQEAFDLIKKYLSSAPVLKAPQAGVPFRLYIAAEDKVIGAVLTQETEGKEHVVAYLSRRLVDAETRCYLLSSHCTVSGQADVIKYMLHNPIMSGRIGKWAYALIEYDLAYEPLKSMKGQVVADFIVEHRVNDIHELDMSYLTITPWTLYFDGSVCNEGQGIGIVLVSPSNVSFDFSSRLKTYCTNNQAEYEALLSGLELLNGMGVKHVMVFGDSQLVVQQVLEEYQCFDGTLNSYLEKCWSIIHSFDEFNIRHISRVENHRANDLAQDASGYRIKRGKFHKTENLITSAKPNSQVTDRPRDDAGPSGVTRNVLFINSADNEADASDWRTPILNYLRNPNIRTDKNIRRTAFKYVLMSDELYRRTVNDILLKCLGPDDAILAMAEVHEGICGTHQSAPKMKWLLRRSGFYWPSMIADCFKYYKGCQVCQKFGDLQLVPATELHPIIKPWPFRGWGLDFIGEIHPSSSKGHRFVLVATDYFTKWTEAVALKNMTHKEVIEFITEHIIHRFGIPQTLTTDQGTSFMSKEVREFAELYRIKLLNSSPYYAQANGQVESSNRTLINLIKKKISDNPKHWHKIFSEALWAHRISKHRATKVSPFELVYGQEAVLPVEISLNAIRFARQNDLTATDYYDSMMDNIDEVTDKRMIALGAIEKDKIMVARAYNKKVKAKSFQVGDLVWKTILPLRSKDRKFGKWSPSWEGPYKVKQVMFGNAYLLQTLQGKDLPKALNGRFLKQYHPSMWQDA

SEQ ID NO: 344402 - protein, 111 aa, Zea mays
  Clone ID: MRT4577_77254C.1.pep
KNRGGGPTPKGPLLKNFSQISPPEIFLGKGGFPGIQFFGAPWVPLAPPFGPVSPPFPGALFSLRKKKSPGFFFLKPPPPPFGEKKKPPPFFLGAPLFFFGVNWGRSKMFFL

SEQ ID NO: 344403 - protein, 388 aa, Zea mays
  Clone ID: MRT4577_77255C.1.pep
MAGSRDSSDISPSNIIEPTWETLSADEQLQFEEHKERMIQEAKAKFLANFKVDRNNKVVRHRATDPASLQPTPDIPNSQPLYGMPMDTYPEQPQIGSKSADLHMPGPSAQKQLVGLAFNGLRYYLKERLEGIQFFTLAQLHQRALACESRSKETAKTMRHNVHIVECDQSSSDDESAEVYAAEMVWPKQAKSSACASLQPVQKKRQEEVKFTFNVGKCDKIFDELLKNGNIKINHIVPSADELKRRAYCKWHNSFSHATNDCNVFRRQIQSAINEGRLKFQEMQVDTEPFPMNMIDFEGKKVLVRLNTTDKGKGKETIIGNAKKADGDCKVSCRKVVAEKTPDGGETLKVTITASSTGGQAQTGRQLREPVLRITDSPSSRRGRSDTS

SEQ ID NO: 344404 - protein, 124 aa, Zea mays
  Clone ID: MRT4577_77256C.1.pep
MAARRAHAAATLALLVAALVLSAAPAPAEGAVANCGQVVSYLAPCISYAMGRVSVPGGGCCSGVRGLNAAAATPADRKTTCTCLKQQASGIGGIKPNLVAGIPGKCGVNIPYAISQGTDCSKVR

SEQ ID NO: 344405 - protein, 99 aa, Zea mays
  unsure (1)..(99): unsure at all Xaa locations
  Clone ID: MRT4577_77257C.1.pep
PQDCSWATKKKTGFTYGFGKTDLKFTKIYTDLAGGINPQIPHIPLEGWISKTFYWGPFGKKPXIGLDQQCGGDLQKNSTLDPRRARGRGENPRWATAFE

SEQ ID NO: 344406 - protein, 1656 aa, Zea mays
  unsure (1)..(1656): unsure at all Xaa locations
  Clone ID: MRT4577_77258C.1.pep
MAGSRESSDISPSNIIEPTWETLPADEQLQFEEHKERMIQEARAKFLANFKVDRNNKVVRHRATDPASLQPTPDIPNVSNTNELQSLRNYVEEQREQIQSIIGGMQSDVKRLVRAFDKSNIANFPSHEVGLGDNACNTSATGCHDQSQPLYGMPMDTYPKQPQIGSKPADLHMPGPSARERGPSGPATVGPIFNELPRYAPEPPHTTQNPNYPVGRSAYNDGRSAYNHGRSGYVSGQSAHEYFEEDYYMNPRPSQQHFPSHYAMHQPINSGSKAQESFPAPPRRPERNDQTYDPYRANENAPRNSNQWGERQHANIQPTPPMFDQRAGGLAPAAIDIVREEIAGAFRDKLGVSMVPGGQSYRKPYDSRFDHHPYPQGTRIPEFAKFSGDQGKNTREHIGQFLAQLGELADTEAFRVRLFSLSLTGTAFAWYATLPPNSISSWGDLEQKFHDHFFSGDYELDLVDLVSLRQTKDESVNDYIRRFRDTRNRCFQIHLAEKQLVGLAFNGLRYYLKERLEGIQFFTLAQLHQRALACESRSKETAKTMRHNVHIVECDQSSSDDESAEVYAAEMVWPKQAKSSACSSLQPVQKKRQEEVKFTFNVGKCDKIFDELLKNGNIKINHTVPSTDELKRRAYCKWHNSFSHATNDCNVFRRQIQSAINEGRLKFQEMQVDTEPFPMNMIDFEGKKVLVRPNTADKSKGKEAIIGNSKKADEDHKVSCRKVVAEKTPDGGETLKVTVTASSTGGQAQTGRQMQEPVLRIPDGPTRRRGRSGTPPDGPESSGGRAGRTQDLRQPRTFKPRRPEIGTWKTNTFKAAGRLVKAGPTFDQLLSKYVKKKAGPSDRPAKRPRSPMHEQRQVRPIGPPHQSEEMKGHTIQVRPNIPAWTPPPPYPPMPYPYTYLPPPYVPNQMWGMPPYPFGMPQYPAWGAPQTSVFNRLTPPVQDRLSTAQSGGHMPAATQKTTKGDIIKIDTADVVIQGDNKGAMIFGELANATEKDTATIKTADPKYSMPRWCPAGLTRSQKRKLQRLRAKESQEKEAEKTFNDTHPLYPPPQKKWRPKAVEKKQTATEIESQSAPSADRPAPTRGPSAVHQEVSGQPAPGADRPATARGPSAVHQEASNDTTTSMEEDDLLGEDLIDYEASPEHQGMDVNIIXFLPIVLLSXDEPVVAQFDFGPKEAAFTKPKESVNHLKPLFVRGHIDGIPIAKMLVDGGAAVNLMPYSLYRKLGKQDDELVKTNMTLSGVGTDSSIKARGVTSVELTIGTKTLAAAFFVADVEGNYSLILGRDWIHANQFHESLVTDSSAAKAGWSSLSQKSSDFKTEHLPQRKDSITDDPVPETGKSAITQRSSDSSVGDMIEEFRDLGKLGQGFTSADPLKEIDTGDGKTPRPTFVNKTLETDSRNEMIGLLKEYSDCFAWNYTEMPGLSREIVEHRLPIKPEWVSNIVPVEKKESGFIGLFEWVVMTFGLKNAGATYQRAMNLIFHELLGNTVEVYIDDIVVKSAEFSSHIADLRKAFDKMRRYGLKMNPRKCAFGVSAEIDPDRIKSIRNVGPPTCKVEVQRFLGKXGKIDAFTPILRLKNDAEFTWGXAEQQEAFDLIKKYLSSAPVLKAPQVGAPFRLYIAAEDKVIGAVLTQETEGKEHVVTYLSRRLVDAETRENP

SEQ ID NO: 344407 - protein, 381 aa, Zea mays
  Clone ID: MRT4577_77259C.1.pep
MAGSRDNSDISPSNIIEPTWETLPADEQLQFEEHKERMIQEAKAKFLANFKVDRNNKVVRHRATDPASLQPTPDIPNVSNTNDLQSLRNYVEDQREQMQNIIGGCHDQSQPLYGMPMDTYPEQPQIGSKSADLHMPGPSARERGPSRPATVGPIFNELPRYAPEPPHTAQNPNYPVGRSAYNNGRSAYNHGRSGPNLRLVPPCSRFKRNGKRRLSLRLMSIQSAINEGRLKFQEMQVDTEPFPMNMIDFEGKKVLVRPNTADKGKDKETIIGNAKEDSRWEETLKVTITASSTGEQAQTGRQMQEPVLRIPDGPARRRGRSGTPPDGPESSDGRSGRTQDSQRPRTFKPRRPEIGTWKTNTFKAAGEREMCPWAISKYFGD

SEQ ID NO: 344408 - protein, 39 aa, Zea mays
  Clone ID: MRT4577_7725C.1.pep
RCRHRTSIRRISAYTRRYRSPTWRCCRRRTHPRPAGRVR

SEQ ID NO: 344409 - protein, 1602 aa, Zea mays
  unsure (1)..(1602): unsure at all Xaa locations
  Clone ID: MRT4577_77260C.1.pep
MPYPYTYLPPPYVPNQMWGMPPYPFGMPQYPAWGAPQASVFDRLTLPVQDRLSTAQSGHQAQTQQDCRTTRPSRPTNPAGGHMPVATQRTTKKDIIKIGTADVVIQGDNKRPMIFGESANTTEKDTATIKTADPKYSMPRWCPAGLTRSQKRKLQRLRAKESQEKEAENTFNDTHPLYPPPQKKWRPKAVEKKQTVIEIESQPAPGADRPAPAHGPSAVHQEASGQPAPGADRSAPACGPSAVHQEASNDTTTSMEEDDLLGEDLVDYEASPERPGMDVNIITFSADCTIISDDEPVVAQFDFGPKEAAFTKPKESVNHLKPLFVRGHIDGMPIAKMLVDGGAAVNLMPYSLYRKLGKQDDELVKTNMTLSGVGTDSSIKARGVTSVELTIGTKTLAAAFFVADVEGNYSLILGKDWIHANQCIPSTLHQMLIQWVGDDIEQDSIMDDSVPEAGKSAIIQRSSNSSARNMIEEFRDLDKLGQGFTSADPLEEIDIGDDCFAWNYTEMPGLSREIVEHRLPIKSGFRPFKQRARTFRPDLLPRIKDEIHRLLEADFIRPCRYAEWVSNIVPVEKKESGFIGLFEWVVMTFGLKNAGATYQRAMNLIFHELLGNTVEVYIDDIVVKSVEFSSHIADLRKAFDKMRQYGLKMNPRKCAFGVSAEIDPDRIKSIRNVGPPTSKVEVQRFLGKQEAFDLIKKYLSSAPVLKAPRAGVPFRLYIAAEDKVIGAVLTQKTEGNEHVVTYLSRRLVDAETRCYLLSSHCTVSSQDDVIKYMLHNPIMSGRIGKWAYALIEYDLAYEPLKSMKGQVVADFIVEHQINDIHELYMSFLTITPWTLYFDGSVCNEGQGIGIVLVSPSNVSFDFSSRLKTYCTNNQAEYEALLFGLELLNGMGVKHVKVFGDSQLVIQQVLEEYQCFDGTLNSYLEKCWSIIHSFDEFSIRHISRVENHRANNLAQDASGYRIKRGKFHKTENLITSAXNQIPRSRTVRVMTPDRPGLPEKFSXDSADNEADASDWRTPILNYLRNPNIRTDKNIRRTAFNMIADCFKYYKGCQVCQKFGDLQLVPAAELHPIIKPWPFRGWGLDFIGEIHPSSSKGHRFVLVATDYFTKWTEAVALKNMTHKEVIEFITEHIIHRFGIPQTLTTDQGTSFMSKEVREFAELYRIKLLNSSPYYAQANGQAESSNRTLINLIKKKISDNPKHWHKILSEALWAHRISKHRATKVSPFELVYGQEAVLPVEISLNAIRFARQNDLTATNYYDSMMDNIDEVTDKRMIALGAIEKDKIMVVRAYNKKVKAKSFQVGDLVWKTILPLRNKDRKFGKWSPSWEGPYKVKQVMSGNAYLLQTLQGKDLPKALNGRFLKQYHPTPPKGRGAYVEHHIERADGPALRPDGPRSGQSALVGRTKNYNSAKLSCVFHQKWKNPGERPNRQRERVAHLGERWMVLGSDREQVRRMGAGTWNRRARIRPRKLDHERHCCRLAATLLFEGVGRLLFPLTGHPEAPPERPTAARTFASIRVAAPAGGAMSDSGQGSRRRGTEEATMDPHEKAAPDPTRKTVNPTVKVAIALNPVVTAMKRMGGRLGGSSKQGATPDLARRRSDVDDR

SEQ ID NO: 344410 - protein, 2038 aa, Zea mays
  unsure (1)..(2038): unsure at all Xaa locations
  Clone ID: MRT4577_77261C.1.pep
MVPGGQSYRKPYDSRFDHHPYPQGTRIPEFAKFSGDQGKNTREHIGQFLAQLGELADTEAFRVRLFSLSLTGTAFAWYATLPPNSISSWGDLEQKFHDHFFSGDYELDLVDLVSLRQTKDESVNDYIRRFRDTRNRCFQIHLAEKQLVGLAFNGLRYYLKERLEGIQFFTLAQLHQRALACESRSKETTKTIRHNVHVVECDQSSSEDESAEVYAAEMVWPKQAKSSACASLQPVQKKRQEEVKFTFNVAKCDRIFDELLKNGNIKINHTVPSADELKRRAYCKWHNSFSHATNDCNEMQVDTEPFPMNMIDFEGKKVLVRPNTADKGKETIISNXLKRPMGIXEVSCRKVVAEKTPDGGETLKVTITASSTGGQAQTGRQMQEPVLRIPDGPARRRGRSGTPPDGPESSGGRSGRTQDSQRPRTFKPRRPEIGTWKTNTFKAAGRLVKAGPTFDQLLSKYVKKKAGPSDRPAKRPRSPILEXSARVGRLDHPTNRKXMKGHTIQVRPNIXLMDTSTSISTYAISVHIFTSAICPKSNVGHATISIWDATVPRLGGTPNICFQQVDATSTRPIEHCSIRSPGTNPTGLPDYSTXSRPTNPAGGHMPVATQKTTKGDIIKIGTADVVIQGDXRADDFRRIGQRNRKGYGXIETADPKYSMPRWCPAGLTRSQKRKLQRLRAKESQEKEAEKTFNDTHPLYPPPQKKWRPKAVEKKQTATEIESQPAPSADRPASARGPSVPHQEASGQPAPCADRPASARGPSAVHQEASDDTTTSMEEDDLLGEDLVDYEASPERPGMDVNIITFSADCTIIGDDEPVVAQFDFGPKEAAFTKPKESVNHLKPLFVRGHIDGIPIARMLVDGGAAVNLMPYSLYRKLGKQDDELVKTNMTLSGVGTDSSIKARGVTSVELTIGTKTLAAAFFVADVEGNYSLILGRDWIHANQCIPSTLHQMLIQWEFRDLDKLGQGFTSADPLEEIDIGDGKTPRPTFVNKTLETDSRNEMIGLLKEYSDCFAWNYTEMPGLSREIVEHRLPIKPGFRPFKQRARTFRPDLLPRIKDEIHRLLEADFIRPCRYAEWVSNIVPVEKKETGKLRVCIDFRNLNRATPKDEYPMPIADTLINNASGNRIISFLDGNAGYNQIFMAEEDASKTAFICPGFIGLFEWVVMTFGLKNAGATYQRAMNLIFHELLGNTVEVYIDDIVVKSAEFSSHIADLRKAFDKMRRYGLKMNPRKCAFGVSAGKFLGFVIHEHGIEIDPDRIKSIRNVGPPTCKVEVQRFLGKVNYLRRFISNLAGKIDAFTPILRLKNDAEFTWGAEQQEAFDLIKKYLSSAPVLKAPQVGAPFRLYIAAEDKVIGAVLTQETEGKEHVVTYLSRRLVDAETRCYLLSSHCTVSGQTDVIKYMLHNPIMSGRIGKWAYALIEYDLAYEPLKSMKGQVVADFIVEHRVNDIHELDISYLTITPWTLYFDGSVCNEGQGIGIVLVSPSNVSFDFSSRLKTYCTNNQAEYEALLFGLELLNGMGVKHVKIFGDSQLVVQQVLEEYQCLDGTLNSYLEKCWSIIHSFDEFSIRHISRAENHRANDLAQDASGYRIKRGKFHKTENLITSAEPNSQVADRPRDDAGPSEVTRKVLLIDSADNEADASDWRTPILNYLQNPNIRTDKNIRRTAFKYVLMSDELYRRTVNDVLLKCLGPDDAILAMAEVHEGICGTHQSAPKMKWLLRRSGFYWPSMTADCFKYYKGCQVCQKFGDLQLVPAAELHPIIKPWPFRGWGLDFIGEIHPSSSKGHRFVLVATDYFTKWTEAVALKNMTHKEVIEFITEHIIHRFGIPQTLTTDQGTSFMSKEANGQAESSNRTLINLIKKKVSDNPKHWHKILSEALWAHRISKHSATKVSPFELVYGQEAVLPVEISLNAVRFARQNDLTATDYYNSMMDNIDEVTDKRMIALGAIEKDKIMVARAYNKKVKAKSFQVGDLVWKTILPLRNKDRKFGKWSPSWEGPYKVKQVMSGNAYLLQTLQGKDLPKALNGRFLKQYHPSMWQDA

SEQ ID NO: 344411 - protein, 141 aa, Zea mays
  unsure (1)..(141): unsure at all Xaa locations
  Clone ID: MRT4577_77262C.1.pep
SLIIFLISNVSEDIEMLDGYSSPSEMKVTNALAETDIKYEYXDKDLTYYRPLFLQMNPVHNKTPILIHTGEPICXSLITVHFIHEVRNDRNPLLPYDPYHIAQAXIXTDYADPKIYYLGMKIWSLIGKEHEAAIKEYIESL

SEQ ID NO: 344412 - protein, 80 aa, Zea mays
  Clone ID: MRT4577_77263C.1.pep
SARADPAVSGTHSREDELPSLSHMRGLPDACMHRDKHRELRPLSGSIGGCCSTPSGHRTHTPGVIGPQSVVMHNGSQSAN

SEQ ID NO: 344413 - protein, 138 aa, Zea mays
  Clone ID: MRT4577_77264C.1.pep
PPTPTTPAATGAAATAAVTPEHARPRRMVRFNPRSDRFHTLAFHHVEFWCADAASAAGRFAFALGAPLAARSDLSTGNSVHASQLLRSGNLAFLFTAPYANGCDAATASLPSFSADAARRFSADHGLAVRSIALRVAD

SEQ ID NO: 344414 - protein, 87 aa, Zea mays
  unsure (1)..(87): unsure at all Xaa locations
  Clone ID: MRT4577_77265C.1.pep
VLVKYVADDGDIVLMEIQGKLSAEWKPMKLFWGAIWRMDTAKALKGPFSIRLTSEFGKKVICXDVISVNWILYAYYTXSNDQFYLTF

SEQ ID NO: 344415 - protein, 126 aa, Zea mays
  Clone ID: MRT4577_77266C.1.pep
DSLKKIEIWKLPPVLLVHLKRVSYDGRWKQKLQTSVDFPLENLDLSQYVIGPKNNLKKYNLFSVSNHYGGLDGGHYTAYCKNAARQRWFKFDDHEVSDISISSVKSSAAYILFYTSLGPRITDVAT

SEQ ID NO: 344416 - protein, 80 aa, Zea mays
  Clone ID: MRT4577_77267C.1.pep
YFRSRLTNNKVGCYSQSDRWQLFLKKPPLNKMTQISFGTHVCGEKTTATKTSSCYPPSEMRRQKAHLYTYHSFLPPKIQH

SEQ ID NO: 344417 - protein, 74 aa, Zea mays
  Clone ID: MRT4577_77268C.1.pep
MRMSCNGCRVLRKGCGDACTIRPCLQWIEAPEAQANATVFLAKFYGRAGLLNLLAAAPDDGVRPAVFRSLLYEA

SEQ ID NO: 344418 - protein, 199 aa, Zea mays
  unsure (1)..(199): unsure at all Xaa locations
  Clone ID: MRT4577_77269C.1.pep
PSSYAPRRHRRRSSSSSRLDIRVPAICTPSAAFGFRDPPLMAGEEAAEGSGNRRRMDLNLYLGLPPLPRPPGRLGVAMDRPPPPNSAIPVPESPRTDEPAVLPAPEEMPPLPVVYSPSNALSTPELSLIDPMLFDWLDGLSTDSEEALDAGEPAVVRDTPSHDANVSPPPPAPLSLPGLEGFALSXWKGFLTLFWWLLQ

SEQ ID NO: 344419 - protein, 138 aa, Zea mays
  Clone ID: MRT4577_7726C.1.pep
VRTRLTASPRHVNKHKGVASPRARWRRAQTRKRGSRRRSSGHRPSRQGSVAAAAGRATGGGRRRRRRCLLGRPPVARRGRARRHRRGPGSRRRRRDAELATGRARPARPTRSPLLRGFSDADAPQGQGRPRAGDGDTA

SEQ ID NO: 344420 - protein, 63 aa, Zea mays
  Clone ID: MRT4577_77270C.1.pep
IIRHYCVAVLLFWDIFTVLAIKFIESACPIVVCFYTVHNLFLFYTNGKFGAVLILSLLCLEKH

SEQ ID NO: 344421 - protein, 67 aa, Zea mays
  Clone ID: MRT4577_77271C.1.pep
MVTNHLRVLSCAVIMYVNGVVSPFPYMVNREDVPKSKINAEWLERDMVSTGVAKVAVHHKRFLEPPV

SEQ ID NO: 344422 - protein, 116 aa, Zea mays
  Clone ID: MRT4577_77272C.1.pep
SLPAREHERGLSIPRDSVLFVGSKRVDSRKDPCPAVVARTSPRRRRGGRRMAAQGHRRGQGPSPRRGRGQGQGQGPSPRRRWALARRGPCPRRASCLFAASPPVVPGRHRRRLTKR

SEQ ID NO: 344423 - protein, 46 aa, Zea mays
  Clone ID: MRT4577_77273C.1.pep
YQNHAFLTSTATTEAFLLSKTITASTHNHRITNSTIHFNNSKCTTY

SEQ ID NO: 344424 - protein, 1338 aa, Zea mays
  Clone ID: MRT4577_77274C.1.pep
MADSTASKAGQSAPGADRPASTRGPSVLHQEASGQSTPGADRPASARGPSVLHQEASRQSTPGADRPASASGPSDLHQEASGQPAPGADRPAPARGPSAVHHEASNDTTTSMEEDDLLGEDLVDYEASPERLGMDVNIITFSADCTIIGDDEPVVAQFDFGPKEVAFTKPKESVNHLKPLFVRGHIDGIPIAKMLVDGGAAVNLMPYSLYRKLGKQDDELVKTNMTLSGVGTDSSIKARGVTSVELTIGTETLAAAFFVADVEGNYSLILGRDWIHANQFPESLVTDSLASKAGWSGLSQKGSDFKTEQISQQKGNITDDPIPETGKSAVTQRSSNSSVGNMIEEFRDLDKLGQGFTSADPLEEIDIGDGKTPRPTFVNKTLETDPRDEMIGLLKEYSDCFAWNYTEMPGLSREIVEHRLPIKSGFRPFKQRARTFRPDLLPRIKDEIHRLLEADFIRPCRYAEWVSNIVPVEKESRKLRVCIDFRNLNRATPKDEYPMPIADTLINNASGNRIISFLDGNARYNQIFMAEEDASKTAFICPDFIGLFEWVVMTFGLKNAGATYQRAMNLIFHELLGNTVEVYIDDIVVKLAEFSSHIADLRKAFDKMRQYGLKMNPRKCAFGVSAAEEKVIGAVLTQETEGKEHVVTYLSRRLVDAETRCYLLSSHCTVSGQADVIKYMLHNPIMSGRIGKWAYALIEYDLAYEPLKSMKCQVIANFIVEHRVNDIHELDMSYLTITPWTLYFDGSVCNEGQGIGIVLVSPSNVSFDFSSRLKTCCTNNQAEYETLLFGLELLNGMGVKHVKAFGDSQLVVQQVLEEHQCFDGTLNSYLEKCWSIIHSFDEFSIRHISRVENHRANDLAQDASGYRIKRGKFHKTENLITSVEPNSQVADRPRDDAGPSGVTRNVLLIDSADNEADTSDWRTPILNYLLNPNIRTDKNIRRTAFKYVLMSDELYRRTVNDVLLKCLGPDDAILAMAEVHEGICGTHQSAPKMKWLLRRSEFYWPSMIADCFKYYKGCQVCQKFGDLQLVPAAELHPIIKPWPFRGWGLDFIGEIHPSSSKGHRFVLVATNYFTKWTEAVALKNMTHKEVIEFITEHIIHRFGIPQTLTTDQGTSFMSKEVSEFAELYRIKLLNSSPYYAQANGQAESSNRTLINLIKKKISDNPKHWHKILSEALWAHRISKHRATKVSPFELVYGQEAVLPVEISLNDVRFARQNDLTATDYYNSMMDNIDEVTDKRMIALGAIEKDKIMVASAYNKKVKAKSFQVGDLVWKTILPLRNKDRKFGKWSPSWEGPYKVKQVMSGNTYLLQTLQGKDLPKALNGRFLKQYHPSMWQDA

SEQ ID NO: 344425 - protein, 1263 aa, Zea mays
  Clone ID: MRT4577_77275C.1.pep
MADSTASKAGQSAPGADRPASTRGPSVLHQEASGQSTPGADRPASARGPSVLHQEASRQSTPGADRPASASGPSDLHQEASGQPAPGADRPAPARGPSAVHHEASNDTTTSMEEDDLLGEDLVDYEASPERLGMDVNIITFSADCTIIGDDEPVVAQFDFGPKEVAFTKPKESVNHLKPLFVRGHIDGIPIAKMLVDGGAAVNLMPYSLYRKLGKQDDELVKTNMTLSGVGTDSSIKARGVTSVELTIGTETLAAAFFVADVEGNYSLILGRDWIHANQWFTSADPLEEIDIGDGKTPRPTFVNKTLETDPRDEMIGLLKEYSDCFAWNYTEMPGLSREIVEHRLPIKSGFRPFKQRARTFRPDLLPRIKDEIHRLLEADFIRPCRYAEWVSNIVPVEKESRKLRVCIDFRNLNRATPKDEYPMPIADTLINNASGNRIISFLDGNARYNQIFMAEEDASKTAFICPDFIGLFEWVVMTFGLKNAGATYQRAMNLIFHELLGNTVEVYIDDIVVKLAEFSSHIADLRKAFDKMRQYGLKMNPRKCAFGVSAAEEKVIGAVLTQETEGKEHVVTYLSRRLVDAETRCYLLSSHCTVSGQADVIKYMLHNPIMSGRIGKWAYALIEYDLAYEPLKSMKCQVIANFIVEHRVNDIHELDMSYLTITPWTLYFDGSVCNEGQGIGIVLVSPSNVSFDFSSRLKTCCTNNQAEYETLLFGLELLNGMGVKHVKAFGDSQLVVQQVLEEHQCFDGTLNSYLEKCWSIIHSFDEFSIRHISRVENHRANDLAQDASGYRIKRGKFHKTENLITSVEPNSQVADRPRDDAGPSGVTRNVLLIDSADNEADTSDWRTPILNYLLNPNIRTDKNIRRTAFKYVLMSDELYRRTVNDVLLKCLGPDDAILAMAEVHEGICGTHQSAPKMKWLLRRSEFYWPSMIADCFKYYKGCQVCQKFGDLQLVPAAELHPIIKPWPFRGWGLDFIGEIHPSSSKGHRFVLVATNYFTKWTEAVALKNMTHKEVIEFITEHIIHRFGIPQTLTTDQGTSFMSKEVSEFAELYRIKLLNSSPYYAQANGQAESSNRTLINLIKKKISDNPKHWHKILSEALWAHRISKHRATKVSPFELVYGQEAVLPVEISLNDVRFARQNDLTATDYYNSMMDNIDEVTDKRMIALGAIEKDKIMVASAYNKKVKAKSFQVGDLVWKTILPLRNKDRKFGKWSPSWEGPYKVKQVMSGNTYLLQTLQGKDLPKALNGRFLKQYHPSMWQDA

SEQ ID NO: 344426 - protein, 81 aa, Zea mays
  unsure (1)..(81): unsure at all Xaa locations
  Clone ID: MRT4577_77276C.1.pep
HASXLLXXNKKXXNKKXLERRKGIGGRELTFHLGVRERGAPRKGAPSLKHNVLSSKLSQLTTSTLGGTTFPRISPLVGSCV

SEQ ID NO: 344427 - protein, 303 aa, Zea mays
  Clone ID: MRT4577_77277C.1.pep
PRARPPPLPLHSTCSLVGSSRPASPPAKGWTRFAYGRPSSPCGPARPAREAVVAALFMNIYIVGLNQLFDIEIDKVNKPTLPLASGEYTLATGVAIVSVFAAMSFGLGWAVGSQPLFWALFISFVLGTAYSINLPYLRWKRFAVVAALCILAVRAVIVQLAFFLHIQTFVFRRPAVFSRPLLFATGFMTFFSVVIALFKDIPDIEGDRIFGIRSFSVRLGQKKVFWICVGLLEMAYSVAILMGATSSCLWSKTATIAGHSILAAILWSCARSVDLTSKAAITSFYMFIWKLFYAEYLLIPLVR

SEQ ID NO: 344428 - protein, 1047 aa, Zea mays
  Clone ID: MRT4577_77278C.1.pep
MEEDNLLGEDLVDYEASPERPVHESLITDNSALKAGWSGLSQNSSDFKTEHLPQRKDSITDDPVPETGKSAITQRSSDSSVGDMIEEFRDLDKLGQGFTLADPLEEIDIGDGKTPRPTFVNKTLETDSRNEMIGLLKEYSDCFAWNYTEMPGLSREIIEHRLPIKSGFRPFKQKARTFRPDLLPRIKDEIHRLLEANFIRPCRYAEWVSNIVPVEKESGNRIISFLDGNAGYNQIFMAEEDTSKTAFICPGFIGLFEWVVMTFGLKNVGATYQRAMNLIFHELLGNTVEVYIDDIVVKSAEFSPHIADLRKAFDKMRRYDLKMNPRKCAFGVSAAGKIDAFTPILRLKNDAEFTWGAEQQQAFDLIKKYLSSAPVLKAPQVGAPFRLYIAAEDKVIGAVLTQETEGREHVVTYLSRRLVDAETRCYLLSSHCTVSGQADVIKYMLHSPIMSGRIGKWAYALIEYDLAYEPLKSMKGQVVADFIVEHRVNDIHELDISYLTITPWTLYFDGSVCNEGQGIGIVLVSPGNVSFDFSSRLKTYCTNNQAEYEALLFGLELLNGMGVRHVMVFGDSQLVVQQVLEEYQCFDGTLNSYLEKCWSIIHSFDEFSIRHISRVENHRANDLAQDASGYRIKRGKFHKAENLITSAKPNSQVVDRPRDDAGPSGVTRDVLFINSADNEADASDWRTPILNYLRNPNIRTDKNIRRTTFKYVLMSDELYRRTVNDILLKCLGPDDAILAMAEVHEGICGTHQSAPKMKWLLRSRLHPIIKPWPFRGWGLDFIGEIHPSSSKGHRFVLVATDYFTKCTEAVALKNMTHKEVIEFITEHIIHRFGIPQTLTTDQGTSFMSKEANGQAESSNRTLINLIKKKISDNPKHWHKILSEALWAHRISKHRATKVSPFELVYGQEAVLPVKISLNAIRFARQNDLTATDYYDSMMDNIDEVTDKRMIALGAIEKDKIMVARAYNKKVKAKSFQVGDLVWKTILPLRNKDRKFGKWSPSWEGPYKVKQVMSGNAYLLQTLQGKDLPKALNGRFLKQYHPSMWHDA

SEQ ID NO: 344429 - protein, 95 aa, Zea mays
  Clone ID: MRT4577_77279C.1.pep
QRPKAKPTQTTRQDRYKRGHPEAAGQKRRTDAQGLAAEPPEETTRLQGRSEMENKTNRNHVLPKDKNSRCVKQEKIDGFALDTIKTTKKKRERRG

SEQ ID NO: 344430 - protein, 79 aa, Zea mays
  Clone ID: MRT4577_7727C.1.pep
QSNYNDQLHAIGTRSRSPNTRAGLHVSEHIYVDVAQKLWIRTYQIQWCCGALARGCCRFFILKNGEPRTIYCCTLPVLK

SEQ ID NO: 344431 - protein, 235 aa, Zea mays
  unsure (1)..(235): unsure at all Xaa locations
  Clone ID: MRT4577_77281C.1.pep
YACRIRPPGKIFDELLKNGNIKINHTVPFADELKRRAYCKWHNSFSHATNDCNVFRRQIQSAINEGRLKFQEMQVDXHXPFPMNVIDFEGKKVLVRPNTADKSKGKEAIIGNSKKADEDHKVSCRKVVAEKTPDGGETLKVTITASSTGGQAQTGRQMQELVLRIPDGPTHRRGRSGTPPDGPESSGGRSGRTQDSQRPRTFKPRRPEIGTWKTNTFKAAGRLIKPGPTFDQLLS

SEQ ID NO: 344432 - protein, 162 aa, Zea mays
  unsure (1)..(162): unsure at all Xaa locations
  Clone ID: MRT4577_77282C.1.pep
SAGKFLGXVIHEHGIEIDPDRIKSIRNVGPPTCKVFLGKVNYLRRFISNLAGKIDAFTPILRLKNDAEFACGAEQXEAFDLIKKYLSSTPILKAPRAGVPFRLYIAAEDKVIGVVLTQQTEGKEHAVTYLSRRLVDAETRGIQEWRTAGNSRESNVLIEKRN

SEQ ID NO: 344433 - protein, 206 aa, Zea mays
  unsure (1)..(206): unsure at all Xaa locations
  Clone ID: MRT4577_77283C.1.pep
MADSAAKTTEPSAQGADYSTPESGPSAPHQDTSDDVPTSMEEDDLLGEDLVDYKASPERPGMDVNVITFSXLYYCRXDEPVVAQFDFGPKEVAFTKPKELLNHLKPLFVGGHIDGIPIAKMLLDGGVTVNLMPYSLYRKLDYFGQDKLFGKTPSRGPSGPLQRTVRDTRVTLGQNKCKNTSLHYGLSDGKSSIVRPQARTVRSAQN

SEQ ID NO: 344434 - protein, 276 aa, Zea mays
  Clone ID: MRT4577_77284C.1.pep
MAEVHEGICGTHQSAPKMKWLLRRSGFYWPNMIADCFKYYKGCQVCQKFGDLQLVPAAELHPIIKPWPFRGWGLDFIGEIHPSSSKGHRFVLVATDYFTKWTKAVALKNMTHKEVIEFITEHIIHRFGIPQTLTTYQGTSFMSKEVREFAELYRIKLLNSSPYYAQANGQAESSNRTLISLIKKKISDNPKHWHKILSEALWAHRISKHSATKVSPFELVYGQEAVLPVEISLDAVRFARQNDLTVTDYYNSMMDNIDEVTEREMCLWAISKYFGD

SEQ ID NO: 344435 - protein, 52 aa, Zea mays
  unsure (1)..(52): unsure at all Xaa locations
  Clone ID: MRT4577_77285C.1.pep
GKCEPERHAYEKCXYELVMERMLQMQKIREAQETKVKGGASIGLIPATAKLA

SEQ ID NO: 344436 - protein, 96 aa, Zea mays
  Clone ID: MRT4577_77286C.1.pep
NSARGPSPPTYTPSPKPPTPNPTPPTYTPSPKPPTHPTPKPTPPTYTPSPKPSTPKPTRGGYTPSPKPPTPRPTPPTYTPTPKPPATKPPTYSSRP

SEQ ID NO: 344437 - protein, 108 aa, Zea mays
  Clone ID: MRT4577_77287C.1.pep
WPLPPVRYNKFSVHMPKEAVVFGGVRIVKTLKAVPKKKVRRIRQRVLKVAPRVVYRRHGSTPKLKKAVKDPVALPVDGVLQRIRWRTRALEDGPPERISAQKEASVAK

SEQ ID NO: 344438 - protein, 163 aa, Zea mays
  Clone ID: MRT4577_77288C.1.pep
MAGSRESSDISPSNIIEPTWETLPADEQLQFEEHKERMIQEAKAKFLANFKVDRNNKVVRHRATDPASLQPMPDIPNVELGGNTRNTSATGCHDQSQPLCGMPMDTYPEQPQIGSKSADLHMPGPSARSGRLEMRNTLCPGEYTSVVTRGLSGLKAQRVYVGG

SEQ ID NO: 344439 - protein, 1788 aa, Zea mays
  unsure (1)..(1788): unsure at all Xaa locations
  Clone ID: MRT4577_77289C.1.pep
MAKSSACASLQPVQKKRQEEVKFTFNVGKCDRIFDELLKNGNIKINHTVPSADELKRRAYCKWHNSFSHATNDCNVFHRQIQSAINEGRLKFQEMQVDTEPFPMNMIDFEGKKVLVRPNTADKDKGKETIIGNXLKRPMGIVKFLAGKWXGREDSRWRGDPKXPSQPPVLGGKRRQGDRCRSPCCVSRTIRHVGADGPESSGGQSGRTQDSQRPCTFKPRRPEIXVDATSTRPIEHCSIRSPGTNPTGLPDYSAFQADQSXAGGHMLVATQRTTKKDIIKIGTADVVIHGDNKGPMIFGESANTXQKRIQLPSKQPIQNTPCLDGAQRXDTIPKEKITAPKSKGEXRRRRKRHLMTHIHYTRHRKRNGDRRPLRKXTNGHENRKSTRTRRGPSGXSARGPSVPHQEASGQSAPGADRPAPAHGPXPTFTRKRLDNLHQARTVRPPRADRPPFTKRPPTTRQHQWRRTXLLGEDLVDYEASPERPGMDVNIIXFLPXTIISDNEPVVAQFDFGPKEAAFTKPKESVNHLKPLFVRGHIDGIPIAKMLVDGGATVNLMPYSLYRKLGKQDDELVKTNMTLSGVGTDSSIKARGVTSVELTIGTKTLAAAYFVADVEGNYSLILGRDWIHANQCIPSTLHQMLIQWVGDDIEQVHADVSACIAVADAPVLWTYETATCLTGVDFSDYQFISIDKKVHESLVTXVRPPRPDGLVFHKRVRTLRPNXPQRKDSITDDPVPETGKSAITQRSSDACVGDMIEEFRDLDKLGQGFPSADPLEEIDIGDGKTPRPTFVNKTLETDSRNEMIGLLKEYSDCFAWNYTEMPGLNRVIVEHRLPIKSGFRPFKQRARTFHPDLLPRIKDEIHRLLEADFIRACRYAEWVSNIVPVEKKETGNRIISFLDGNAGYNQIFMAEEDASKTAFICPGFIGLFEWVVMTFGLKNAGATYRRAMNLIFHELLGNTVEVYIDDIVVKSAEFSSHIADLRKAFDKMRQYGLKMNPRKCAFGVSAGKFLGFVIHEHGIEIDPDRIKSIRNVGPPTCKVEVQRFLGKVNYLRRFISNLAGKIDAFTPILRLKNDAEFAWGAEQQEAFDLIKKYLSSAPVLKAPQAGVPFRLYIAAEDKVIGAVLTQETEGKEHVVAYLSRRLVDAETRCYLLSSHCTVSGQADVIKYMLHNPIMSGRIGKWAYALIEYDLAYEPLKSMKGQVVADFIVEHRVNDIHELDMSYLTITPWTLYFDGSVCNEGQGIGIVLVSPSNVSFDFSSRLKTYCTNNQAEYEALLFGLELLNGMGVKHVMVFGDYQLVVQQVLEEYQCFDGTLNSYLEKCWSIIHSFDEFSIRYISRVENHRANDLAQDASGYRIKRGKFHKTENLITSARPNSQVADRPRDDAGPSGVTRNVLFINSADNEADASDWRTPILNYLRNPNIRTDKNIRRTAFKYVLMSDELYRRTVNDILLKCLGPDDAILAMAEVHEGICGTHQSAPKMKWLLRRSGFYWPSMIADCFKYYKGCQVCQKFGDLQLVPAAELHPIIKPWPFRGWGLDFIGEIHPSSSKGHRFVLVATDYFTKWTEAVALKNMTHKEVIEFITEHIIHRFGIPQTLTTDQGTSFMSKEVREFAELYRIKLLNSSPYYAQANGQAESSNRTLINLIKKKISDNPKHWHKILSEALWAHRISKHSATKVSPFELVYGQEAVLPVEISLNAVRFARQNDLTITDYYNSMMDNIDEVTDKRVIALGAIEKDKIMVARAYNKKVKAKSFQVGDLVWKTILPLRNKDRKFGKWSPSWEGPYKVKQ

SEQ ID NO: 344440 - protein, 92 aa, Zea mays
  Clone ID: MRT4577_7728C.1.pep
GPLEPAGAKGEAKPKRGRAWQWSSRGECCCRCFWSSPSRPRHRRRLLPHSPSALRPQCLFLLLAMLKTPKASSSTPTRRRRRAGCTITLCRG

SEQ ID NO: 344441 - protein, 88 aa, Zea mays
  unsure (1)..(88): unsure at all Xaa locations
  Clone ID: MRT4577_77290C.1.pep
TTRPVHSADWNPRLDNETXTGXAENAXRKRERPQPGTGGAXXPTHKSEGHKAARARRQTAPDRAXXXGRAAEEGGGKDRDXEKGGKKK

SEQ ID NO: 344442 - protein, 57 aa, Zea mays
  Clone ID: MRT4577_77292C.1.pep
ASELKKKKKKNNNKKKQTYKQKTGGGVNKGGGGPKIKFTEHLVYNILKWGHLCRTPT

SEQ ID NO: 344443 - protein, 68 aa, Zea mays
  Clone ID: MRT4577_77293C.1.pep
SLPAAEHIAVDSFDLVITSYDDVLRRLADDDAMIDLKTGMVDQDYVPPTINVAEEKEIGIDVLMNNLV

SEQ ID NO: 344444 - protein, 79 aa, Zea mays
  Clone ID: MRT4577_77294C.1.pep
PAGIGSEQVGRAGHTDHVVRVVHCPVVIARLCDHTLHAIVFVISPIQPSRIPERWVPPSRHACSSNKNSCYHATIVLIS

SEQ ID NO: 344445 - protein, 76 aa, Zea mays
  Clone ID: MRT4577_77295C.1.pep
QCGACSSFLESGHGKIKIYTQKSAYTKFKLIFLRRERQTSTLSVPLKDNKNTYCITTFRHKHIFSSSQTWLHKFSA

SEQ ID NO: 344446 - protein, 541 aa, Zea mays
  unsure (1)..(541): unsure at all Xaa locations
  Clone ID: MRT4577_77296C.1.pep
MDDDVVVAAAAAAAAAAASSSPSPPWSLLQGLLALLVAWGAYRAAQTFWLRPRRLGRALRAQGLTGTAYRFPAGDLKENARLNDEXARCMSMQPLSSHDVVALVVWSLXCSVADLQGRTXNTWVGPNPRVVNTEAELERQTVSNNGYTFEKFTNKSLGKMIALGVASYDGEKWAKHRRILNPAFHLEKLKRMQPAFLTCCTELIDRWDKEVAGGSDGSFELDVWPEFQSLTGDVISRTAFGSSFMEGRRIFQLQAEQAERVIKAFQYIYIPGFVFFPTPNNRRMKEINREIEATLRGMIDKRERAIENGEASGDDLLGLLLQSNLESGKGGLRMSTEDVVEECKLFYFAGMETTSVLLTWTLVILGMHPEWQDRAREEVFSVFGRDKRPDFDGISRLKTVTMILYEVLRLYPPAVTLNRRTFKDMQIGGITYPAGVILELPVIVVHHDPDVWGKDAHEFRPERFAEGISKATKDQQPAFFPFGWGPRICIGQNFALLEAKMALSMILQRFQFRLSPSYTHAPYTVLLLHPQHGAPIIFDRI

SEQ ID NO: 344447 - protein, 87 aa, Zea mays
  Clone ID: MRT4577_77297C.1.pep
QLCMAQALTTSFVLHPQLGRDPWHAASRSTRSLERWHSLSYNKASRPWLHMAPKRPCPWLVAPCSFQSPKWEKRSAYYPIPWCSLIT

SEQ ID NO: 344448 - protein, 125 aa, Zea mays
  Clone ID: MRT4577_77298C.1.pep
MFGIIPKIEEKLPMGGAPKNKGGGPPKKAEGPPKKEEGGPPKKAGGEPKEGFVEKIKAKFPGEPGDKSGAPKEKKAKKKKVKKKPGEGPAPDGGPSSSTSASDLVLVSQPRCTPCLLPGWRFHPR

SEQ ID NO: 344449 - protein, 47 aa, Zea mays
  Clone ID: MRT4577_77299C.1.pep
TCCFSKSVKCMQVSSVPCIFVCISYWKFVQFRIVFTQHFVCFIKVCL

SEQ ID NO: 344450 - protein, 66 aa, Zea mays
  unsure (1)..(66): unsure at all Xaa locations
  Clone ID: MRT4577_7729C.1.pep
HDFNQIVLKNHFFKKKFFQLPIISFPLLNTFVQCGYWFANYKPNKAFQFPQTFILNHPLIRNIXVR

SEQ ID NO: 344451 - protein, 64 aa, Zea mays
  Clone ID: MRT4577_772C.1.pep
PTLFYLIYKRIHKREIENDYTLVFTLTFCFDVLFVDEGGPIYSPKSSHSRWSFPKKPILGGAPD

SEQ ID NO: 344452 - protein, 330 aa, Zea mays
  unsure (1)..(330): unsure at all Xaa locations
  Clone ID: MRT4577_77300C.1.pep
MDDDVVVAAAAAAAAAAASSSPSPPWSLLQGLLALLVAWGAYRAAQTFWLRPRRLGRALRAQGLTGTAYRFPAGDLKENARLNHEXARSRPVQPPCSHDVVPRVMPHLFNTVKDHGNICITWFGPIPRVVITEAELVRDILSNKFGHFEKFTNKRLGKMIALGVASYDGEKWAKHRRILNPAFHLEKLKRMQPAFLTCCTELIDRWDKEVAGSDGSFELDVWPEFQSLTGDVISRTAFGSSFMEGRRIFQLQAEQAERVIKAFQYIYIPGFXFFPTPNNRRMKEINREIEGTLRGMIDKRERAIENGEASGDDLXRLLLQSNMESGERRP

SEQ ID NO: 344453 - protein, 79 aa, Zea mays
  unsure (1)..(79): unsure at all Xaa locations
  Clone ID: MRT4577_77301C.1.pep
SISECRSTKDKGGRXXNREKPRYASMCWPASSSMNLETLRYRQLTNASPATITVVSSPLLIFLLPPCSLFAGIDSCSCS

SEQ ID NO: 344454 - protein, 219 aa, Zea mays
  Clone ID: MRT4577_77302C.1.pep
MGEEAVDDYELHMVCYGSDEDERVMEWESGLPGADELTPLSQPLVPPGLAAAFRIPPEPGRTLLDLHRASEATVARLRRAPPSSPGTSSSPHGHQEARGGEGADSAAATTTNSNRRPRLVWTPQLHKRFVDVVAHLGIKKAVPKTIMELMNVEGLTRENVASHLQKYRLYVKRMRGQGPSPSDHIFAPTPVHGVAVGMVPMVSGQAYHYLYNGGGGGDR

SEQ ID NO: 344455 - protein, 81 aa, Zea mays
  Clone ID: MRT4577_77303C.1.pep
IFPHSLLASTPLSFIYSIMGINIGKNGAPFHNAYCPMNKSVTPSVNAGLHIPFRQICRYLNKGLYSHHCWHLLPLLPLLSP

SEQ ID NO: 344456 - protein, 83 aa, Zea mays
  Clone ID: MRT4577_77304C.1.pep
RKKNPTVFTPKKVAERPPLRSKEKQGGGDLTGGLTKHPGRGKNGILHHQPGNGPDHTNTAKGGKGDRPSPRKEGGEKPNYRAP

SEQ ID NO: 344457 - protein, 93 aa, Zea mays
  Clone ID: MRT4577_77305C.1.pep
PAHSLCCVRDLSSIRVEDSLCCQLSSSLHLCAWLCCDLSLVCVASPNLTPCFHCDLYCKGERLQYVKIPRKREQSTKRKAVVFKLIIGSLERG

SEQ ID NO: 344458 - protein, 51 aa, Zea mays
  Clone ID: MRT4577_77306C.1.pep
MRRNRKDSGYTTADLGEEDQAEELTEEGDEEKEEQTDEGCGEEDASAAYTP

SEQ ID NO: 344459 - protein, 130 aa, Zea mays
  Clone ID: MRT4577_77307C.1.pep
TSYDGVRECSIIYSLLKEEINAYRTTSIYAMFGVDADEDEMGSQNILQRERISHPSCSSCKLYALLARSSARHTAAIVVVVVAAGYGRQRGERGGRRGPPDDGAAPEHPPPLVERVLRLRQVAGAVHRRR

SEQ ID NO: 344460 - protein, 83 aa, Zea mays
  Clone ID: MRT4577_77308C.1.pep
RGRRESAPSLRHGVVFSGQLVAPRGGGRSRPVPWPSARGERMARGGEWGIGLGFHAPGRNSLRGRGLWWWWYRRGRWRKSPRP

SEQ ID NO: 344461 - protein, 2529 aa, Zea mays
  unsure (1)..(2529): unsure at all Xaa locations
  Clone ID: MRT4577_77309C.1.pep
MAGSRDSSDISPSNIIEPTWETLPADEQLQFEEHKERMIQEAKAKFLANFKVDRNNKIVRHRATDPASLQPTPDIPNVSNTNDLQSLRNYVEDQREQMQNIIGGMQSDLKRLVRAFDKSSTANFPSHEVELGDNACNPSATGCHDQSQPLYGMPMDTYPKQPQIGSKPADLHMPGPSARERGPSGPATVGPIFNELPRYAPEPPHIAQNPNYPDGRPAYNHGRSGYVSGQSAHESFEEDYYMNPRPSQQHFPSHYTMHQPINSGSRAQESFPAPPRRPERNDQTYEPYRANGNAPRSSNQWGERQHTNMQPTPPMFDQRAGGLAPTAIDIVREEIAGAFRDKLGVSMVPGGQSYRKPYDSRFDHHPYPQGTRIPEFAKFSGDQGKNTREHIGQFLAQLGELADTEAFRVRLFSLSLTGTAFAWYATLPPNSISSWGDLEQKFHDHFFSGDYELDLVDLVSLRQTKDESVNDYIRRFRDTRNRCFQIHLAEKQLVGLAFNGLRYYLKERLEGIQFFTLAQLHQRALACESRSKETAKTIRHNVHVVECDQSSSEDESAEVYAAEMVWPKQAKFSACASLQPVQKKQQEEVKFTFNVGKCDRIFDELLKNGNIKINHTVPSADELKRRAYCKWHNSFSHATNDCNVFRRQIQSAINEGRLKFQEMQVDTEPFPMNMIDFEGKKVLVRPNTVDKGKETIIGNXLKRPMGIXKVSCRKVVAEKTPDGGETLKVTITASSTGGQARTGRQMQEPVLRIPDGPARRRGRSGTPPDGPESSGGRSGRTQDPQRPRTFKPRRPEIGTWKTNTFKAAGRLVKAGPTFDQLLSKYVKKKAGPSDRPAKRPRSPIHEQRQVRPIGPPHQSEEMKGHTIQVRXHACMDTSTSISTYAISVHIFTSAIYPKSNVGHATISIWDATVSRLGGTPNICFQQVDATSTRXLSTAQSGHQAQTQQDCRTTRPPRPTNPAGGHMPATKKDIIKIGTADVVIQEDNKGPMIFGESANTTEKDTTTIKTVDPKYSMPRWCPAGLTRSQKRKLQRLRAKESQEKEAEKTFNDTHPLYPPPQKKWRPKAVEKKQTATEIESQSAPGADRPAPVHGPSAVHQEVSGQPALGADRPAPARGPSAVHQEASNDTTTSMEEDDLLREDLVDYEASPERPGMDVNIITFSADCTIIGDDEPVVAQFDFGPKEAAFTKPKESVNHLKPLFVRGHIDGIPIAKMLVDGGAAVNLMPYSLYRKFGKQDDELVKTNMTLSSVGTDSSIKARGVTSVELTIGTKTLAAAFFVADVEGNYSLILGRDWIHANQCIPSTLHQMLIQWVGDDIEQVHADVSACIAVADAPVLWTYETATCLTGVDFSDYQFISIDKKVHESLVXTVRPPRPDGLVFHKRXDFKTEHLPQRNNSITDDPVPETGKSAITQRSSDSSVGDMIEEFRDLDKLGQGFTSADPLEEIDIGDGKTPRPTFVNKTLETDSRNEMIGLLKEYSDCFAWNYTEMPGLSREIVEHRLPIKPGFRPFKQKARTFRPDLLPRIKDEIHRLLEADFIRPCRYAEWVSNIVPVEKKETGKLRVCIDFRNLNRATPKDEYPMPIADTLINNASGNRIISFLDGNAGYNQIFMAEEDASKTAFICPGFIGLFEWVVMTFGLKNAGATYQRAMNLIFHELLGNTVEVYIDDIVVKSAEFSSHIADLRKAFDKMRRYGLKMNPRKCAFGVSAGKFLGFVIHEHGIEIDPDRIKSIRNVGPPTCKVEVQRFLGKVNYLRRFISNLAGKIDAFTPILRLKNDAEFTWGAEQQEAFDLIKKYLSSAPVLKAPQAGAPFRLYIAAEDKVIGAVLTQGTEGKEHVVTYLSRRLVDAETRCYLLSSHCTVSGQADVIKYMLHNPIMSGRIGKWAYALIEYDLAYEPLKSMKGQVVADFIVEHRVNDIHELDISYLTITPWTLYFDGSVCNEGQGIGIVLVSPSNVSFDFSSRLKTYCTNNQAEYEALLFGLELLNGMGVKHVKVFGDSQLVVQQVLEEYQCLDGTLNSYLEKCWSIIHSFDEFSIQHISRVENHRANNLAQDASGYRIKRGKFHKTENLITSAEPNSQVADRPRVDAGPSEVTRKVLLIDSADNEADTSDWRTPILNYLQNPNIRTDKNIRRTAFKYVLMSDELYRRTVNDVLLKCLGPDDAILAMAEVHEGICGTHQSAPKMKWLLRRSGFYWPSMTADCFKYYKGCQVCQKFGDLQLVPAAELHPIIKPWPFRGWGLDFIGEIHPSSSKGHRFVLVATDYFTKWTEAVALKNMTHKEVIEFITEHIIHRFGIPQTLTTDQGTSFMSKEVREFAELYRIKLLNSSPYYAQANGQAESSNRTLINLIKKKVSDNPRHWHKILSEALWAHRISKHSATKVSPFELVYGQEAVLPVEISLNAVRFARQNDLTTTDYYNSMMDNIDEVTDKRMIALGAIEKDKIMVARAYNKKVKAKSFQVGDLVWKTILPLRNKDRKFGKWSPSWEGPYKVKQVMFGNAYLLQTLQGKDLPKALNGRFLKQYHPSMWQDA

SEQ ID NO: 344462 - protein, 44 aa, Zea mays
  Clone ID: MRT4577_7730C.1.pep
LDHVYVHVALLISCAPPLYCIRWALSCYPGMSFPLLWFFVTLRM

SEQ ID NO: 344463 - protein, 82 aa, Zea mays
  Clone ID: MRT4577_77310C.1.pep
LKIQCCGLTIMCSTSNTNELVKSLMCPGYVFEDLDLTTGKPLFSKIVPVSPLITGAAVGTAQCVIHLIQRFCSVVRSIVMCC

SEQ ID NO: 344464 - protein, 37 aa, Zea mays
  Clone ID: MRT4577_77311C.1.pep
THAVVLAFLKKKKKKKKKKKKKKKKKKNKKKKKKKKK

SEQ ID NO: 344465 - protein, 85 aa, Zea mays
  Clone ID: MRT4577_77312C.1.pep
LCGQIKGGYKRSWCATSHKARWKQLSALAEHRFLLQAEPYVCISTYSWLTTVDVPWSSSCVCCPVRARNVAATNRQRRTRGRKKR

SEQ ID NO: 344466 - protein, 30 aa, Zea mays
  Clone ID: MRT4577_77313C.1.pep
EELTGLERRANGVEYSGSQNQAWLDLDTKG

SEQ ID NO: 344467 - protein, 101 aa, Zea mays
  unsure (1)..(101): unsure at all Xaa locations
  Clone ID: MRT4577_77314C.1.pep
KRETPPKATPAKKGDANTHALKDAKVLKSXLSRXKTKKIRIVVTYYLPTTLYNACDPKYPPINSTVRNKLDQYQISKNPFTTESXMKKIVVNNTLGFIVDL

SEQ ID NO: 344468 - protein, 104 aa, Zea mays
  Clone ID: MRT4577_77315C.1.pep
VSLSDILRDLNAIISLIVLYPPLSSYVLFCSTYQSYRLGFVRALVLELLIEVLKARRMSGDLPCAPCRQGRSEPVASQWMILLAARTAASPVCRRRFLLCCTER

SEQ ID NO: 344469 - protein, 58 aa, Zea mays
  Clone ID: MRT4577_77316C.1.pep
CNVSSIGSRQTLDIHATTRLWTLLEYVILYTRLIDMKSSILQIVASDCDRASMKHIYI

SEQ ID NO: 344470 - protein, 69 aa, Zea mays
  unsure (1)..(69): unsure at all Xaa locations
  Clone ID: MRT4577_77317C.1.pep
TSTTSPGPVGSSSRCSLRPARTSGLSTLPRTMTPDGIQFSGKNAGCFPCRGAAAEPPXHRPLVFAAPDE

SEQ ID NO: 344471 - protein, 795 aa, Zea mays
  Clone ID: MRT4577_77318C.1.pep
MDANHSPPAQPERHHGSFNYDIESTDGTWRGAGAWQEQDPSSEALLRYDDDGPREPLLRRRTMNTTSQIAIVGANICPIESLDYEIVENDLFKQDWRSRKKQQIFQYIVLKWSLVLLIGLCTGLVGFFNNLAVENIAGFKLLLTSDLMLKHRYFTAFLAYGGCNLVLAAAAAAICAYIAPAAAGSGIPEVKAYLNGVDAYAILAPSTLFVKIFGSILGVSAGFVLGKEGPMVHTGACIANLLGQGGSRKYHLTCNWLRYFKNDRDRRDLITCGSAAGVAAAFRAPVGGVLFALEEAASWWRSALLWRTFFTTAVVAVVLRGLIQFCRSGKCGLFGQGGLIMFDLSSTVPSYSTQDIIAIIVLGIIGGVFGGLFNFLLDRILRAYSFINERGAPYKILLTVTISIITSACSYGLPWLAPCTPCPADAVEECPTIGRSGNFKNFQCPPGYYNGLASLFFNTNDDAIRNLFSSGTENEFHMSTLFVFFTAIYCLGLVTYGIAVPSGLFIPVILAGATYGRIVGTLLGPISDLDPGLFALLGAASFLGGTMRMTVSVCVILLELTNDLLMLPLVMLVLLISKTIADSFNKGVYDQIVVMKGLPFLEAHAEPYMTHLVASDVVSGPLISFSGVERVGNIVQALRITGHNGFPVVDEPPLSEAPELVGLVLRSHLLVLLKGKGFMKEKMKTSGSFVLERFGAFDFAKPGSGKGLKIEDLDFTDEEMDLYVDLHPITNTSPYTVVETMSLAKAAVLFRALGLRHMLVVPKTPGRPPIVGILTRHDFIPEHIHGLFPNIHKSH

SEQ ID NO: 344472 - protein, 66 aa, Zea mays
  Clone ID: MRT4577_77319C.1.pep
GSSFGIIRVPKGRARLGLHYVSYHITPLRGRAYEATRLYSVLDSHRLYFLCLQKHIVDTILLLMNK

SEQ ID NO: 344473 - protein, 53 aa, Zea mays
  Clone ID: MRT4577_7731C.1.pep
ERAQDVLKTGHARALYFYANTVQITYTKYRLRPEKRKGSFAIRKGVKKGVRGV

SEQ ID NO: 344474 - protein, 60 aa, Zea mays
  Clone ID: MRT4577_77320C.1.pep
AFAGKLHQKQGSLTVSGTTPRGGGYILTSRREIKPKVSSSLMPLGFFSRHNFGFLTQTKL

SEQ ID NO: 344475 - protein, 127 aa, Zea mays
  Clone ID: MRT4577_77321C.1.pep
SLTSNVTDDNAEKVRSILKPFVHIHNGNILRTLPGLRESVIILKPLPLQKSIIKKVENIGSGNNFEHEYVISLASTHPSLVTAINMSEEEASLIDKPMLAKVRSNPYEGVKTRFVIEVVRLSEALRE

SEQ ID NO: 344476 - protein, 217 aa, Zea mays
  unsure (1)..(217): unsure at all Xaa locations
  Clone ID: MRT4577_77322C.1.pep
MSKGKVHHDWILRRCCGSIAACILTLAVLVGFVALVIYLALHPSKPSFYLQDIQLRSIDLADPALSLDVQVTIASRNPNDRVGIYYKTLHAFTTYRDEPVTVPVSLPAIYQGHKDQSVWSPVMSGDSVPVAPYVADAMKQDIAAGHVLLHVKVDGRVKWKVGSWVSGGYHIFVNCPALLSASGGXVGGAFAMXXATVGGKQTVSLSSRSRPTGTVDV

SEQ ID NO: 344477 - protein, 159 aa, Zea mays
  unsure (1)..(159): unsure at all Xaa locations
  Clone ID: MRT4577_77323C.1.pep
EGHFSRQLGFEPHTPGGGGHFWRPSAARRHGGPGGAGRGXTRGSGRGTAAVGLDAGXRGPDGSPWGGARLAAFPAFPGGAGSRPRHAGAAPRHAARARGXPGRVAPGCLGARPPASQVRSPGGAGARSPGSAGAAPTARGRGPGGWRPPSPVSAALAAA

SEQ ID NO: 344478 - protein, 129 aa, Zea mays
  unsure (1)..(129): unsure at all Xaa locations
  Clone ID: MRT4577_77324C.1.pep
RPVGGHFKKRPPPGFGLFFKPGGPPLFFFVNPPFSPPPFFFFGPPLWPPGLFSLGFRFPMGGRNCQGIPISSWDPLLAKFGPPFVPLPFLRVVPPLAPVRNIPGLNQGSQRKNPPKKKINQTQKKKXNK

SEQ ID NO: 344479 - protein, 76 aa, Zea mays
  Clone ID: MRT4577_77325C.1.pep
SWRVSPFLPKTPSSHEQVWWSYRTSRHKFSRSCFVKYALALFIWAPMLEPFNFYLMIVGFPCFFLKILVLKNIRHV

SEQ ID NO: 344480 - protein, 115 aa, Zea mays
  unsure (1)..(115): unsure at all Xaa locations
  Clone ID: MRT4577_77326C.1.pep
KAKPEPLPTPLPXPNPEPKPGPRPDXKIKPNPKPEPKPDPKPDHKPEPKPEPKPIPKPEPKPDPQPIPEPKPEPKPEPKPDPKPEPQPKPXPKPEPXTXPKPVPQPKPEPKPEPK

SEQ ID NO: 344481 - protein, 632 aa, Zea mays
  unsure (1)..(632): unsure at all Xaa locations
  Clone ID: MRT4577_77327C.1.pep
MGKRPRTTLRRTPARGLPKSKRADELPTMPDSDNDEIDAFHKQRDMIPFDADDVRESEDDDVEQPVFDLKGVSDSESDDSKGELSGDMAEADYEGWDKGYISKLKRAQRAVKEIAGGDDSMDEQEDETQENVWGRGKNAYYAPGEQSGDDEVDYEEAQRIQKIKEKRLSMKDFGLEDGESDEEGNATKVSNHESKMKEDFAVLSGDEKMDVLYSSAPELVSLLSELKDAHEELRAIGQLTSEVTSCLGKDKMQPFEVKKACLLAHCQAITFYASVKSEGLSVQDHPVISRLIETKNMVEKIKQITLNPVSHQGSADAWADAWVAPSKQIXVSLDKQEGKFSNVLALDKVKQGAEVSESRKSEPSNNDYXKLKFRXKDERMGLHSLEMLKVRANLEERLKKKGLYNLTRSKPEKSSKTRTTSDKSGLQTLDDFDDEVLKNNQMMKPSKLVAAAAKSNKSMFVSGDDDLPKRDNIGERRRKHELRVLSRVGANSAEDHELPDGDASEEEDHHELPEGGDESEDDIHRDVKRKRTEKLSTKNALYSPTPGVEHLEEETEGDGKRTISYQILKNRGLTRSRNKKKKNPRKNYRDKHKNKLVKRKGQVRDIKKQSGPYGGETSGINPNVSRSVRFKS

SEQ ID NO: 344482 - protein, 99 aa, Zea mays
  Clone ID: MRT4577_77328C.1.pep
RQASPLPSQSLVPHGAHARAHTTDRAIPRRRAPDQSPAWDGSPSAIHQAKLHHATSTKNNTTALVQMRRTHTLRDARARHEPQIPPSKQNITYPDELRD

SEQ ID NO: 344483 - protein, 38 aa, Zea mays
  Clone ID: MRT4577_77329C.1.pep
PGPRRGTVCCRAYKAIAILPSHFGILVTTHRPPIIISC

SEQ ID NO: 344484 - protein, 56 aa, Zea mays
  Clone ID: MRT4577_7732C.1.pep
PTSVLPYIHFFPFSLPIARVALSYISRLTHHFFYTTKMPLYRAFRHQHYYHISILC

SEQ ID NO: 344485 - protein, 425 aa, Zea mays
  unsure (1)..(425): unsure at all Xaa locations
  Clone ID: MRT4577_77330C.1.pep
KMDVLNSSAPELVSCLSELKXAHEELRAIGQLTSEVTSCLGKDKMQPFEVKKACLLAHCQAITFYLLMKSEGLSVQDHPVISRLIETKNMVEKIKQITLNPVSQKGCADDHSMHCGTIQTDKIVSLDKQEGKFSNVLALDKVKQGAEVSESRKSEPSNNDYHEVNEEKNKDERMGLHSLEMLKVRANLEERLKKKGLYNLTRLKPEKSKTRTTSDKSGLQTLDDFDDEVLEKYQMMKPSKLVAAAAKSNKSMFVSGDDDLPKRDNIGERRRKHELRVLSRVGANSAEDHELPDGDASEEEDHHELPEGXDESEDDIHRDVKRKRTEKLSTKNALYSPTPGVEHLEEETEGDGERTISYQILKNRGLTRSRNKKKKNPRKNYRDKHKNKLVKRKGQVRDIKKQSGPYGGETSGINPNVSRSVRFKS

SEQ ID NO: 344486 - protein, 167 aa, Zea mays
  unsure (1)..(167): unsure at all Xaa locations
  Clone ID: MRT4577_77331C.1.pep
PAAXRAHHHHQYYSEPAGPTAATATALSPDDASSALRPSSSLTADDASHYAAAYAYTSAATATPTTDDQQGVLHHCGADARTGPTPSDAAGDDDVFAGTTWSELLATTATGGPHEDCSSMSMIGLQLQDFGIGYFEGGLWSLDDLSLEQPCTLSSPADAYHHHHACS

SEQ ID NO: 344487 - protein, 77 aa, Zea mays
  Clone ID: MRT4577_77332C.1.pep
FPHTILGWASVSARLSCLGTVILSVVTRMEAVNYQHQRTATEIDQHPPLAVACCLLPDGSGGTEAWANLPAFLSLKH

SEQ ID NO: 344488 - protein, 96 aa, Zea mays
  unsure (1)..(96): unsure at all Xaa locations
  Clone ID: MRT4577_77333C.1.pep
KTKHAGNARGFPDXPLENPGQGNGKRPPKGRTGPPKSRPKPPPGGRHPQKSPQGGARPRKKIFFFFFFLLYFYFKFFFFKFFFFFFLALFLVFFSR

SEQ ID NO: 344489 - protein, 92 aa, Zea mays
  Clone ID: MRT4577_77334C.1.pep
PRKILFSSATSLQKANVGLLLLLFNTETHIGIWDSNSAQTLRVTIKQMQFLWCGHFVCMDIFSLIFYTRCMQKNELALCIRRLMLVYQQLLT

SEQ ID NO: 344490 - protein, 102 aa, Zea mays
  Clone ID: MRT4577_77335C.1.pep
SLLGITCNKKAPVASAVMLFLRATKAAIDYVDCTAAGAATASFLLLGLLSSAFLAPSVALPGAAGFDPEAESGSSSSRKTICSPTPPWFWFRVLPKVQAERC

SEQ ID NO: 344491 - protein, 142 aa, Zea mays
  unsure (1)..(142): unsure at all Xaa locations
  Clone ID: MRT4577_77336C.1.pep
PPPGGPRGXPHSPPPGCPIDGWPIPANTGVLVKGWALGKNPPVWEKPQEFLPERVLPPGWGKFHRFNGPGFRVLPFGFGGRIFPGGKFALPAQGIMVPPPLVPFGWGGPQKKKNRGGKVSLDXTFGVILSKNKPLFPVSRAV

SEQ ID NO: 344492 - protein, 106 aa, Zea mays
  Clone ID: MRT4577_77337C.1.pep
LLKLHGCECCSSTIRDRCHKRFHFFLECCGCCSFLRILDGEDLRILDQDQISARAVVLLPRAGAGAACWCWGLSPPPPADGFFGRGSRRRWTEGQVIRRSRFDGRG

SEQ ID NO: 344493 - protein, 114 aa, Zea mays
  unsure (1)..(114): unsure at all Xaa locations
  Clone ID: MRT4577_77338C.1.pep
EKTATQEPYFNEIRVNLKGSIFGSEICSPIWFALVPTTLDIFAFFKVSFVSIAASRVPTPLPSRLSPSEELIRSAQPLVPLQISCTRPXQSCCTRPSPKFLQIHFSPSSGGCVV

SEQ ID NO: 344494 - protein, 57 aa, Zea mays
  Clone ID: MRT4577_77339C.1.pep
VVSRSLGPSFTHLTRDRPSLSISLSLACVSYTSEQGSMPLEGRLEHRLLTVSNETGR

SEQ ID NO: 344495 - protein, 88 aa, Zea mays
  Clone ID: MRT4577_7733C.1.pep
PLPLVLPFRGGMQIFFKTFAGKTKTLGVERSDPIDNVKAKIPGKKGIPPNQQGFIFFGKQLEDGCPLAGFNIQKEGPFPLVLRPRGGQ

SEQ ID NO: 344496 - protein, 110 aa, Zea mays
  unsure (1)..(110): unsure at all Xaa locations
  Clone ID: MRT4577_77340C.1.pep
MAAMEYSILTFRALSACVANATIISHYLQATIAALFAXILTLMTASVCEIPCIXPYRLQHVYLARHVTCXPVWFQSMAALYLVXSLIQTITAHQLHQLVLPVISQVALAN

SEQ ID NO: 344497 - protein, 101 aa, Zea mays
  unsure (1)..(101): unsure at all Xaa locations
  Clone ID: MRT4577_77341C.1.pep
HALLGFGKNPEPEPGRCRRTDGKKWXCWRXTIPNEKYCERHMHRGRKRPVQVFLEDDEPDSASGSKPAAPGKATEGAKKADDKSPSSKKLAVAAPAAVQST

SEQ ID NO: 344498 - protein, 94 aa, Zea mays
  Clone ID: MRT4577_77342C.1.pep
PISWILKLTESVNNSKGFRSSSLAAQWSSSPESSLVWALAGTIPQPNPRPEQCFLFLQLRSRPFSFLLPARSTLLCLHLDYFRNEMQQIFIQQC

SEQ ID NO: 344499 - protein, 242 aa, Zea mays
  unsure (1)..(242): unsure at all Xaa locations
  Clone ID: MRT4577_77343C.1.pep
IPVLSQSWGGGGLILSALILGRKYRANQILGCLLVTAGVILAVAGGASNGPILFEVKGGGAALSRFQLXFQAAASIIKEFVFIDGAKRLEGVRPDIFVVNSFGSGFQALFIFLLLPFLSNLKGIPFAELPAYLTRGAACFLNVGGNLKDCHGAPLLPLLYITLNMAFNISVLNLVKMSTAVVASLTSTLAVPLSIYILSLPLPYLPEGTNLSASFLIGVATLVLGLLLYNLPQESTNQVKED

SEQ ID NO: 344500 - protein, 230 aa, Zea mays
  unsure (1)..(230): unsure at all Xaa locations
  Clone ID: MRT4577_77344C.1.pep
MANNRTYEEHTPAVEWSRSAAEADAVKISLPGFKREDLRVLVDNHGHLRTRGERHLTGNRWIRFQNDFELPANCNADGIRAKFENETLTITLPKKTPSTPMQPPPRMPTAXAASVAGPGAGXPPAARPAAPTPAPLAPAAPSVKPPAESRASMPRKTYDPVPAPAPEVEPPATTKPQPSLGAVQRLKEEEEERKREEEGKMXRDRKEMVHEKDTQQEQQPMLAETMALAN

SEQ ID NO: 344501 - protein, 58 aa, Zea mays
  Clone ID: MRT4577_77345C.1.pep
YKGRMQSLRMTMICTVNGVKSSCHISARSIKPSCYIKVCMGQIYHLCSGILIVRPVHF

SEQ ID NO: 344502 - protein, 304 aa, Zea mays
  unsure (1)..(304): unsure at all Xaa locations
  Clone ID: MRT4577_77346C.1.pep
MANNRTYEEHTPAVEWSRSAAEADAVKISLPGKQSLGSFPAWSDDGFKREDLRVLVDNHGHLRTRGERHLTGNRWIRFQNDFELPANCNADGIRAKFENETLTITLPKKTPSTPMQPPPRMPTAXAASVAGPGAGXPPAARPAAPTPAPLAPAAPSVKPPAESRASMPRKTYDPVPAPAPEVEPPATTKPQPSLGAVQRLKEEEEERKREEEGKMAEDRKEMVHEKDTQQEQQPMLAETMALANLKPRQASARQGMLVSVAVAVVVLLGFTVYVWHSLRNATGGAGGEHGHGHQLWTGSYGDEM

SEQ ID NO: 344503 - protein, 76 aa, Zea mays
  unsure (1)..(76): unsure at all Xaa locations
  Clone ID: MRT4577_77347C.1.pep
PPYGKPKDILFTIPSRSKGDGDSHLPSNVLMAHFLWGRIKKTQXNSFLXKKCVPPLPGKGNPFFDLPEKPLPPGKV

SEQ ID NO: 344504 - protein, 54 aa, Zea mays
  Clone ID: MRT4577_77348C.1.pep
ATIKSWKCSPGYNQVTNGMIHKLQNNLCTRHMVKDPKRLFTIFRGLRQHTKRGG

SEQ ID NO: 344505 - protein, 36 aa, Zea mays
  Clone ID: MRT4577_7734C.1.pep
MPCFILNSEGQLIGRPVHKQPPSTYMHTTFHYIQST

SEQ ID NO: 344506 - protein, 57 aa, Zea mays
  Clone ID: MRT4577_77350C.1.pep
SLHLCLDFLSRSPQPPTWEVQQVIVPGAHNYPPPPTTNPPTYPYLRPSLQLQTAPTK

SEQ ID NO: 344507 - protein, 61 aa, Zea mays
  unsure (1)..(61): unsure at all Xaa locations
  Clone ID: MRT4577_77351C.1.pep
TNQLXARGGYIITRGAPCTQTHMIFLQKHLLLPFLEAWLLALANFILCLQKQVKEAYCSTT

SEQ ID NO: 344508 - protein, 89 aa, Zea mays
  Clone ID: MRT4577_77352C.1.pep
PVFMCRVMTGYFYLRNIMLQHILGCRGGGDMREFNGNHFWGRNTAKSSRTRGQPWEPTRGHSPPWSLTPRRDCQPPLAPGSWGVITSLT

SEQ ID NO: 344509 - protein, 72 aa, Zea mays
  Clone ID: MRT4577_77353C.1.pep
SSNSLKNSPSLIKTTTSFLSTFFFSFSPKKKPHPYFFNPSFIPSFPPTIYISYPPTFPTLSTFIPINPRPFF

SEQ ID NO: 344510 - protein, 44 aa, Zea mays
  Clone ID: MRT4577_77354C.1.pep
VPDRRYALDRRSRAKRCSVHGAPYASRDRCSRQLSSQRPQILDQ

SEQ ID NO: 344511 - protein, 97 aa, Zea mays
  unsure (1)..(97): unsure at all Xaa locations
  Clone ID: MRT4577_77355C.1.pep
MKTLXGFFQLXGGLFNXFSPLGYGXXHRKELXAEXTPXSFIXFPFHQTLPKVNATFARKATVXPHSWPSRFRNXXKSXWKVIXEXXXVEXKQRPXXP

SEQ ID NO: 344512 - protein, 77 aa, Zea mays
  Clone ID: MRT4577_77356C.1.pep
GSATRLIDIISLPVMLRTIGLAGVFGSYAFVCCLSLVFVYLRVPETKGFPLEVIIEFFNVGAKAQKPEQHEEEENHD

SEQ ID NO: 344513 - protein, 110 aa, Zea mays
  Clone ID: MRT4577_77357C.1.pep
MNSRPIVLVFLLLVLIISSQFEWKQQIGEAEASPEATRRRQQPLVVREDAVKEKIILAQEKNIQQLTELIQSLQVQLLHCRGSNSTAHGASSNQSSASYAEADRHQIIDD

SEQ ID NO: 344514 - protein, 325 aa, Zea mays
  Clone ID: MRT4577_77358C.1.pep
FGTRWTEMVGADGVRRGGVKRMYLHEEGGGDGDSSDPAGGYVHAAALVSPSILYTKDVLIGQSPTPAFDSPPPETVANKAGGGPCWRELLEPGVRRALFCGVMIQILQQLSGINGVMYYTPQILDQAGVSVLLSSLGLSADSASILLSGVTMLMMLPCIVVAMRLMDVAGRRSLLLRTIPVLIVSLAVLVLANVVPMAAKVHALLSTACVVVYFCCFVMGFGPIPNILCAEIFPTRVRGICIAVCSLTFWICDIIVTNSLPVMLRTIGLAGVFGSYAFVCCLSLVFVYLRVPETKGFPLEVIIEFFNVGAKAQKPEQHEEEENHD

SEQ ID NO: 344515 - protein, 528 aa, Zea mays
  Clone ID: MRT4577_77359C.1.pep
MEMAGAAGTEAWLPYVTTVASCAVGVFFLLYFYAPHWRIRDVPGPPALPVVGHLPLLARHGPDVFGLLAKKYGPIFRFHLGRQPLVIVADPELCREVGVRQFKLIPNRSLPAPIAGSPLHQKGLFFTRDERWSAMRNTIISLYQPSHLAGLVPTMQHCIERAADAIPAMVVQENGQVDFSDLSLNLATDIIGQAAFGVDFGLTASGPGCEAAEFIREHVHSTTSLKMDLSAPLSVVLGLVAPALQGPVRHLLSRVPGTADWRVARTNARLRARVDEIVVSRARGRGQHGERRKDFLSAVLDARDRSAALRELLTPDHVSALTYEHLLAGSATTAFTLSSAVYLVAGHPEVEAKLLAEVDAFGPRGAVPTADDLQHRFPYLDQVIKEAMRFYTVSPLIARVTSRQTELGGHTLPKGTWLWMAPGVLSRDAANFEDPGAFRPERFDPASEEQRRRHPCAHIPFGIGPRACVGQRFALQEVKLSMLHLYRRFLFRRSPRMESPPELQFGIVLNFKKGVKLVAVERCAAMPL

SEQ ID NO: 344516 - protein, 57 aa, Zea mays
  Clone ID: MRT4577_7735C.1.pep
RPPPGDVSNQRAFLGNPIVIHVFLTVNPNQAPLALQIVIRWPFPFVSLEGPVDPSFS

SEQ ID NO: 344517 - protein, 460 aa, Zea mays
  unsure (1)..(460): unsure at all Xaa locations
  Clone ID: MRT4577_77360C.1.pep
MEMAGAAGTEAWLPYVTTVASCAVGVFFLLYFYAPHWRVRDVPGPPALPVLGHLPLLARHGPDVFGLLAKKYGPIFRXKATTIRSRLDLAESSALFQXHLVDVFIRIKMGMRFSHGCRFHLGRQPLVIVADPELCREVGVRQFKLIPNRSLPAPIAGSPLHQKGLFFTRXFSLFVFLYTFGTTSRCATXIAISXDERWSAMRNTIISLYQPSHLAGLVPTMQHCIERAADAIPAMVVQENGQVDFSDLSLKLATDIIGQAAFGVDFGLTASGPGPGCEAAEFIREHVHSTTSLKMDLSAPLSVVLGLVAPALQGPVRHLLSRVPGTADWRVARTNARLRARVDEIVVSRTRGRGQHGERRKDFLSAVLDARDRSAALRELLTPDYVSALTYEHLLAGSATTAFTLSSAVYLVAGHPEVEAKLLAEVDAFGPRGAVPTTDDLQHRFPYLDQASDTTMQRHV

SEQ ID NO: 344518 - protein, 55 aa, Zea mays
  Clone ID: MRT4577_77361C.1.pep
YLLGYPNRLQRFSQGRVVNPQFEMKVMGIELQWVYLSSMFKLIKLVLSMDMADCG

SEQ ID NO: 344519 - protein, 297 aa, Zea mays
  unsure (1)..(297): unsure at all Xaa locations
  Clone ID: MRT4577_77362C.1.pep
LWRWPWRTGRSWPRWRPWCGRWSSASSWGGRPAWAPPRASAGRGGPGGSGSPPKAKWGGARRPRRPSARRVPCKGRRAAALTRAPGGANASYTTTCRGRRPGFPGLISSFPPDLAHSINSNFFGRAGMGAGGMWPDPNMGAWGGEEQSSYGGRAASDQQYGEGXEPWEREATREASGLSNWRRREREKPGXQEDVXRSRRTERAMVVRERMTKXDRERDRDGERDRDRDRERDRDRERERERERERHRDDRDRYGDYHRHRDRDSERNEDWDRGRSSGIRGRSREADHSKRRRMTPQ

SEQ ID NO: 344520 - protein, 88 aa, Zea mays
  Clone ID: MRT4577_77363C.1.pep
DSKPMLHLYKSIGVALQPTRKPNNCATDPIKQILKHNCLVADEQLKSPNRTFNSFQSSFYDYLSNFLLYFRLNYQACKVFVESSLFYF

SEQ ID NO: 344521 - protein, 96 aa, Zea mays
  Clone ID: MRT4577_77364C.1.pep
AIYVAICCEPASPSSVSSSLCRCTSSCRRLPPPSYIVTNRPVLFDVPCLARQPPSRCRSFVVPSFGLISSCGAHQKSVVNNEKDPPKMRSYKSNEG

SEQ ID NO: 344522 - protein, 89 aa, Zea mays
  unsure (1)..(89): unsure at all Xaa locations
  Clone ID: MRT4577_77365C.1.pep
SNGVNHSNXLRYPIRWAFLAGTWPYYKGSQQARKRAVRLPSRLGRRPGARADAGFDPARTDRSKLASRGMLNRGGLTPGPIEPPVETCV

SEQ ID NO: 344523 - protein, 476 aa, Zea mays
  unsure (1)..(476): unsure at all Xaa locations
  Clone ID: MRT4577_77366C.1.pep
LEPASRQSLNGGELHYASVDGAGWRLALWRYRPPRNAPVRNHPLMLLSGVGTNAVGFDLSPGASFARHMSSQGFDTWIVEVRGAGLSMREYDDSTPSGSVTFEDVSSGIQPLNSTFEATSIQSSGGYASDCDDLGIVALDEPPLLAELSNFFDRISKLMEEAVVNGNFHEITEKVSVLSEMVESSTIIGPVREESLRLLKNFQDQLDSWERFVATQMDLTSEYNWDFDHYLEEDIPAAVEYIKQHSRAKDGKLLAIGHSMGGILLYAMLSRSGFEGVSSNLAAIVTLASSVDYTTSNSSLKLLLPLAHPAQALNVPAVPLGTLLAAAYPWASGPPYLFSWLNPQISAQDMMHPELLAKLVSNNFCXGTVPAKVVLQLTTAFREGGLCNRNGTFSYKDHLRECQTPVLALAGDKDLICPPDAVYETVKLIPNHKVDYRVFGKPQGPHYAHYDLVGGRLAINEVYPCIIEFLSRHDGY

SEQ ID NO: 344524 - protein, 98 aa, Zea mays
  unsure (1)..(98): unsure at all Xaa locations
  Clone ID: MRT4577_77367C.1.pep
XKSFPFLHSHNHTPLVFRSAFHPAQYGGGGGDVPGSETAKGLLQPDQGVPAQKHWICLKNYFNQKRGPVFGKQGVEHSSFKEETLDVAKRLAAAVESH

SEQ ID NO: 344525 - protein, 90 aa, Zea mays
  Clone ID: MRT4577_77368C.1.pep
YLWYQCMVFIRFCNKIHFPSLYSYDSDLACPFILRYFVEWQEQNKSLCSESCGQVVIQNVIAQYEGYYILFAFVTHQFWTTPHVYFASVV

SEQ ID NO: 344526 - protein, 35 aa, Zea mays
  unsure (1)..(35): unsure at all Xaa locations
  Clone ID: MRT4577_77369C.1.pep
SSXXDWPFLFSHLLMLLVVVEFESARSXQAGSART

SEQ ID NO: 344527 - protein, 67 aa, Zea mays
  unsure (1)..(67): unsure at all Xaa locations
  Clone ID: MRT4577_7736C.1.pep
IEGVLAVLAKLVWTGKQHTYVETENVRCVDQPXLEGGYFLLITNKQSSILVDLDTLRVLSKHVAEYS

SEQ ID NO: 344528 - protein, 55 aa, Zea mays
  Clone ID: MRT4577_77370C.1.pep
NSATRSNRTSAKYHLSLCSLRFINMDLVLITCCIAYNLKRTDLTSVFMEILCSKN

SEQ ID NO: 344529 - protein, 70 aa, Zea mays
  Clone ID: MRT4577_77371C.1.pep
MAAASAAALRGLVVVLAVLSVSTWGAVATINVKDTCSFTAHPNLCEKAMTKLMGQNGVPTSAPAAPETSA

SEQ ID NO: 344530 - protein, 55 aa, Zea mays
  Clone ID: MRT4577_77372C.1.pep
FSLNAGGIQSGWTTGRLELKRTTAFLLTQLELGPRVILDRLMTAGLNMVLHRGRA

SEQ ID NO: 344531 - protein, 179 aa, Zea mays
  unsure (1)..(179): unsure at all Xaa locations
  Clone ID: MRT4577_77373C.1.pep
VSRIFVCSREGVSGRPSRGGAIVIANGGAGSAGTPRPGPPPTRTGCQARMVIKITPCRTYRVAKFFPEHNHPLANPDSVHKLRSHKMRARAHELGAGEMHRRKQGKGVQLGDVGAALQYLEELQVENPSVYYAVGVGPDXNPLWISFWADAKSIIDYRSFGDVVCFDTTYALNIYGRAF

SEQ ID NO: 344532 - protein, 120 aa, Zea mays
  Clone ID: MRT4577_77374C.1.pep
IGYLEAGRAADLAPLVANVSSYLGRPWKRYSRAVFAQTKLEALVHPRGWLEWNDTFALDTLYYAEYMNRGPGADTSARVPWPGYHVLNDSADAANFTALDFIQGDIWLNATSFPYTLGFT

SEQ ID NO: 344533 - protein, 50 aa, Zea mays
  Clone ID: MRT4577_77375C.1.pep
AKKFNPKTPLIRNGLATKVKKSPNQMKKRKNRAKKIRGVKKTKAGDPKKK

SEQ ID NO: 344534 - protein, 222 aa, Zea mays
  Clone ID: MRT4577_77376C.1.pep
MQIFVRSPSGKMICLRVQPDDTLHTVKKNILEKYHLVFEGVQMEDNLTLADYNIQHQSTLDLQEKMQIYVKETLKGLTITLDVDSLDTIDIIKDKIEYNEGFPKGRQCLIFGDEQLEGKYTLADYNICNESTLLLVIHPCTSTSDAMQIFVKMQNGKTTTVRVDSSDTVNSITVKIYEMEGIPPLEQRIIFRGRRLEGRRTLADYGIQKEETLHLMLCLCGW

SEQ ID NO: 344535 - protein, 86 aa, Zea mays
  unsure (1)..(86): unsure at all Xaa locations
  Clone ID: MRT4577_77377C.1.pep
ASSLFSCFREISGPGCSSLGGAMHEIGPFFVNRDNKTLRVDXNFLMAVANMLFLESPAGVGFSYSNRTSDYNNTGDRSTAADASSR

SEQ ID NO: 344536 - protein, 121 aa, Zea mays
  Clone ID: MRT4577_77378C.1.pep
YLNPLYSSTPSSVSAPRIKLVSLTVVFMSERLNLYIDPREHSGLAFHGERGRGSRARAAIWVEVAGIAGRLLPVLRAPCAALERHRAVHVIPPRDRVPASAPQIQYHISHNPHGLCPVSPP

SEQ ID NO: 344537 - protein, 158 aa, Zea mays
  unsure (1)..(158): unsure at all Xaa locations
  Clone ID: MRT4577_77379C.1.pep
MTHSFAMLKHARSGLKGIVVYLLARRYVSAYLAPEDDFXVYTXITTAASNEHIDVAEWCSDLGAXLVMLIVITANGQGMLGVSSAHASAPAIHDXLLAPSDEEEDNDDVDIFGEDTDYEIKVVVDGSAIRRVAGYYKQSEKLSPLRDDKSCTDDTVMA

SEQ ID NO: 344538 - protein, 67 aa, Zea mays
  Clone ID: MRT4577_7737C.1.pep
MQQYKPTTSLRPLYGPLLRYSELAHPFGTPGAPMAISVLLGWLNSDPLAFFKRAPELAKSWQALLGL

SEQ ID NO: 344539 - protein, 143 aa, Zea mays
  Clone ID: MRT4577_77380C.1.pep
PLGACFTCPWLGFARSPSPSGWACRACAGWGCPCPAPRGLPAWVRCRFTSWCLWSRFCLRAPCARSLVPPGVHRGPGCVPSPVLGRVHWFPGSACPRPSSLVCSVLSGASLVLRAPRPSCGFFVCECQHGRPCVCGGGSLLLA

SEQ ID NO: 344540 - protein, 113 aa, Zea mays
  unsure (1)..(113): unsure at all Xaa locations
  Clone ID: MRT4577_77381C.1.pep
PGYDGGPTMVVIALKSPHIVVVVVHISKPRIEACNSDTLPIYEPGPDDVVFFCPPTNLFFSTDDEKHVPEAGIIFVSENTPTKTRGLVAVKAADLTYXERAARMIADVSKPDK

SEQ ID NO: 344541 - protein, 98 aa, Zea mays
  Clone ID: MRT4577_77382C.1.pep
CKLIVTCNHFTIKNLFPLQKKKKKKKKKKKKKKKKKTVTDGFYKPPPFYISWLVSERFSLPCHVMCESFFSWLALSEHGCSFASLDFGSSLGVIFVTL

SEQ ID NO: 344542 - protein, 68 aa, Zea mays
  Clone ID: MRT4577_77383C.1.pep
KALEVPLVLETGPVKKPRVGFVSHIWVFQIKVAPCQIRALLLGEKSWGGFPIRIVGPPLFWHKHGFFW

SEQ ID NO: 344543 - protein, 193 aa, Zea mays
  Clone ID: MRT4577_77384C.1.pep
LRSSRPLPVPHTRPHLLLFEMFLRIASSPAAVAAASQLSAPGPAHGSARLPPLAKGSSTATACRAAGKGNKEEVLLSGVMFQPFEELKGELSLVPQAEGQSLARQKFVDECEAAINEQINVEYNASYAYHSLYAYFDRDNVALKGFAKFKESSDEEREHAEMLMEYQNRRGGRVRLQSTVTPLTEFDHSEKGD

SEQ ID NO: 344544 - protein, 99 aa, Zea mays
  Clone ID: MRT4577_77385C.1.pep
NTKAPQLYIHKSITIIISFTTRSFTNIIHNYKAHNYITNVSYHSSYCSKAHNYITLATPELISHKSKTCEIYVEDFANCPSSTGTAIVASISSEHQYHQ

SEQ ID NO: 344545 - protein, 146 aa, Zea mays
  unsure (1)..(146): unsure at all Xaa locations
  Clone ID: MRT4577_77386C.1.pep
QRRKSCLLETFRRFDDRVRKRWFGQRNPSRIQIEKQFWEIVEGKAGELEXMYGSDLDISIYGSGFPRLGDPVPSSMDLETWQKYCSSPWXLNNFPNLPGSVLRTVKDKIPGVXVRXLFLLPXNYLHWYANEDHCFYXSXNYLHWYA

SEQ ID NO: 344546 - protein, 126 aa, Zea mays
  unsure (1)..(126): unsure at all Xaa locations
  Clone ID: MRT4577_77387C.1.pep
EAIAEGLLLVLYMYEPYWKERHVPCPDPLPFDGHXIHLLTRHGPDVLXQLTNKHGPMFKGHIGRHPLIIASNAXICKAAGIKTFKSTPNRIXPSSISKLPIHLKRLXYRQGIKXSVVRNIMANIYH

SEQ ID NO: 344547 - protein, 35 aa, Zea mays
  Clone ID: MRT4577_77388C.1.pep
ATHSQRAHVRIGEIVHALHASSPDASSMIPMYDPG

SEQ ID NO: 344548 - protein, 55 aa, Zea mays
  Clone ID: MRT4577_77389C.1.pep
KWLPNYYQRGTATSSKKLSSKRSASRARRTKRRTTTISWTPGERNRGARHTHSSK

SEQ ID NO: 344549 - protein, 53 aa, Zea mays
  Clone ID: MRT4577_7738C.1.pep
VKKPFFGGFSLHKVFNCTKPFFFPPVFGKAFSIGKKKKLNLKTMGPYFKLLTI

SEQ ID NO: 344550 - protein, 48 aa, Zea mays
  Clone ID: MRT4577_77390C.1.pep
MSAHGTGTKGLDKVISKRHRKVLRDNIQSITKPAIRKLPKRGCKKRIS

SEQ ID NO: 344551 - protein, 101 aa, Zea mays
  unsure (1)..(101): unsure at all Xaa locations
  Clone ID: MRT4577_77391C.1.pep
MATEIGAVLMLVGLSACDGNATILPSXCDKLTIGFPLTPYLSLKIASVCENPALQRYRLQQGIRVRHIALXPLVQQLPSLSLVQSLVQTIRAQQLEQLVLP

SEQ ID NO: 344552 - protein, 76 aa, Zea mays
  unsure (1)..(76): unsure at all Xaa locations
  Clone ID: MRT4577_77392C.1.pep
GDRFDPLGLSRDPKAFGALXVNELKXNGRLAMLSMFVIFDQAIVTGKGPLANLAXHIADPVYNNAWAYSSNFVHSK

SEQ ID NO: 344553 - protein, 137 aa, Zea mays
  Clone ID: MRT4577_77393C.1.pep
DDLSFKHESQRVVTSNPSCHPLLESFLLPSLQHAGNVTILSKIGQQIKACRQRILIHVFNGFVNTLVWVRATVGKAHSFRQGLHEDGDALPSPFPFLLLLLLLLLVPALRAYWVRTIRLCEGVEIVLRRAPFRSAGS

SEQ ID NO: 344554 - protein, 102 aa, Zea mays
  Clone ID: MRT4577_77394C.1.pep
SEKVFHLYRFHMSTRGRCSMRIRWSGHEFFPKPMVPLPFVPGVIVMVRTALPNVFSSLCILPKVLFCALWPQNVPLVLLRCRRQTISMWNTFVVPLDVYAPP

SEQ ID NO: 344555 - protein, 301 aa, Zea mays
  Clone ID: MRT4577_77395C.1.pep
MVGNSVMWQHLEVEDLLLYHKEKILLYYKEKIHESGRAFVLREVHHEECARRLNEKYGANFTWKQTYNKYHKLKGEWKVIMEAKSARGAGFDDVQKKITYDEIEVVKMKAKGDKKAKYYNVPIPLYDEMEFVFTGKHATGEFSVIEAPFDRSGRQEDDAVGNVNLDQEPADLNGDSSQHDFDTLPESDSPNPVGSKRRHEEKEKEKEKEKEKEKEWKWARQGVPIFMQALSEAVSFTHGGTDPYEGIYKAIEDMDEYPLPARLDLLTYLAQNRHIASMLKGRQEETFKQWVARWVAGHYPL

SEQ ID NO: 344556 - protein, 74 aa, Zea mays
  Clone ID: MRT4577_77396C.1.pep
AHAHVPALPRLVALDVCRQRVLILQPQHGRIIAEAADDMALLPRLFHGQSTPVSPTTTSTTYRLPSASSQAEGG

SEQ ID NO: 344557 - protein, 81 aa, Zea mays
  unsure (1)..(81): unsure at all Xaa locations
  Clone ID: MRT4577_77397C.1.pep
LFHLILNFPFINIFTFYFFLFYLIYFXFKFFFYLFFNLYFFYIVLFLVFIIYFSCFLIIYFIIFLFIFFILLYIFFIFFFF

SEQ ID NO: 344558 - protein, 109 aa, Zea mays
  Clone ID: MRT4577_77398C.1.pep
NTGYRPALQHKTTKGGQDTKSQIWSLLIIMSNSPLACTCRTVLSKSSSSPGSTFSSCGSDSPALDGGWGTVCASCTNLKISSTLCDKKAGAADELLLLLLLLSPWRLKK

SEQ ID NO: 344559 - protein, 86 aa, Zea mays
  Clone ID: MRT4577_77399C.1.pep
CCHAFKKGEPPLRKMPYALCRAYKTPVLYGKMYRFMPHPVQSHWGIEEIRRTREALALLPFAVVCRSFNVCRGPKKRWNLYFGRPG

SEQ ID NO: 344560 - protein, 49 aa, Zea mays
  Clone ID: MRT4577_7739C.1.pep
FKSGRPLVCSFKKKLLEAPSHISLEGHKDNVGPGFFPLNKWGMKTLSPL

SEQ ID NO: 344561 - protein, 63 aa, Zea mays
  Clone ID: MRT4577_773C.1.pep
CGGPCRIFGQFFLVVENVPHIVVFPVSFSSLLQFVSSRCIFAVSYFFMPVRILSYYLTLSKKK

SEQ ID NO: 344562 - protein, 55 aa, Zea mays
  Clone ID: MRT4577_77400C.1.pep
VYLEGTLLKPIMVTPGHACTQKFSNEEIAMATVTALRRTVPPAVPGVTFLSGGQS

SEQ ID NO: 344563 - protein, 60 aa, Zea mays
  Clone ID: MRT4577_77401C.1.pep
SKQLYFSWCLMADNHGVFISGTVLVWIQQNVSWSFGFGISSICLVIAEVALLDGTPLYRV

SEQ ID NO: 344564 - protein, 284 aa, Zea mays
  Clone ID: MRT4577_77403C.1.pep
GWYPPGHGDVFPSLNNSGKLDILLAQGKEYVFVANSDNLGAIVDIKILNHLINNQNEYCMEVTPKTLADVKGGTLISYEGRVQLLEIAQVPDEHVNEFKSIEKFKIFNTNNLWVNLKAIKRLVEAEALKMEIIPNPKEVDGVKVLQLETAAGAAIRFFDKAIGINVPRSRFLPVKATSDLLLVQSDLYTLVDGFVIRNPARANPANPSIELGPEFKKVANFLARFKSIPSIVELDNLKVSGDVWFGSGITLKGKVTITAKSGVKLEIPDGAVLENKDVNGPEDL

SEQ ID NO: 344565 - protein, 62 aa, Zea mays
  Clone ID: MRT4577_77405C.1.pep
KLPLHQLQGVSCEKIKPPCCLPPGRTPPPHGSPGLPSPFPLVSPSLPHSHSTTDRKRETVYA

SEQ ID NO: 344566 - protein, 111 aa, Zea mays
  Clone ID: MRT4577_77407C.1.pep
VQHRHKAQSVHPITRWCTFACRNALDLSLSPRFPSYRVHRASPVPLFSCMIFSLDMRFAGRAYLRSGNVDPVLCTVISVNDRPSNRIYGLFGWAGAVNTVSVGCNVSNQLL

SEQ ID NO: 344567 - protein, 70 aa, Zea mays
  Clone ID: MRT4577_77408C.1.pep
VCRPTTFHACGDQQKSEMPYCTSSIQKAPLPIDNEGPATSSKLSVVLGNGPPMQEQKPGFTRFVFPTLMS

SEQ ID NO: 344568 - protein, 126 aa, Zea mays
  Clone ID: MRT4577_77409C.1.pep
LLPHQEKAFVQRLLLEPVPDQTKAIHARPWLRPQQVPVFYQNFRCGGHPVSRPVPPALVRAAARNSGHFHSICHCHLFWPRSVHSFLFFFVVQAHLVGIMIGASILCGGVCKKKKSILNLGLPLAP

SEQ ID NO: 344569 - protein, 207 aa, Zea mays
  unsure (1)..(207): unsure at all Xaa locations
  Clone ID: MRT4577_7740C.1.pep
PGPSPSSRSGFRGRLSPNPRSVSAACTAPCALPACGDGNKRSRRRAATLAWRGLLPPSRVIPXDFSKPPVMFLHIATVMLDPKALRYSLDLFVKRYXHSLISPLCVGVXARGMIYXPPIPLTIDGKSVPFLIPKKWATXPIFWEYSMTYSPARINMPGVATHLNVWPFVIHDLXLTKARTLCTHVXNLSEHVRAQVIECPLVTDWCE

SEQ ID NO: 344570 - protein, 107 aa, Zea mays
  Clone ID: MRT4577_77411C.1.pep
GEVDHERMPWTTRLLPVLKVVEVQKRKDMMELLLQSVRDLMKDAAAPPKEELGDIDNSKQLTILYDANVLLFDDFTCEWGHDLMQNGQQGDASGTERCVDSNFCSCC

SEQ ID NO: 344571 - protein, 138 aa, Zea mays
  unsure (1)..(138): unsure at all Xaa locations
  Clone ID: MRT4577_77412C.1.pep
VRXEAAPARGERAGADGRFERXQAQNLQAQHVGXVRDAVLLLGLLVGPSCPARASRXXRHSPFFRXSRXXIGAASGGGFRGRRXSVXXSYRXVSRDGRKRKGERRVEVSRSPPGRPPAAVASSCASLRVSPHPXLSVS

SEQ ID NO: 344572 - protein, 48 aa, Zea mays
  Clone ID: MRT4577_77413C.1.pep
IHFIARKNLCPTQHRLLVFHNRITSLGMGQNKGSFRALNRTISRVCGF

SEQ ID NO: 344573 - protein, 340 aa, Zea mays
  unsure (1)..(340): unsure at all Xaa locations
  Clone ID: MRT4577_77414C.1.pep
QVLAATQMPEEPAGWFQXYSHKSIDNIVILSGDQLYRMNYMELVQKHVEDDADITISCAPVDTSPFLENRLVKIDHTGRVLQFFEKPKGADLNSMRVETNFLSYAIDDAQKYPYLASMGIFLEDIXPIDALLDLLKSKYIQLHDFGSEILPRAVLDHSVQACIFTGYWEDVGTIKSFFDANLALTEQPSKFDFYDPKTPFFTAPRCLPPTQLDKCKMKDAFISDGCLLRECNIEHSVIGVCSRVSSGCELKDSVMMGADTYETEEEASKLLLAGKVPVGIGRNTKIRNCIIDMNARIGKNVVITNSKGIQEADHPEEGYYIRSGIVVILKNATINDGSVI

SEQ ID NO: 344574 - protein, 89 aa, Zea mays
  unsure (1)..(89): unsure at all Xaa locations
  Clone ID: MRT4577_77415C.1.pep
SHAIQCIAVNLGLESPDLISQLXGEHRIESSAAVIDVITGTVGDMQKLXLQESFKVKQXLILYASQAAQMIVRVDEIIACAQRRTRDRM

SEQ ID NO: 344575 - protein, 76 aa, Zea mays
  Clone ID: MRT4577_77416C.1.pep
RGTGRVVPPAPLTEEEASKLLLAGKVPVGIGRNTKIRNCIIDMNARIGKNVVITNSKGIQEADHPEEGYYIRSGIV

SEQ ID NO: 344576 - protein, 170 aa, Zea mays
  unsure (1)..(170): unsure at all Xaa locations
  Clone ID: MRT4577_77418C.1.pep
GPSVQACIFTGYWEDVGTIKSFFDANLALTEQPSKFDFYDPKTPFFTAPRCLPPTQLDKCKMKYAFISDGCLLRECNIEHSVIGVCSRVSSGCELKDSVMMGADTYETEEEASKLLLAGKVPVGIGRNTKIRNCIIDMNARXKGIQEGYYIRSGIVVILKNATINDGSVI

SEQ ID NO: 344577 - protein, 117 aa, Zea mays
  unsure (1)..(117): unsure at all Xaa locations
  Clone ID: MRT4577_77419C.1.pep
VGRVVSIYADLKNNRLTNYTFRFEQMLSGGGDTGVYLYYAHAXRICSIILESTKNIEELXRCKKXISVEHPDERELKLVLIQFAXQLERYAQSLLPNVVCEYLYNLYGMGTHSIPTH

SEQ ID NO: 344578 - protein, 247 aa, Zea mays
  Clone ID: MRT4577_7741C.1.pep
MAAGQFAAAGVLTGLLALATLASCNTDGDILYKQRLAWEDPNNVLQSWDPTLANPCTWFHVTCNLNNSVVRVDLGKAGISGPLLPDLGALESLQYMELFGNSLNGSIPATLGNLTDLISLDLWDNLLTGPIPTTLGSISTLRYLRLYENNLTGPIPPSFGNLTSLLELKLHRNSLSGSIPASLGDIKSLQFLKLNENMLTGTVPLEVLSLVVVGNLTELNIARNNLDGTVRSSGLRVTAVIQDMRTA

SEQ ID NO: 344579 - protein, 68 aa, Zea mays
  unsure (1)..(68): unsure at all Xaa locations
  Clone ID: MRT4577_77420C.1.pep
AGSRCESQHRQYVDEVPARPNFLHPTPTTAPLSLWASTSHXLRAGPVLGRRGGGGGGRPRALRAGRRS

SEQ ID NO: 344580 - protein, 127 aa, Zea mays
  Clone ID: MRT4577_77421C.1.pep
GGVGPLGDHAWVVGEGESAGARQGEPRSMRARRGIAGARAIAGARAVWVIAGAFHRAWASITVEGPRGGEVCDNGGMRVSFHRQGEPGRGHGVPSVGAISGRLSRALKSWGGDAAVAGRRRQAGAGA

SEQ ID NO: 344581 - protein, 101 aa, Zea mays
  Clone ID: MRT4577_77422C.1.pep
VLAFSIGYLFVCASAQARPSSMMGSIALSSLVGAPFLLTGCRFFVPEALLLPAPYVAALTTFYAVPLIDPGIPPLVHGFLSAGVVDLRVVCSCLVSLRRCI

SEQ ID NO: 344582 - protein, 29 aa, Zea mays
  Clone ID: MRT4577_77423C.1.pep
CLVTCRGIKTEKAIPECWVTVIHVASNLL

SEQ ID NO: 344583 - protein, 85 aa, Zea mays
  Clone ID: MRT4577_77424C.1.pep
MSKRGRGGSAGNKFRMSLGLPVAVTVNCADNTGAKNLYIISVKGIKGRLNRLPSACVGDMVMATVKKGKPDLRKKVLPAVIVRQR

SEQ ID NO: 344584 - protein, 59 aa, Zea mays
  unsure (1)..(59): unsure at all Xaa locations
  Clone ID: MRT4577_77425C.1.pep
SLVMHITYTYIYYLFXSISSSHSATSISLSLIARLTLLHIIKLLRTKIRLVYSGVAPPP

SEQ ID NO: 344585 - protein, 44 aa, Zea mays
  unsure (1)..(44): unsure at all Xaa locations
  Clone ID: MRT4577_77426C.1.pep
LSIIIMNKCSPLFWDLSLLFSTRGLHLFIITTDNLCTWKXLKDA

SEQ ID NO: 344586 - protein, 30 aa, Zea mays
  Clone ID: MRT4577_77427C.1.pep
LAAEALFVCSHPTCEEPQAASRRCLAPFIT

SEQ ID NO: 344587 - protein, 54 aa, Zea mays
  unsure (1)..(54): unsure at all Xaa locations
  Clone ID: MRT4577_77428C.1.pep
EAFEGACSLRAAISVLTVPGQGMGRXDTXRLGRLRTLGNICVFGELLKQKVVSV

SEQ ID NO: 344588 - protein, 42 aa, Zea mays
  Clone ID: MRT4577_77429C.1.pep
LIAGTPRALGDGDRGAGHDGGPARRRSRRPRLQPLDLVRWTG

SEQ ID NO: 344589 - protein, 40 aa, Zea mays
  Clone ID: MRT4577_7742C.1.pep
LQPKKVTVLISLLYIHGLKPIVKSFKATLYPSNERNCKKF

SEQ ID NO: 344590 - protein, 84 aa, Zea mays
  Clone ID: MRT4577_77430C.1.pep
VQCVQHRSRSRPTPSSLCDSITAYASPKNDRSRFRCMLTSRIISRGSHVTSLLTSSLEETTNASTRKYSSHCTSAQYAEKKPVD

SEQ ID NO: 344591 - protein, 35 aa, Zea mays
  unsure (1)..(35): unsure at all Xaa locations
  Clone ID: MRT4577_77431C.1.pep
SIVVMSELPCASFTVQNSRAVXPILRYEGLVSSEY

SEQ ID NO: 344592 - protein, 131 aa, Zea mays
  unsure (1)..(131): unsure at all Xaa locations
  Clone ID: MRT4577_77432C.1.pep
AGIFRXGQTREHAAXAGTLGVKQMICCCAXMGATTPKCSKGRXDEIVKEVSSYLMKVGSXPGMMRWVAVSGVRGGIVVERCTILGWCKGPTLLGALGLVIVPWRPSGXPLRLPLRGGRSIGGVAAGPGGRV

SEQ ID NO: 344593 - protein, 154 aa, Zea mays
  Clone ID: MRT4577_77433C.1.pep
GRVGKFGSSFRFGLEAGSKPEILLAMSCLCKGSPDAFLVCNGFKDAEYISLALLGRKLALNTVIVLEQEEELDLVIELSQKMNVRPVIGLRAKLRTKHSGHFGSTSGEKGKFGLTTTQIVRVVRKLRQSGMLDCLQLLHFHIGSQIPSTSLLSD

SEQ ID NO: 344594 - protein, 558 aa, Zea mays
  Clone ID: MRT4577_77434C.1.pep
MAPLLLASRTACRPGLTSRHAHDNGRHGLSSSPPGSRSKRSRSLSLRPRAEKTTTGGGGHVVSEKLSPWQIPRREWFPPSFIFGAATSAYQIEGAWNEGGKGPSTWDDFCHNHPEWIADGSSGDVGANSYYLYREDVRLLKEMGMDAYRFSISWPRILPKGTLEGGINHKGIEYYKKLINLLKENGIEPYVTLFHWDTPQALMDKYGGFLDKSIVKDYTDFAKVCFDNFGDKVKNWFTFNEPETFCTFSHGTGQCAPGRCSPGIITPTGSTSCANPIGNSLTEPYIVGHNLLRAHAEVVDLYNKHYKIDYKGENGRIGIVFDVMGRVPFEKSAFIDQQAEERSWDINLGWFLEPVVRGDYPFSMRSLVRDRLPFFTNEEREKLVGSYDMLGLNYYTSRFSKHIDITQHNTLRLNTDDAYASQETKGPDGEPIGPPMGNWIYLYPQGLKDLLKIMKEKYGNPPMYITENGMAEVDLGHNLNDQKRIDYLQSHLAALQDSVESGANVKGYFLWSLLDNFEWFCGYTQPYGIVYVDRNDGCKRYMKQSAKWYKSFIAANDK

SEQ ID NO: 344595 - protein, 122 aa, Zea mays
  unsure (1)..(122): unsure at all Xaa locations
  Clone ID: MRT4577_77435C.1.pep
APLFWLPLCARLVXPLPSFXXPFLLXSWLRLGRFXLRLRVVVLXLPXPLXVPLAPSSXLCXCSCXPPPCRXGFPXLLPXXGXPLLVFSSXXRALLLVLWWGFGGXRGAPGGGSAGXXGGPAR

SEQ ID NO: 344596 - protein, 568 aa, Zea mays
  unsure (1)..(568): unsure at all Xaa locations
  Clone ID: MRT4577_77436C.1.pep
MAPLLLASRTACHPGLTSSRHDNGRHGLSSSPGSSSKRSRSLSFIPRAEKTTTGGEGHVVSEKLSPWQIPRREWFPPSFIFGAATSAYQIEGAWNEGGKGPSTWDDFCHKYPEWIADGSSGDVGANSYYLYREDVRLLKEMGMDAYRSSIAWSRILPKGTLEGGINHKGIEYYKRLINLLKENGIEPYVTLFHWDTPQALVDSYGGFLDDRIVKDYTDFAKVCFVHFGDVVKNWFTFNEPQTFSSFSYGTGIFAPGRCSPGQKCANPTGNSLTEPYIVAHNLLRAHAETVHESNRHYRGNKDAQIGIAFDVMGRVPYDNMFLDDQAQERSIDYNLGWFMEPVVRGDYPFSMRSLIKDRLPYFTDDEKEKLVGSYDIMGINYYTSRFSKHIDISPKYSPVLNTDDAYAAQETKGPDGNTIGPSMGNPWIYMYPNGLKDILMFMKNKYGNPPIYITENGIGDIDSKEKPLPVKDALNDHARLDYLQRHISVLKDAIDLGADVRGHFTWSLLDNFEWXAGYTERYGIVYVDRSNGCKRRMKRSAKWLKKFNRAAHSKKKDKTGIIPPPSAY

SEQ ID NO: 344597 - protein, 442 aa, Zea mays
  Clone ID: MRT4577_77437C.1.pep
VPEWILDKSNGDVAADSYHMYPEDVRLLKEIGMDAYRFSISWSRILPNGTLEGGINPDGIKYYKNLINLLLENGIEPFVTIFHWDTPQALMDKYGGFLDKSIVKDYTDFAKVCFDNFGDKVKNWFTFNEPETFCTFSHGTGQCAPGRCSPGIITPTGSTSCANPIGNSLTEPYIVGHNLLRAHAEAVDLYNKYYKGENGRIGIVFDVMGRVPFEKTAFIDQQAEERSWDINLGWFLEPVVRGDYPFSMRSLVRDRLPFFTDEEREKLVGSYDMLGLNYYTSRFSKHIDITQHNTLRLNTDDAYASQETKGPDGEPIGPPMGNWIYLYPQGLKDLLKIMKEKYGNPPMYITENGMAEVDLGNNLNDQKRIDYLQSHLAALQESVQSGANVKGYFLWSLLDNFEWFCGYTQPYGIVYVDRNDGCKRYMKQSAKWYKRFIAANDK

SEQ ID NO: 344598 - protein, 133 aa, Zea mays
  Clone ID: MRT4577_77438C.1.pep
VRSEPSFRISITIPRRDIRISHGVHRYHISSTFLSLNSSRSPNWRDEWTRGALLGVGRSTSWQRRFFITINTFSVGRPASSRTGELSAASRSERKRRWLPFLLSLVALAWVMNLAVWSPTQHSAPKRPPPPRP

SEQ ID NO: 344599 - protein, 63 aa, Zea mays
  Clone ID: MRT4577_77439C.1.pep
LNFPRLYLEYPFFFLINEITSSVTVLFEKMSLNQEHTSFWDKGLTPTQVITASPAICIRIQMG

SEQ ID NO: 344600 - protein, 92 aa, Zea mays
  unsure (1)..(92): unsure at all Xaa locations
  Clone ID: MRT4577_7743C.1.pep
MGSTAPASLLPVSPGSRENLVLILGYRSXYTHLITPPVPXLXFRGGGXSFTAPLXSXKDLQPRPVILSRGPHSVHAPGAPPFPEGFLGFPAA

SEQ ID NO: 344601 - protein, 75 aa, Zea mays
  Clone ID: MRT4577_77440C.1.pep
VNLDFLNLPQKPLQFWGKRIKKQEIQGAPHEPVSPGGLVRSVTAPPDKAPVVGHYFARIGSVQLIGKVDRISFLP

SEQ ID NO: 344602 - protein, 58 aa, Zea mays
  Clone ID: MRT4577_77441C.1.pep
TSIPSSSPALCVHSPLCNKGPFRDSFYKNLHYSMHVTNVRFQHLFLFHELHCLLTLLL

SEQ ID NO: 344603 - protein, 101 aa, Zea mays
  Clone ID: MRT4577_77442C.1.pep
PTRGQTTRPGETLNKEGGTPRKQYRSRTQKPTAPPNNTKGPPPGDAQRTPDRRSTLAYINSEQHVHSPPRRHPNAKATTATNMNQDKATATTKLEPTPTEK

SEQ ID NO: 344604 - protein, 113 aa, Zea mays
  unsure (1)..(113): unsure at all Xaa locations
  Clone ID: MRT4577_77443C.1.pep
VGRAVLFRRWTQMASESSRRSGRFNFNWEAERPRTPRHXLSFPWLSSSLPSSNPPRRSGGAAESRRPAGGRGSREDGAGKVGWERGGGAAAKGDGEGARAAAGWGEWSGAGSE

SEQ ID NO: 344605 - protein, 162 aa, Zea mays
  unsure (1)..(162): unsure at all Xaa locations
  Clone ID: MRT4577_77444C.1.pep
TTAEREPPERGGGRHQPPPAATRDAPRRNRRTTHRNTPGPRSTDPAANTXTKTGAXERGGGHGGKNNKXEDKTADXEXEKXXGNXGGKEEARKTNQTEXEXKNXEXATSXKEXGGGETNHXAHRRKGETXRESNKRXEXKQARQQGKKPGKKDKDEGRGKGG

SEQ ID NO: 344606 - protein, 63 aa, Zea mays
  Clone ID: MRT4577_77445C.1.pep
VKPIKALKVTPNLHKLRSSKSFVTALLPKERVRNVSLLSKRHPRHESIVNLCPLFLHVFTILF

SEQ ID NO: 344607 - protein, 318 aa, Zea mays
  Clone ID: MRT4577_77446C.1.pep
MHPRCPVLDFPLPMPEMKAATALGSWLLPAAPAIRPTLVNLRSRGFCSHGYFPSASRISCSSELSDSDRGLAKEMESEFSDEICAENGAEEDDETEDLIWSKEEIDAISALFDRPMRQKPLKPRNPARQRALPLPLPHKTRLPVAPAPKQHVRLAARAGLSSRACFSDQVRKKPEFLLGIAREIAALPPEHDVSTVLDRWARFLRKGSLSLTIRELGHMGLPERALQTLCWAQRQKAVPLFPDDRVLASAIEVLARFERLRVESALEQCVPTASRAVLEAMASGFIRAGKVDRVRKLLELARINNRTLHPSIYVKLML

SEQ ID NO: 344608 - protein, 79 aa, Zea mays
  Clone ID: MRT4577_77447C.1.pep
GMLMALAFILMEKFQGCVQRPPAGPSCFALWNTLEPHGRAPTLARDSVPALWLMNGSAFVGCAVHPVLPPSRYFIIYQL

SEQ ID NO: 344609 - protein, 109 aa, Zea mays
  unsure (1)..(109): unsure at all Xaa locations
  Clone ID: MRT4577_77448C.1.pep
MPLFPRQAPPTTAPPQPRRPSSPSAAPLRSPRAAGWARRTPRRARGGRPRGRXPFTPAQYQELEQQALIYKYLVAGVPVPPDLVVPIRRGLDSLATRFYGQPTRTTLTE

SEQ ID NO: 344610 - protein, 190 aa, Zea mays
  Clone ID: MRT4577_77449C.1.pep
MGGSSQLHMDSAASYSYAALGGGTAKDLRYNVYGIRSLADEHNQLIAEAIDSSIESQWRLPSSSFPLSSYPQLGALGDLGGQNSTVSSLPKMERQQPPSSFLGNDTGAGMAMGSASAKQEGQTLRHFFDEWPKARDSWPGLSDETASLASFPPATQLSMSIPMASSDFSVASSQSPNGESRTFLLATDRR

SEQ ID NO: 344611 - protein, 173 aa, Zea mays
  Clone ID: MRT4577_7744C.1.pep
LRPVRAPGSNWSGRFQANFPTRARGRRGRARGASLGRPGPVVRSPGDPVASRGPWPGPAAQANLVAHHPSARGRPRARGETLAASYAARGEGRRERASETRSPARRARPAVIAEVQAIELSGECDPRPSLDRLPAERSRGRPRPAPGPEPRPRPGARPDAWVDPGIPDRNRRR

SEQ ID NO: 344612 - protein, 75 aa, Zea mays
  Clone ID: MRT4577_77450C.1.pep
IFCGGFCPEGPKGPLVAFFSGYPPRPKANVIWGPKTGRSQGFGFFFFRNPPDGQRAKKDLKGGVSRSQVLNYGPL

SEQ ID NO: 344613 - protein, 92 aa, Zea mays
  Clone ID: MRT4577_77451C.1.pep
RKKKIGGVPKECSKAQTSNWQCKHLKVGAHSTVFFSKPGQGPLLRKRAFNQFPFMGTKNRRELKTFSNLNSRTFKGVPTLGGQKNFYPLVHS

SEQ ID NO: 344614 - protein, 55 aa, Zea mays
  Clone ID: MRT4577_77452C.1.pep
NFCHFYRRAVSTMNRGTVEAIRSFMGSEAGYQFQVAKPDLGSVSGNMESCEVISF

SEQ ID NO: 344615 - protein, 156 aa, Zea mays
  unsure (1)..(156): unsure at all Xaa locations
  Clone ID: MRT4577_77453C.1.pep
HGDTRENKTPDTETPIEGKDAVIXTSPSDHSLAIDTLCNELLEQGGVAQLGVIFFPHPQNPLPRARLLHTTNLTPLFAAPEVVSRLXMSMPVCRTVTENLHRTNNIHDHMRLPXPTVNTVLLDQAVFLHLDAVLFRMVRQKLVLNVSADYLDDDDC

SEQ ID NO: 344616 - protein, 116 aa, Zea mays
  Clone ID: MRT4577_77454C.1.pep
FKQRGPEGNDSNEGCPPDESSNAYLNWELLPIFLHSVMLIVCILAMRLHTSGYDDLLRMMLASSSWNLTTRRTRRLHGAKMSVIGMIQTPNPNISIAALWRALNFCGFGFLHRTTL

SEQ ID NO: 344617 - protein, 112 aa, Zea mays
  Clone ID: MRT4577_77455C.1.pep
NCIWEIKARKFSLQCSDMILVGSARILPAHSHRHNNKTKRRKRCIIPLQPYSSSVEHSSSRAARRVKHICRCQGLQEDPMIHHPVSAPPTRFTGNETLTASKEALTGVSDGD

SEQ ID NO: 344618 - protein, 46 aa, Zea mays
  Clone ID: MRT4577_77456C.1.pep
AQILCSFQGSKRGPSTGKRHTLRGNLDSGKTLIWAETEIHVWAKID

SEQ ID NO: 344619 - protein, 100 aa, Zea mays
  Clone ID: MRT4577_77457C.1.pep
VSFVLSIDVVRVQRYIAADKSNKYTTIFELKRGHFSQMFINPCIYMKWEDSPFPQTVELEHSRCKWQRNLVHVGGETPGHYQSYNNFTFSRTGLPTMMSP

SEQ ID NO: 344620 - protein, 117 aa, Zea mays
  Clone ID: MRT4577_77458C.1.pep
LVSMECGSNKAAGGCDGADASPAGASCDDGEGPPPAGGYLHRDWPGHHREGEGTSSDRHPLWRNLCLPTMLYGSHGLPMHWPNRHDEISGLSITATRAGRKTRTERRCSNYWMRMVI

SEQ ID NO: 344621 - protein, 73 aa, Zea mays
  unsure (1)..(73): unsure at all Xaa locations
  Clone ID: MRT4577_77459C.1.pep
KSRVENLNKXFFNEEGVCQTLVCTDLAVRGLNLDVDHVIMFNFPSNSECVGVCFNSLHCDFYAVLGVILGFQD

SEQ ID NO: 344622 - protein, 97 aa, Zea mays
  unsure (1)..(97): unsure at all Xaa locations
  Clone ID: MRT4577_7745C.1.pep
KCGITPQPPRVVFSGSLGKVQCYVCIISNSPSVVWVFSRIGQXFVLMYAERALVLWFVGEGMEEGLFCYDHEDLAVLEKDXRQVGLHVPEGTEEARL

SEQ ID NO: 344623 - protein, 74 aa, Zea mays
  unsure (1)..(74): unsure at all Xaa locations
  Clone ID: MRT4577_77460C.1.pep
YNKMTNYKRMRDDFNRSMIETGLTDGQSKRKRESVCGWVGLCCVGLVKQHHIIXPLLLSASSQVSLHMELCCSP

SEQ ID NO: 344624 - protein, 326 aa, Zea mays
  Clone ID: MRT4577_77461C.1.pep
MAHYQQGRRQQVDEYGNPVPGGHGVQGQQLGEAAGGYGVAGTGSYGGQQQAGYGPTGTGTHDAGGYGGSGHPGYGATGTGVHDAGGPGAYGAVTGTRAHGTHGGVTGIQDGAAGLTGGGLHGATGMGTTTGTGAHGATGMLDTGVLGGGGHAATGMPAGHGTRPGATGVAGTGGAFPHAAEHKTGGGILRRSGSSSSSSSSSSEDDGMGGRRKKGLKEKIKEKMPGGHREGQGQATATGAYGGTGYVAGPTTGGPHEKKGVVEKIKEKIPGGHKDYDQHQHTTAATGGGGGYGGTTDTTYGTTTTEGTHEKKGFMDKIKEKLPGQH

SEQ ID NO: 344625 - protein, 109 aa, Zea mays
  unsure (1)..(109): unsure at all Xaa locations
  Clone ID: MRT4577_77462C.1.pep
AVVTTQSTFFFFFFFFWFFFFFFFFFFFFFFFFFSGSKKIFLGGPSQDQTXGVPNMXPHFLTFLMTHTYKGGGRQGPQKQASLTGHRYMGFYFGPEARAGCLLGGDTRG

SEQ ID NO: 344626 - protein, 47 aa, Zea mays
  unsure (1)..(47): unsure at all Xaa locations
  Clone ID: MRT4577_77463C.1.pep
RIGTCPVFTLQSTPAKICLXXRQSXKXSALHITCCGLNILTLKEANF

SEQ ID NO: 344627 - protein, 235 aa, Zea mays
  unsure (1)..(235): unsure at all Xaa locations
  Clone ID: MRT4577_77464C.1.pep
MAEHLASIFGTEKDRVNCPFYFKIGACRHGDRCSRIHNRPTISPTIVLMNMYQRPDMITPGVDAQGQPIDPRKMQEHFEDFYEDIFEELSKFGEIETLNVCDNLSDHMIGNVYVQFREEDQAAAAHTALQGRFYSGRLIIVDFSPVTDFREATCRQYEENTCTRGGHCNFMHVKQIGKDLRKKLFGRYRRSQRGRSRSPSPHHXRERHDRDDYRGRDDFRRGGGGGGGGREGWEQ

SEQ ID NO: 344628 - protein, 130 aa, Zea mays
  unsure (1)..(130): unsure at all Xaa locations
  Clone ID: MRT4577_77465C.1.pep
WSRSAVXXSXXVXXVXSXVLPXALPCXWXFLRLLVXXLGXLFWXFWXASXXGXSLSVXGVXXFPXXAXLGGXXXGXXFSXLXXXXPXXVXXXCLWFSXXXFXXXXGWXLXXLXXXWSVWXFXSFGXXXPV

SEQ ID NO: 344629 - protein, 149 aa, Zea mays
  Clone ID: MRT4577_77466C.1.pep
FLETLKENASSVYPPSDHRATMCRRSPRRCFHCVPAPCDPCRRKTTRRRTRHRWSDRQGDLALLPRLVLLAKTRLPEIVRCLRPPPWASARVSPLSSSSRRSPRDLVFLRMYWFFVLRFSCFTSRWMRQRPLVLVSDSLFISIISGITS

SEQ ID NO: 344630 - protein, 108 aa, Zea mays
  Clone ID: MRT4577_77467C.1.pep
MVARRPGLIALVDVDGTLTAPRKVVTPEMLTFMQELLKVVTVGVVGGSDLIKISEQLGSTVTNDYDYAFSENGLVAHKEGKLIGTQSLKSFLGEEKLKEFINFTPYYI

SEQ ID NO: 344631 - protein, 56 aa, Zea mays
  unsure (1)..(56): unsure at all Xaa locations
  Clone ID: MRT4577_77468C.1.pep
MTVIDILTRVDAIWQKXARHDVDKLTGANVAGDDPFARLYASVDADNNQWLDTAET

SEQ ID NO: 344632 - protein, 50 aa, Zea mays
  Clone ID: MRT4577_77469C.1.pep
TKQISKTSPSNLISARNFFYNLQIYNQLVSNFFRNFALIDLNILLNYRKH

SEQ ID NO: 344633 - protein, 541 aa, Zea mays
  Clone ID: MRT4577_7746C.1.pep
MRMKTLACCRRRPQDFSIDMDQEPDRVVTYNGLETCIINSSAYDDDSGISATTGGDGCITTDSLDDEVSSCSSKDASGSSFTSHCLSKQEEHSLDELGTPMAIHLLPFKGKKTITYTLSASDIENMKEKFAKLLLGDDTSGGARGVCAALALSNGIINLSATVFGELWKLEPLCEDKKIRWRKEMDWLLSPTTYMVELVPTKQSGADGCTFEIMTPKARSDVHVNLPALQKLDMMLIEVMDSMIDTEFWYEESGSRADGRGKITGPRKSKKWWLPSPRVPEQGLSQFQRKRLGFQAKLVHQILKAAKSINEQVLSHMPIPAAVMDALPKSGRASLGEDLYQAITTDYIPVEEIFVSLSLKTEHSVLETINRLEGAVFAWNQRILEERSKRSPGRHSWSFMKDSSSEVDKMSACIERVDALVQLLKSRYPNLPPTFIDVLKVQYNVDVGHAIVEAYARVLVGVAFSILSRVAEILLEDDLIKKPNTPMATLKFDLSSDVYLAGITETPPGHIRRSLMDQISMVDGRYDAVVGKKKEVKQLRW

SEQ ID NO: 344634 - protein, 77 aa, Zea mays
  Clone ID: MRT4577_77470C.1.pep
MSSTECGGGGGGAKTSWPEVVGLSVEDAKKVILKDKPDADIVVLPVGSVVTADYRPNRVRFFVDIVLQTPPTRLDNI

SEQ ID NO: 344635 - protein, 54 aa, Zea mays
  Clone ID: MRT4577_77471C.1.pep
GELEDNDWHLTRGKIIYTPKDRRLTSAGKPSTSYCKTKAAVGVIGSYKLFDRMR

SEQ ID NO: 344636 - protein, 129 aa, Zea mays
  unsure (1)..(129): unsure at all Xaa locations
  Clone ID: MRT4577_77472C.1.pep
MADDVAPCTASGYLDPSYWDGRFGKEEHYEWFKDFSHFRHLLAPLLSPSLSVLEVGCGNSRLGEELLREGVTGGVTCIDLSPVAVQRMRDRLAEQGTSGVDVVVXDMLDLPFESESFDLVIEKGTMDVL

SEQ ID NO: 344637 - protein, 73 aa, Zea mays
  Clone ID: MRT4577_77473C.1.pep
MSSTECGGGGGGAKTSWPEVVGLSVEDAKKVILKDKPDADIVVLPVGSVVTADYRPNRVRIFVDIVAQTPHIG

SEQ ID NO: 344638 - protein, 369 aa, Zea mays
  unsure (1)..(369): unsure at all Xaa locations
  Clone ID: MRT4577_77474C.1.pep
MSSSQESTFTSASAAAQVNASALDLLPVYAKELIAGGAAGAFAKTAVAPLERVKILLQTRTEGFQSLGILQSLRKLWQYEGIRGFYKGNGASVLRIVPYAALHYMTYEQYRCWILNNFASSIGTGPVIDLLAGSAAGGTAVLCTYPLDLARTKLAYQVLNVGLTGNALGNSGQQQTYNGIKDVFKTXSNVGQIGNALGNSGQQQTYNGIKDVFKTVYKEGGARSLYRGVGPTLIGILPYAGLKFYIYEDLKSQVPDDYKDSVILKLSCGALAGLFGQTLTYPLDVVRRQMQVQSKQSQNSSDGFRIRGTFQGLLLIIRCQGWRQLFAGLSLNYVKVVPSVAIGFTTYDMMKALLGVPPRERVHASGGNK

SEQ ID NO: 344639 - protein, 73 aa, Zea mays; identical to SEQ ID NO: 344637
  Clone ID: MRT4577_77475C.1.pep

SEQ ID NO: 344640 - protein, 715 aa, Zea mays
  unsure (1)..(715): unsure at all Xaa locations
  Clone ID: MRT4577_77477C.1.pep
MAPHTTAGGGGGAEDEVSEAAAASPALRHRHAGKGEGLGGNGGAGADGQASVERVFADKAVPSWREQLTLRAFVVSALLAVMFSVIVMKLNLTTGIIPSLNVSAGLLGFFFVRMWTAAAERMGFLRQPFTRQENTVIQTCVVSAYGIAFSGGFGSYLFGMSDKIAKQATEAKDANNIKDPHLGWMIGFLFLVSFIGLFALVPLRKIMIVDYKLTYPSGTATAYLINGFHTPEGAKLAKKQVKTLGKYFVFSFFWGFFQWFYTAGDECGFKNFPTLGLEAYNNRFFFDFSPTYVGVGMICPYIVNVSVLLGGILSWGLMWPLIAKKKGSWYPANLEDSSLHGLQAYRVFISIALILGDGLYNFIKVLIRTIAGFISMVQQNSKSMLPVSDNGSSXPVXAVSFDDERRIENFLKDQIPKSVAYGGYVAVAAISIGTLPQIFPQLKWYYILVAYVVAPVLAFCNAYGSGLTDWSLASTYGKLAIFVFGAWAGLSHGGVLVGLAACGVMMSIVSTASDLMQDFKTGYLTLASPRSMFISQVIGTGMGCVIGPCIFWLFYKAFGDIGESGTEYPAPYAIVYRNMAILGVDGFGSLPKNCLTLCYIFFAAAITINLVRDLTPYKVSRFIPLPMAMAIPFYIGSYFAIDMFLGSAILFVWERLNKAKADAFGPAVASGLICGDGIWTLPQSILALAKVQPPICMKFLSRSTNAKVDSFLGLS

SEQ ID NO: 344641 - protein, 67 aa, Zea mays
  Clone ID: MRT4577_77478C.1.pep
CGYSRRRWLQLTDLATCGSENSRFSGFMNGSGQPCTFLHGSLSMWIGEADRGVSCSMGVICVFARSE

SEQ ID NO: 344642 - protein, 152 aa, Zea mays
  Clone ID: MRT4577_77479C.1.pep
MGRAGAGLSHSNEDAQVEAPRSGNDNGSAGAPDIFESPAVVSLTRTGIEDLVRLENRAEPWLVVLTSGRSRPLHGSIDDHHAHRSAREAAARGSGSVSRTRASLLRTRASLLLTAVRLRTRAWAARCYCTDESVRRGAGSQWIVAATRPASR

SEQ ID NO: 344643 - protein, 212 aa, Zea mays
  Clone ID: MRT4577_7747C.1.pep
NSFSAFVEIMTPKARSDVHVNLPALQKLDMMLIEVMDSMIDTEFWYEESGSRADGRGKITGPRKSKKWWLPSPRVPEQGLSQFQRKRLVFQAKLVHQILKAAKSIDEQVLSHMPIPAAVMDALPKSGRASLGEDLYQAITTDYIPVEEIFVSLSLKTEHSVLETINRLEGAVFAWNQRILEERSKRSPRRHSWSFMKDSSSEVDKMSACIER

SEQ ID NO: 344644 - protein, 112 aa, Zea mays
  Clone ID: MRT4577_77480C.1.pep
NKYLRGGRNCRYKKSESEKIHHRTCNAFNGGRPLLALVLGHTKQERDNSPGPGPLRGPGCRKGPPRGGKGRRRRRRTKRRRPRTWGWPRPRWGPWGPPRGRPRGARRRRWPG

SEQ ID NO: 344645 - protein, 108 aa, Zea mays
  unsure (1)..(108): unsure at all Xaa locations
  Clone ID: MRT4577_77481C.1.pep
LQFRRIPGRVHCYPGSMGATGLFREHIPLLRLIFRSQQKFITKGXVTRGVSXQRLAHAATNPILTKQGEYXSWHKDYSSDENQMGXDASDPKKARKLXEISEKLLRLA

SEQ ID NO: 344646 - protein, 63 aa, Zea mays
  Clone ID: MRT4577_77482C.1.pep
MKRGLLGPALCQMAAKQLLLAGGASSRSLVRVAARGTDAGDRPRGRRVQASVKGRARLEGLAA

SEQ ID NO: 344647 - protein, 65 aa, Zea mays
  Clone ID: MRT4577_77483C.1.pep
ESTTHLCSIHFFHMLSLHNLYNQFFTLTVFNVIRLKAFLLFIEANKLFLHANGPPQGFFEVSFFF

SEQ ID NO: 344648 - protein, 41 aa, Zea mays
  Clone ID: MRT4577_77484C.1.pep
LRLERSLAALEVPDEFVATANQDVSPPEMGPSTTRPPSWSD

SEQ ID NO: 344649 - protein, 180 aa, Zea mays
  unsure (1)..(180): unsure at all Xaa locations
  Clone ID: MRT4577_77485C.1.pep
IWFILLVSFHCDYFFYFSFLIFTGHSSCGCRIEEIPIILEEDKIQFRHLLXVEIGEIAHESSFLAALFAYFMEDATVPKXSVSSKLSPSRNLLEIMLAXHISTLDRLYFWESKLYDEAKASSAICRKYGGKCKKLRLHESRGVNQIDNDFTRAARERCQYHCILQDDRICSSGPINKRDG

SEQ ID NO: 344650 - protein, 76 aa, Zea mays
  Clone ID: MRT4577_77486C.1.pep
FQYNAHCRCLLMLLGTATFIFSRVYLTQKLQVPCSSIAHWLRGSYHDQTSKGASMDYSHLLCREHFAQYPSSPMSL

SEQ ID NO: 344651 - protein, 75 aa, Zea mays
  Clone ID: MRT4577_77487C.1.pep
WASICNELSKTFLPKLDTVYYIHNFKGAKGERLFRCYPEPWKVMRKASSYSYICLHQQEEMPSLKEVSLDILPSV

SEQ ID NO: 344652 - protein, 111 aa, Zea mays
  Clone ID: MRT4577_77488C.1.pep
PLSADLKQKYNVKNIPFRKDDEVQVVRGTYKGREGKVIQVYRKKYVVYIERLTREKANGATVNIGVHPSKVVITKLKLDKDRKAILERRKAGREAEKGKIKDTTSPMAVVD

SEQ ID NO: 344653 - protein, 61 aa, Zea mays
  Clone ID: MRT4577_77489C.1.pep
FCLFISNSIRISLIPSILAILFMESTQAHISHIHHIYSPFHLCIFILISSNIRLTYNSSPV

SEQ ID NO: 344654 - protein, 240 aa, Zea mays
  unsure (1)..(240): unsure at all Xaa locations
  Clone ID: MRT4577_7748C.1.pep
MRMKTLACCRRRPQDFSIDMDQEPDRVVTYNGLETCIINSSTYDDDSGISATTGGDGCITTDSLDDEVSSCSSKDASGSSFTSHSLSKQEEHSLDELGTPMAIHLLPFKGKKTITYTLSASNIENMKEKIAKLLLGYDTSGGAXGVCAALALSNGIINLSXTSRSSLFCVYSSVPVLLDHDSTRLTXVKATVFGELWKLEPLCEDKRLWWRKEMDWLMSPTTYMVELVPMKQRGSDGCTF

SEQ ID NO: 344655 - protein, 114 aa, Zea mays
  unsure (1)..(114): unsure at all Xaa locations
  Clone ID: MRT4577_77490C.1.pep
TGGGAIGREPRLTHXERVEPNLGPGAVDRTMTTRAAAFNGLRAQRFGREATLQSNLCSEPWLKYNRDIVADIGLRKSLYTCARLKKGEVIYLETHINQLNRAELCYKGDKPCLI

SEQ ID NO: 344656 - protein, 75 aa, Zea mays
  Clone ID: MRT4577_77491C.1.pep
IVGFLKNYVAVVMEETYMLMCFAVVFKYGTGLTFWSDMILGLLLFLLDARLTRILVFLGFENNFAMCSSLVLSDQ

SEQ ID NO: 344657 - protein, 63 aa, Zea mays
  Clone ID: MRT4577_77492C.1.pep
RLTTTRDGRFSLPPPPPLLQNQEMEHKLLWTADGVGGLLLASQLARSRADGGGDPDSDRTAGT

SEQ ID NO: 344658 - protein, 56 aa, Zea mays
  Clone ID: MRT4577_77493C.1.pep
FCLKYFIFMRTTQHCTYLDRMNKYKQPNKETLYSLVQLTRGRLGDTSNQTYYNTVQ

SEQ ID NO: 344659 - protein, 92 aa, Zea mays
  Clone ID: MRT4577_77494C.1.pep
RDGGRCSIEGYAPGSCIPSPQKNVERDFLKKYWSRWKADHVGRCRAMPHIKTFTRYSGQNIAWFLLTSANLSKAAWGALQKNNTQLMIRSYE

SEQ ID NO: 344660 - protein, 108 aa, Zea mays
  unsure (1)..(108): unsure at all Xaa locations
  Clone ID: MRT4577_77495C.1.pep
AAGLTDNPFLLALLLKTKPIVNRILNGKTKEQYDRLRYLLSLINXIXICIWXGLPXDTDRGRGHIATDNCTGXMFQIAYISLFIFYSDRKTTRIKVMPLMELEIFTFA

SEQ ID NO: 344661 - protein, 132 aa, Zea mays
  Clone ID: MRT4577_77496C.1.pep
YQHKELLSVTAFQSALEVLLLHTFASPPSCPDSVSVSSTSCTHPRRPTCLTSLTMVVTRSASSTSFTATSPPLRPAAVRLSPSSVECTVRSSPSSATMASTSIRSQLTPPSACPNQCEGGDWSLAPTVVSVF

SEQ ID NO: 344662 - protein, 259 aa, Zea mays
  Clone ID: MRT4577_77497C.1.pep
MATEYLSGWPLSSWISPGAAFFLFVNVLIGAIVVTSRGHQAGGGRAAASTRRLCRSASSMVLDRLRSFSLFSVHPDPTETEERCSTSSPLELEAEEEQQPQPQPAVAEPARSLVAAVAAPADGASSEIAKEEAAEAGKDLPTSSNEAHGLVLQLQQGHGGRQQPPSSVNVVTAADATAAVEIKEEEEKKAEQEATMQRAPACRRGTTEEAAEGKAALNARAESFIRKFREDLKLERLNSIINYTRTLRRGVGAPQPTAQ

SEQ ID NO: 344663 - protein, 94 aa, Zea mays
  Clone ID: MRT4577_77498C.1.pep
PPPWPELKRKFFRELGDLPGFSRGPAFSPPMGGGIPPGPDAQLEAPLKAPPGPPRGGQRGFPPPPPPGAEGNLAPPKGVPKSPWFFGGGTIPPQ

SEQ ID NO: 344664 - protein, 78 aa, Zea mays
  Clone ID: MRT4577_77499C.1.pep
SRNILLPDVTGDILIKARLVAYTTLHWPLDTKATENQATCLSKLCFSGILIPDGTLYRNMKVLNPKAKTDARKCHGLN

SEQ ID NO: 344665 - protein, 292 aa, Zea mays
  Clone ID: MRT4577_7749C.1.pep
CLSSPFPANGTSRTGCGAAPAGNSCSTCSSSSNTASRISSRTVSESNSLGLTSIARTLLSTNPTSRTSSAGAASATRWCCFTSAASVSKGGTCATPTTSTPCLSGPASRTSTGTRATSAPRSYWFTTTSCTVRSSNPAAPETSLGTTSAPDTSWLASAPTAATTVAEVKSGRFTPPPPSSPSSTSAARRTSRTAFTGTPSSSGKLSGSFTSATTTAGAFSASTHPSASDGATAAIPSLRITSSTSMILSSSATSSAIAAAARSVRRWESLAAKSVASRRAARRVTAAVRSSS

SEQ ID NO: 344666 - protein, 393 aa, Zea mays
  unsure (1)..(393): unsure at all Xaa locations
  Clone ID: MRT4577_774C.1.pep
LMFAKHEISRLESEFSAYKVRAHALLQKKDAELTAAKSSDFIKEHEEAIREAEKEVAAALAERDKAIDDLQKAESRHGDEIEARDMALADAEKKLKDVMKKLDSVTSNFISEKGSWEKNLMNVGESWRLKCESLKVQSNDHVDDELKKNLGELTLKYEKLKEEHQSFRDIADRMIEDKEREITKLLKENRDLHQSLDARPTVSNNDHQSQGPVKDTMSVELAEQQILLLARQQAQREEELAQSQRHILALQQEIEELERENRLHDQQEAMLKTELRNMERSQKREGIDMTYLKNVILKLLEXQGKWERCCLWLGRYYSLVLTSSRSASKVSFRVWSLHKLLQCQMAQPHRIRSLQDSRSEALPSKISSLAGGEDVLSLQIHSFVDRRKRLFIY

SEQ ID NO: 344667 - protein, 166 aa, Zea mays
  Clone ID: MRT4577_77500C.1.pep
RARQVGRRRVVSPRASHVAARFLSKKEHNSIESRLNSRNKKTKPIMMMLESQTKRKTTNLLRILLLLSTIILHNIGISTKTTLRKHRRNQHRTNHRPRHMTLRIPMQRRPTIKISTIRNYLPIHPLPPTRQPQLYPEGETRAEQNNNNEAHKQAHKQAHKSAQSSK

SEQ ID NO: 344668 - protein, 51 aa, Zea mays
  Clone ID: MRT4577_77501C.1.pep
EIGKVVVRRDDGEIKVEALFLDKLAYSVIKCDYKAKEVYDIEKDEMASVGN

SEQ ID NO: 344669 - protein, 39 aa, Zea mays
  Clone ID: MRT4577_77502C.1.pep
SYTQVTELCVYYEIRSDLYTVGSIIIYQIKEKTLASSYA

SEQ ID NO: 344670 - protein, 59 aa, Zea mays
  Clone ID: MRT4577_77503C.1.pep
LGPPLKPVPAKIVHVPSAVINPWPVLFECFCSRPTILVLKKIFFLGISFLDTPVQIMPP

SEQ ID NO: 344671 - protein, 63 aa, Zea mays
  Clone ID: MRT4577_77504C.1.pep
TPNLVAIPFLSRPIHRRLLNILGEHTWQLNGRDGTKQAGGRAPKPRERKGGGYAKERRTKPFS

SEQ ID NO: 344672 - protein, 325 aa, Zea mays
  unsure (1)..(325): unsure at all Xaa locations
  Clone ID: MRT4577_77505C.1.pep
VDPASGEAAPGRRKVTYGFHLVEGRMPHGMEDRHVAEFRKLDDGNEVGLFAVFDGHSGADVATYLREHLFDNILMDQXYNITHTLALCSFHCLVQNSDTSVALGCVASIMFLLGTRVACSAPQSGSDFWTDPTEAIRRAYHRTDRKLLKKTAGDDSGEGMKKGRRRGGSTAVTAILINGEELVVANVGDSRAVLCDAGGRARQLSVDHEPLRERRAIEARGGFVTEIHGDVPRVDAQLAMARAFGDRSLKEHISSDPDVAIEDVGDGAELLVLASDGLWKVMSNQEAVDEARGIEDARKAAVRLVDEAVRRGSKDDISCIVVRLH

SEQ ID NO: 344673 - protein, 50 aa, Zea mays
  Clone ID: MRT4577_77506C.1.pep
PDTGPPPPGGPPAPIIRSLITARHHHHNSFLLGKIIISSHHTTSYPPHQI

SEQ ID NO: 344674 - protein, 36 aa, Zea mays
  Clone ID: MRT4577_77507C.1.pep
SAGRVVLYAVRLLQGPMLRQKTQMLRNSCWMHELVG

SEQ ID NO: 344675 - protein, 187 aa, Zea mays
  Clone ID: MRT4577_77508C.1.pep
MYCIVRKLTRRWWSPAWLKQTMPRAATEAVVHGEGGTIKVGTTGTIGSLMTRELDAVKVAPPPPAAAGNPRLRRHQGCPVSVPCGAATPRKTVLRKSSSDISGGSRADRVSAEDACCKPRRVSRRNTFDSPMLRSDGALVDVRTPSGGRAKKKGGVYGVELVDVKCGNPMTSRLRKLGFCKLSETFA

SEQ ID NO: 344676 - protein, 140 aa, Zea mays
  Clone ID: MRT4577_77509C.1.pep
PSPYGARDRLLLGAAPAATPRRGLLTTFAPASIFDQSPVLTSPSLLSVFSLPCFFSLTHKQDRQQAAERPPHRDAAQAPPCASSALPRQPTAMPSAPDDQTPRTVVRFLLHGDLFHPLLIPIISPLVTDVLTAFEACGTS

SEQ ID NO: 344677 - protein, 55 aa, Zea mays
  Clone ID: MRT4577_7750C.1.pep
LKMQKFLNLVWSLTSTTRIYKLIPIHSITNTLLITFLIQFPTSIVSISPLTQSLI

SEQ ID NO: 344678 - protein, 68 aa, Zea mays
  unsure (1)..(68): unsure at all Xaa locations
  Clone ID: MRT4577_77510C.1.pep
QLVISGAIRVHEDIGLAXSEALAAHGIQENFDKRSICADLTSMRKISARISAAVPERAYELGLETRLP

SEQ ID NO: 344679 - protein, 156 aa, Zea mays
  Clone ID: MRT4577_77511C.1.pep
MHTCVSFHSSRLRTPTLFFILNSAYDVYQFHHILAPPSSDPGGHWSRCKSDPGGCSATQIATLQGLRNEMLTSLRQFESKPKAGMFINSCFAHCQSELQDTWFAPNSPSIDNKKIAEVVGDWYFERGAAVKIDCAYPCDSTCRNLIPIDKNGFSGA

SEQ ID NO: 344680 - protein, 158 aa, Zea mays
  unsure (1)..(158): unsure at all Xaa locations
  Clone ID: MRT4577_77512C.1.pep
ALRQFHYILAPPSSDPGGNWSRCKSDPGXCSATQIATLQGLRSGMLTSLRQSESKPKAGVFINSCFAHCXSELQDTWFAPNSPSIYNKXVVGDWYFERGADVEIDCAYPCDSQSCRNLIPIDKADHPRLNFKDRYPEPYRDSHPTAPVAVHGCQVSLL

SEQ ID NO: 344681 - protein, 170 aa, Zea mays
  unsure (1)..(170): unsure at all Xaa locations
  Clone ID: MRT4577_77513C.1.pep
MMYIGQFHHILAPPSSDPGGNWSRCKSDPGGCSATQIATLQXNSLLSXGLRSGMLTSLRQSESKPKAGVFINSCFAHCXSELQDTWFAPNSPSIYNKKIAEVVGDWYFERGADVEIDCAYPCDSQSCRNLIPIDKADHPRLNFKDRYPEPYRDSHPTAPVAVHGCQVSLL

SEQ ID NO: 344682 - protein, 131 aa, Zea mays
  unsure (1)..(131): unsure at all Xaa locations
  Clone ID: MRT4577_77514C.1.pep
ALRQFHHILAPPSSDPGGNWSRCKSDPGGCSATQIATLQGLRSGMLTSLRQSESKPKAGVFINSCFAHCXSELQDTWFAPNSPSIYNKKIAEVVGDWYFERGADVEIDCAYPCDSQSCRNLIPIDKELRMY

SEQ ID NO: 344683 - protein, 140 aa, Zea mays
  unsure (1)..(140): unsure at all Xaa locations
  Clone ID: MRT4577_77515C.1.pep
MLWKRKSSGRGGCGGDEMRERLIPAAGCVPPGCVAVLVGGGDEPERVVVDVRALAQPCVRALLKAAQREFGFDQKGVLRIPCAADEFRRAVTAGXATGAGGRRPTTWCLLVLSLWVVYIHVYRCTHRVHHLASPGPQSFT

SEQ ID NO: 344684 - protein, 99 aa, Zea mays
  unsure (1)..(99): unsure at all Xaa locations
  Clone ID: MRT4577_77516C.1.pep
AVLGVFFVGANLHWFSNHHPYPSLVDEPQIEPIGSENQPSGCESNTWRSEYASHSHRHGTVTERPEGFQPTGPLKGXKLMRQETXSFGGIDYYDRKFAV

SEQ ID NO: 344685 - protein, 78 aa, Zea mays
  Clone ID: MRT4577_77518C.1.pep
QFAFATFSKPLYQSPHRQPPAQHFSMAAPPVQPVPTAAAAAAAVNRDAFHLCFVCSDNLAEIIARCLAAVSRSSWPPP

SEQ ID NO: 344686 - protein, 64 aa, Zea mays
  Clone ID: MRT4577_77519C.1.pep
LCPPALNRDLVLQNLTCPPLPKFCMRVFLLLGTVKLFCGGPFCLGRVNVEPPLGGGLCLLPGAA

SEQ ID NO: 344687 - protein, 36 aa, Zea mays
  Clone ID: MRT4577_7751C.1.pep
SPTLVESLEPTKWNTWQLEYTRFSQVFRYNRYPESG

SEQ ID NO: 344688 - protein, 53 aa, Zea mays
  Clone ID: MRT4577_77520C.1.pep
SSSSTSSAINSASSFFVSISDSDCAFCLLAQPVQAGNQLLLRHKLLCTATMLS

SEQ ID NO: 344689 - protein, 80 aa, Zea mays
  Clone ID: MRT4577_77521C.1.pep
GQACADGIQGPGGGGAARLRGDGCQLRAVVRPHPRPGPGEPECLQNHAAALGGHIVDGCGEFMPRDSDSLKCAACGWHRS

SEQ ID NO: 344690 - protein, 112 aa, Zea mays
  Clone ID: MRT4577_77522C.1.pep
SRRCAPRRRWRTAWSRTARWRRRGARNGSRQRHRGSRFAACQKTAGSRSSCPSPRRHAWLRTTTTRSAVQWFRIFAFFLGRTARFFFFPFPFPFPWARGESEGGDGGNCGCP

SEQ ID NO: 344691 - protein, 701 aa, Zea mays
  unsure (1)..(701): unsure at all Xaa locations
  Clone ID: MRT4577_77523C.1.pep
MADADAALPTPPPEVVAPEEHPVGAESTVAAPAEVDNKRKLEEVSADAEVKGTSEDAKRPRVDGEPDAATGVEQQIDGSSVNADPAAPEDKAALNVGAAMDGDNDTPAPAPAPDSQAVSDEKPLEAAAEAPQQEGDAATAVQEISRKIEVPNSKVGVVIGKAGETIRNLQISSGAKIQITKDIEADSNALTRPVELVGTPGSVDKAEQLIKSVIAEAEAGGSPALIARGFGSGQPGSEQFEMTVPDNKVGLIIGKGGETIKGMQTKSGARIQLIPQHPPEGVTLTERIVRVTGNKKQIEAAKDLIKQAMNQTFSKHTNQSGGYGPQGYRPQGHGAASQLGPRSQNHGYGYPPRGMPPPQNYNAPYGGYPPQGPSRGGMGWDQRPGPPTHPSYQGGGSDYYKQGSQPYDSQPPSYPPGPGNYNSYGQSQGPNYGQPQYPQHAPQQNYSHGYGDPRYNAPPPNQQYYGQPPMAPQQGYPQQPDPYARPPYSGPGQXPQGCSPPQMAXQAPPSSYGPPSQHPPAYGQTYGAATGPDGYGQQGYPQQGGQVPASYGQSAPAAPGYPQQGTQQGGYAQYPQTQPAYGDQAAQANANYGYQGAPADPNYGSAYPQQPGYGPPGQATGQAGYASSAPAASQPVYGQAGYTQPPTNPPSYDQSAAPAATQSGYAAPPANPQQPAAAKGVSPQPAAAAAAGYGASGQWTA

SEQ ID NO: 344692 - protein, 92 aa, Zea mays
  Clone ID: MRT4577_77524C.1.pep
RGSHVVGLLTTLNFGDGPDRNKTRTFQATVLGSQMGLKGSSAGQLVLITARVTTERTAGTCLYFSAVPGILPSSQPPISCSEEGAGNATLSP

SEQ ID NO: 344693 - protein, 201 aa, Zea mays
  Clone ID: MRT4577_77525C.1.pep
YKYLEELYKKKQSDVLRFLSRVRCWEYRQLPAIVRVQHPTRVDKARRLGYKAKQGFVVYRVRVRRGGRKRPVPKGIIYGKPKSQGITQLKFQRSIRSVAEERIGRKAGNLRVLNSYWVAQDATYKYYEVILIDTFHKAVRKDPRINWITNPVHKHRELRGLTAAGKSNRGLVGKGHGYKKNTPSRRAVWKRQNTLSLRRYR

SEQ ID NO: 344694 - protein, 69 aa, Zea mays
  unsure (1)..(69): unsure at all Xaa locations
  Clone ID: MRT4577_77526C.1.pep
CCQAVXQVYLQHRYQAFFGLVFQSILQQQPQSGQVEGLLAAQIAQHLTAMCGLQQRTPCPYAATGGVPH

SEQ ID NO: 344695 - protein, 229 aa, Zea mays
  unsure (1)..(229): unsure at all Xaa locations
  Clone ID: MRT4577_77527C.1.pep
MDMSGIRGLPLPSPPPPPSAMPGSATAAVQPRPPSVTAPWWRKRWRHPQGXTDGWDGFVLTTAGWDVHRGTFPAWMVSLQGNDSSLVLLNTRPGSAADGAGMAEHLQLHLGQVSLRSWSSFAGYWVARWTFPSDCRSSAFFCVRFGICTSVGTCACVDEFEPSKPCEWQRGYFVDGCTTRSHPLSCTADDSGRRPTTEQDDSFLLLDNLRGLPYSSIPQRRATAGRASS

SEQ ID NO: 344696 - protein, 62 aa, Zea mays
  unsure (1)..(62): unsure at all Xaa locations
  Clone ID: MRT4577_77528C.1.pep
EARXHGMLPVKMKTNXVTKPQHDTMQGYYSSRSGTVTGRCRRCSAAMTPSPSSASMAPSSLS

SEQ ID NO: 344697 - protein, 297 aa, Zea mays
  Clone ID: MRT4577_77529C.1.pep
MVINRPQLVSSIIVCFATCCFAPPPPIHHMYVDITTQTYNSLYIEFANLLKIPIGPVYDPQEVMQRYVLGPRRFGFYDEPPEWIYIHVVGEEQDKVTLAIAIDDLCLIGFQNASDHWYKFNGQSSSFKGLPGATVLPIRQNYQDLIKGHANLWKVPLGKKSAIHATKQLATYDRAVTPDSELKDGLARFVVMMCEGMRFRSIRDMFSSLSGNNWEEETFITELQAKSVVYWSQLPPRRLRSARAGRLPGGPKWGAVDGRYNSMAKHVQETINVNDANDALTIIDFLLRPTEEVDTGN

SEQ ID NO: 344698 - protein, 135 aa, Zea mays
  Clone ID: MRT4577_7752C.1.pep
RPVRAILRGLRVAVDEGDLAMDPRYLHELAALLPRLASPRRATLPQVFVGGRHLGGADEVRRLHEAGELRRVVGGAGAASLAACGRCGGEQYVLCGTCDGSHKRYSAKGGGGFRACAGCNENGLVRCPDCSPPDV

SEQ ID NO: 344699 - protein, 55 aa, Zea mays
  Clone ID: MRT4577_77530C.1.pep
KMWGPGGTVWDYPLGGLSEPFGSGRQPKQWFWGLFGIFQVFKAFPPVILFYSFYT

SEQ ID NO: 344700 - protein, 43 aa, Zea mays
  unsure (1)..(43): unsure at all Xaa locations
  Clone ID: MRT4577_77531C.1.pep
FFFLAWVGPPLGLKKNPNFYFPFGGVPPKNKKNPQKKKKKKKX

SEQ ID NO: 344701 - protein, 217 aa, Zea mays
  Clone ID: MRT4577_77532C.1.pep
MALEPVALLLTVLVAAPLTVLLLLLFLVAGNKRPARAASPTPRHRLRLPLPPSPRGLPLLGHLHLLGSLPHRALASLARAHGPVLLLRLGRVPTVVVSSAAAAEEVMRARDLAFANRPASAMAVRLLYGRDVAFAPYGEYWRQARRVCVVHLLSARHVGSFRRVREQEAAALVARVARDSAGGAAVGLSDLLTEYANAVVSRAAFGDESARGLVGRI

SEQ ID NO: 344702 - protein, 113 aa, Zea mays
  Clone ID: MRT4577_77533C.1.pep
KGARTKKNWVAHNKRTRPVFFYFLKKLGAPPRGLDPPQGLSLGKIEKMVGILGETIFTFFLRDIHLTPMNFGKKNFVFFFNRTRVLKNRGGKLIGGPKKNKWLLEIKKGGFLK

SEQ ID NO: 344703 - protein, 73 aa, Zea mays
  Clone ID: MRT4577_77534C.1.pep
MAGKGDGPAIGIDLGTTYSCVGVWQYDRVEIIANDQGNRTTPWYGGLTDCERLIGDAGGNQGAVDPINTAFDA

SEQ ID NO: 344704 - protein, 122 aa, Zea mays
  Clone ID: MRT4577_77535C.1.pep
ETIVEMIYARLPGEKNDYSKAAQTGVSFTGGYLAGILCAIVSHPADVMVSKLNSVREPGEGFGSAVGRIYKDIGFRGLWNGLPMRIVMIGTLTGLQWMIYDYFKIFMGLPTTGGPAPPPKEK

SEQ ID NO: 344705 - protein, 68 aa, Zea mays
  Clone ID: MRT4577_77536C.1.pep
SCSLWCASGCLCEMKGVDRSLFKMMSTNRPNEGWTNRVTEDLMLIKDVSNTTSLEFYSTQAPVHSPLP

SEQ ID NO: 344706 - protein, 49 aa, Zea mays
  Clone ID: MRT4577_77537C.1.pep
PNGSGIKPRPSLNGKKSLKRIKMDGWTVDNLVYSMINKLLFWLGTLDLL

SEQ ID NO: 344707 - protein, 153 aa, Zea mays
  Clone ID: MRT4577_77538C.1.pep
LLVLLGLRPQSCVASGGGGGEPAEFEIPRDGSVLELDESYFEAAVRAAEFLFVDFYAPWCGHCKRLAPQLDEAAAVLAGLSTPVLVAKVNADKYKKLGSKYGVDGFPTLMFFDHGVPSEYTGSRKADVLVENLKKLVAPDVSVLESDSSINGF

SEQ ID NO: 344708 - protein, 115 aa, Zea mays
  unsure (1)..(115): unsure at all Xaa locations
  Clone ID: MRT4577_77539C.1.pep
MAKGGPMQRGAGKTHLPPKPPKGGPRPQGKPQAAARGKGKPGGPGAGPPPGPRSPGGAGPXAGGTPGTADRPGRRNPRAGEERGGGEGLPNAPLKGASPGGGAGQRPGESPGAPP

SEQ ID NO: 344709 - protein, 217 aa, Zea mays
  unsure (1)..(217): unsure at all Xaa locations
  Clone ID: MRT4577_7753C.1.pep
LLAQPQPPTPPTQASLRRSRSPARSTLVCHHHRRLTSCSPLPLPLAPLPLAGSSTFTASSSDRARPRTGRSLAPLSCCCELRGQGSPVHPHPARPDLAVVREGDGGEGCCVVVSSGPSLDHHFSVFADPPHLHGCHMKTTYTDTANFIGVLXGVPDRRCRSKDRRSCDLPFRCFHIHAISSSSGLTDAARLARELREKAAADAEXERARQAXIIFHL

SEQ ID NO: 344710 - protein, 60 aa, Zea mays
  unsure (1)..(60): unsure at all Xaa locations
  Clone ID: MRT4577_77540C.1.pep
RGPKGGGXFXIFYFFFFFWNVKKTCIKILFFGLRYKKTRTPRPGSYKCISCTSQCPSPSP

SEQ ID NO: 344711 - protein, 83 aa, Zea mays
  Clone ID: MRT4577_77541C.1.pep
NIQLIHPSPQKKQGGGGAKLNSTRLRGDHNHIWVGGFTKHLGRASLKLFFYLNFTGFRSPPNPQTYPYFLFNKSAWGPGPNGE

SEQ ID NO: 344712 - protein, 154 aa, Zea mays
  unsure (1)..(154): unsure at all Xaa locations
  Clone ID: MRT4577_77542C.1.pep
GLPSPPCSPPHQQRRPSPSRSPWLAPTRRRRSTRRPAAGGTSXTGVGAALLMALSPQRARAASDDEYLTETTEVIGKVRSTISMDKTDPKVADAVTELREMSNSWVAKYRREKALLGRQSFRDMYSALNAVSGHYISFGPTAPIPNKRRIRILE

SEQ ID NO: 344713 - protein, 95 aa, Zea mays
  Clone ID: MRT4577_77543C.1.pep
RPPIGNFSRVYSITWKPKLTSQPEGKVFFLSNGNFSKLVHNLKGGMLVLKSNNFQVKTLSSMLKSIDFLPLGGPFSSLIQKQILKGGPPLYPLGD

SEQ ID NO: 344714 - protein, 89 aa, Zea mays
  Clone ID: MRT4577_77544C.1.pep
HTRPANYCYGGDIIIRCDANGMGTAGRCSDNVAGYPPAGGVAEYWQSSKNSGDAACQKNCIVYTQPSAFTLPASKCTPSTGSNATGTVT

SEQ ID NO: 344715 - protein, 67 aa, Zea mays
  Clone ID: MRT4577_77545C.1.pep
INLTVYRRRVGCASSVSRLGAMTSDERRGSASSVLRSCRRRSGGRGSVRPTCLGAIICSRPASRYPM

SEQ ID NO: 344716 - protein, 742 aa, Zea mays
  Clone ID: MRT4577_77546C.1.pep
DCKKMALAWMVSKENSSHCAGGILADDQGLGKTVSTIALIQKQRMEQSKFMFVDSDRLKSEALNLDEDDEGEQTVSNEPKKDQGACSLSTSAGTSAELFVNQPNNVVNKMVETKAERKKKAKVSTSSASTSRSMTRPAAGTLVVCPASVLKQWSNELTDKVSESAKLSVLVYHGGARTKDPRELAKYDVVVTTYTIVANEVPKQMADDDADQKNSEEPSASNKRKPSANMQTKAKKKKKKLKDSNFDLDSGPIARVRWFGVVLDEAQSIKNFRTVVARACCGLRAKRRWCLSGTPIQNAIDDLFSYFRFLKYDPYCTYNSFCTMIKHPIARDAINGYKKLQAVLKVVLLRRTKETVINGKPIINLPPKTINLNKVDFTQEERSFYLMLEERSRQQFKAFAAAGTLKQNYANILLMLLRLRQACDHPILVKGNQSEYGGDGSIEMAKKLPKEVVIDLLAKLEVGSTLCGLCNDTPEDAIVTICGHVFCYQCIHERITTDENMCPAPNCSRTLGLELLFSSGALKICISGKSSSAVASSSSDNESSSISQSSFVSSKIQAAIDILNSIIVMDPLTESYTMESSRSGLGPVKAIVFSQWTGMLDLLELSLNINCIQYRRLDGTMSLNLREKNVKDFNTDPEVRVMIMSLKAGNLGLNMVSACHVILLDLWWNPYAEDQAVDRAHRIGQTRPVTVSRLTVKDTVEDRILALQEEKRTMVNSAFGDDKAGGHATRLTVEDLRYLFRI

SEQ ID NO: 344717 - protein, 97 aa, Zea mays
  Clone ID: MRT4577_77547C.1.pep
TPDIKKTECLKLYTRLPPVGAKKNKDTWSSNFFTLRTMEITQLPRKYAFEHKGVSRLAGEATTLGRVTRPFRLARDYITNFGPISLFGCHPPPALDF

SEQ ID NO: 344718 - protein, 98 aa, Zea mays
  unsure (1)..(98): unsure at all Xaa locations
  Clone ID: MRT4577_77548C.1.pep
SQTRGTDPRARPGPGQRRGRGRLGAPRGGGGLSCLPSSRGPRRGGPPPCRQGGGGPPXGGPXPPPGPPPPPRPPPXXPPPPPPPRPPRPPAPPPPPTP

SEQ ID NO: 344719 - protein, 346 aa, Zea mays
  Clone ID: MRT4577_77549C.1.pep
MTPANGAPARAAEAGPHEVESEADAFRRQVDDLVSKTDVLERRVKEVADFYDGKKHGSGGRKGGGGGRYGASSRGMPDLMRQFGVLLKEITSHKDAWPFLEPVDVVTLQLPDYHNIITQPMDFSTIQKKMERKDGTCYTNVREICSDVRLIFANAMKYNDDQNVIHLMAKSLLEKFEEKWLHFLPKVESEEKRQKEEESKGVAATNTSREVAIVKLAKDTDDELNQINRKLEELRKMVVHRCRKMTTDEKRKLGAGICHLSPDDLSKALEIVAQDNPSFQTKAEEVDLDMDAQSETTLWRLKFFVREALERQANVASGKMDENAKRKREICNALAKTTSRRIKKQP

SEQ ID NO: 344720 - protein, 106 aa, Zea mays
  unsure (1)..(106): unsure at all Xaa locations
  Clone ID: MRT4577_7754C.1.pep
DDLDAFRNGKAYYARLGQAWQPGYLLYGPPGTGKSSMIAAMANHLDLGXVYDIGVTVGGMNRGAREGLLRXDQRGIIGGEEIDCSLDLTGKRKTKNKKEEDGENKK

SEQ ID NO: 344721 - protein, 74 aa, Zea mays
  Clone ID: MRT4577_77550C.1.pep
KRACPLKITCSHKPAAHASSRRSRRPQSAARYLLAFAADARSRPSRVARHRWQLWCHCFGHPRRCTPDERLQSA

SEQ ID NO: 344722 - protein, 64 aa, Zea mays
  Clone ID: MRT4577_77551C.1.pep
PARDTTILPATLFATTKKNTHMVCYLMDALPRNNLITFEMQDVLTPFRCPITAAHPRFNLLPHI

SEQ ID NO: 344723 - protein, 64 aa, Zea mays
  Clone ID: MRT4577_77552C.1.pep
PQTKKKPGVFKKKGGGTLGKFKPNLIRGREKKPRGGAKKREKPPKKTPFPYGPGGVHSLNKTTG

SEQ ID NO: 344724 - protein, 400 aa, Zea mays
  Clone ID: MRT4577_77553C.1.pep
MEVVEGAVAVAVAGGSTLTVVLPTILAAVEGTYRGGSGVGNDFGDQRQRYGGGTRGGGRGDFQDHDSRSNYVKLFVGSVPRTVTEEDVRPLFEEHGDVLEVALIKDRKTGEQQGCCFVKYATSEEAERAIRGLHNHYTPPGVLGPIQVRYADGERERHGAIEHKLFVASLNKQATPKEIEEIFAPYGHVEDVYIMRDSVKQSRGCGFVKFSSKEAAVEAMNALSGTYTMRGCEQPLIIRFADPKRPRPGESRGRPAFGGPGFSPRSDAALVIRPTANLDESRGQHMLPESWRPSSPRPMAPNQYNNFGSDNPLALSGGTVTSADTATFRPPMFPGNGHQTVPSSHMGMNTPMVQEHHLRRSHSKHLVHHNFADLQNALCLCFSCIITIEYLFCFQVSERL

SEQ ID NO: 344725 - protein, 74 aa, Zea mays
  Clone ID: MRT4577_77554C.1.pep
HSAIFTKKYRIASQAAGGKPKSFTNTGIHAAWRRNQLENPTGSRRRGHLEMENLEAWVHGRRGTRLLRILNFIF

SEQ ID NO: 344726 - protein, 103 aa, Zea mays
  unsure (1)..(103): unsure at all Xaa locations
  Clone ID: MRT4577_77555C.1.pep
MKVSAALLCLLLIVRAFIPQRLAQPDAINAPVTCCYNFTNREISVHRLASYRRITSIKCPKEAVIFKTIVAKVVCADPKQKWVQDSMDHLDKXTQTPKTCTLT

SEQ ID NO: 344727 - protein, 50 aa, Zea mays
  unsure (1)..(50): unsure at all Xaa locations
  Clone ID: MRT4577_77556C.1.pep
LPQHLLSXKHCXHNLRLXXLXXSLRMXNNYLXKTXSPXPGRVXXTXRGXV

SEQ ID NO: 344728 - protein, 47 aa, Zea mays
  Clone ID: MRT4577_77557C.1.pep
STSPRYSTSVLSRRAIWVLTGSSPHMFSSLGFLVVHSCQQIKVAVIT

SEQ ID NO: 344729 - protein, 53 aa, Zea mays
  Clone ID: MRT4577_77558C.1.pep
GHRAHRSSASVLSKARLKAMCTLVRMWCYSRSPPQSTSGHRLGVRVALCKTIT

SEQ ID NO: 344730 - protein, 50 aa, Zea mays
  Clone ID: MRT4577_77559C.1.pep
PLSSVGHIKGIGSHHDYTLPFIKTCNSNISDTKSASYIVSVSLRLMISPD

SEQ ID NO: 344731 - protein, 91 aa, Zea mays
  unsure (1)..(91): unsure at all Xaa locations
  Clone ID: MRT4577_7755C.1.pep
MACTDNAMRALFLLVRFCIVHGENEXNXGIVAKAFGPGGVFYITXLGAFGNGMTXDSTKAVHDALAFAFGGSGXHTILIPYGDFLVVQLNF

SEQ ID NO: 344732 - protein, 60 aa, Zea mays
  Clone ID: MRT4577_77560C.1.pep
PTRPGDIDKKLKLATQNLHYVNVLPSIGLNVYSILQHDTLVMTRAAINRIVERMHTPINR

SEQ ID NO: 344733 - protein, 97 aa, Zea mays
  Clone ID: MRT4577_77561C.1.pep
GGGFFFFFFFFFFFFFFKPKHPGFIFEGGNFENLRTGGKLGLGLRREKKKKNQTSWIYPWDWGGATLSREKNVSKKKFKRLLNALGGKKSRKFHFFW

SEQ ID NO: 344734 - protein, 73 aa, Zea mays
  Clone ID: MRT4577_77562C.1.pep
MAAGLNTTKTPQVVAVLVAAALLASIYLAAITCGQVGSSLAPTIPYSTVRDTSLPVSCCCLLNSLNSSARTRA

SEQ ID NO: 344735 - protein, 78 aa, Zea mays
  unsure (1)..(78): unsure at all Xaa locations
  Clone ID: MRT4577_77563C.1.pep
MWTXTXVTXXTLLGNVRTXXXXXTXVKXLXFLRXXREVXKVXXVKXXKKXDVXXMGVYKVKXVGXEGEEDEFDGXEEG

SEQ ID NO: 344736 - protein, 69 aa, Zea mays
  Clone ID: MRT4577_77564C.1.pep
GCLWLQGIFAPKAILGNGLEFCQGFLRLDLAFPPHIVRQVCRQAQKGGLSFKYSVELGFVGVPGICVLF

SEQ ID NO: 344737 - protein, 78 aa, Zea mays
  Clone ID: MRT4577_77565C.1.pep
GGGLRPLWKGRPFLPLGGGGAPQGGEPFCLRGPFFLVKSFWGSPGVNQAFIGVSHGGVFFCFAPRFLFVLFRPNKGGF

SEQ ID NO: 344738 - protein, 211 aa, Zea mays
  unsure (1)..(211): unsure at all Xaa locations
  Clone ID: MRT4577_77566C.1.pep
MGHVLSCSRDGADLFRAVQHGDLDALLAVDPELARRATTIYDRLSLLHIAAANGQLQVLSMLLFDDGGAGGNVDVLNRKKQTPLMLAAMHGRTDCVLSLLDAGANILMFDSVHARTCLHHAAYYGHAHCLQAILSAAKTTPVADSWGFARFVNVRDEHGATPLHLAARQGRXQCVRHLLHAGAIVSAPTASYGFPGSTALHLAARRGKLDC

SEQ ID NO: 344739 - protein, 97 aa, Zea mays
  Clone ID: MRT4577_77567C.1.pep
GGKNKRFFRRGETVKVPPGLFEDFTGSTGEGKRKNKKTPGRLPLLGKKSFVDLDLDQIEAVKVAPHDSNLWGILCLCTPVADNFLPTTQISSWGCWG

SEQ ID NO: 344740 - protein, 191 aa, Zea mays
  unsure (1)..(191): unsure at all Xaa locations
  Clone ID: MRT4577_77568C.1.pep
PSPSPSHHTSGCPFGEGCHFIHYFLSGYQAVXKMTXPPGSMMMDGSPTPVVKTRLCNKYNTAKGCKXGDKCYFAQGERELGKSMMDNYMPPXIEPRPTGYFVPPPMANPGLATLTRFSASATTKINVDASFAGSIIGRGGANTKQISFVIGAKLAIXDHESYTSLXNIELEGTFXQIRNASAMVSELIVCV

SEQ ID NO: 344741 - protein, 110 aa, Zea mays
  unsure (1)..(110): unsure at all Xaa locations
  Clone ID: MRT4577_77569C.1.pep
GAMIGYTXRGMQLAQETIEKMTSXKFFLECQDGNXLLLAAAGETAGGYTTANYVWDLLQSRKITPTLPAVEAYHKGLTAREIPSDDPRLLNVTRVLDNLKLRFGPRRNTQ

SEQ ID NO: 344742 - protein, 110 aa, Zea mays
  Clone ID: MRT4577_7756C.1.pep
LGDDGLDLSRTHHSILQAPHPAVPVLDISLHSARSGGYKLIPHTTMVFLSVRFCPCCVWRHATAVAGGASRGLAPVIGEEGIHAVVVVGAEGGSQEAMDSKGRDRSQPGR

SEQ ID NO: 344743 - protein, 88 aa, Zea mays
  Clone ID: MRT4577_77570C.1.pep
GKVTWCYTWSPWTPGGNCEFVPMLWSGKQVSDFKKNVVGKKFKHVLGFNEPEISGQSEMSVGEVAPSGSSTSSPWTLFALHLLSPCLP

SEQ ID NO: 344744 - protein, 450 aa, Zea mays
  Clone ID: MRT4577_77571C.1.pep
MALLKNSLMLPGRLRHAAAALTARRHAATSTEEYARRNYADNNSEYNTVIGSLVAQRRPYLLRDAYDDMMLDGVKPERETFHTLIVGTMKGSRLQDALYFRDQMKEMGLKPDVNLYNFLISTCGKCKNSDAAIMLLEEMKAHDVKLKGETYICLLNALASTGQTDQVYAIVSDMSAAGLGLNKFCYAGLITAFKNKTPTAEETMAKILDFVGQSKGWQYVERVSKDIAENIMMNVSEEELYNLPTAEYVNRRGGFVFKQHTVYHVALQACAELRSKETLEALLEMFNKDNRDGSTYDAYMVMQAMRCYLRCGDIDSAVKMFEEYSSSRSPPAELYATLAEGAMIGYTPRGMQLAQETIEKMTSRNFFLNAKMGTDLLLAAAGETAGGYTTANYVWDLLQSRKITPTLPAVEAYHKGLTAREIPSDDPRLLNVTRVLDNLKLRFGPRRNTQ

SEQ ID NO: 344745 - protein, 72 aa, Zea mays
  Clone ID: MRT4577_77572C.1.pep
AATAVSRYQLTAGRPSHRRPFRQRINARWLAKLIVCQRWDVRKGSRSDDNTRREDDNDEQRQERDIRVDWFK

SEQ ID NO: 344746 - protein, 59 aa, Zea mays
  Clone ID: MRT4577_77575C.1.pep
HRKEGNVNLDVRKRGTFRVFVLFFFFFLFSFFFFFFFWNKTFFVSFQLFTDAWRRAGNS

SEQ ID NO: 344747 - protein, 70 aa, Zea mays
  Clone ID: MRT4577_77576C.1.pep
RYDAQGHCTALFTRILFPLALSALVGSLASLPMIWGCCSGLLATHSMFLTSVMSSHWTHMGRRAFLHHML

SEQ ID NO: 344748 - protein, 61 aa, Zea mays
  Clone ID: MRT4577_77577C.1.pep
NELRSILGAIKSTRRCHLDQIELLIVRLLLNHLFFSCGGCETARVSSHMFIAQQVVGNNVA

SEQ ID NO: 344749 - protein, 159 aa, Zea mays
  unsure (1)..(159): unsure at all Xaa locations
  Clone ID: MRT4577_77578C.1.pep
IRSTRSQCTFTVWQRSCESHIESVSKHRIYHRKSKKKNPNKPKRAPSAFFVFMEEFRKEFKEKNPKNKSVAAVGKAAGDRWKSLSESDKAPYVAKANKLKLEYNKAIAAYNKGESTAAKKAPAKEXEEEEDEEESDKSKSEVNDEDDEEGSEEDEDDDE

SEQ ID NO: 344750 - protein, 81 aa, Zea mays
  Clone ID: MRT4577_77579C.1.pep
GLPPVCLLLPGTPASGVWFSFLFLPLALFLGPAAGCSFVLGPIRFVLVPFLGAMRLVWVGFGSPPPVRNLPLRVCLIWAPQ

SEQ ID NO: 344751 - protein, 194 aa, Zea mays
  Clone ID: MRT4577_7757C.1.pep
MSTTGEILRSELSSRTPPFGLRLWIVIGICIWVAILFIIGFMCFWSIYRRKPTKSSFDSTNAIPVSQIPDVSKEIAVDEVREHAAVQTFHVHESCRALAVQEKPCEKDSGRMLGHLVRSKSSDADNLSQCSSAAYQCERAASSYSGDEGSSGNARRQYPTVSASPLVGLPEFSHLGWGHWFTLRDLEHATNRFS

SEQ ID NO: 344752 - protein, 59 aa, Zea mays
  unsure (1)..(59): unsure at all Xaa locations
  Clone ID: MRT4577_77580C.1.pep
MLGITVLAALLACASSCGXPSFPRNLSARVVGGEDARPHSWPWQISLQYLKNDTWRHTC

SEQ ID NO: 344753 - protein, 90 aa, Zea mays
  unsure (1)..(90): unsure at all Xaa locations
  Clone ID: MRT4577_77581C.1.pep
AVLRRRACTSGPDFHRDWVLRRCCGSLAVCLLALAAVVGFFVLVFYLALRPCGPSFFLRAVRLRSLGLCVPALSLGLXVAFVSRRPCGGW

SEQ ID NO: 344754 - protein, 226 aa, Zea mays
  Clone ID: MRT4577_77582C.1.pep
PTSGSESVKQENNVVGTEEVILHSSDTKVEKHSHIDDVCTETEISLTDNGICAVDNHTDRTGCTKQEERGSPMNEANDVSSHDIVFTRRGRKSCEAKQRTCEEEARFEKRITRSATVRQREVSASSHKTSTNEAALEGRGRKGDIVAHYTRKVSSAVSPKGHHAELGDCNTSMPKQTVKETVVDRRDSGVPENDNHANVTKNKESENGKEINLKTQPPVGIVKKTS

SEQ ID NO: 344755 - protein, 67 aa, Zea mays
  Clone ID: MRT4577_77583C.1.pep
TPLPGCSPKLHEYLRRRGPIRRAEWHPSMQPVHPINSRRFERRNGGLAGQFLQQLRLKMSVGEDGRL

SEQ ID NO: 344756 - protein, 64 aa, Zea mays
  Clone ID: MRT4577_77584C.1.pep
NSARGSCAETDLGFGAESETTIWGRPQGTEGAMTPGPIRAVLSGAGAMGGGGPEGAQREGGDYE

SEQ ID NO: 344757 - protein, 103 aa, Zea mays
  Clone ID: MRT4577_77585C.1.pep
TSPGGGPIRVFFLKPVIFFPPQGPPPPLGFFPPKGRFLALFYGKTWVVSPVAFPPPFFFFGAPQGVVFFPPVVPPFLVPGFLLWGLFPWALANFKNPFGKGFF

SEQ ID NO: 344758 - protein, 203 aa, Zea mays
  unsure (1)..(203): unsure at all Xaa locations
  Clone ID: MRT4577_77586C.1.pep
MGGVCSAGIAGDKSPTELSFRAMGFVVEQDFKAFSAAGKNKTAPVEEAVDPNQVSDQSFRFSEKGSPPSTSGKVRRSVSKEAKTGKPRRSASGKAGPSKVSDIGTVLGRKSTSGLGKAVEVLDNLSSSMSSLSPGGGFVAGPTTKGNKISILAFEVANTIVKGMSLMQSLSKESXKLLQDMVLLSEVXHDLVSXDMDDLMRML

SEQ ID NO: 344759 - protein, 70 aa, Zea mays
  Clone ID: MRT4577_77587C.1.pep
MGGVCSAGIAGDKSPTELSFRAMGFVVEQDFKAFSAAGKNKTASVEEAVDPNQVSDQSFRFSEKGSAPST

SEQ ID NO: 344760 - protein, 63 aa, Zea mays
  Clone ID: MRT4577_77588C.1.pep
KVKGPAVPSVRMLEILYVAHYCLLGVHLRACFPVPWFRTVACGLGCSNIILPNKNREALRNIK

SEQ ID NO: 344761 - protein, 292 aa, Zea mays
  unsure (1)..(292): unsure at all Xaa locations
  Clone ID: MRT4577_77589C.1.pep
FGTRHPCRTPHHAHAHAPLSPNRPXPSIATRTPPXPNPPLXAPPCVPTSLRSSSSSPPSSASSPSHCPSARSRPSQPRCSYKDPPXDVPPPLRPQPSXPSTPPPLXGPPXPPSTIAASPMRTTGPLRGPDALDVRPPLRPXSVLPPSRPLDSPSTTSPPAPPLAPHRGPPSAAQPPPXPPSVVLLTSPAIPIHARXKTPRPSHAPTPXSPPTXPPSEIIAFALPPPEIGAATPCPXSSAXVPFSPHPXTPRPSPXPSPYPLDCCGASARLRAVRDGPDAGLAEQVTVSMAPM

SEQ ID NO: 344762 - protein, 513 aa, Zea mays
  Clone ID: MRT4577_7758C.1.pep
MSTTGEILRSELSSRTPPFGLRLWIVIGICIWVAILFIIGFMCFWSIYRRKPTKSSFDSTNDIPVSQIPDVSKEIAVDEVREHAAVQTFHVHESCRALAVQEKPCEKDSGRMLGHLVRSKSSDADNLSQCSSAAYQCERAASSYSGDEGSSGNARRQYPTVSASPLVGLPEFSHLGWGHWFTLRDLEHATNRFSKENVIGEGGYGIVYRGRLVNGTDVAIKKLLNNMGQAEKEFRVEVEAIGHVRHKNLVRLLGYCVEGIHRMLVYEYVNNGNLEQWLHGAMRQHGVLTWEARMKVVLGIAKALAYLHEAIEPKVVHRDIKSSNILIDEEFNGKLSDFGLAKLLGAGKSHITTRVMGTFGYVAPEYANTGLLNEKSDVYSFGVLLLEAVTGRDPVDYGRPANEVHLVEWLKMMVGTRRAEEVVDPDMELKPAIRALKRALLVALRCVDPDAEKRPTMGQVVRMLEAEDVPSREDRRSRRGHSSHADNESKASSSEFEISSDRRESGPSSRFQA

SEQ ID NO: 344763 - protein, 279 aa, Zea mays
  Clone ID: MRT4577_77590C.1.pep
FFFYSILSPQTTAFLYEYVAKGSILDILCSQEDFPLDLRMRIAIKTAEALQYLHSSETGVTGHGSVSASTILLDNNLVPKLTEFSRSCTLFKKSETTSVVGAGVMITGSLLEKALNDDPSRYGSVLMNLESDVYRFGGVLMALVSRDGDGDHDGLLARFTRAYETEETGRALFDRDVITAEEDVALLDELGRLALKCSVLDADRIAVRPTMKEVADELRTMRRSWKERSRSTEAAAAYVDVATAGAGAAVVPAEARLPNLMRHMFGYRRISVGDPIRVC

SEQ ID NO: 344764 - protein, 187 aa, Zea mays
  unsure (1)..(187): unsure at all Xaa locations
  Clone ID: MRT4577_77591C.1.pep
MRTPFVDPHSAAGRLKQRLARILTRSTCTTNNAAAASSGGTATATAFVSLAKTNNAHTAASSSHPEPEAPPSPYFCTPCTYDYERPKADRGTRPRRTRSASLIHISVDWTGAGAASGRRSAHSDAPLLQHLLSEQVPARDVVGGTKQSKGGGRSKLTTTRSSPSASRRHCXRRPPSWGRARARRSST

SEQ ID NO: 344765 - protein, 62 aa, Zea mays
  Clone ID: MRT4577_77592C.1.pep
LFEEWISTFYQIQGLFSSLSMEELSSYVRSVSFFLSHHRASTHYPLPYHNIVKPFLAKEIFV

SEQ ID NO: 344766 - protein, 80 aa, Zea mays
  Clone ID: MRT4577_77593C.1.pep
AGGSRLCPREVISDLSRATVTYHLCRDMDEDRTETRSTLLSNTLHYYAPGIHPRCFLNYMLVQQGIACHARSAENKIPWF

SEQ ID NO: 344767 - protein, 237 aa, Zea mays
  Clone ID: MRT4577_77594C.1.pep
MAIPQVYPLFMTMGVAMGICGLQLFWNITGNLEVRFGSIIFTPFAYSILARDVLFHLEQDAKDGVVSDFLSLSTMLFPNFSADLNGTTGDMVDFQSTGDVGNSAAITEMGNLVPEPSYEEISMPGPQLLRRRTKMLRLCMLQDYLCSDCHHVATLRFWCLKLESCGLESLHQLENSFWLGFGDWKESLASQRNIASFTYNWNDLRGMIYALTQAPLSETTQAPLSETVRIENDINMF

SEQ ID NO: 344768 - protein, 178 aa, Zea mays
  Clone ID: MRT4577_77595C.1.pep
MDSGSDSDGAPEELTAVQGVEKHEEISQVEKDSAIRVTREGKERRKRWAQRRTSSKPDKKAPKEVVEDEGTKQSEETDTMPGMLPTSVIEILAAREKQTFASDSEEENVKQKVQKRKKRMKTAGPETILLKDVRSTQHVKNALDFLEQRKKQVPRSNAVLKNASKALRLLSSKGNFLS

SEQ ID NO: 344769 - protein, 52 aa, Zea mays
  Clone ID: MRT4577_77596C.1.pep
GLCFWRCDKRPGSRRFVTQKTHYVKKIPGVPNVFYFKELPLCLLKKKCQQMM

SEQ ID NO: 344770 - protein, 82 aa, Zea mays
  Clone ID: MRT4577_77597C.1.pep
KKYLTKNHKLEEAQDENGAAHANGDAEDTQTPKKKKKKSRVISEEAEPTTVTEGKKKKNEEAEPKTATEGKKKMPKAVKADQ

SEQ ID NO: 344771 - protein, 94 aa, Zea mays
  Clone ID: MRT4577_77598C.1.pep
GNNLSSFFFLSSGDIIGIGSYHHIQRGAKHSSPIIINGIYPGPNDFGGEQCKKRNPKKKKTGDPVTAANPTPHLAETRSTTLGIFLCSTFAVYP

SEQ ID NO: 344772 - protein, 186 aa, Zea mays
  unsure (1)..(186): unsure at all Xaa locations
  Clone ID: MRT4577_77599C.1.pep
ACHFAFAPTVPPAPTRSAPPPPTPPPRLPPASSSPEQVRPPLPTHAPTTGLTAACSTSAALPADPDPWVAPARSSSPTRVAELLADALPLVRAIYLPXSYPQKNNVEXDLKWKLNSLTSIDTYMSFRYYSXLPFEIHKTSAQDSHDNSLEILMGDRIENSAYRFRMYYSDAHVFVCRSAPVGADAF

SEQ ID NO: 344773 - protein, 64 aa, Zea mays
  unsure (1)..(64): unsure at all Xaa locations
  Clone ID: MRT4577_7759C.1.pep
SCSVTRSFQVLMGLLVAHXILWITRVGLESSKILASNYACLLELFFCPSSQKIKEKKGGPATRR

SEQ ID NO: 344774 - protein, 86 aa, Zea mays
  Clone ID: MRT4577_775C.1.pep
HKNKISNSIGTTQLLYSWGTARKKKKSEKKPSQQGSAKKKKKLQGRARPLLIPIISPPTKKQRIQLQWVCKAYMSVNPVEIPKSHA

SEQ ID NO: 344775 - protein, 61 aa, Zea mays
  Clone ID: MRT4577_77600C.1.pep
TKCSRNRKPRIFPFRNSVNALLGVGCLNRPKSEQLLANSVSYFKSREVNIHSCIVRQAFNP

SEQ ID NO: 344776 - protein, 132 aa, Zea mays
  Clone ID: MRT4577_77601C.1.pep
FTPPPGLLEVITNAFFFFYQWVSFFPSPSPPSYTSIRKIVWFGGVPPDIKKLCGPALLIFGRPKFFFPHIFFWWGVFPHFFFFSLGPPFFFFGCFPFFPPIFFQTFCFLYSPLIPRGSKKNKITAKNFNHNN

SEQ ID NO: 344777 - protein, 124 aa, Zea mays
  Clone ID: MRT4577_77602C.1.pep
HASVVVIYLGPEGWYNICKVGVFEVDLSTNPFRFTETNSLDGDCIFISPCSSNSFCACPYDGVEDDLIYFIGSLNHSRNASPLDKFVYNMRDGTLAPFALEITDDDLRAPDGSRMNPTWLLPSE

SEQ ID NO: 344778 - protein, 50 aa, Zea mays
  unsure (1)..(50): unsure at all Xaa locations
  Clone ID: MRT4577_77603C.1.pep
RPGTESSPPAANTEDKAKRKKKXEKGLGAQNPXRSRIHHGRWVHLPSAAT

SEQ ID NO: 344779 - protein, 253 aa, Zea mays
  Clone ID: MRT4577_77604C.1.pep
IRHEAGLVIIRARRRKGAEKKKRKLQLEAQSRNSSTTEDALKLWRIEESSSEFTLYDFAELAAATGGFSDENLLGRGGFGPVYKGKLADGAEIAVKRLAAHSGQGLEEFKNEIQLIAKLQHTNLVRLVGCCVQEEEKLLVYEYMPNRSLNCFIFDQQRGPLLDWEKRRRIIEGVAQGLLYLHKHSRVRIIHRDLKASNILLDKDLNPKISDFGMARIFGSNMTDANTNRVVGTYGYMAPEYASEGIFSVKSDV

SEQ ID NO: 344780 - protein, 111 aa, Zea mays
  unsure (1)..(111): unsure at all Xaa locations
  Clone ID: MRT4577_77607C.1.pep
RXSAFASAFLFSKVVFCETFVSEFFVYFSADLWTATSVGTECASEGSSKGVPFKGKENHWSCLWRTQVGPGEDGALGLACLRCVSPIENLCGFDSAQPDLLRGLHRIATHL

SEQ ID NO: 344781 - protein, 414 aa, Zea mays
  unsure (1)..(414): unsure at all Xaa locations
  Clone ID: MRT4577_77608C.1.pep
MAARVGLLPHAILVSSRALPTPRARVPYPLPPVPSYLRHASSSASRSCRASPRFVAVRAMASGNPYAAELAAAKKAVTLAAKLCQTVQQDIMHSGVQAKADKSPVTVADYGSQILVGFSLKMDVSSGPFSLVAEEDSDELRKDGAEEILEDITDLVNETIFDDGSYNISFTKEGILSAIDDGKSEGGPSGRHWVLDPIDGTKGFLRGDQYAIALALLDEGKVVLGVLACPNLPLSSINNINGNSSGDKVGALFSATIGCGAEVESLDGSPPQKISVCSIDNPVNASFFESYESAHSMHDLTGSIAEKLGVQAPPVRIDSQAKYGALARGDGAIYLRFPHKGYREKIWDHAAGSIVVTEAGGIVTDAAGNDLDFSKGRFLDLDTGIMXNQQELMPSLLKAVQEAIKETNQTASCR

SEQ ID NO: 344782 - protein, 83 aa, Zea mays
  unsure (1)..(83): unsure at all Xaa locations
  Clone ID: MRT4577_77609C.1.pep
FVSSSFYQLLFLLRIDPRKAAGIASRWMGQDTMPRSIDHVEAVTHFDDDSDXLQQWHQHIGALCPTLTDIFDRMLSKGITITL

SEQ ID NO: 344783 - protein, 54 aa, Zea mays
  Clone ID: MRT4577_7760C.1.pep
IGVPLLYTGEKSEESMSIVIGCDSFFTGIGARTTKEEVGSLLGFSSHTYRSFSY

SEQ ID NO: 344784 - protein, 62 aa, Zea mays
  Clone ID: MRT4577_77610C.1.pep
WPTGAILILEKPPPDSFTHYPAKNCPGTYDICFHLNDPSPETATLPSTPHRTPGPQDMNTKI

SEQ ID NO: 344785 - protein, 401 aa, Zea mays
  unsure (1)..(401): unsure at all Xaa locations
  Clone ID: MRT4577_77611C.1.pep
MASGNPYAAELAAAKKAVTLAAKLCQTVQQDIMHSGVQAKADKSPVTVADYGSQILVGFSLKMDVSSGPFSLVAEEDSDELRKDGAEEILEDITDLVNETIFDDGSYNISFTKEGILSAIDDGKSEGGPSGRHWVLDPIDGTKGFLRGDQYAIALALLDEGKVVLGVLACPNLPLSSINNINGNSSGDKVGALFSATIGCGAQVESLDGSPPQKVIAFILINNLKFLTYLLSYXHFSFSXHYLVIIFNLXFLLTLGELXXISVCSIDNPVNASFFESYESAHSMHDLTGSIAEKLGVQAPPVRIDSQAKYGALARGDGAIYLRFPHKGYREKIWDHAAGSIVVTEAGGIVTDAAGNDLDFSKGRFLDLDTGIIATNKELMPSLLKAVQEAIKETNQAASLL

SEQ ID NO: 344786 - protein, 64 aa, Zea mays
  Clone ID: MRT4577_77612C.1.pep
KPHLSKSLFVLGEFGGNDYNAQIFGGYTPEQASGQSATIVDAIGKGVEQLISLGAMYVGGPGAC

SEQ ID NO: 344787 - protein, 65 aa, Zea mays
  Clone ID: MRT4577_77613C.1.pep
RLLLTDPSFRVSTRLQVNHPAYGRTETGPCYSSFVLRYRPHFFSFFFSLSLSVIRLLVFCRCPLD

SEQ ID NO: 344788 - protein, 48 aa, Zea mays
  Clone ID: MRT4577_77614C.1.pep
MYCDLFASIVFQALMSPQSIEGPVSVQNGRAPGRVQIPLVPNAIGRVP

SEQ ID NO: 344789 - protein, 58 aa, Zea mays
  Clone ID: MRT4577_77615C.1.pep
IGYHIAICIGDANGKLMLAHAASAQGISVVEQISGKDHILNHLSIALACSINTILCRV

SEQ ID NO: 344790 - protein, 113 aa, Zea mays
  Clone ID: MRT4577_77616C.1.pep
FFFFFFFCFFFFFWGFFFFRKEVFFFLLFTEKRKGLLLYTPPPLGKPFYWDNSITFFSGNKDPGTPPPKVVIPNPPVFSAPKTQKTPAFLKSKKPQTPLKVSLTKRAPKGFGF

SEQ ID NO: 344791 - protein, 72 aa, Zea mays
  Clone ID: MRT4577_77617C.1.pep
RAHTHAQHLFWQCNSSPFFLFPSQGKKGSHLFRVNTNRLQPAVIHINICRELRWISQCTLFSFTNGSVNLLP

SEQ ID NO: 344792 - protein, 35 aa, Zea mays
  unsure (1)..(35): unsure at all Xaa locations
  Clone ID: MRT4577_77618C.1.pep
SDTCWQECPSHKRLXSTRSMKHTDAMPSICPNRFS

SEQ ID NO: 344793 - protein, 208 aa, Zea mays
  unsure (1)..(208): unsure at all Xaa locations
  Clone ID: MRT4577_77619C.1.pep
SPILLPACRHTSRSKRTRQRSIHQWLPEILHPLLLLLDLSVXSATNAXIIYTEAHVDPIAIIAQXLTPLTLMGXKHPGVLAYKLLLALVASALQQPIAXQSQLQSLGXHITLQTXIATQHQQHXXVPSLSHLXAVVNPVAYLQQQLLASNPLALANEAAYQPQQQLQQFMPALSQLGMVNPAVYLQLRSSSALSVGNAPTYLEXQLLQ

SEQ ID NO: 344794 - protein, 66 aa, Zea mays
  Clone ID: MRT4577_7761C.1.pep
FGSALAEICLLRGSNWLLTVYCGRANQIHPVDDRTGPEPVCEKHPHECITPTPYSRPRTVSLMVRA

SEQ ID NO: 344795 - protein, 73 aa, Zea mays
  Clone ID: MRT4577_77620C.1.pep
LHPRATPPAWRNAPDLPHMGAGHKKRLKGPTRPRGSVTHFPWQLAGRAVKRKNSGEPHQTGGRSSPPLEGRSK

SEQ ID NO: 344796 - protein, 61 aa, Zea mays
  Clone ID: MRT4577_77621C.1.pep
HLKLCFPRQINGTEGKPNHMEWTHGERTFQSYRRRQPLERTRTTLTCKRRGTFRGTRTSQI

SEQ ID NO: 344797 - protein, 63 aa, Zea mays
  unsure (1)..(63): unsure at all Xaa locations
  Clone ID: MRT4577_77622C.1.pep
NILHPTFYVIFFSCRTVVSLHASKISHMGVQYAAKNHIXRLXAXGXPXTRTFXXYINRTLLYH

SEQ ID NO: 344798 - protein, 135 aa, Zea mays
  Clone ID: MRT4577_77623C.1.pep
PRVRQPQLCPPSPHPRIRGAPTPLSHSSLPAAPAVDDDESPRMTGTESPAPSPMSGSILFAEVDRFAGGAGSPPSSSSSAQSPIGSTPVSQTILLQGQPTQREQGSIMPMDIATVRNTNANVAVPSWDDTLAQSL

SEQ ID NO: 344799 - protein, 62 aa, Zea mays
  Clone ID: MRT4577_77624C.1.pep
CLSSESLSELTWVFQPFHFIQGGRVFKPLVDASFISMWSTLARGCVSAVKSSQSASKLQLIS

SEQ ID NO: 344800 - protein, 127 aa, Zea mays
  unsure (1)..(127): unsure at all Xaa locations
  Clone ID: MRT4577_77625C.1.pep
MRPERVGGVAPTTVLLAGGGGGGRPSLWRTPTPYLFLGFATMMVLIAVALVALMCARRKASSSSSSANGGDEKPASXAGPGAARPGAPXKVVVVMAGDALPSFIAVASARKPLAFAATPAAAEAEDL

SEQ ID NO: 344801 - protein, 99 aa, Zea mays
  unsure (1)..(99): unsure at all Xaa locations
  Clone ID: MRT4577_77626C.1.pep
HAYGSSRSRSDTRDLDVSGVIQFQHNDELDPAKKLYPGGSYYDTLXLADDPEKKERMQLAEIKHARMAMVDLLGFSKQAVTIGKGALNNWATHRSDPLH

SEQ ID NO: 344802 - protein, 179 aa, Zea mays
  Clone ID: MRT4577_77627C.1.pep
DGVKHMVMTTGTPNATDRGAAVLCASAFAVKAAVDLPIQAQCEPPDDDRWFERMKASGIDALGMHLEAVTPEIRARIMPGKASVPLERYYTAFEAAVPVFGRGQVSTYILAGLGDAPEAILEMAERLIKMGVYPFVVPFVPISGTPLESHPAPGPDFMHGILKPLADLLVGADLRATDI

SEQ ID NO: 344803 - protein, 45 aa, Zea mays
  Clone ID: MRT4577_77628C.1.pep
AVVTTQSTRGNVWLNRTFNGCTVVQLILLLLHCICIYLCCGLICL

SEQ ID NO: 344804 - protein, 147 aa, Zea mays
  Clone ID: MRT4577_77629C.1.pep
SKAKQENRNKKRLQRIKRNGSDNPHGTRETKLTQTPGARHEPTGELITEILLQSLNGWTNPIKEHSVSMHLEAPIPQNDDIVNPFSLILHCTLVGLPPPVLKRLVGVVILKSYRLKGDEQGTRDPGADGHIPFLHCLGDEASVDRDK

SEQ ID NO: 344805 - protein, 71 aa, Zea mays
  Clone ID: MRT4577_7762C.1.pep
YLPVQSVGREFCVKYNEPRSNQTEFTVVLGICFCQPVTGRLFLGFLPLDFRVAYKFLAYMDKHQSMKRFTC

SEQ ID NO: 344806 - protein, 55 aa, Zea mays
  Clone ID: MRT4577_77630C.1.pep
KKVIKSGWPAMVPISKTPPNFHSETGHQQILSTYTRSTVYNCKWRQEKKNLSPDQ

SEQ ID NO: 344807 - protein, 182 aa, Zea mays
  unsure (1)..(182): unsure at all Xaa locations
  Clone ID: MRT4577_77631C.1.pep
RHAQFPAPAPNNRNTREAFAEEESRPAPRRCGWASILGHQPPPAPTTVAAAPPGATPVVCFNCGEEGHCQVECKQPPTCFKCKRMDHPTLLCPDQXGGELMLFGYALDDLGFLQMDLSEPAATPSLTALVSALGGKTASPAIIMDELRHLFRPDWDWEVTPISDHDFTAVYPDLVSLRYHTH

SEQ ID NO: 344808 - protein, 81 aa, Zea mays
  Clone ID: MRT4577_77632C.1.pep
WPLPCNRRMLRKLIYHALSTKKLKLHQQEKKTLGCTLDTLRRSSVFLARSKPVKLGYVTTLCNRRITSCQKQVLPVHGMYL

SEQ ID NO: 344809 - protein, 105 aa, Zea mays
  Clone ID: MRT4577_77633C.1.pep
SIGEPSASNFSQPEKLIRLWPPPSERTNHPTPSPMQSVFDVPPPPHERDGDEEDPLRRPRLHRRLGHRNAVLHRGLRRVHPNCLQVVRRGYRLRCRLRCRLRRLL

SEQ ID NO: 344810 - protein, 81 aa, Zea mays
  Clone ID: MRT4577_77634C.1.pep
RYGTHDISTTNLQIQPTARTTLARTYLQAQLQRRTELLLFKATTRRGRGGDGETRTRRRRRDEDEAATAPCSVACGELDLF

SEQ ID NO: 344811 - protein, 127 aa, Zea mays
  Clone ID: MRT4577_77635C.1.pep
NRKLLLPLHHGSGALVSWLFQFKSYSRTEAKLGTRLHGWGGAGGSGCYKQRGNPQTDTNHKRRTGENNLYGPAGKTLLTGKNGPNPFKPKLEQAQVQNAFRAGQGGGTLVGPPLGGTQIAGLGQMEV

SEQ ID NO: 344812 - protein, 116 aa, Zea mays
  Clone ID: MRT4577_77636C.1.pep
TFGLLYVLVYVLVYVLAPRVAIPIVAKKIALWSSSPAALTGHGAASFIPGGTILRAVVSGPTHPAVLEVSESAENSGNTNDPLGKIRSPSAPFAVASDVIPTTRTPLHSLRIPEKS

SEQ ID NO: 344813 - protein, 140 aa, Zea mays
  unsure (1)..(140): unsure at all Xaa locations
  Clone ID: MRT4577_77637C.1.pep
RTYCLDTTRHTWSKVGTWTLPFDGKXVDSATGFQPEVXGSWMELTLPEGWEQKGRTQLVNLGSGRFCVARFMNEMFDPYGSGYVLLTGVEIVPHFDNLTGNDVSSGSGDGSKGKLKLQIIPHKSWVYMPTTPLALIQDVF

SEQ ID NO: 344814 - protein, 409 aa, Zea mays
  unsure (1)..(409): unsure at all Xaa locations
  Clone ID: MRT4577_77638C.1.pep
MSRAIESTMRQSRQFVNLIMTNLYNGAKSLYFVDLKRQPLFKTPLPPTASTDGDRFETQDAFSQTQPTESLVLERLRLPRPSFQFETSTAQDRSWYINCLPLSDRVVFCSDQCGHNFVVDGIARCLVTMPSLHKRKMMPLSIFIPSTDVEGGGSLFLVDRSPGITATRVEFESLVYRKASFSNTYSWQAQLLPPAPYPLYTSYSXRLNSSHQHXPLYTKISSYAVIGGGSHICLSVKNEGTYCLDTTRHTWSKVGTWTLPFDGKVEYVPELKLWFGASADRQKLAATDLSYLSSTVDSATGFQPEVLGSWMELTLPEGWEQKGRTQLVNLGSGRFCVARFMNEMFDPYGSGYVLLTGVEIVPHFDNLTGNDVSSGSGDGSKGKLKLQIIPHKSWVYMPTTPLALIQDVF

SEQ ID NO: 344815 - protein, 71 aa, Zea mays
  Clone ID: MRT4577_77639C.1.pep
PEINGRSHHRSLLQCRMRPLLNRLNRDLSTLGIGSGARVLWWWKPRWAAPPRGVLLAGGGSHFIEPPPKGG

SEQ ID NO: 344816 - protein, 172 aa, Zea mays
  unsure (1)..(172): unsure at all Xaa locations
  Clone ID: MRT4577_7763C.1.pep
MRRMLMRGAKIDNPQCYEEPGCEXRTRPKNQTPAYNGXFHAXPMIDNPNYMGIWMPQEIPNPXEYFEXLTRPDXFDPIRCYQGSKICTMQXGILFETILIDDDEKVATFILEKTCKPKYDAEKDMENAAEEADAGADVISEVLEKIFDVLCSIAXDLSMLAPYRRNIXIDVI

SEQ ID NO: 344817 - protein, 41 aa, Zea mays
  Clone ID: MRT4577_77640C.1.pep
RLCFGESNLAVKQCGDVNFIRLTLTNHYFPCGLLSVQFSVA

SEQ ID NO: 344818 - protein, 150 aa, Zea mays
  Clone ID: MRT4577_77641C.1.pep
AQTPFRHRPVLNLAPRRGSRASHARQSRLCPPISASPRCTLAYPRTLSHMRMEVASSCWNKGPPRSGRKAHSCWRNPRPKSIAVAPPSILGSWHPLRQRPPSSPLPTLTPASDGQRTMQARDPSLPTPPPTMPSPSPHSRPSPHPLAPPH

SEQ ID NO: 344819 - protein, 124 aa, Zea mays
  Clone ID: MRT4577_77642C.1.pep
VKPKRAGGPKPGGAPGPGAPATFFLSINKPQRRGWDQGPWGPPPDGGGKIYFFTTPRGLEQGGEQGDHPVGGPPLGGDPRDELEKGGVKGKPGLGVKKLDLVPPGKGGETKSPPTEPMNPLGGP

SEQ ID NO: 344820 - protein, 69 aa, Zea mays
  Clone ID: MRT4577_77643C.1.pep
KCNPCNCLSNRSQSMDMIIIFLACGGGFTIISKAQLAAIKRYCVVCLLKKKKKSSSVCHPFRQVWGQSL

SEQ ID NO: 344821 - protein, 48 aa, Zea mays
  Clone ID: MRT4577_77644C.1.pep
TSERSAANDCRLPSINARLRLPRLLVEDHECILGGRHMRLCNQRSGSI

SEQ ID NO: 344822 - protein, 140 aa, Zea mays
  Clone ID: MRT4577_77645C.1.pep
RWYMGLPVGRTAASQREIDSKGLMPNLGAAVSVPFRLTAQRRQVVVSSSSSSDRDMAATALLAAERPLASVQVYVPAVAELTSSEEVPLQQRAAGRCWSPRRRRCTGRTTIGRAVEASGGGAWRPSGRHHRRSGGASPAG

SEQ ID NO: 344823 - protein, 129 aa, Zea mays
  unsure (1)..(129): unsure at all Xaa locations
  Clone ID: MRT4577_77646C.1.pep
MFSPGAPLPGKISREKVSRIFLTALASPNSLGKPFEVKSLFPFNEPFFFSPPNPPPEKGFXSFFKKPKKGLPGKKALKPPPAQVLKCRLIKNFVCFFKFCPSTPPFECLKSSKNINAPNVKFSPPRPAP

SEQ ID NO: 344824 - protein, 228 aa, Zea mays
  Clone ID: MRT4577_77647C.1.pep
MEERPSPEASAGNSRAEDDFRSCCGDEEEWEDTEESFTAGVAKGELDEASIEANCLGQLRHPKLVELIVYCCEDDHRKVAVFCCWFLRSITAIHLACSAICAYPFIEALWVSAKELLGIKSDSDEEQPSAMTKGPTPIHQLSRTSCATNLYPSSEWEQMRKDNYKTVNVEESLHKKCFNEYTIQLILQTEGGAGGAKFSQFGADLSRVELGFHILSGSGGGAVQCHGD

SEQ ID NO: 344825 - protein, 57 aa, Zea mays
  Clone ID: MRT4577_77648C.1.pep
TLVCMLLSSTGAKATSRAHLYSGDSRISFTSQSSLRPRPTSCNRLAPALRSTPLEQH

SEQ ID NO: 344826 - protein, 55 aa, Zea mays
  Clone ID: MRT4577_77649C.1.pep
VTKAFIAKNARVEEKVIMNNFENAQGALGYTAGSFIQSDLVTVIKIALTQVGRFT

SEQ ID NO: 344827 - protein, 126 aa, Zea mays
  unsure (1)..(126): unsure at all Xaa locations
  Clone ID: MRT4577_7764C.1.pep
EAGRDTTIEEPPSAMMASYPTKKDGDHPKPSPTRPTTTSAADDRDNVWEENLSXSCGQHLXCAFGLRNXRLSWPCCRIEGASCCXDHDRWRPTGYPVCNAGGETCATXQNRPPSREALNPTLGKLN

SEQ ID NO: 344828 - protein, 106 aa, Zea mays
  Clone ID: MRT4577_77650C.1.pep
PTRPGFYTHQLGEPLPSLRLQQQQRRHRRRRRLLAGIVAGGKRPGSVPAGGEAVARGRRRRRDCDPLHHSGPGPRLRGLRLLPRPVYTGDGCCVGGSGAGFPLGRG

SEQ ID NO: 344829 - protein, 126 aa, Zea mays
  unsure (1)..(126): unsure at all Xaa locations
  Clone ID: MRT4577_77651C.1.pep
LGCMCMRFMSPTVGCMLYCHPXGVRPPTGMTPHWLTHGHRGVSALSQVDYTGCHSVLFRPRTSGSLAPAPSWARWLPPSQALIILESIMVWSRFSTVHTDDSIQVKARVSWAYEASMFSALPGIYI

SEQ ID NO: 344830 - protein, 73 aa, Zea mays
  Clone ID: MRT4577_77652C.1.pep
TVLFKNKIVLYPLFYKRLINMSLNVRVLRYDCLASTSDTGSEPAHAKHAADPARPQAPPRRSRTTGTGARLPR

SEQ ID NO: 344831 - protein, 84 aa, Zea mays
  Clone ID: MRT4577_77653C.1.pep
GGWRGPPEGGFPPWGGPRGGPSGGCFPATPPCLGQNFSQTLFKPSVKLGPQKKLKGGCFFKNGTGQTNFPGGPCCCRSSPGGPR

SEQ ID NO: 344832 - protein, 58 aa, Zea mays
  Clone ID: MRT4577_77654C.1.pep
HPTSPLTLYYQNTYPPPLPLIYSPIPIPIHNKHPPYEPPYLPHNKPFHASIPLHHNLL

SEQ ID NO: 344833 - protein, 90 aa, Zea mays
  unsure (1)..(90): unsure at all Xaa locations
  Clone ID: MRT4577_77655C.1.pep
HSSRSRAEXXTPPQARRGVAGRRPEPPEQRLDGTRRREKNGGRRRACPPPDVDSRAPEGASPLVAGLARRGGGGPATPWRQDVGTGDAGR

SEQ ID NO: 344834 - protein, 280 aa, Zea mays
  Clone ID: MRT4577_77656C.1.pep
ALLDEACMFPKSTHETFAQKLYQTFQKHKRFVKPKLSRTDFTICHYAGEVLYQSDQFLDKNKDYVVAEHQELLSASKCSFISGLFPPPPEETSKSSKFSSIGARFKQQLQALMDTLNSTEPHYIRCVKPNNVLKPAIFENVNVMQQLRCGGVLEAIRISCAGYPTRRTFYEFLHRFGILAPEALEGNSDEKAACKRILEKKGLLGFQIGKTKVFLRAGQMAELDARRTEVLSAAAKTIQGKMRTHIMRKKFLSLRKASVCVQAIWRGRLACKLYDNMRRE

SEQ ID NO: 344835 - protein, 47 aa, Zea mays
  Clone ID: MRT4577_77657C.1.pep
FSFTSLQRLCSIVLLDVHILPPQLKGVDAVQAEPIWGALGASQLQAN

SEQ ID NO: 344836 - protein, 29 aa, Zea mays
  Clone ID: MRT4577_77658C.1.pep
MAQSMRIVVLALLALLEVEAPAPVHTAHE

SEQ ID NO: 344837 - protein, 127 aa, Zea mays
  Clone ID: MRT4577_77659C.1.pep
MTLRKPVFTKVEKLQPGTQGHNLIVQVMNVGEVMEKVRPSGDKLQIAEVLLADETGAVLFTARNEQIKLFKKGECVTVRNAKVNMVRGFIRLVVDKWGAIKPPGPTEKLQGPPKVENNISNIEYELV

SEQ ID NO: 344838 - protein, 70 aa, Zea mays
  Clone ID: MRT4577_7765C.1.pep
SIIHSHVRVLICNTISLHSFENSSSVVCDEIYSQSMFIVRSVDGNDFEVLFCSPPSLRPPPPLGRGSSSP

SEQ ID NO: 344839 - protein, 122 aa, Zea mays
  Clone ID: MRT4577_77660C.1.pep
THGPAAHRLHGYTFLSPATSRNRTDSHGLRSVARPTLAEPPTLWLNCLRLDQILHELAGVHWWRDATNVVSTLLSGNRRPESYKGTCMWWPGGGSDLESSPNVPDKPTATTIIASILAIYFF

SEQ ID NO: 344840 - protein, 51 aa, Zea mays
  unsure (1)..(51): unsure at all Xaa locations
  Clone ID: MRT4577_77661C.1.pep
RAAAVGLPYLFLPMYVYICKYQICNVLITIXLGRPHEYFTHRYVQHQIFHF

SEQ ID NO: 344841 - protein, 237 aa, Zea mays
  unsure (1)..(237): unsure at all Xaa locations
  Clone ID: MRT4577_77662C.1.pep
MSMTKLSIRYVLFHLIILGCLYFTSEFSCFNIFVSLMQLLLHPESDDSAQLSXIETEKLLAQLVETEMNRRLKEDTYKGKKFNAFCHFLGYQARGALPAKFDCDYAYVLGHVCYHIIAAGLNGXGYMTTVTNLKNPVNKWRCGATPISYYYFIRLMGRKASHVALECALQSHPNMVKFSPLIQPLLRQFPASAVCSLQSLRAASPAKSELAEIVPQEKSPKDSIQPMSPSPRYSTSR

SEQ ID NO: 344842 - protein, 80 aa, Zea mays
  Clone ID: MRT4577_77663C.1.pep
FPFSGPIFGVVVRRGRLPSWAGIVACLNTAGTSLPLRSMGDFAEAGGQFPGRPSRGSRCSRPQDWHHKHLIKNKQKNKHN

SEQ ID NO: 344843 - protein, 74 aa, Zea mays
  Clone ID: MRT4577_77664C.1.pep
EEAKGFWLKLYQVKFSPLIQPLLRQFPASAVCSLQSLRAASPAKSELAEIVPQEKSPKDSIQPMSPSPRYSTSR

SEQ ID NO: 344844 - protein, 247 aa, Zea mays
  unsure (1)..(247): unsure at all Xaa locations
  Clone ID: MRT4577_77665C.1.pep
NCRYNNSSCDRCSLPIHRSEMQTDIIYEHWDILPPXKQIKDPETKKPEDWDDKEYIPDPEDKKPEGYDGIPKEITDPDAKKPEDRDNEEDGEWTTHLLXHSQPKYKGPWKQKKIKNSNYQGKXKAHMIDNLDFKDDPYIYAFDSLKYIGIEMWQVKXGTLFDNTIITDDLALAKTFAEETWGKHKEILCSYAWSEDGCHSALAVCSLQSLGAASPAKSELAEIVPQEKSPKASIQPMPPSPRYSTSR

SEQ ID NO: 344845 - protein, 82 aa, Zea mays
  Clone ID: MRT4577_77666C.1.pep
YLYRATNHRSYRTPELVTGVNRGSAPPSVSSCTTTKRNRWRALGLSRTAPPSRACGDRSAYRTRGAPGDQSAALIPSWDRHY

SEQ ID NO: 344846 - protein, 78 aa, Zea mays
  unsure (1)..(78): unsure at all Xaa locations
  Clone ID: MRT4577_77667C.1.pep
RDAQKCLCKLCCKIILHVVLWFTGEAAQHEESEVMDGEDDDDEDDDDEDDDDYDTKKDKGTAGGEGQQGKRPXKCQQQ

SEQ ID NO: 344847 - protein, 139 aa, Zea mays
  unsure (1)..(139): unsure at all Xaa locations
  Clone ID: MRT4577_77668C.1.pep
IIWCKAGLESLGPDGVRFEAAADAYSNRSLKYXETALRDYEAQXLEDDPFVHRPFYSLSDTLLDQNLCTXLSPTSRVAIAHLAXTSNCPLTIFENKPADMILDKKFPGTLDQSAGCLIIFGDPHTEDILPATLETISHV

SEQ ID NO: 344848 - protein, 384 aa, Zea mays
  Clone ID: MRT4577_77669C.1.pep
MSDFGTIGDKKIDLPWVSEEEKHLHKSLFDSAHEMPMKPNGSLLVVYYLRRYRYLEAYEVDRSLQKFEQKILENTTEEIASKIRAIARWRESLVVKCLDMLPEVQRENVKAINSGEQSQFARTAQLSSPAHVGKSQSPVMDLSTTFTTSLQNKSSLLRKNNALTDSGGLIRSSRSEFGRKVPSVLDTRASPHGPPTSNMRSSAGDMFPTVGQRVESPFLRGAKDISSRKGEEGFKEGIKYGDHDPVPMYLNLSSGDTPMKDYRTSLLKTAVNKTTIFQGKDSVGKGELHFGSRAEKPFILNGTGVGQNGLAKVSGYAGFREDYKVPTKENILSSSKRSSIDGAEASKGVSRWRSDESSEDEEERTNRESGASLVTRRRPRFSRR

SEQ ID NO: 344849 - protein, 55 aa, Zea mays
  Clone ID: MRT4577_7766C.1.pep
LSEAIAERLPRPTASRPNTRVYWLYHVMHARPYTPVLYGLRKTTDVKIFTPLCHS

SEQ ID NO: 344850 - protein, 51 aa, Zea mays
  Clone ID: MRT4577_77670C.1.pep
EEVINRGSCLIHPAYIESAINNVLSLEQQQLETNSCHFPYNMAQPHTLVSG

SEQ ID NO: 344851 - protein, 184 aa, Zea mays
  Clone ID: MRT4577_77671C.1.pep
SLDYALSNPSHVGAVDPFTKLQYTSMLYAQVDAVTFAAARLGYGGVPVHVSETGWPSKGDANEAGATVENARQYNRNLLMRQVSGEGTPLRPRLRLEVYLFALFNEDMKPGPASERNYGLYQPDMSMVYNVGLSQLATTSAASLSLATSPAARTTDVGKDYAGLCLVAVSVAILLITQQGSLLL

SEQ ID NO: 344852 - protein, 140 aa, Zea mays
  Clone ID: MRT4577_77672C.1.pep
GPSRPAGTRMYYLLLSCAPRSPVPATRSALGKETLPFATETDNYSQQNGHTARLRLPPTVCVLSERQTSTNGPRHVMSNRTPASHTECDSTIRRIRSRRSRPANLHADKPSKNVCSSSKDTALYTVNMDMWSITCYSHRP

SEQ ID NO: 344853 - protein, 59 aa, Zea mays
  unsure (1)..(59): unsure at all Xaa locations
  Clone ID: MRT4577_77673C.1.pep
KTQKKKKTRKKEEKKKKKKKKKKKKKKKKKKKKINKNKKKQXKKKKNIKEKNGARAFRV

SEQ ID NO: 344854 - protein, 126 aa, Zea mays
  Clone ID: MRT4577_77674C.1.pep
SLLTSVNGMLMANDLNKRGIEMLGRDGKLLALPSAMGTSDQLEINLPFFIQSTSTGLSVHWTLAHTLSNNNQSRALRRLNGLRTNRISSGGEYQHRFYTKATTRTRRWSKQQPQVKNSVSKAVTRE

SEQ ID NO: 344855 - protein, 60 aa, Zea mays
  Clone ID: MRT4577_77675C.1.pep
LMYAIIRGLRFTMSGHFVPSAAPWRNFFRDYIKSFDPSSTVNQERYPRLQPKIGKGKGFL

SEQ ID NO: 344856 - protein, 238 aa, Zea mays
  Clone ID: MRT4577_77676C.1.pep
MDINHLQAKTPKRLITKVSSEVTETEGPEGIEKTKSVPVKFKVGAPDKSLERNMSVSVSLVSDKRVMDVTDSRSTGKVNKIVIPNKMKSDDFPPDTPKPSVVFRPPAEEKDVPRKKITIKQPKGIDQQRHVESRSVQEPTRKTRKIVELSSFEDKSREDDHWVGGEPSQVNSSHGRRLGLEGKISKATMENERSWRDFEERREMPQARLFDATIYASREEDHLKAKKKNKKKKKHEFK

SEQ ID NO: 344857 - protein, 133 aa, Zea mays
  unsure (1)..(133): unsure at all Xaa locations
  Clone ID: MRT4577_77677C.1.pep
MSTEEDVVGEVPVTDVPWEVPEAQADEEPKAKNAPKEKNVPKEKKISXAVNKPVACPPYAEMIVQAIAALNDRKGSSSAYINKYIQVKHGDKLPCNFCKELTVHVKKVAGVGKLTREKNCFKMASTDVKPEAA

SEQ ID NO: 344858 - protein, 179 aa, Zea mays
  Clone ID: MRT4577_77678C.1.pep
DALEAVIVTWTKAFLHAFNVGLSTEHELWARVFAGRHAGVGRGIFADLSRCVMLHMLSFTEAVAMTKRAAEKLFKVLDMYEAVRDASPVIEAFLSADEPAAEHSHSGLAELKSEIAAVRSRLGESAAAIFRELESSIRADAGKQTVPGGAVHPLTRYVMNYLKYACEYNSTLEQVFREH

SEQ ID NO: 344859 - protein, 123 aa, Zea mays
  Clone ID: MRT4577_77679C.1.pep
VASNYGWRHQSQNLDKFHLAPPNLGAHRTGQRRIEQLASTQATGALEEGTRIGPEATWPWPRPPLRTTKKSEGATTNRNTRTTTGGSRRRRRWRASLLRLGRRWSRGAPLRGRHLRRGNASAD

SEQ ID NO: 344860 - protein, 196 aa, Zea mays
  unsure (1)..(196): unsure at all Xaa locations
  Clone ID: MRT4577_7767C.1.pep
LMAAPVATSPVKQAPRTHQHSXXXXXXXXXXLLVAGGAVEIRHGEGPRGPKRPVPRHLAGGGDVHAQPRGRERGRFPRAPXXXXXXXXLLXXXXXXXXXXXXXXXXXXHGVXXXXXXXXXRGGQGAVRLPPPRPRLQHAQPLVERVLRVGDLXXXXXXXXXRQARERLELDRVEAGQAPLGGQGIIQGFERGQPHH

SEQ ID NO: 344861 - protein, 77 aa, Zea mays
  Clone ID: MRT4577_77680C.1.pep
AMVHLSSCCTWVSASAGALWCTSIWMSSSNKHLWFVCHESWLWLCWFKDPVVSCVLYPKLFCTQYGLNPLESLMFDL

SEQ ID NO: 344862 - protein, 393 aa, Zea mays
  Clone ID: MRT4577_77681C.1.pep
MIWYGSIISLTITCLCFSGERISLFIKPAINTRSVCRRIPRRCLVRCMHQRFCCKMFEKQATVSTQQCQRGARLAAYSISCFPAAFSRRFRYPNPSPQAFPFSLPAAGAALLPRPLRFGLHPSSLPFLRSGGSSSRASFPGSTTAGRSAVMAGRSLAEPSLRSATDDDVSAVPSTTTSAARGVSAQDEGPASGVLVECRICQEDGDEACMEAPCSCKGSLKYAHRRCIQRWCDEKGDTVCEICLQQFVPNYTASSKLFQRGRNTFFFSAPGYIQARPMQNADHSATSTGYGHDQTPDPTGVLCCRIIAIALMVLLVSRDAVSVFLGDQDAYTVAVVTLLMLRTAAIVIPVYIILVAVTELLHRRRHRQVVHGQASDHAAEERTQPQQHVISIQ

SEQ ID NO: 344863 - protein, 97 aa, Zea mays
  unsure (1)..(97): unsure at all Xaa locations
  Clone ID: MRT4577_77682C.1.pep
HAEVGAHRFHQYREVGXALPTPTDERPKXIYHMKLCDTNEVHAKPXCLDFLRKLKNVKMSNGQLLAINXIFERNPTTIKNYRIWLRHQTKTGDHNLD

SEQ ID NO: 344864 - protein, 74 aa, Zea mays
  unsure (1)..(74): unsure at all Xaa locations
  Clone ID: MRT4577_77683C.1.pep
AAPDDVVTDVCAHPVFCQNILSIYRIVIPLASVTLLDVRSNFGLRVVTPXVSLECSRYETRRQKNEQGFRSQIY

SEQ ID NO: 344865 - protein, 92 aa, Zea mays
  Clone ID: MRT4577_77684C.1.pep
CLHDVLEGDESEYVRYDDIVRDQRAPGHCRRGHQRTLPPPSLSQAEAIEESSIEEERSRASHGYGVGLGWLPSGMTGSTHGVCTEVGCYPGR

SEQ ID NO: 344866 - protein, 105 aa, Zea mays
  Clone ID: MRT4577_77685C.1.pep
YLLVFHHMDKLWRYSLCVGECFKHAFSPGRAAHLCLLIQSCDYENKPWRCPLDSCWTAVTSITPLRSNLPLKHLNGTPETATFHPLLTRVERDSVLNMSRLHAYH

SEQ ID NO: 344867 - protein, 57 aa, Zea mays
  Clone ID: MRT4577_77686C.1.pep
PRTTKKKSGTRGHCHPLKSAVFEYGGRKGRMAASGASKPQGPSRCPISTKTLRGSSY

SEQ ID NO: 344868 - protein, 102 aa, Zea mays
  unsure (1)..(102): unsure at all Xaa locations
  Clone ID: MRT4577_77687C.1.pep
MSGWLPVRAAAEAMVAAAALPLLVGGAYADCYNYCFNDCLNKDMSMRDYCSYACDMTCAPDSAPLRPFAGLPINCQLSCFWDSCNRYLADANNIIXACFGQC

SEQ ID NO: 344869 - protein, 46 aa, Zea mays
  Clone ID: MRT4577_77688C.1.pep
KHILNLLLILHKHSSCKYHFLLHPIILNAYNQIFHFYNHTYYKITI

SEQ ID NO: 344870 - protein, 208 aa, Zea mays
  Clone ID: MRT4577_77689C.1.pep
PGEPKFGCWPFQKNPQPVFAICKKIFPCKFCPGKVWGPPMGQEPQGAPFLLFWPGNWGLTPPLYPLRLGDLEGFYGLKPLLGGGKKRGENRVFQPRGGKKNTPFPRPLWCPYFQKGGAPPKKKPFDLWPGFKKTVLKGKRVRVFPPPVSNHWGIKKIRGNREALGPLPFSGVCGKFKFWRGAKKKWHFFFGQPQTGGFFPFLYGIFWP

SEQ ID NO: 344871 - protein, 44 aa, Zea mays
  Clone ID: MRT4577_7768C.1.pep
NKSIGATNPRRTEAHSTDPCNEHKKLKASFQRLRTVIVGKQTTT

SEQ ID NO: 344872 - protein, 69 aa, Zea mays
  Clone ID: MRT4577_77690C.1.pep
AKQHLTSFPAANMGQLFLQSTPQHDEKFTVHCSSGPFNEHTRGCQEHSTKRACSALLQMLLWACNCLNP

SEQ ID NO: 344873 - protein, 41 aa, Zea mays
  Clone ID: MRT4577_77691C.1.pep
FYCWVSTYDSIIDNGYPGCHTLVLGELVLVTHINSISSMDL

SEQ ID NO: 344874 - protein, 106 aa, Zea mays
  Clone ID: MRT4577_77692C.1.pep
GRPFFFFFFFFFFLKFFLAFFFNFYFFFFWFFFFQKPRWAPTTLDHQGKQRATRPPPKKITPFKTGGTRGGKRNKILGFKGPPPLSSPSSLHCCLTPRRGFHHSFP

SEQ ID NO: 344875 - protein, 97 aa, Zea mays
  Clone ID: MRT4577_77694C.1.pep
STTRMVIVLGRSRSSWVSVQSVLGVESAPHQALWVGANSMYFMCCNSGAGCLTSLLWYLRVICRSLVEPISGVCSCPGLHARFPYNPQLFSAVDFFY

SEQ ID NO: 344876 - protein, 178 aa, Zea mays
  unsure (1)..(178): unsure at all Xaa locations
  Clone ID: MRT4577_77695C.1.pep
PLGHRTDTRRTTEAPWLRQSCTLLPDASVTPCAPAPAGAMITMGPTCDRAPQRICQGHDTPLYLAPISDQTPTKLSGNXPGNYPGNTAGISRDSQTIRRHPHVNVICSRCTTLGPLCCRFPESLRKNCAKTAERSWIKGGSKTFSKSSLNYLWNTCLNAHPEHAENMLVICAGHGLLM

SEQ ID NO: 344877 - protein, 69 aa, Zea mays
  Clone ID: MRT4577_77696C.1.pep
ILPQYHCWLSVPQLLDVTTITLQNLANLFPLHLHMCMALCTSFSSVGFHGEDTITISSLSWLFASDLRK

SEQ ID NO: 344878 - protein, 59 aa, Zea mays
  unsure (1)..(59): unsure at all Xaa locations
  Clone ID: MRT4577_77697C.1.pep
LLFNIIXLDFFNFPAYLLYRWLLPCSGVALPIPCTLLTQPHFFPVYHHDCPNPSSLLQL

SEQ ID NO: 344879 - protein, 36 aa, Zea mays
  unsure (1)..(36): unsure at all Xaa locations
  Clone ID: MRT4577_77698C.1.pep
LELSIQRSGRERPTRTSRSQTHRXRREXANRRRAMG

SEQ ID NO: 344880 - protein, 165 aa, Zea mays
  Clone ID: MRT4577_77699C.1.pep
FDCGFHIFTFYNCLFIVECGIFFFLWRHLVLFSLSIYRERARKKKEEEERRMEREREKKDIWTFFIFQERVRIGKELLEAKRIEEQNERKRMIELRRLEKEEEKRAREKIRQKLEEDKAERRRKLGLPPEDPAAAKPSAPPPVEEKKVKTRYCRMMLMEDAVMGS

SEQ ID NO: 344881 - protein, 37 aa, Zea mays
  Clone ID: MRT4577_7769C.1.pep
TSNPTTYTGPIYSCSAFRSANAFTGMSRLLQSHVLMG

SEQ ID NO: 344882 - protein, 46 aa, Zea mays
  Clone ID: MRT4577_776C.1.pep
SNLSLFLQNVYYKLLEARSSLSRFVHLLMYYIAVFAHPYFLYFIFI

SEQ ID NO: 344883 - protein, 70 aa, Zea mays
  Clone ID: MRT4577_77700C.1.pep
MSATTAAVPFWRAAGMTYIGYSNICAALVRNCLKEPFKSEAASREKVHFSISKWADGKQEKPTVRTESDE

SEQ ID NO: 344884 - protein, 33 aa, Zea mays
  Clone ID: MRT4577_77701C.1.pep
HATGLSRTSLTPKDNLVKTRMDPAVRGTCDIYS

SEQ ID NO: 344885 - protein, 69 aa, Zea mays
  Clone ID: MRT4577_77702C.1.pep
MSATTAAVPFWRAAGMTYIGYSNICAALVRNCLKEPFKSEAASREKVHFSISKWADGKQEKPTVRTEDE

SEQ ID NO: 344886 - protein, 70 aa, Zea mays
  Clone ID: MRT4577_77703C.1.pep
MSATTAAVPFWRAAGMTYIGYSNICAALVRNCLKEPFKSEAASREKVHFSISKWTDGKQEKPTVRTESDE

SEQ ID NO: 344887 - protein, 148 aa, Zea mays
  unsure (1)..(148): unsure at all Xaa locations
  Clone ID: MRT4577_77704C.1.pep
PPPPPPGXGAPPPPPXPPDTRMSPXHXDSRSSAPPPRPPTNQAHXAPPXPPPPPPXHSTGPXAPLPVTMAPPSAPAAGPPXPPRTRRRRRPRRPPGCAAQGAPARPSPCXPGRPAGAPAPTQXGGSPRPRILRPATAPPXEPPGGAEP

SEQ ID NO: 344888 - protein, 277 aa, Zea mays
  unsure (1)..(277): unsure at all Xaa locations
  Clone ID: MRT4577_77705C.1.pep
MARRRDDVALAAITFAIVALCARYASAVGTTPQSSFSYREGDPTGPTKWATLQKDWDVCDSGTEQSPIDVAKVEVSEDLDPLQQTYEPGDAVMHNRLHDFMLNWTGGNGGLTIEGKKYKLKQVHWHVPSEHTVNGTRFDAEMHMVHEDSTDAKSKAVVAVLFSAKAAXKPYFERLAGKQNGTEEVKGPVVDPAAWIDKASGYYGYEGSLTTPPCTQGVLWTIMSKVADASKEEIHSIESVKEANARPAQKINSRVVRYYKAAGATEAPAPAPAPEAT

SEQ ID NO: 344889 - protein, 63 aa, Zea mays
  Clone ID: MRT4577_77706C.1.pep
VGCAGLGGYGGGSRPAGIARGRPPRCLLPPSPAPTGSAGPRACRSPPASRVRRRSSRPCPARV

SEQ ID NO: 344890 - protein, 239 aa, Zea mays
  Clone ID: MRT4577_77707C.1.pep
MRRQWALSVTSDYRAATPQSSFSYREGDPTGPTKWATLQKDWDVCDSGTEQSPIDVAKVEVSEDLDPLQQTYEPGDAVMHNRLHDFMLNWTGGNGGLTIEGKKYKLKQVHWHVPSEHTVNGTRFDAEMHMVHEDSTDAKSKAVVAVLFSAKAGKSSKLLRDLKPYFERLAGKQNGTEEVKGPVVDPAAWIDKASGYYGYEGSLTTPPCTQGVLWTIMSKVADASKEEIHSIESVKEVRS

SEQ ID NO: 344891 - protein, 59 aa, Zea mays
  Clone ID: MRT4577_77708C.1.pep
HPGARRRVGHGPRPAGFLLRPGSGDPLHDGRGCEHDLRPFHRRPPVPAGDGDPPFWSAS

SEQ ID NO: 344892 - protein, 118 aa, Zea mays
  Clone ID: MRT4577_77709C.1.pep
ECSCRAFSSHYNSQKGSSDPLGLGERRRADVINSGPRAMVLVSRSWARSLYGCRASIRSKSCSALHRFHADVHTRKSEELTSLPGCYAGRTVVGFTIQLEVSSASLDATIGPAFSALC

SEQ ID NO: 344893 - protein, 55 aa, Zea mays
  Clone ID: MRT4577_7770C.1.pep
RNGRPSSSTRHCSGRLSKKRGKFSPVAYRKSMSCVAVPVCLIILSKHLLIIALAR

SEQ ID NO: 344894 - protein, 131 aa, Zea mays
  Clone ID: MRT4577_77710C.1.pep
KKKKKKKKKKKKKKKKKKKKKKKKKKKKKKKKGRPGLARSKCSHPSLARALPFFLVALLGSPKLARLVPPFSPGKTRGNPPLFPPLFPFPLFPFGLFAIRPKGPPLSTFPHFDWLLGPPLPPLFRPFRRGG

SEQ ID NO: 344895 - protein, 62 aa, Zea mays
  unsure (1)..(62): unsure at all Xaa locations
  Clone ID: MRT4577_77711C.1.pep
IPDTSWYEIFGTTRSNQIVDRXLINTFQQIGIHLAXDFYLPFELISLILLVSLIGAITMARQ

SEQ ID NO: 344896 - protein, 88 aa, Zea mays
  Clone ID: MRT4577_77712C.1.pep
RKTQHQPAVVACSSPVPEHSSVERGGCACACLCTCLQGSGPVEVATVAVLLWRGVSGSQRRLARRQGLTLEVRRAVVKASTKLILTFI

SEQ ID NO: 344897 - protein, 106 aa, Zea mays
  Clone ID: MRT4577_77713C.1.pep
MQVACNYTTRTHPFDFDASSMEAQAHTSCNRRAGYYVRKIAPPLAPMSRLLDCGAGAATQGNPAHGPTAPTEHIGHRDRERGYFERDPSLRRKRAPSPPTDQGFEG

SEQ ID NO: 344898 - protein, 89 aa, Zea mays
  Clone ID: MRT4577_77714C.1.pep
KETLITGPRIDMLTGAEPALILGSADPDNFLNICRMKPSSALSEPTPFVARPPSVEPHRNSCTTVRQHCRSYTVRRRRDRAARRPHSFP

SEQ ID NO: 344899 - protein, 78 aa, Zea mays
  unsure (1)..(78): unsure at all Xaa locations
  Clone ID: MRT4577_77715C.1.pep
VLEPPGVVPPEQGXYPFFDGYPAGHDPPXVLPLPAQEXYPPLCYPQQGYPPYCAMAAPQDLKSSTPCCLERWLAALCC

SEQ ID NO: 344900 - protein, 74 aa, Zea mays
  unsure (1)..(74): unsure at all Xaa locations
  Clone ID: MRT4577_77716C.1.pep
MALRLXDVALCLSXXLXXXXRXGXXFXAVXXMRXXXXSTRVENKKPFAPPREVHVQVTHSMXXNKIEXFKSLMI

SEQ ID NO: 344901 - protein, 88 aa, Zea mays
  Clone ID: MRT4577_77717C.1.pep
NLSRFSDNHCMWLPEVDGKKSNNSDSYMYIFASLFLENVELEFPEEFRSHFLWLQDRPNKGRWLRLTYEHFPSLFLPCGKEIQRGSSR

SEQ ID NO: 344902 - protein, 32 aa, Zea mays
  Clone ID: MRT4577_77718C.1.pep
LLQYNQLGGTNLGEFYQQRIIDGALFRINYDL

SEQ ID NO: 344903 - protein, 178 aa, Zea mays
  unsure (1)..(178): unsure at all Xaa locations
  Clone ID: MRT4577_77719C.1.pep
GREALASFDAIPAAIVSASNTTRSPVLACVRAISPLAAGMAGVGGGARSSDRAGAARSPTTTTTTTTTXDPVHSDADILDTLRESNMDPNETAQKLLNQDPFHEVKRKRDKKKESAGQKSFADSTGQVDQNPQWMRPHTHRMENDQRRLPNQGQMSGPSHEFRVVRDNRFQHGVVENR

SEQ ID NO: 344904 - protein, 96 aa, Zea mays
  unsure (1)..(96): unsure at all Xaa locations
  Clone ID: MRT4577_7771C.1.pep
HLIGTMCCSHLVDHRQCEVSFLSLCVIPSRESRDVWSEQAPRYLINKTVALAPKSSLADCTRQXKITSLEHRCSVPGSCALPVQLKRKQWYAGLSG

SEQ ID NO: 344905 - protein, 65 aa, Zea mays
  unsure (1)..(65): unsure at all Xaa locations
  Clone ID: MRT4577_77720C.1.pep
TPPPGYPPAILPPPRPXYPNQVYPQQAYPPQYAHPPPQQHKXTGPSFMEEYLXPLSSSSLLNACF

SEQ ID NO: 344906 - protein, 72 aa, Zea mays
  Clone ID: MRT4577_77721C.1.pep
RQRIDGFTMATQIRPCVCSKGTGKWPDSCSPYPPPPCQGPLRPDATTETFSRSLNKVIRAIERKATNWKFRA

SEQ ID NO: 344907 - protein, 336 aa, Zea mays
  unsure (1)..(336): unsure at all Xaa locations
  Clone ID: MRT4577_77722C.1.pep
HAEREYLQAYGHKDPNIHTTNEAQLYGLVXPNVHPQALASSSQGYPSENPEADNAVQVFRMPDSNVHSQVLPSTSEALNPQIVSNSPVPISSQQQHISQQQAATQMYPQMHVQHFPNFMPYRQLYSPVYPMPMPNYSPNVPYPSNGNSYLQMPSGGSHLTAGSVKYGVSQYKPVPSGNPSGYGNYTHPAGFTMGSPGVIGAAVGVDDVNRMKYKDNIYASTPQVETSDIWIQTAREMPPLQVPSYYNIPGQATPGAFVPNPANASFNATSQSPHAQFPGLYHPQQPPSIVSPHPMVHQQVPSAIGPNVGVGVAAPGPQVGAYQQRQIGHMNWRPSF

SEQ ID NO: 344908 - protein, 901 aa, Zea mays
  unsure (1)..(901): unsure at all Xaa locations
  Clone ID: MRT4577_77723C.1.pep
MAGVGGGARSSDRAGAARSPTTTTTTTTTAIQSTIQSIKEVVVGHSDADILDTLRESNMDPNETAQKLLNQDPFHEVKRKRDKKKESAGQKSFADSTGQVDQNPQWMRPHTHRMENDQRRLPNQGQMSGPSHEFRVVRDNRFQHGVVENRPEPGHKGSADVQMSESGGRVGGRVGGRVGNNSSTGPQPRQHRHLRSTVVQSARNLSPATTSDGQIXISRNRSPATTSGDQITHQNAMQNSNSDTTQGKRDAQGTTEKHVKPYLKNPQNEQHFPGSDPAHGSANVRIAGGTVGPAQRHVGVVNSTRQFAGRSGSQMHAPGGSYANIQRGSFTSVGASGRYSAFMSRNIQQNLRPDTTFRGRPTVRSFIAQNTNRYHQGPTTNQKVHPIKEWKPKLTKKSPTIDAENSIADAASPSASNCENANTTDVNGLPEKLSQANLHEVEHVIIPEHLRVPEYEQTKLRFGSFTPDLDLEQVPALTPQDTEQPEHVQEPVQQASECDSLDAGPDDMDEQARSSQHLSTSTAEISLPPSEDSDRMSGQVENDDGLGLVQSDTPVGAADGDSTQITSTLTAFSAYGHKDPNIHTTNEAQLYGLVEPNVHPQALASSSQGYPSENPEADNAVQVFRMPDSNVHSQVLPSTSEALNPQIVSNSPVPISSQQQHISQQQAATQMYPQMHVQHFPNFMPYRQLYSPVYPMPMPNYSPNVPYPSNGNNYLQMPSGGSHLTAGSVKYGVSQFKPLPSGNPSGYGNYTHPAGFTMGSPGVIGATVGVDDVNRMKYKDNIYASTPQVETSDIWIQQAREMPPMQVPSYYNIPGQATPGAFVPNPANASFNATAQSSHVQFPGLYHPQQPPSIVSPHPMVHQQVPSAIGPNVGVGVAAPGPQVGAYQQPQLGHMNWRPSF

SEQ ID NO: 344909 - protein, 70 aa, Zea mays
  Clone ID: MRT4577_77724C.1.pep
ERVLKTGRIFFCLSPFPWGGNNFAPLRILAPSNFLGFGGGPLLFFPFNRKKSVSPKVFFRALPLALGGFF

SEQ ID NO: 344910 - protein, 304 aa, Zea mays
  unsure (1)..(304): unsure at all Xaa locations
  Clone ID: MRT4577_77725C.1.pep
PAGTQFPPSLGKPAPTEPGRPQPIRPNQNPDPLSPETQGLRSRGAIPAAIASASTTTRSPVLARVWAISPLAAGMAGGGGGARGSDRAGAARSPTTTTAIQSTIQSIKEVVVGHSDADILDTLRESNMDPNETAQKLLNQDPFHEVKRKRDKKKESAGQKSFADSTAQVEQNSQWMKPHTQKMENDQRTPKQGQMSGPTREFRVVRDNRFQHGVVENRPELGHKGSANVQMSDRSTLVQSGRNRSPATTSGDQITHQNAMQNSNSDXTQGKRDAQGTTEKHVKPYLKTXQNEQHFPGSDPAHGS

SEQ ID NO: 344911 - protein, 85 aa, Zea mays
  Clone ID: MRT4577_77726C.1.pep
FCLRCMAFVLLYTAQVLLMRLLELYPGASRVVVGQSYIYLSFSVLLELITFRVCRRMNHRKLMCASMVVVLTRRSGPRSGSCCSR

SEQ ID NO: 344912 - protein, 56 aa, Zea mays
  Clone ID: MRT4577_77727C.1.pep
MTGEKKMFTSYIKNKDSHDTIIFGDGNQGKVKDHWSYYIWTSSDPSPTLASGEDKS

SEQ ID NO: 344913 - protein, 92 aa, Zea mays
  unsure (1)..(92): unsure at all Xaa locations
  Clone ID: MRT4577_77728C.1.pep
AYSFISLSHFKKXSINSLQTHLLSCTPFPTSFSRLHSSVSSSCQDRSTWRPRLDVLRRGHHRRGLAASGSRPKRVEAYYSLTSLGGRCLGLA

SEQ ID NO: 344914 - protein, 42 aa, Zea mays
  Clone ID: MRT4577_77729C.1.pep
RGSRPARAQPLLLPLRGERGAERLVLVIEARRVDAHGPVLCR

SEQ ID NO: 344915 - protein, 58 aa, Zea mays
  Clone ID: MRT4577_7772C.1.pep
ELDQYCDDRLFSFFGLTWYNQPHRTIIHILFLKYLINSVHAQLVRSHVLSLLGMVLYN

SEQ ID NO: 344916 - protein, 565 aa, Zea mays
  unsure (1)..(565): unsure at all Xaa locations
  Clone ID: MRT4577_77730C.1.pep
YEGGANNGQYGYGPSGQXVRTQLGNSQRVQKQQYVDHRSGGSYTDRSGHHPSQYVNPTHSRKEHVAGFQQGNNSNFGYNASQAYQSPYFTRQADTHSTSHGYSMYLNTDVQRLSHGVHQEKHSHAQSAGSFGNHVNSAPHEYGKYHQSLQGNPSNVGSSYEVPSEAGSKHKCTVEELEKFCDDGNVKEALEVLAMLKENRIVLHAPQYFRLMQACGDATALSEARLIHSQISESSLTVDTDFQNKILEMYARCGSMEDAKKIFSSMDHHNLTSWNTMISGFVHNVLGEEAIDFFERFKQTGDKPDHGMFRHVFLACGILGSVNEGMLHFESMQKDFGIHPTTEHYASIVTMLGQSGYIVEAYEFVERMPVEPSIEVWENLMNMCRLNGFLELGDRCAQIIECLDSSRLNEQSKMGLFPVDVSDLAKEKERKKASVAEARSKVHEYRAGDRSHPDTPKIYEELRYLLAHMKEAGYIADTRFVLHDVDQETKEDALLAHSERLAISYGLITSAPRSPIRVIKNLRSCGDCHTAFKIISKLVGRQIIARDAKRFHHFENGVCSCKDYW

SEQ ID NO: 344917 - protein, 90 aa, Zea mays
  Clone ID: MRT4577_77731C.1.pep
LFILMSGGPRGSFFVLRPGPFPGLFCSLPWNMLGGTFKVFRFFWVFPPKLPALGPLLYKISCGKKKKKKRIKPKKPKKNPKKKKKKKKRE

SEQ ID NO: 344918 - protein, 48 aa, Zea mays
  Clone ID: MRT4577_77732C.1.pep
DLRSYYFRETRLTPRHAQGPGSSRMHHLRYHPHDLVIYTFLLHCMSTS

SEQ ID NO: 344919 - protein, 80 aa, Zea mays
  Clone ID: MRT4577_77733C.1.pep
NVIVNSLKGFTSYTDRGLSAPLNILGGSQSPYQSASLLGSPQMFWTTVITRLTRVAPNKPGSRSPLHECHSFSKLRHLAA

SEQ ID NO: 344920 - protein, 241 aa, Zea mays
  unsure (1)..(241): unsure at all Xaa locations
  Clone ID: MRT4577_77734C.1.pep
MAAGTISRIRLENFMCHSSLHIELDKHVNFITGQNGSGKSAILTALCVAFGCRAKNTQRAASLKDFIKTGCSYAAITVDINNHGEDAFKPEVYGDTIILERRITESASSTVLKDQHGRKVAHRKDGLNEITEHFNIEVENPCVIMSQDKSREFLHSGNDKDKFKFFFKATLLQQVNDLLATIRDNLNIAASIVEELEASIRPALRELDEIQEKIKNMEHIEEIAHEIXNLNKKLAWVWGYD

SEQ ID NO: 344921 - protein, 330 aa, Zea mays
  unsure (1)..(330): unsure at all Xaa locations
  Clone ID: MRT4577_77735C.1.pep
HELTRSGRTRTTAAAAYPKMARPPILSVALPSDTGRVLSIXQSHTVQGYVGNKSAVFPLQLLGFDVDPINSVQFSNHTGYPTFRGQVLNGKQLWDLIEGLEENQLLHYTHLLTGYIGSVSFLDTVLQVVEKLRSVNPDLVYVCDPVLGDEGKLYVPQELISVYQQKVVPVASMLTPNQFEVELLTGLRITSEEDGLTACNTLHSAGPQKVVITSALIEGKLLLIGSHKKTEEQQPEQFKIEIPKIPAYFTGTGDLTTALLLGWSNKYPDSLEKAAELAVSSLQALLKRTVEDYKMAGFDPSTSSLEIRLIQSQDEIRNPTVTCKAVKYGS

SEQ ID NO: 344922 - protein, 175 aa, Zea mays
  unsure (1)..(175): unsure at all Xaa locations
  Clone ID: MRT4577_77736C.1.pep
EIAPXNTTXGSLWNLYYSILHVSKGISWEDELGQKKLLSFLRAIKTRPNPPFPEPSTEILRENWVWGDGELWSDLMLFGPSSRXMWNDQPGLELSAETELEAKFAQNICGLLGRVTSAGIMSYKNYAIWALRDATEVSVDVDSVDVQRGLYTVMHSAEVVELIGPIRYRSSRKSA

SEQ ID NO: 344923 - protein, 105 aa, Zea mays
  unsure (1)..(105): unsure at all Xaa locations
  Clone ID: MRT4577_77737C.1.pep
QGTPKLFIRWTFYDFQASNMSLYDYIAVNATNYSMYLTYTTSRYCNKRLRXALCPIVVRLTNCIMMHELLIGDKVIDVLIIEHTLEIIHLLTDANPIQVPVHAII

SEQ ID NO: 344924 - protein, 86 aa, Zea mays
  Clone ID: MRT4577_77738C.1.pep
HHVHQKNRSAKSRAGPPQPQQMPQPHDVPDLAAAFRHVDARASERASARPSRPPVDVDLSSARLGSTNVNRWRRTARGSAARVELA

SEQ ID NO: 344925 - protein, 60 aa, Zea mays
  Clone ID: MRT4577_77739C.1.pep
QFYLVWALFYCPHACQRWVSCPIILILGPDLICMLGWVPLFNFLLSLGVLICGLPKAQCL

SEQ ID NO: 344926 - protein, 66 aa, Zea mays
  Clone ID: MRT4577_7773C.1.pep
LLSPFPSSSRPLSLVSPGVLKLSSLLDAGSGSYLSCWCLMLTQEATADGQPLAVLATPRWTRSNES

SEQ ID NO: 344927 - protein, 109 aa, Zea mays
  Clone ID: MRT4577_77740C.1.pep
KNRNLKNLRAMKLRLRSIKARGGYDAVGGPTAWTCRPRTLWTQEKTVLASEAICGSTRPRRSSYDCRLNRRERASIGEPCRYGSVPQARDRGSRIHHPMQDYGPSGGGS

SEQ ID NO: 344928 - protein, 74 aa, Zea mays
  Clone ID: MRT4577_77741C.1.pep
YGVLNLSRLPVFCVSVQKGKRKGSNVCVCVQLLQFPAVKFLGYRFLFFHSYVVNVSFTLCGLKVEFHHLFVFLY

SEQ ID NO: 344929 - protein, 57 aa, Zea mays
  Clone ID: MRT4577_77742C.1.pep
RPVTPTDHSCAQNQAERCSQPHYSAIIRHSPAYKQTYFTWTFTNHCHGAYKLGRRAI

SEQ ID NO: 344930 - protein, 104 aa, Zea mays
  Clone ID: MRT4577_77743C.1.pep
FGTRPLSSSSAADHHDLHSAGTIAAMKFWPQVDVLSLEQSEHGDPVRQALRRRTRACRWCGGACGSDPHPLLALGCRRHGGADVCLLRWCILCVPLTCDPDVFP

SEQ ID NO: 344931 - protein, 106 aa, Zea mays
  Clone ID: MRT4577_77744C.1.pep
MTRRWPPFSARVAAAVFLLLLSPAATSQLGLGPAIAAWINGSPPPSPDAAAAAAAAASGPRSQEYAALQALKVAVTDDPKGALASWQGANVCAYKGVYCSAPPDGA

SEQ ID NO: 344932 - protein, 61 aa, Zea mays
  Clone ID: MRT4577_77745C.1.pep
PFNSSRYLQGESNPQRTITIYILEQLDLASSSDSYGTLLLNFLVQFILQATPLSFSIFSTL

SEQ ID NO: 344933 - protein, 62 aa, Zea mays
  Clone ID: MRT4577_77746C.1.pep
DRMTQVQVPITWTYLPLGPATVLMCRIARSTKICFSEPLRPGSRPGLCGGPLKRIQVLGRGA

SEQ ID NO: 344934 - protein, 89 aa, Zea mays
  unsure (1)..(89): unsure at all Xaa locations
  Clone ID: MRT4577_77747C.1.pep
DLGSLDDMEVDQLEKPTDSFLNHIRSTRSQHMLEQLTDLXRRXQMMCEAYNFLTRKLDETSIQLHVQVCVHGANXLLYYQRYSLPQPAP

SEQ ID NO: 344935 - protein, 87 aa, Zea mays
  unsure (1)..(87): unsure at all Xaa locations
  Clone ID: MRT4577_77748C.1.pep
KQLLFYEVDASVKACASXDEGCLTAITFIVVQKLHHTXLFPEDHHAHGQMDRLGNIXAGTVDDTKICHPREYHFYLWRHSGIHGTSP

SEQ ID NO: 344936 - protein, 70 aa, Zea mays
  unsure (1)..(70): unsure at all Xaa locations
  Clone ID: MRT4577_77749C.1.pep
PVAFVEVSSKYSEKFHNANEXPFRTPIRGSGTKGGSARTDVFGINLHALSIWAAXCRMXFLKSIGKLXWE

SEQ ID NO: 344937 - protein, 765 aa, Zea mays
  Clone ID: MRT4577_7774C.1.pep
MPKGYIQQKDRMKVVSIHLAAAVVAVLLLLAAKRTPAIAVPSPQCQWQCGGVDIAFPFGIGDNCSLSAGFNLSCQEVQSGVYRPFQGNIEVLNISLINGTVRELNPVSTYCYDSSSGSMEPSTWSFDASRTPYRFSDVQNKFTVIGCQTLAYITDNTDKSYQSGCVSTCQNVSDLTDGSCSGMGCCQTDIPKKMGFYNVSFDPASDTSQISRLGLGSCSYAVLMEAEEFSFSTTYITNTTAFNDTNSGRVPVVMDWAIRDDGAPSCELATRNETGTYACRSGNSKCVESPNGPGYLCNCSDGYEGNPYLSDGCHDVDECKKNNSPCPSVGGVCHNTVGAYRCSCRAGRKLNKQNNTCDPDTTLITGVTIGFLVLVIFSSFGYMILQKRKLNQVKQDHFRQHGGMILFERMRSENGLTFTVFSEAELVKATDSYDKSRIIGKGGHGTVYKGIVKGNVPIAIKRCALIDERQKKEFGQEMLILSQINHKNIVKLEGCCLEVEVPMLVYEFVPNGTLYELIHGKNQALQIPFSTLLRIAHEAAEGLSFLHSYASPPIIHGDVKSANILLDGNYMAKVSDFGASILAPSDKEQYVTMVQGTCGYLDPEYMQTCQLTEKSDVYSFGVILLEVLTGQEPLKLDGPETQRSLSSKFLSAMKENNLDAILPSHVNGGQESNELIRGLAQLAKQCLDMCGCNRPSMKEVADELGRLRKLSLHPWVQINAEMIESQSLLSGTTTASFEIEVGTTGYPTQEAENLPMNPRSSYYAR

SEQ ID NO: 344938 - protein, 188 aa, Zea mays
  Clone ID: MRT4577_77750C.1.pep
LRWLHHQQPVQRAHPDLADKCVLASSGFQGDIKALHKNLAARELLYQHQHNKRMSCPAMAQLLSNTLYYKRFFPYYAFNVLGGLDSEGKGCVFTYDAVGSYERTGYSAQGTGSTLIMPVLDNQLKSPSPLLLPAKDAVTPLSESEAIDLVKDVFASATERDIYTGDKLEIVVINKVGTKREYIDLRKD

SEQ ID NO: 344939 - protein, 86 aa, Zea mays
  Clone ID: MRT4577_77751C.1.pep
MFYTYTQALWEHKQKGLGHPNRPLDPDTETVFKVDLFMEHPHRRLVHNGNELVEVYAPVLHQQVHTISNPGIRPEQHTTGTLEEGG

SEQ ID NO: 344940 - protein, 215 aa, Zea mays
  Clone ID: MRT4577_77752C.1.pep
MSRRGDWVYENNGGTCVAIAGADYCVVAADTRLSVGYSILTRDHSKICDLADKCVLASSGFQGDIKALHKNLAARELLYQHQHNKRMSCPAMAQLLSNTLYYKRFFPYYAFNVLGKGCVFTYDAVGSYERTGYSAQGTGSTLIMPVLDNQLKSPSPLLLPARDAVTPLSESEAIDLVKDVFASATERDIYTGDKLEIVVINKVGTKREYIDLRKD

SEQ ID NO: 344941 - protein, 215 aa, Zea mays
  Clone ID: MRT4577_77753C.1.pep
RGSVWSCRTCVAIAGADYCVVAADTRLSVGYSILTRDHSKICDLADKCVLASSGFQGDIKALHKNLAARELLYQHQHNKRMSCPAMAQLLSNTLYYKRFFPYYAFNVLGGLDSEGKGCVFTYDAVGSYERTGYSAQGTGSTLIMPVLDNQLKSPSPLLLPARDAVTPLSESEAIDLVKDVFASATERDIYTGDKLEIVVINKVGTKREYIDLRKD

SEQ ID NO: 344942 - protein, 190 aa, Zea mays
  unsure (1)..(190): unsure at all Xaa locations
  Clone ID: MRT4577_77754C.1.pep
PQQRRRKQTNATQGERGQKGGERGXXXKXASRRAXXXXRAXEKAXAAXXXPGTGXAXRPXAXAGGRRGXNTGXPXRRHEGAEXEDESXREXEGRHGGRDHXXPSXXXXXXXEPXXAPHSXGRXXNXXDDXAXAAPXXAXRXGXNAKEDEEAXHXRXDKPRPGKEHDKAXAEQNSPANKGEGEKEXSEDEA

SEQ ID NO: 344943 - protein, 245 aa, Zea mays
  unsure (1)..(245): unsure at all Xaa locations
  Clone ID: MRT4577_77755C.1.pep
MSRRGDWVYENNGGTCVAIAGADYCVVAADTRLSVGYSILTRDHSKICDLADKCVLASSGFQGDIKALHKNLAARELLYQHQHNKRMSCPAMAQLLSNTLYYKRFFPYYAFNVLGGLDSEGKXVALLSHIYWWNTQVSMLCTCTGKGCVFTYDAVGSYERTGYSAQGTGSTLIMPVLDNQLKSPSPLLLPARDAVTPLSESEAIDLVKDVFASATERDIYTGDKLEIVVINKVGTKREYIDLRKD

SEQ ID NO: 344944 - protein, 99 aa, Zea mays
  Clone ID: MRT4577_77756C.1.pep
FGTRRRWEASSTFSPPHVDEVARRGDSLTDFSPGRQSLPSAWLVIAVSKERLSAPLRPSARRGALRPRVEFLRLVQANSDLPSHPARLFFAGLLRSMLS

SEQ ID NO: 344945 - protein, 252 aa, Zea mays
  unsure (1)..(252): unsure at all Xaa locations
  Clone ID: MRT4577_77757C.1.pep
MSRRGDWVYENNGGTCVAIAGADYCVVAADTRLSVGYSILTRDHSKICDLXHYCVEVAKLSLIIMYFMRKMVISYSLHFKLADKCVLASSGFQGDIKALQKNLAARELLYQHQHNKRMSCPAMAQLLSNTLYYKRFFPYYAFNVLGGLDSEGKGCVFTYDAVGSYERTGYSAQGTGSTLIMPVLDNQLKSPSPLLLPVRDAVTPLSESEAIDLVKDVFASATERDIYTGDKLEIVVINKAGTMREYIDLRKD

SEQ ID NO: 344946 - protein, 572 aa, Zea mays
  Clone ID: MRT4577_77758C.1.pep
MTDLKSYFSQASSGSRPSTRASGVCNEPGIQVEVQENNSEDANGENIYGQVEGINQFNPDHIISDPGLCIPIDYFAPNNRDDVRRAFIAKGPTQPIGHNFPQSHDKRSFQKHWFRQHSWLEYSVEKNKAYCFYCYLFKHDRMDDKFFHDAFTKVGFSQWRNVYTAFPKRVGGPNSIHNTAATAFHDFCNQRSSVSHKVANYSKEALVKYETRLETSLSIVSLLALQAESFRGHDETSTSLNKENFLEFLDWYKQRNEEVRRAFDELCPKNDKMISGTIQKELANCCAETVTRAIKEEMEDCLFSILVDESRDISVKEQMTIVVRFVNKQGEVIGRFLGIKHVKDTTSESLKKALVEMILRITNELSLLLQRKDQNVVEAMSLVVDVRTRLINLRNDDWEPLLEEATTFCLANDIPIPNMSDVVPRFGRSRKGGRNNITTEHFYRVDTFYAIIDSVTTEFDHHFNELSQELLTIKDQLRTFIIHVRKIEEFKACCDLASLSKRMVELERHIVFPLVYRLIELALLLPVATATMERAFSATKIIKTELHNKMSNGWLNDLMILFAIWHLVVNGL

SEQ ID NO: 344947 - protein, 76 aa, Zea mays
  Clone ID: MRT4577_77759C.1.pep
METDFPYLLAPNLLTGGKGADLVIRGNVVLNRINGDKNGDCVVCHRSTTAGPLPYRALWAGSYLCAYATRWLRNCV

SEQ ID NO: 344948 - protein, 54 aa, Zea mays
  Clone ID: MRT4577_7775C.1.pep
MSMTRRARAMGSIGVPSHASSISDDRSPDMQKRKVMNIVLLCGISMHTVLIRNH

SEQ ID NO: 344949 - protein, 64 aa, Zea mays
  Clone ID: MRT4577_77760C.1.pep
YFSSSKTILWYLRIYGILDKKRSLEDYLENLYFKPWFHRYHNLFGSKKLSPRSKLFAGAWLQPR

SEQ ID NO: 344950 - protein, 69 aa, Zea mays
  Clone ID: MRT4577_77761C.1.pep
YLSPCSHPNHSRLHFNPGVWLSLGRGSPVLILQPPSAQQQCTPFSQLGSPSPGLQLLPRDTFSVRTYTR

SEQ ID NO: 344951 - protein, 141 aa, Zea mays
  Clone ID: MRT4577_77762C.1.pep
LTKLYRNDFLEGLFKEPDWITLKREPIRENFKVLQQAFKTLGGIPLFPKAVKRGGNPLDFYAIGLPRGHGLFFSPPGFNDGSSPFLTPKQSRSRGSNPFGGQVPFNPNMSGNGFLCPPPSFQNGPPDWFWDPPNVPPPPLF

SEQ ID NO: 344952 - protein, 61 aa, Zea mays
  Clone ID: MRT4577_77763C.1.pep
LVNGRVYSDQNKFVANQTNLHPLCVDLKRKIRHLQPGCQSTVPPYPERVGEADEYGPTGFA

SEQ ID NO: 344953 - protein, 64 aa, Zea mays
  Clone ID: MRT4577_77764C.1.pep
LAKEIKVLFQEHNFFMIDQLISFLSIKDLNVRSSADMAARVIETTYKDFGAQNFKEEYAGIPGS

SEQ ID NO: 344954 - protein, 139 aa, Zea mays
  Clone ID: MRT4577_77765C.1.pep
MCSALLLAMAALNGLAPAAALPLPRLTLLYPSGTMPRPTVLEARIPHHPSSQTQEKSYFSPALINYTEPSREADEGHKRSGRVCQRTNCHHLPRLDHQHSDGHIRACLPTELPRQRPCARARLLPRLCVRGGVCVHTHL

SEQ ID NO: 344955 - protein, 58 aa, Zea mays
  Clone ID: MRT4577_77766C.1.pep
GISGGAGVPPMLVGGRRKLMIPASLAYGLEPAGCFSGVCSIPGGSALLYGLFLVGIYK

SEQ ID NO: 344956 - protein, 84 aa, Zea mays
  Clone ID: MRT4577_77767C.1.pep
TCFGILPRFLSLSDSPLPISAYPFLETRIVPPHQGPLRRGGCHPAHSQVLVPQVLQGVKPRGCASLVLPGLLCPPREALLAFWV

SEQ ID NO: 344957 - protein, 70 aa, Zea mays
  Clone ID: MRT4577_77768C.1.pep
RGVFYWGATTFGRHTHMMSPGSSPNKALHSNLIYTPHITTFRISFTTKQSNQGHSNCRFISPYSDRAFTV

SEQ ID NO: 344958 - protein, 122 aa, Zea mays
  unsure (1)..(122): unsure at all Xaa locations
  Clone ID: MRT4577_77769C.1.pep
EKGDQPPLYFAADDLGYEAAFFVGRXXMGAFRIALESIFNEINDHPLKYTSYGKPNPFVFKNAANILEKLVMSMYPNSQTPMEGKDYQFSTIYMVGDNPKVDINGAMKAGHPWSSVLTKTGV

SEQ ID NO: 344959 - protein, 66 aa, Zea mays
  Clone ID: MRT4577_7776C.1.pep
PGSANLGPPVVSSTMERHLSVTSDQQMGYRRPTLVSKVKMKPNTPSNHTNLYIIPSHCATTWCENG

SEQ ID NO: 344960 - protein, 117 aa, Zea mays
  unsure (1)..(117): unsure at all Xaa locations
  Clone ID: MRT4577_77770C.1.pep
MATVDLEKLRMSGAGKAIGVLTSGGDAQGMNAAVRAVTRMGIYVGAKVFLIYEGYEGLVEGGENIKPANWLSGSDIMQLGGTIIGSARCKAFTTREGRLAAGYTLLRRGXTNLCVIG

SEQ ID NO: 344961 - protein, 130 aa, Zea mays
  unsure (1)..(130): unsure at all Xaa locations
  Clone ID: MRT4577_77771C.1.pep
ENRQKGRKKKGKKPKKRGLRARQKERAPWAEPPPPPGXKGPPKGGANXKQGGPMVGKANGAGPFGKKPTGEKGKGRKAKKMGKPKGFPKPGGGKTRPXNGKPPPKRRKGPPXKGRPNGPQGEGKPQKSPL

SEQ ID NO: 344962 - protein, 71 aa, Zea mays
  Clone ID: MRT4577_77772C.1.pep
LAGAIRVLVSVVSLFLPGNQKASCPVAQRKKRAEEGGSYEADRSASPREVRTLRRSSPPMRRGSKCLLLDV

SEQ ID NO: 344963 - protein, 81 aa, Zea mays
  Clone ID: MRT4577_77773C.1.pep
RTTNPIFARCGGGGQPPMAKSLRSRGEKRLSTLRLQIAKPFYNKKVAVKLAAQARCPSCCPAPKYSGPRDARMWEPFSQLA

SEQ ID NO: 344964 - protein, 127 aa, Zea mays
  unsure (1)..(127): unsure at all Xaa locations
  Clone ID: MRT4577_77774C.1.pep
ERARIEAXQVNAAEAAAQLKLGEQMGMKREQERKKGCTTXHCMKKTVDIDNSQXHFLKGLENLXKXQWKFVHGIELTQGLGSPLXEALXGGLFMKKDIEEDVEHEMEDSVSTYQNADVGEGEISCCQ

SEQ ID NO: 344965 - protein, 76 aa, Zea mays
  Clone ID: MRT4577_77775C.1.pep
LSLGHSGHQEQAMVIPACPPQPQLISAKLYWHQHFCPGQSFPSLVRHIKWSEIAIHHSDRQQLPQNMHICASIGKG

SEQ ID NO: 344966 - protein, 152 aa, Zea mays
  unsure (1)..(152): unsure at all Xaa locations
  Clone ID: MRT4577_77776C.1.pep
RTEWAGPVNAAEAAAQLKLGEQMGMKREQERKXTAQLALCMXFCSPFSCLKKNDMLDVTLWLFMMKKMKKTVDIDNSQXHFLKGLENLXKXQWKFVHGIGLTQGLGSPLXETLXGGLFMKKDIEKDVEHEMEDSVSTXPNADVGEGEISCCQ

SEQ ID NO: 344967 - protein, 74 aa, Zea mays
  unsure (1)..(74): unsure at all Xaa locations
  Clone ID: MRT4577_77777C.1.pep
XAGRSYECEPVQHLRPRARLSLLFLSHHRXTHGRSTXEGDQAVXSVERARPMAPTSTNGHLGRSATCIRVVPAR

SEQ ID NO: 344968 - protein, 80 aa, Zea mays
  Clone ID: MRT4577_77778C.1.pep
DVRARIEALGGKVIQWNGYRVSGILAMSRSIGDRYLKPFVIPKPEVTVVPRAKDDDCLILASDGLWDVVTNEEAWPKNCC

SEQ ID NO: 344969 - protein, 178 aa, Zea mays
  Clone ID: MRT4577_77779C.1.pep
SGIPGSTHASVQPDRKDERARIEALGGKVIQWNGYRVSGILAMSRSIGDRYLKPFVIPKPEVTVVPRAKDDDCLILASDGLWDVVTNEEACKAARRQIQVWHKNNGAAGASWSLCDEGDGSTTDPAAQAAADYLVRVALKKGTEDNVTVIVVDLKPRKKSSGATRSIGRAGSITVELS

SEQ ID NO: 344970 - protein, 58 aa, Zea mays
  Clone ID: MRT4577_7777C.1.pep
KALAMMPKEFKDEPPDPSLLQYWWGHMTPFVIKVMFSPEEYGDMVLLVNKGLFSRKVV

SEQ ID NO: 344971 - protein, 57 aa, Zea mays
  Clone ID: MRT4577_77780C.1.pep
ISLAEFVTRKSFRGSRSIMQAHSREPYNYRVYESMQDTSDIRYIYKSQVIQGAGTIP

SEQ ID NO: 344972 - protein, 390 aa, Zea mays
  Clone ID: MRT4577_77781C.1.pep
MAAAAICVEDEAACAAAECAGIGNLDLAAAGAGAGGKRSVYLMDCAPVWGCASTRGRSTEMEDACAAAPRFADVPVRLLASRRDLDRLGLDADTLRLPAHLFGVFDGHGGAEVASYCRERLQVLLRQELRLLSKDLGETSEADMKEHWDELFTRCFQRLDDEVSGQASRLVGGVQETRPVAAENVGSTAVVAVVCSSHVVVANCGDSRVVLCRGKEPLELSIDHKPDRNVARARIEALGGKVIQWNGYRVSGILAMSRSIGDQYLKPFVIPKPEVTVVPRAKDDDCLILASDGLWDVVTNEEACKTARRQIQVWHKNNGAAGASWSLCDEGDGSTDPAAQAAADYLERVALKKGGEDNVTVIVVDLKPRKKSSGATRSIGRAGSITVELS

SEQ ID NO: 344973 - protein, 152 aa, Zea mays
  unsure (1)..(152): unsure at all Xaa locations
  Clone ID: MRT4577_77782C.1.pep
TPSWTPALAHNSYLRPLQQLGLTFLATYSNNQQFLSSNRXTLNAVGYLLEPPSPTIQPATGYLHQQQLFLLTQVSVLHSCVYTEQQTLIPYTHLCGEHRALFVTHTQVVAFYQHCADNRDPLTQVPQAVIFAHRAETDPAVYYQHTIVGAPS

SEQ ID NO: 344974 - protein, 43 aa, Zea mays
  Clone ID: MRT4577_77783C.1.pep
PYRIAMTWHASEGKIGSCTSAASELEPVGRMGRPGSSAPEPAG

SEQ ID NO: 344975 - protein, 125 aa, Zea mays
  Clone ID: MRT4577_77784C.1.pep
VPALLFFGASATRAPARSDAFQAAALAALLAGGGHVPGLGGRTVHLVGANYGGLVAYHLARELEQRGVRVGKVALCDADACWGAEDDRALAARSGAADVVDLLAPGDTAAVRRRWMMSAYRPFKH

SEQ ID NO: 344976 - protein, 162 aa, Zea mays
  unsure (1)..(162): unsure at all Xaa locations
  Clone ID: MRT4577_77785C.1.pep
MDRVQLVLLGLPILLFCSDVVTLFAPQPPAAPKPHRHPQAASGAFQPGDSSPDAADSAQLTEAQVDGPGSGTTVELKFCASCSYKGNAMTMKRMLDTSFPGIHVVLENYPPPFPKRALGKMVPFVQVGAIATLMAGDQIFPRFGMVPPXPWHYSLRANRFGT

SEQ ID NO: 344977 - protein, 87 aa, Zea mays
  Clone ID: MRT4577_77786C.1.pep
GGAPDPGRGFFRRPGFGPKGVVPPARGRQKPPPPRVTRPALLGQPPLLFVYKKGGGKAWQWQAPCLCSVGVGSLLFSLQFYTPSSGA

SEQ ID NO: 344978 - protein, 114 aa, Zea mays
  unsure (1)..(114): unsure at all Xaa locations
  Clone ID: MRT4577_77787C.1.pep
MGRWNXCGWHICCNCQKPGRHMCYTCSFTFCMTCLKEAMINCVXNNKGLCDACMNTGMIIENREEAADPEEVDFDDNSNYWCLFKDYWINYKTNLTTTVEEISADISPKSGEIH

SEQ ID NO: 344979 - protein, 109 aa, Zea mays
  unsure (1)..(109): unsure at all Xaa locations
  Clone ID: MRT4577_77788C.1.pep
MQSTKDQLPREAMAMGPAFCVALLLMLATAAANQAAPPHAVTSCTCTTDLHRLLPCLPXIEGTVTVPGDTWCANLGSMAHDEPNCLCQALNNPSTDHVCTNRDARDGHA

SEQ ID NO: 344980 - protein, 127 aa, Zea mays
  Clone ID: MRT4577_77789C.1.pep
DALFGNQSLEYFLSAVRVHGLSTYMNTHRYSGPQLIWPNQLAHQNLQKFRLHLPILAHRLQSSGRPHISQNPDVTLPPRRNVACPQATTCHVMQSGIPRSNYPKEQLSLTSVIIIPMRPINSWIPLL

SEQ ID NO: 344981 - protein, 572 aa, Zea mays
  Clone ID: MRT4577_7778C.1.pep
MAAKDGSGSQDLGGHTFWPMLSYACGELCVIVLLYVSALASYAATRLARVCGLRPPCILCGRLDHALHGKPWFSSDLVCAAHRSEISSLAHCKTHDQLVACSGDLSRPTSARSRRLCSCSDPLKNARGAQKHSEAANAVECWDSSVPADHPNEKTFVVGIEEVHESDGSPGSHGQSTKDSAPSANGGGAAKSNYISPAPTRIAVDRNGSVKNASVARANLTSPRPSEIISARDSNSTTQQEVKALLSQMSSVRGLDGSSSEGSPSPGTSAPNEESNPATASKRPYLERNYSVLEPSEGSQLADDVEGESSLENVKKQLELNKKAMAALYKELEEERSASAVAASQTMAMINRLQEEKAAMQMEALQYLRMMEQQADHDHLAIQDLHDLLTEREKELLDLDAELAHCRRLLQNDPFNGDGRNNGADTVNTTIDGRNPAAIECLDGADLVGSAMSLFEDEKAFILESLSRLEENLGIFTNRLASGDARGSQEDVLFEEHEHTTADGSPSNGDKLSGVANLKAGISLLNIRLRALEDDQEFLKQVLSSLQCGSDGLQCIQEISGHLAELRRVVTR

SEQ ID NO: 344982 - protein, 189 aa, Zea mays
  unsure (1)..(189): unsure at all Xaa locations
  Clone ID: MRT4577_77790C.1.pep
MAMGSFLIPISLLVLAASSAVAQLEMGYYRKSCPDVEAIVREEMVKIISAAPSLAGPLLRLHFHDCFVRGCDASVLLDSTKGNLAERDAKPNKSLRGFGSVERVKAKLEAAXPGVVSCADVLTLMAXRDAVVLAKGPSWPVALGXRRDGSVSTATEASDELPPPXATSLWLTRIFALKGLDSRDXVVLS

SEQ ID NO: 344983 - protein, 69 aa, Zea mays
  Clone ID: MRT4577_77791C.1.pep
EYESSLFRLKNEYICFKRRFIMGLMHGYMRYLGIGMVDDVFMHEEIVLCFFVSLLVFLFVFLGKKCPIP

SEQ ID NO: 344984 - protein, 254 aa, Zea mays
  Clone ID: MRT4577_77792C.1.pep
LEDLSKRILERKINEEKTIWEKHQEKMKEKRKGRKRGLKDEDDDNHYISDDEPENDDDFFADEQSDEEPKPSKSKKHKAKAKGEAKRKGNDGTTDEHLEQEATKDELELLVAGDQDTANGAKGYNLKRKKGKKGKEESADDKLPDIDLSKDERFSAMFTSHLFALDPTDPQYKRSAAFMRKQAGKPGVHGGKSSREPPLEGSSLGGTVPPDDAVTNNDGQKPDGSATEKLQILSAVKSLKRNLGAFKNSKTGDR

SEQ ID NO: 344985 - protein, 76 aa, Zea mays
  unsure (1)..(76): unsure at all Xaa locations
  Clone ID: MRT4577_77793C.1.pep
TRRFELDLVEHCFPNNCNPRRVAYYPEAWGVLTGRDIDTNADNLKSTLNLCPGYMGRYKDSLAXETAFEYAQLAKK

SEQ ID NO: 344986 - protein, 49 aa, Zea mays
  Clone ID: MRT4577_77794C.1.pep
LIHADSFTCNNLRCISQSNIGLHLTQYSEHPYFHTWSKQTVGMNSFAES

SEQ ID NO: 344987 - protein, 82 aa, Zea mays
  Clone ID: MRT4577_77795C.1.pep
KRTGSKNLMTGILVISIREKKPDLSISTKRPSVGPQLTVHRFMKTEQHHRCIQCEICCDLTSFASFFGMPSRIATSFSTTSG

SEQ ID NO: 344988 - protein, 126 aa, Zea mays
  Clone ID: MRT4577_77796C.1.pep
PEFVNEATQASPRYTLAQWKRIINQPWILANTASLINPKCQRSTFYFTNATAVPTFRTGNVTLGPSASVDPLTAVLQKASPDGSGFYGGVYGFTACAQNVGYGVVVPQGEDCEVAAQIVASSPGAW

SEQ ID NO: 344989 - protein, 451 aa, Zea mays
  Clone ID: MRT4577_77797C.1.pep
HRAGKPGATDAAHAFGSRFNTHASQAEVFSDIQPLIRSVLDGFNVCIFAYGQTGSGKTYTMSGPGTSKEDWGVNYRALNDLFDISLSRRNAFSYEVGVQMVEIYNEQVRDLLSNDIAQKRLGIWSTSQPNGLVVPDASLHPVKSTLDVLELMEIGQTNRAVGSTALNERSSRSHSILTVHVRGVDLKNGSTSRGCLHLIDLAGSERVERSEAIGDRLKEAQYINKSLSALGDVIFSLAQKNAHVPYRNSKLTQVLQSSLGGQAKTLMFVQINPDTGSYSETISTLKFAERVSGVELGAARSNKEGKDIKELLEQVSSLKDTISRKDMEIDQLLKNKAKSPGSSIDRNDSRQQIRRLSGTGSSEAECEDNMSDDGCSVAGTEYSVGGASEATAERMQKAPSRIARLFHTKNGQPANSKPKPRESALKPPGRTTSTGGSQATGGSLVKPPKRR

SEQ ID NO: 344990 - protein, 307 aa, Zea mays
  unsure (1)..(307): unsure at all Xaa locations
  Clone ID: MRT4577_77798C.1.pep
MAAAASGSATGGGSRLVDRCIDAAARGPATVEAWRRQRRSLERLPAPLADALLRRLAARRLLFPSLLEVFGRSVEEVDLSGFLSVNSEWLAYLGSFRYLRALKLADCKNINNDAVWSLSGMNTLKELDLSRCKKISDAGIKHIVTIESLEKLHLSETELTDNGVMLISSLTNLSFLDLGGILMTDKTLQSLQVLTKLEHLDIWGSETTNEGASALKSFAKLLSLEXLALTRVNHLSIPPTTSYLNMSNCEIHSICDVDSEVPVPLENFIASAATFGTVDKVLPTIQPRSLIHWDLSXTHVKHLDFLE

SEQ ID NO: 344991 - protein, 215 aa, Zea mays
  Clone ID: MRT4577_77799C.1.pep
DAWADAWAYRNSKLTQVLQSSLGGQAKTLMFVQINPDTESYSETISTLKFAERVSGVELGAARSNKEAKDIKELLEQVSYLKDTISRKDMEIDQLLKDKAKSPSSSTDINDSSQQIRRLSGAAGSGEAECKDNMSDDGCSVAGTECSVGGASEATAERMQKAPSRIGRLFLTKNGQPANSKPKPRESALKPSGRTTSTGSQATGGGSSVKPPKRR

SEQ ID NO: 344992 - protein, 119 aa, Zea mays
  Clone ID: MRT4577_7779C.1.pep
TGTASRSTHAPRTRGLFFFFYIGRHQTAFDSGYQLLQDVHKQPASKQNTTAKPDLPNLEPLLLDLRKQESQINIEIKRQNKDNRTSFNTLPKELSKQERTSSSNIRSLLTCWSSTSRNK

SEQ ID NO: 344993 - protein, 123 aa, Zea mays
  unsure (1)..(123): unsure at all Xaa locations
  Clone ID: MRT4577_777C.1.pep
MGKEKIHISIVDIGHVDSGKSTTTGHLIYKLGGNDKRVIDRPQKEAADMTHRSFTLACVLVQLPADRATGITIDIALRHAQTTNHPRTAIDAPXHRXFIQNMITGTSHADCAXLTIDSTTGAP

SEQ ID NO: 344994 - protein, 178 aa, Zea mays
  unsure (1)..(178): unsure at all Xaa locations
  Clone ID: MRT4577_77800C.1.pep
DGLRVFNTRASQVEVFSDIQPLIRSVLDGFNVCIFAYGQTGSGKTYTMSGPGTSKEDWGVNYRALNDLFYISLSRRNAFSYEVGVQMVEIYNEQVRDLLSNDIAQKRXLPPHQKMFTLYYNISHDCIFTTCILTDMPRKQNMLFLTKRXLGIWSTSQPKGLVVPDASLHPVXSTLDVL

SEQ ID NO: 344995 - protein, 57 aa, Zea mays
  Clone ID: MRT4577_77801C.1.pep
GCTRLGPNPPPGPFPWAGISRPVGPQKKKKKKKKKKKKKKKKKKKKKKKKKKKKKKK

SEQ ID NO: 344996 - protein, 158 aa, Zea mays
  unsure (1)..(158): unsure at all Xaa locations
  Clone ID: MRT4577_77802C.1.pep
VELGAARSNXEGKDIKELLEQVSSLKDTISRKDMEIDQLLKNKAKSPGSSIDRNDSRQQIRRLSGTGSSEAECEDNMSDDGCSVAGTEYSVGAASEATAERMQKAPSRIARLFHTKNGQPANSKPKPRESALKPPGRTTSTGGSQATGGSLVKPPKRR

SEQ ID NO: 344997 - protein, 88 aa, Zea mays
  unsure (1)..(88): unsure at all Xaa locations
  Clone ID: MRT4577_77803C.1.pep
NKPNERESREKQHQQTAIQIPKEEHRLSTDSENEPAXREPRQTKKMPQXKEKKKRXRAXPHKGGRRRXRNSRRPPRDWRPPRPQQAXE

SEQ ID NO: 344998 - protein, 114 aa, Zea mays
  unsure (1)..(114): unsure at all Xaa locations
  Clone ID: MRT4577_77804C.1.pep
VGDVRYRQRSDGYCACLAEFQLGLPTLSPQVAQRWSRPLSDXXXMMSDRGYNYVGSCSRQQFSEGVDEVRLXXXXPTVLRAPPRGRHAVXPRRKHSTLSLRFTGIDHFTSFMWC

SEQ ID NO: 344999 - protein, 90 aa, Zea mays
  Clone ID: MRT4577_77805C.1.pep
MAEELVLDTAIRDWVLIPLSVVMVLIGVLRYFVSKLMRSPPSASPSPDPKTVKEGQVVIRARNLRNGAQFIPAKAFKVRKLYYTNGEAGL

SEQ ID NO: 345000 - protein, 232 aa, Zea mays
  Clone ID: MRT4577_77806C.1.pep
HASAQVEVFSDIQPLIRSVLDGFNVCIFAYGQTGSGKTYTMSGPGTSKEDWGVNYRALNDLFYISLSRKNAFSYEGGVQMVEIYNEQVRDLLSNDIAQKRLGIWSTSQPNGLVVPDASLHPVKSTLDVLELMEIGQTNRAVGSTALNERSSRSHSILTVHVRGVDLKNGSTSRGCLHLIDLAGSERVERSEAIGDRLKEAQYINKSLSALGDVIFALAQKNAHVPYRNSKLT

SEQ ID NO: 345001 - protein, 101 aa, Zea mays
  Clone ID: MRT4577_77807C.1.pep
TPKVCQTCTNRNRNAGGFGHFVAIYIYVCVLFYVLKRRERVGLASFTGEKNGAGAACRCPCTDNLRLPSFYFFLKKNANKFTPALHFDVRFWTKDRREGAF

SEQ ID NO: 345002 - protein, 34 aa, Zea mays
  Clone ID: MRT4577_77808C.1.pep
TGQMNCNFSSCKKMEILQTNKAARIWHSVPFLPS

SEQ ID NO: 345003 - protein, 86 aa, Zea mays
  Clone ID: MRT4577_77809C.1.pep
RVTRLHLFVVSTVDIRICHDPVKLNVRTQKGVYVSYTRSHCHHKSVHFQYVPSKFQPEDFLVQAHNGAEHQIHQIGYNAYNPPLAP

SEQ ID NO: 345004 - protein, 84 aa, Zea mays
  Clone ID: MRT4577_7780C.1.pep
PKLHFIEVITGDFANEREIGKGSFGVVYKGVLQNGEVVAVKRLLVVAKTNLDKQYLNEVSSLIDLNHRNIGKLFGYCNEIQRET

SEQ ID NO: 345005 - protein, 187 aa, Zea mays
  unsure (1)..(187): unsure at all Xaa locations
  Clone ID: MRT4577_77810C.1.pep
TLALFHRYQFSSTPRVRSRSRRGAGWAGLRSRXTAHLYLRPFRMKGYVXITIYIYIYKIGNYVYVKVNGAGHKGMANKYYHCRTGRVWNGTKRAIGVEINMHVNGSIIMKRMHVRVEHVHAHRCTXELRLRKVKNDQVKADAKERGEVMSTKRQTLGPKPGFMVEGTTIEIVTAIPYDVDNDHNGED

SEQ ID NO: 345006 - protein, 154 aa, Zea mays
  unsure (1)..(154): unsure at all Xaa locations
  Clone ID: MRT4577_77811C.1.pep
IKDRRERLSRQRSGNIAVMMVGNKSDLNHLRSVPEEDRXRHFRSEKEGLSFLETSAXRGAINVEKAFHTXILSEIHQTLSKKALPAQQSASANGRSMHGTXTINVAESSPPAKRLACCSSCKDLLPIPTEQMQVSLRVGCRSLCIICLPPKASN

SEQ ID NO: 345007 - protein, 83 aa, Zea mays
  Clone ID: MRT4577_77812C.1.pep
TVLTQQIINPEEGKSFGSSQRPHHRLLLSSPKSNNQTRITTIKHTYSYASRWSRLPRSPKNLSLFSLDHPPESCYSSINTKGQ

SEQ ID NO: 345008 - protein, 130 aa, Zea mays
  unsure (1)..(130): unsure at all Xaa locations
  Clone ID: MRT4577_77813C.1.pep
MGWLGNTPACASHQGSLTWEFCYDPXGLGSDPENLLRNVEVQLRHXRDAMLRATMIIIPXELLTEIPVRYTAFWXKPSDSRXLTDTTTLFMIELILNGWAEAPRSPDIIKSGTDYTDPLLPIYKLTCTDG

SEQ ID NO: 345009 - protein, 385 aa, Zea mays
  unsure (1)..(385): unsure at all Xaa locations
  Clone ID: MRT4577_77814C.1.pep
MASIRRPHSPAKQHLLRHHHPFATSSPPSSPLRHSSTSSSPRTHHHLAGGYPHPFLFFTRRPLPRFAAFFLLGSFLGLLHFLSHLPHQTPHLRPATSSPAVIPRHQLPIVRLNNHDDDDDESNSKLLVVVTPTRARAAQAYYLSRLGHTLRLVHPPLLWLVVEAGNPTPEAAAALRGTTVMHRYVGCCDNLNASASDDALRFRPHQMNAALELLENHRIDAIVYFADEEGVYSLDLFKRLRQVRRFGAWPVPVISENRKDGVGVVLEGPVCKQNQVVGWHTSEHASKLRRFHVAMSGFAFNSTMLWDPRLRSHLAWNSIRHPDTAKQGFQATTTFVEQLVEDESQMEGIPADCSQIMNWHVPXGTEXLAYPRGWRVGTNLDVVIP

SEQ ID NO: 345010 - protein, 57 aa, Zea mays
  Clone ID: MRT4577_77816C.1.pep
IFLLHFHVYLSFKCYMDPFHMQLALHPILIIKNPIMSTANTTHIIHMISTTNHNKIF

SEQ ID NO: 345011 - protein, 1053 aa, Zea mays
  unsure (1)..(1053): unsure at all Xaa locations
  Clone ID: MRT4577_77817C.1.pep
MASAEDQAAAAALLGGDPAAFDALLSTLMSSSNADRSAAEAAFHRLRASHPEPLALRLATSLATPTTPADLRAMAGVLLRKVLSPAPSSDASSNNATPPAPLWPQLSPAGQAALKAHLLSALQSDPPKPIAKKVCDAISELAASLLPENAWPELLPFLFRAASGPDAHNLQESALLIFARLADYIAESLLDHLMTIHNLLASALAHPTSPDVRIAALGAAVNLVQCLPTNSDRDKMQDLLPAMMRALTDCLNSGQEVSAQEALELLVELAGAEPRFLRRQIADVVGAMLQVAEATQLEDGTRHLAVEFVITLAEARERAPGMMRRLPQFVGRLFAVLMQMLLDVEDDPAWHSAETEDEDAGEGNNYGVAQECLDRLSIAIGGNAIVPIASELLPQYLSSAEWQKHHAALITLAQIAEGCAKVMLKNLEQVVSMILNGFQHPHPRVRWAAINAIGQLSTDLGPDLQVHYHQQVLPALANAMDDFQNPRVQAHAASAILNFSENCTPEILTPYLDGIVNKLLVLLQNGKQMVQEGALTALASVADSSQQIESRAPTPPVAASAALCHLERTSLVLPDLLDHFKKYYDAVMPYLKSILMHATDKSNRMLRAKSMECISLVGMAVGKDKFRDDARQVMEVLMALQGAPMETDDPITSYMLQAWARLCKCLGQDFLPYMSVVMPPLLQSAQLKPDVTVTSAESDDDIASDDDSIETITLGDKRIGIRTSVLEEKATACNMLCCYADELKEGFFPWIDQVAPTLVPLLKFYFHEEVRRAAVAAMPELLRSAKLAVEKGQAQGSDDXLGNLIKTFKGSFLPFFEELSMYITPMLGKDKTPEERRIAICIFDDVAEQCRESALKYYDTYLPFLLEASNDENSDVRQAAVYGVGVCAEFGGHVFRPLVGEALSKLNNVIRHPDARLPDNIMAYDNAVSALGKICQFHRDGIDAAQVVPAWLSCLPIKDDKVEAKVVHGQLCSMVERSDAEILGPHSQYLPKIVSIFAEVLCNGTELATDETRNRMVNVLRRFQQTLPPDFLASTFSNLQPQQQLLLQSILST

SEQ ID NO: 345012 - protein, 293 aa, Zea mays
  unsure (1)..(293): unsure at all Xaa locations
  Clone ID: MRT4577_77818C.1.pep
PPTRPVRAIIDEIKNVIIGSATLKRERSERTKAEDFDADEGELLKEENEQXRRLIDQVSECLGTLIKTFKGSFLPFFEELSMYITPMLGKDKTPEERRIAICIFDDVAEQCRESALKYYDTYLPFLLEASNDENSDVRQAAVYGVGVCAEFGGHVFRPLVGEALSKLNNVIRHPDARLPDNIMAYDNAVSALGKICQFHRDGIDAAQVVPAWLSCLPIKDDKVEAKVVHGQLCSMVERGFVQXGTELATDETRNRMVNVLRRFQQTLPPDFLASTFSNLQPQHQLLLQSILST

SEQ ID NO: 345013 - protein, 153 aa, Zea mays
  unsure (1)..(153): unsure at all Xaa locations
  Clone ID: MRT4577_77819C.1.pep
LVVYLQGKDKTPEERRIAICIFDDVAEQCRESALKYYDTYLPFLLEASNDENSDVRQXVFVLSCSLDLFTLFYLVNLNTDVVMNLFXXAAVYGVGVCAEXGGHVXRPLVGEGLSKXNNVIRHPDARLPDNIMAYDNAVSALGKNMPIHRDGID

SEQ ID NO: 345014 - protein, 305 aa, Zea mays
  Clone ID: MRT4577_7781C.1.pep
GKIAVLQLGRWHNLCRHHIEVDSTEFLEGLQSSNQLKYLCLRGISRIIELPASIGGLSNLRILDLHACHNLERLSTSITYLQMLTHLDVSECYLLEGMPRGIGLLTELQVLKGFVIGGSTGNYNCRVAELARLDKLKKLTIYIGSKVAVTENELNELENIKGLCVLKITWAVSLSKKERVHQTSDSTPLITSLSLPLNLEKLDLCCFPGEKVPDWLSPSKLLRLKRLYFTGGMLRTFGNKNMLEVWSVEVLRLKFLNDLSVQWTQVHEIFPKLTFLEVFRCRKLESFPCDKDGVWMNHDTKDSRK

SEQ ID NO: 345015 - protein, 419 aa, Zea mays
  Clone ID: MRT4577_77820C.1.pep
FGSRLNGFQHPHPRVRWAAINAIGQLSTDLGPDLQVHYHQQVLPALANAMDDFQNPRVQAHAASAILNFSENCTPEILTPYLDGIVNKLLVLLQNGKQMVQEGALTALASVADSSQDHFKKYYDAVMPYLKSILMHATDKSNRMLRAKSMECISLVGMAVGKDKFRDDARQVMEVLMALQGAPMETDDPITSYMLQAWARLCKCLGQDFLPYMSVVMPPLLQSAQLKPDVTVTSAESDDDIASDDDSIETITLGDKRIGIRTSVLEEKATACNMLCCYADELKEGFFPWIDQVAPTLVPLLKFYFHEEVRRAAVAAMPELLRSAKLAVEKGQAQGRDESYVKQLSDYIIAALVEALHKEPETEMCSSMLDSLNECMQLSGLLLDEAQEGIEGRLYRCDVECSCSVDLSRCSVVVVIGTG

SEQ ID NO: 345016 - protein, 140 aa, Zea mays
  unsure (1)..(140): unsure at all Xaa locations
  Clone ID: MRT4577_77821C.1.pep
LXLVAPVPSXXCXXPASXALASPSWXXXXXXRGRGAXWRXXXLWAPXXXXXXXXRXVXXAXRCGXXAXXCAXXXALXXPXRXAPPGXRAPXXXLPSPXPVXGXXWXGARXXPRXPXXXXXRXSXVRXXWXLXPGSVPPGS

SEQ ID NO: 345017 - protein, 75 aa, Zea mays
  Clone ID: MRT4577_77822C.1.pep
MAKEPMRVLVTGAAGQIGYALVPMIARGVMLGADQPVILNMLDISPAAEAPNGVKIDWVDAAITILKGVVATTDV

SEQ ID NO: 345018 - protein, 75 aa, Zea mays
  unsure (1)..(75): unsure at all Xaa locations
  Clone ID: MRT4577_77823C.1.pep
MLRNLLALRQIGQRTISTASRRHFKNRVPEKQKXFQEDDEIPLYLKGGVADALLYRATMILTVGGTAYAIYELAV

SEQ ID NO: 345019 - protein, 171 aa, Zea mays
  unsure (1)..(171): unsure at all Xaa locations
  Clone ID: MRT4577_77824C.1.pep
MSSSTMAFSSTCFSGXAANEPSHSAFGEARVLLLKTPWKVNSALLSGSLCYVPYRVLNLAPTCPSTPXSYTDGSSFSGCTTWXDTRRXIGVTCSTFVKNRKLEVILSSWPMVCAFGCSFSELISRYXVKFGECVRFKACSCLRRGVLDYLVITILIFEQSILAMWLCWIWL

SEQ ID NO: 345020 - protein, 512 aa, Zea mays
  unsure (1)..(512): unsure at all Xaa locations
  Clone ID: MRT4577_77825C.1.pep
SCEKFVQVKYVSGSYDRVEGFELLNKAISEYETSKNNDSGSYRRLFYLALPPSVYPSVCKMIRSYCMSPSSHTGWTRVIVEKPFGKDLNTAEELSAELGQLFQEEQLYRIDHYLGKELVQNLLVLRFANRLFLPLWNRDNIANVQIVFKEDFGTEGRGGYFDQYGIIRDIIQNHLLQVXYLMNFFCRWFMSDFPNTYFLTXLDSRGVLVXWGLGTVQYNAXYLVIXNTLFHHQSSANLLSRHSRYLXTFLIYIAMFCSGESSGMTVALILQVFCLVAMEKPVSLKPEHIRDEKVKVLQSVEPIKHEEVVIGQYDGYKDDPTVPDDSNTPTFASVVLRVHNERWEGVPFILKAGKALNSRKAEIRVQFKDAPGDIFRCKKQGRNEFVIRLQPSEAMYMKLTVKKPGLEMATEQSELDLSYGMRYNGVKIPEAYERLILDTIRGDQQHFVRRDELRAAWEIFTPLLHDIDGGKLRSVPYKPGTRGPQEADELSRRMGYVQTHGYVWVPPTLSKV

SEQ ID NO: 345021 - protein, 187 aa, Zea mays
  unsure (1)..(187): unsure at all Xaa locations
  Clone ID: MRT4577_77826C.1.pep
MMFIESFHRKSPHMQDGPMEIEGEYRPDTTELAHEGEDSAXRWVVHPKDVKYNFSTITDVRKVVVKLEQRRGNNSNTLTDGDIDNMKGSSWANKDKAHQDSYCSSLTQGSXITAYSCSVEESYAQLKSLLCIVNRDDIVPAGXGTSSMNLADYMTRAKALDIDLHKLATPYMESMVTLTGVYDPNLI

SEQ ID NO: 345022 - protein, 94 aa, Zea mays
  Clone ID: MRT4577_77827C.1.pep
VSMAQYINNSSTRNHRLRTRNHHFFAGLSKSKAHCTLRGSHVCSKRHTLHRQHKRPLWAQHQNRCQFPDHHTMAPKINFMLLRPVVNNCQVSTT

SEQ ID NO: 345023 - protein, 517 aa, Zea mays
  Clone ID: MRT4577_77828C.1.pep
MSGGSSESSPLSGQNSLSSLSISKDNELSSESGCLSIVVLGASGDLAKKKTFPALFHLFQQGFLQSGEVHIFGYARSNLSDDGLRERIRGYLKGASDEHLSQFLQLVKYVSGSYDRVEGFELLNKAISEYETSKNNDSGSYRRLFYLALPPSVYPSVCKMIRSYCMSPSSHTGWTRVIVEKPFGKDLNTAEELSAELGQLFQEEQLYRIDHYLGKELVQNLLVLRFANRLFLPLWNRDNIANVQIVFKEDFGTEGRGGYFDQYGIIRDIIQNHLLQVFCLVAMEKPVSLKPEHIRDEKVKVLQSVEPIKHEEVVIGQYDGYKDDPTVPDDSNTPTFASVVLRVHNERWEGVPFILKAGKALNSRKAEIRVQFKDAPGDIFRCKKQGRNEFVIRLQPSEAMYMKLTVKKPGLEMATEQSELDLSYGMRYNGVKIPEAYERLILDTIRGDQQHFVRRDELRAAWEIFTPLLHDIDGGKLRSVPYKPGTRGPQEADELSRRMGYVQTHGYVWVPPTLSKV

SEQ ID NO: 345024 - protein, 117 aa, Zea mays
  Clone ID: MRT4577_77829C.1.pep
PVGPKVPGMSGPASSQPAAFCLTPQRSPEHDDQPVSQWLSLPSPASPMIPRDTAVVGAGAPPAKAGREGAARPSRRPHRLKSTVPSQPRDRRPGGGAHNSGRWSSSASTPAPNPEPR

SEQ ID NO: 345025 - protein, 227 aa, Zea mays
  Clone ID: MRT4577_7782C.1.pep
MGQGRRMKKQGIPEPLDESLVTRKRKDAPAPAEPERKKRSRTAAREAREAKAKAQPKTRVAGKPVKTAAAIVNGAKAKAKAAKAAPPRPSDDEDDEDLSEDDSEMMDDSDINVTGLDALGSASEGEESIDEDEFDSDIVDSDTDIRKGAAMWSEDEDESDAEEKLTAANIAGLSRKLDEQKAIEEAEAQAELEENMQTNIGERPKILDEEDEDGRPITNLVTRTSNC

SEQ ID NO: 345026 - protein, 47 aa, Zea mays
  Clone ID: MRT4577_77830C.1.pep
MGCVQKEKKKKKKKKKKKKKKKKKKKQKKEGREKKKNTLPFLPLLKG

SEQ ID NO: 345027 - protein, 40 aa, Zea mays
  Clone ID: MRT4577_77831C.1.pep
VLSQPTNLEKTLVFLINRINKVFITFLQCSYCTFIRLLCV

SEQ ID NO: 345028 - protein, 81 aa, Zea mays
  Clone ID: MRT4577_77832C.1.pep
TLSMGHQTYSPLFILEGITKPLKGLLEGRGVPNLLGCPQRVKSPVARSSSSLPINKVYLGAGENLLTAGLISGGLSCTKLL

SEQ ID NO: 345029 - protein, 58 aa, Zea mays
  Clone ID: MRT4577_77833C.1.pep
CKKMGREMKFGGIFEGVTICMQAYVKLNPLGTSALSFSQFFVLSSGGFFFPTRPLTRL

SEQ ID NO: 345030 - protein, 113 aa, Zea mays
  Clone ID: MRT4577_77834C.1.pep
DARNKLRGQKFDLLLAILPEKNGSLYGNSKRICETEIGIMSQCCLDKNVRSAGPAYFANVAIKINAKFGGRNLEFANPKESLPSVTIEPTIIFGADVTHPVALDDTAPSIASV

SEQ ID NO: 345031 - protein, 577 aa, Zea mays
  unsure (1)..(577): unsure at all Xaa locations
  Clone ID: MRT4577_77835C.1.pep
GHRLKNHECALARTLVSGYQIRRRLLLTGTPIQNSLQELWSLLNFILPNIFNSSQNFEEWFNAPFACDVSLNDEEQLLIIHRLHQVLRPFLLRRKKDEVEKYLPVKTQVILKCDMSAWQKAYYEQVTSREKVALGFGLRSKALQNLSMQLRKCCNHPYLFVEHYNMYQREEIVRASGKFELLDRLLPKLQRAGHRVLLFSQMTKLLDVLEIYLQMYNFKYMRLDGSTKTEERGRLLADFNKKDSEYFMFLLSTRAGGLGLNLQTADTVIIFDSDWNPQMDQQAEDRAHRIGQKNEVRVFVLVSVGSIEEEILDRAKQKMGIDAKVIQAGLFNTTSTAQDRRALLQEILRRGTSSLGTDIPSEREINRLAARTDEEFWLFEKMDEERRLRENYKSRLMDGNEVPDWVFANNDLPKRTVADEFQNIMVGAKRRRKEVVYSDSFGDQWMKSDEGFEDIPKATQRSKKTAYSSDIQVEFSERRKRPRSVENSADGVSNPTWTPDKGRAGVSSYSKDETEDDGEDEVITSGLQKGNSFTWNTLGRRRSSHFSSSSDSRXAQHSNGNIHECYGLDLLVDGIPL

SEQ ID NO: 345032 - protein, 58 aa, Zea mays
  Clone ID: MRT4577_77836C.1.pep
MGLNSTLKTAHPSKSFNWILYVTLPQPIPIKAVGSNVIVLALNSAVRVLLQTAYRLSL

SEQ ID NO: 345033 - protein, 837 aa, Zea mays
  Clone ID: MRT4577_77837C.1.pep
VLAWHVRARQRISRQEKNRINLLKTGDQEAYMRMVEESKNERLKMLLDKTNELLEGIGKAVQRQKDAEHVSKPEGGSEVPKGSESEDCSQISGIKSESAEESTSDDDGDLPGPADESKFNAGRRLDVTVHSIEEKVTEQPSALEGGELRPYQLEGLQWMLSLFNNNLNGILADEMGLGKTIQTIALIAYLLEKKEVAGPHLIIAPKAVLPNWSNEFKTWAPSIGTILYDGRPEERRLLRDKNFDGEQFNVLLTHYDLILKDKKFLKKVHWHYLIVDEGHRLKNHECALARTLVSGYKIRRRLLLTGTPIQNSLQELWSLLNFILPNIFNSSQNFEEWFNAPFACDVSLNDEEQLLIIHRLHQVLRPFLLRRKKDEVEKYLPVKTQVILKCDMSAWQKAYYEQVTSREKVALGYGLRKKALQNLSMQLRKCCNHPYLFVEHYNMYQREEIVRASGKFELLDRLLPKLQRAGHRVLLFSQMTKLLDVLEIYLQMYNFKYMRLDGSTKTEERGRLLADFNKKDSEYFMFLLSTRAGGLGLNLQTADTVIIFDSDWNPQMDQQAEDRAHRIGQKNEVRVFVLVSVGSIEEEILDRAKQKMGIDAKVIQAGLFNTTSTAQDRRALLQEILRRGTSSLGTDIPSEREINRLAARNDEEFRLFEKMDEERRLRENYKSRLMDGNEVPNWVFANDNETLRKKTVADEFRNIIVGSKRRRKEVVYSDSFGDQWMKSDEGFEEIAKMTPRVKRTAYSPDIQVEYNERRKRPKSVENSADGASNPTRTPDKGRAGVSSYSKDETEDDGEDEVITSGLQKGNSFTWKTLGRKRSSHLSSSSDSKGRPPF

SEQ ID NO: 345034 - protein, 127 aa, Zea mays
  unsure (1)..(127): unsure at all Xaa locations
  Clone ID: MRT4577_77838C.1.pep
GTHSGVLSIAAKIFCLMVXIGPCASVATECQFQHQCSYALYSIRILMRIPRYQCAYFNDKSTLVCKPYRIALVISPSIVPLRPVFLQLXNPMXQQVPMDHYTPLNICAHNLRRLVLANLAAYFDQHQ

SEQ ID NO: 345035 - protein, 146 aa, Zea mays
  unsure (1)..(146): unsure at all Xaa locations
  Clone ID: MRT4577_77839C.1.pep
MPCSAVRGAQGPLPVSSHIETGQAVLRRAWELGPGGVWHXTATTGSMDHLVLDGGPGMGGRQLQTAREEHKTEGILHRSGSSSSSSSEDYGMGGRRKKGIKGKIKEKLAGGHKDDQHATGTTGGAYGQQGHTXGSAYGQEGHTGGA

SEQ ID NO: 345036 - protein, 103 aa, Zea mays
  Clone ID: MRT4577_7783C.1.pep
QNQHYLKNHSVGPQIALVLQVVLILHHHRKAYVQHENEDPCYDPDAIALLGPVSESLDNFPSDLDCGFFSSDVAKESHGRPSPIESPLSRSRTVEEKPIEPPH

SEQ ID NO: 345037 - protein, 65 aa, Zea mays
  Clone ID: MRT4577_77840C.1.pep
LWPHAHFGRVLPYHSHPHLLRPEPPPHWIHPLNARKRTTMHVPLRALNLSLPMHTSCSGRNVARY

SEQ ID NO: 345038 - protein, 94 aa, Zea mays
  Clone ID: MRT4577_77841C.1.pep
MQGAGNIVKTFERQLVQGKRNDFVYGPFHPAGAKKHETDDQTVKQQERKNIQDWENLAVSFRPQYQNQALNDLFGHYVEAWKSWYVDLTQETAS

SEQ ID NO: 345039 - protein, 174 aa, Zea mays
  Clone ID: MRT4577_77842C.1.pep
RLGVGDGRRRDQINPMVAVWSPLSHARVPCHVVRNACVALLGGTHAWCMEELLTGAMVASWIRSSPRPASPERQSMDIVSKIVQVPKITGKAVCVLSVFGAVQDCYLLHSAVILNHKGPLEIIRVFGSILTFDSPGFGCLSATLACGDCSLVSGIAVGPLIAATPVQEERGISE

SEQ ID NO: 345040 - protein, 424 aa, Zea mays
  unsure (1)..(424): unsure at all Xaa locations
  Clone ID: MRT4577_77843C.1.pep
MDASAATPAPGPSFSGAESSAAAAQPPAEAPQLRVHGAGSGSGVARACRHHAYSRKQKSLGLLCSNFVALYDREDVEVIGLDDAAKRLGVERRRIYDIVNVLESVGILVRRAKNRYTWLGFGGVPAALKELKERALRKMSXHRCYCXEDSSTANLSDDEDDEKLGDADEDAESEKLSQPVDNTSDKPDAPSCRLRSDHRKEKSPDSNAQNFVKLFLNMEVGTISLDEAARLLLGEGHADSNMRTAKVRRLYDIANVLSSLNLIEKTQQADTRKPAFRWLGXQSESKITMSWFLXPSMKAMPNKRAFGTDLTNIDNKRGKLDSAAENKVKLMQGAGNIVKTFERQLVQGKRSDFVYGPFHPAGAKKHETDDQTVKQQERKNIQDWENLAVSFRPQYQNQALNDLFGHYVEAWKSWYVDLTQETAS

SEQ ID NO: 345041 - protein, 40 aa, Zea mays
  Clone ID: MRT4577_77844C.1.pep
WSLRSGPVPGAQLGTITSKAEWEHTNHHWLNTAQHIHNYI

SEQ ID NO: 345042 - protein, 136 aa, Zea mays
  unsure (1)..(136): unsure at all Xaa locations
  Clone ID: MRT4577_77845C.1.pep
MGSGFKKKATGGKKPPGAQQPKGERGGGGKVFKPQGLRPNRGPGFPGPQNXNFRRGQNGGGAPQGGGSPLRGAXALGFLGSRGLVDKGPVRXKKGRRNLSXKGFPGGPHPKGGPQSGGSKGXPGPLGPRSPQVREP

SEQ ID NO: 345043 - protein, 84 aa, Zea mays
  Clone ID: MRT4577_77846C.1.pep
MMSSVVVDAAASPPLGLQTISFIYSRAQKNPIDTMRVLLGGVALLALAASATFTHTSGGCGCQPPPPVYLPPPVHLPPPVHLPP

SEQ ID NO: 345044 - protein, 68 aa, Zea mays
  Clone ID: MRT4577_77847C.1.pep
LQKKKKELSYDKDLLQFLVRRFGRYVTMGLYTQLVYTGDMLYQDVEVMNVFYEMQELVLNSRMINMKT

SEQ ID NO: 345045 - protein, 94 aa, Zea mays
  Clone ID: MRT4577_77848C.1.pep
ASFPLGWLITNGVGFAFSPMETVLKRLLLSSGEAVKYKSSLDGFKQFFKKEGPQFLFKGAGANLFGPITGFVVLFGYNQPQILFFGKKFGSGGA

SEQ ID NO: 345046 - protein, 83 aa, Zea mays
  Clone ID: MRT4577_77849C.1.pep
MLQLLDRSIIGFGHAGESLHTPFLSPYLKALGADFSNGVNFAIGGSTATPGGSPFSLDVQLHQWLYLRARSMEMINLGLSTVE

SEQ ID NO: 345047 - protein, 81 aa, Zea mays
  unsure (1)..(81): unsure at all Xaa locations
  Clone ID: MRT4577_7784C.1.pep
MNEILHIHGGQCGIQIRAKLWQVICHEHXIDHTGKHGGDSDLQLGRINIYYNEAYWRRSLPRAALIELEHCNMHLVRSLHY

SEQ ID NO: 345048 - protein, 558 aa, Zea mays
  unsure (1)..(558): unsure at all Xaa locations
  Clone ID: MRT4577_77850C.1.pep
GTGKVGFMFAPTLAGRVGNLGSIGIYNLVKYDISVVRAFNPVYIYVFFETNGIKAWSALGGCVLCITGAEAMFADLGHFSVKSIQVAFTAVXVFPCLLIAYMGQAAFLMKNPLVVERIFYDSVPGVLFWPVFVIATLAAMIASQAMISATFSCIKQAMALGCFPRIKIIHTSKKVMGQIYIPVMNWFLMVMCIIIVATFRSTNDIANAYGIAEVGVMMVSTALVTLVMLLIWQTNLFLVLCFPILFGAVEFVYLTAVLSKIQEGGWLPLAFSSLFLCIMYTWNYGSVLKYQSEMRGKISLDFILDLGATLGTVRVPGIGLVYNELVQGIPSIFGQLLVTLPAMHSTIVFVCIKYVPVPYVPLEERFLFRRVGQKDYHMFRSVARYGYKDVRKEDHGFFEQLLVESLEKFLRREAQEIALEASTMEAERDDISVVSEVPQTPAGDGDLQTPLLSDQRSGDNNRMAATDGSDPVLPSSSMSLEEDPGLEYELSALREAMASGFTYLLAHGDVRARKESVFTKKFVINYFYAFLRRNCRAGTATLKVPHSNIMRVGMTYMV

SEQ ID NO: 345049 - protein, 113 aa, Zea mays
  unsure (1)..(113): unsure at all Xaa locations
  Clone ID: MRT4577_77851C.1.pep
REPNRARDMGEDPTAGAXVTHTVHGAHQSVTQGYILARGMGGLNCMASKTITADSYQRAXIYFSATKQPXDNDTYVCGFNGLAYDGNDVHALFXLTLLCQSXYDKRRVHSHYD

SEQ ID NO: 345050 - protein, 123 aa, Zea mays
  Clone ID: MRT4577_77852C.1.pep
RMSITYHTWCIKDVLDVRFTIESDYDPVPYVIGVQQSQIDLERSSPRSTRLFPIVSSCLSRQPLSSSVSSRSFVMVVLNMLWCYCTVTLHARVVYRKWWPASSDKKGAPPNPRLQRARPASEG

SEQ ID NO: 345051 - protein, 156 aa, Zea mays
  unsure (1)..(156): unsure at all Xaa locations
  Clone ID: MRT4577_77853C.1.pep
MTQMPCRAKDISSSRADXYRNSRPIWLXRSDTTYEEXMITNVAIKVHMSTKIVVVLRDHNVIPVVERENGTXIVRILEARMGMETIMPEELYFLSXKDETIKKHLEKIWTAKDSKFRLLXLAESMIHRLARYYERTKKLPPNWKYXESTTXSTLVA

SEQ ID NO: 345052 - protein, 127 aa, Zea mays
  Clone ID: MRT4577_77854C.1.pep
GRGDLVHRQTAASAVKHMALGVAGLGCEDALVHLLNYVWPNIFETSPHVINAVMEAIEGMRVALGAAVILNYCLQGLFHPARKVREVYWKIYNSLYIGAQDALVASYPALEDDGDNIFSRPVLAMFV

SEQ ID NO: 345053 - protein, 32 aa, Zea mays
  unsure (1)..(32): unsure at all Xaa locations
  Clone ID: MRT4577_77855C.1.pep
XXXVNKTCELSYPSKEQHLQHVPLTSSTFLML

SEQ ID NO: 345054 - protein, 56 aa, Zea mays
  Clone ID: MRT4577_77856C.1.pep
ILQLIIYNQLQQHQLHDISLQILHVRISPSYHLINIFLFKTIINANIQPHHQTFNI

SEQ ID NO: 345055 - protein, 94 aa, Zea mays
  Clone ID: MRT4577_77857C.1.pep
SAHRVHQNRCDGYPLAVHCSTSMLNCLTRFFKIFLVRNGDDISAPIIRSPTKNNKNAKPSLHFRIGAQRHGRKRGGAIARRRRQVSRPASRYPM

SEQ ID NO: 345056 - protein, 86 aa, Zea mays
  unsure (1)..(86): unsure at all Xaa locations
  Clone ID: MRT4577_77858C.1.pep
MDLSPKYPFGKMLVVGFYPPFKLKGLWFFRGQGVPKFVMDGVYDMELSEWAKVDIFYEAQKEGVNPMIGAQDPFXGGALLYPKCFK

SEQ ID NO: 345057 - protein, 207 aa, Zea mays
  Clone ID: MRT4577_77859C.1.pep
KTRRGRWERGVQEAGHGTRRAHGPHRRRRRFRGGEGERRRRRGGTGAGRWAVGAVCGGLVYYHCAVRRASAVSLAADVLLVLLCSLSILGLLFRHLHISVPVDPLEWQISQEMANSIVASLANTVGAAESVLRVAATGHDKKLFFKVVSTLYFLAALGRVVSGAAVAYAALCIFCLYMFAQSTDLFDQLPSWVPVGRDSLGGTQDTA

SEQ ID NO: 345058 - protein, 336 aa, Zea mays
  Clone ID: MRT4577_7785C.1.pep
RLEPEPFRKPYSGLSSDSMMCQEGKPQAAVDKTLDSKVFKGWVETDNPWTSDDETDNNEMTYVNLQLNPERYTGYTGDSARRIWDAIYKENCPKYPSEELCHEKKALYKLISGLHSSISVHIAYDYLLDESTNSWGQNLPLLYDRVLKYPERVQNLYFTYLFVLRAVTKAANYLEQAEYNTGNPEDDLKTESLVKQLLYNSKLRSACPLPFDEAKLWQGENGPELKQEIQKQFRNISAIMDCVGCEKCRLWGKLQVHGLGTALKILFSVDGDSHMNQPLQLQRNEVIALFNLLNRLSESVKFVHEKGSSIEEVIEEQIPSTVQKSVSMPNLKLDFL

SEQ ID NO: 345059 - protein, 162 aa, Zea mays
  unsure (1)..(162): unsure at all Xaa locations
  Clone ID: MRT4577_77860C.1.pep
SATKGLFLTAXRLLEQTESPLSEPEGDATARSPTAVTNARKAEDSLGAHGGPGESPSLPGSSIRLRQSPPHLPVRRRWSSRRSTSRPAHSTGTPPSAPIKIAVAEASELQQQQQQLGGGRRSPAASYTAAIAQCSCGCRSDPPPLPCSGAPNAKPAAGNRTD

SEQ ID NO: 345060 - protein, 80 aa, Zea mays
  unsure (1)..(80): unsure at all Xaa locations
  Clone ID: MRT4577_77861C.1.pep
LRISVPVDPLEWQISQEMANSIVASLANTVGAAESVLRVAATGHDKKLXXKVVSTLYFLAALGRVVSGAAVAYAGNNTAS

SEQ ID NO: 345061 - protein, 96 aa, Zea mays
  Clone ID: MRT4577_77862C.1.pep
VTRDCFTLMDSSDETNEVPVDNSQLDKHSTVDDESSLDGKIDEHTRLPIHPIEEDISGTKINYLAPIDECKFALHHNKPKKDMTTVIVQEGITIVY

SEQ ID NO: 345062 - protein, 186 aa, Zea mays
  Clone ID: MRT4577_77863C.1.pep
RTPKRVEFSTPPELMEELVDAEYDVGDPLRFRIVDSVLGAASPPGLAPRVLDSGDLLFTTAEEPTTFKEAEQSPCWRRAMLEEMKSIEENKTWNLVDLPAGHKPIGLKWVFKVKRDEHGNIVKYKARLVAKGYVQQQGIDFTEVFAPVARLESVCLLHAVVAHEGWEVHHMDVKSAFLNGDLLEEV

SEQ ID NO: 345063 - protein, 105 aa, Zea mays
  Clone ID: MRT4577_77864C.1.pep
VSLASKQIPPKNNKVPLCSPPPTPPLYSKAKSPWGTGQNSLVPPRAPQKTSPHPPLKLKNKRKRRTHKQKKKQKKKKNKKKKKKKKKKKKKKKKKKKKKKKKNPK

SEQ ID NO: 345064 - protein, 80 aa, Zea mays
  Clone ID: MRT4577_77865C.1.pep
FRLADRPTAAGQIVKYVLGYQFIRASVNTEIMYEHESSYKHLGKSVLLSGARLCPYTFIVSTAVSHVFLYKVNEFALALS

SEQ ID NO: 345065 - protein, 45 aa, Zea mays
  unsure (1)..(45): unsure at all Xaa locations
  Clone ID: MRT4577_77866C.1.pep
DRKALLDRKARGRPPHKDKGKFIAXEVVSAPGGGSASGAFLQEID

SEQ ID NO: 345066 - protein, 82 aa, Zea mays
  Clone ID: MRT4577_77867C.1.pep
GWAAPTPQHEYCASSVAFPLSIATECLLLSDGMPSPLTDHDPSKLSLQYYSKTCPIVQHHVHTDIDYAERSYTLYTILILLL

SEQ ID NO: 345067 - protein, 47 aa, Zea mays
  Clone ID: MRT4577_77868C.1.pep
IDQTHHVSAKNIIMAGRGRFTVGHLGTGNDCATLRLRGRRDPRHRMF

SEQ ID NO: 345068 - protein, 145 aa, Zea mays
  Clone ID: MRT4577_77869C.1.pep
LKKHKLLLSSRLHIKSNTKTEVRMDFYVTASRTCISSNILHVYPSRRLSVLHHVERFNCTTSTKYQQPPRIPIQSHLSSIMLALLRVNQAICSGSATSSELVVAHSMRSRGLSRPWRRGSARVGGCWDHSSWIGPLVVNNGRQRG

SEQ ID NO: 345069 - protein, 184 aa, Zea mays
  Clone ID: MRT4577_7786C.1.pep
WVPRGRPGTLLDESTNSAADYLEQAEYNTGNPEDDLKTESLVKQLLYNSKLRSACPLPFDEAKLWQGENGPELKQEIQKQFRNISAIMDCVGCEKCRLWGKLQVLGLGTALKILFSVDGDSHLNQPLQLQRNEVIALFNLLNRLSESVKFVHEKGSSVEEVINEQSPSTVQKGASKTNLKLDFL

SEQ ID NO: 345070 - protein, 100 aa, Zea mays
  Clone ID: MRT4577_77870C.1.pep
GATRDHPVANPFGPDSPELGSVDFPPVLVVVAGLDLLRDRAVDYAERLAAAGKPVELAEFAAAAHGFYLHEPGSEATGELIRAVGRFVDSCVSASEVLLD

SEQ ID NO: 345071 - protein, 97 aa, Zea mays
  unsure (1)..(97): unsure at all Xaa locations
  Clone ID: MRT4577_77871C.1.pep
TRHAPFXFFGKTPYTLTLRXALTEESGLGEPLFEWIAVGGMTNTYIYNCQLGGQTRMKHYELRLGRTRSEMTYIKGMARTANIAMPRPVVPSAGTSP

SEQ ID NO: 345072 - protein, 580 aa, Zea mays
  Clone ID: MRT4577_77872C.1.pep
TIIELPVACAILICLFALQHYGTHKVGFLFAPIVCIWLVCISAIGLYNIIRWDPHVYRALSPYYMYQFLRKTQTGGWMSLGGILLCVTGSEAMYADLGHFSQSSIQIAFISVVYPALVLAYMGQAAFISQHHSFESSYHIGFYVSVPETLRWPVLVIAILAAVVGSQAIITGTFSIIKQCSSLSCFPGVKIVHTSSTLHGQIYIPEINWMLMILCLAVTIGFRDTKHLANAQGLAVITVMLVTTCLMSLVIVLCWNKSIFLALGFLLFFGTIEVIYFSASLVKFHEGAWVPISLSFIFMVIMSVWHYGTIKKYEFDVQNKVSVNWLLNLGPSLGIVRVRGIGLIHTELMSGIPAIFSHFVTNLPAFHQVLVFLCVKSVPVPHVQPEERFLVGRIGPKEYRLYRVIVRYGYRDVQKDDLEFEKELVSNIAEFIRSSGEYDKNGFVEDTDKPLPFEKLSTISTGINMLEEDGEVDAYVSPHKEIDPHNAAPKRKKARFMIPKSAQVDSEVRRELQELMDAREAGMSFILGHSYMKAKSGSSFIKRIVINFFYEFLRKNSRGPAYAANIPHASTLEVGMVYQV

SEQ ID NO: 345073 - protein, 45 aa, Zea mays
  Clone ID: MRT4577_77873C.1.pep
NMGGLFIDSQLYFPFHSYIYFLYRFHLYYNFCLFFFNFLIGKLFF

SEQ ID NO: 345074 - protein, 61 aa, Zea mays
  Clone ID: MRT4577_77874C.1.pep
TNMRWNKQGVATSIRFPGINVCPQLGKFVRPNHWWGQCTELGFLGHNCQLTMVGGFLICAV

SEQ ID NO: 345075 - protein, 87 aa, Zea mays
  Clone ID: MRT4577_77875C.1.pep
LDIWELLYNVFSMASSLLYGFLVPVISIIKAFHGAASLIQRSCGALTARSVNVWSHYGLGAFICHSMSRVSPGHVSLGGKSLHHSTI

SEQ ID NO: 345076 - protein, 82 aa, Zea mays
  unsure (1)..(82): unsure at all Xaa locations
  Clone ID: MRT4577_77876C.1.pep
FAGGTRTSGSAXEWGMSELMRNPPVMNKMHALIREAFRGNTAVTVADLXASHLQYLXMMIYEVLRIHPPIPSAVAPGPVDHP

SEQ ID NO: 345077 - protein, 70 aa, Zea mays
  Clone ID: MRT4577_77877C.1.pep
HASDVKILKPIHYVVKARAKMGERGNYDPSMRWALRSSSEQILVLPTESRDMLPDITLLGTVRHTLTLSD

SEQ ID NO: 345078 - protein, 117 aa, Zea mays
  unsure (1)..(117): unsure at all Xaa locations
  Clone ID: MRT4577_77878C.1.pep
VVMGGRRAPITTCMGAPFVPQDQEVFLPXMSNRXGRTITFXECGGIEIDENWDKDKTMDLPAENPMTNDSCAPWKATSSWGARGKEGDFIKXCSPLTIDLDXSIRAMNPTTMVKGQP

SEQ ID NO: 345079 - protein, 135 aa, Zea mays
  unsure (1)..(135): unsure at all Xaa locations
  Clone ID: MRT4577_77879C.1.pep
MPAVSAAACCAATTPANEVAEDLLGYLRVLRDGTILRSPPEPLVYPATFPGSHPSMHWKEAGYDKPNNLRIRVYRPMTPPGAKKKLPEHVHLHGGGYCLGSCTWANXQEICLPLAREAGAXVLSXGYRLAHEHRL

SEQ ID NO: 345080 - protein, 47 aa, Zea mays
  Clone ID: MRT4577_7787C.1.pep
LKRIALLIKGLNHVPHFLFFYTTFSLYKPTLLNLNTFVKFPGFFKTF

SEQ ID NO: 345081 - protein, 153 aa, Zea mays
  unsure (1)..(153): unsure at all Xaa locations
  Clone ID: MRT4577_77880C.1.pep
VPLGARPEAPEPHIRRRARAFWVGDARLRAGRRAGADDHSDDDTTCGPATPRXPTSLYAGSMLNYIPPATLSRRPAYXAPYDRYGPRALPAYVXRTLRRRRTSGRTCPMDTLKLYACVGALSGLIHLVIGQEARSKCCPLVQGEADLDAVLCR

SEQ ID NO: 345082 - protein, 76 aa, Zea mays
  Clone ID: MRT4577_77881C.1.pep
YIGKKDVWKKKKKKKKKKKKKKKKKKKNKKKKKKKKKKKKKKKKKKPSPRPPPGQAPRLIPQFPPPVPPMGNKTPY

SEQ ID NO: 345083 - protein, 174 aa, Zea mays
  Clone ID: MRT4577_77882C.1.pep
MGNSLRCCLACMVPCGALDVVRVVHLSGRVDEFSCPVAAATVLAANPAHTLTTAWSPSGAPGCGSRKLAIVSPDSDLKRGRIYFLIPSATLPADRRSKKQSSKRPSQSQSQSQSRLRHHAKKQSAGGTAEQDNYLRELLSEKAASGGGHRRRRSGARVGVWRPRLESIVEEASD

SEQ ID NO: 345084 - protein, 70 aa, Zea mays
  Clone ID: MRT4577_77883C.1.pep
RHVVLVEVQHEEDDVEDLMENVRNHGTRHVAWGVQVDVHVEVDGGVADSLEDRNEDVSVELGDVFGYGLG

SEQ ID NO: 345085 - protein, 105 aa, Zea mays
  Clone ID: MRT4577_77884C.1.pep
SLLDALNRPLLLSILPHFISPLLQSIFGHLSNLLTYLPSHPNSSSYNFFLTYHSCYTLPSNLYYRLIPTFNLLTMLNNVKTTSISLTPLFSHLSYNFLIILHNLT

SEQ ID NO: 345086 - protein, 100 aa, Zea mays
  Clone ID: MRT4577_77885C.1.pep
INTTMPHHQHRGAQGGERYPCHHCALNETVSLWLLTSLNPTTTSSFMTMICLMIKMCFKSLATGTLKWIWMMLPPYADMLCCSTCVNRRVQRARDHRIVH

SEQ ID NO: 345087 - protein, 91 aa, Zea mays
  unsure (1)..(91): unsure at all Xaa locations
  Clone ID: MRT4577_77886C.1.pep
XIGRPFFXXFIRXFLXLKRAANAGYGLXVXXXSXXRPCGYHVXXXFLAPXXXXERMXIXLXARXVHSAXRRAXXNILXSSSCIFGXXTXQR

SEQ ID NO: 345088 - protein, 76 aa, Zea mays
  Clone ID: MRT4577_77887C.1.pep
FHASAHASVSCLRGSLMRLSPLRRQIPRRNWRSLMCLAMEVAWSLIFVLVYDVSHFGFRNFHDFVLLFFSSLFFIY

SEQ ID NO: 345089 - protein, 91 aa, Zea mays
  Clone ID: MRT4577_77888C.1.pep
GNFSKAGKVPPRGPPPKRWGPPPFRVGVPNGPFQVRGFPLLKKIKKGLPPQIWAPQIKKTWAEASTQLGGAPKREIKPHPQKGGFPPVFNP

SEQ ID NO: 345090 - protein, 193 aa, Zea mays
  unsure (1)..(193): unsure at all Xaa locations
  Clone ID: MRT4577_77889C.1.pep
SRSSTGTRGRRRRRRGPXGRESPPRRCRGAHEPASVADKREXPPGPRRRAGAERSRMSRAGRAPSRARPSAPWRCRSPPPTAGTARRRPSQVQKAPRRPLQEPSPRAGECGCAGGSEPRRAGAGPRGGAPGPLTGSRARAPWMPSSNASGVRAGARETEQQQPVSACVRRRAGVRVAKFGGSLGFPAGLEVPN

SEQ ID NO: 345091 - protein, 120 aa, Zea mays
  Clone ID: MRT4577_7788C.1.pep
MAVLERAVAGITLPLKTHVGGEDEAYAAGSDDHQQFQLAEPNQRAEEPPSPSRCSHRPCISPSIPVLDCVVAYVVPPPESPVNGEAETNACAPSGDDHHQLQLVEPHQRDEEWSLAAFSV

SEQ ID NO: 345092 - protein, 97 aa, Zea mays
  Clone ID: MRT4577_77890C.1.pep
PSPTGRPSGPGHPTSLRPGPPARPWGFSRLSATLAGSWAPRQRRGGDSLPTRPAPSPPPPAVTRARPISSKVSDYLGSPFRYSDVLNSELKRVHKNF

SEQ ID NO: 345093 - protein, 57 aa, Zea mays
  Clone ID: MRT4577_77891C.1.pep
VYGVQLVGVSSWDLLFNIQSGAYKEPKVCVVNLGIGLSSTFVPVFSNEPWVEPVNVI

SEQ ID NO: 345094 - protein, 105 aa, Zea mays
  Clone ID: MRT4577_77892C.1.pep
TLGYPARLESWTIRYVAPADSHGPQRPSEAAPRLPPALGRCRPALPERPPRAPYCPRRPPPPPAPVRARCVVMVRPRAAQGLRKHVLPVGVIQMPPWTCARQTTS

SEQ ID NO: 345095 - protein, 104 aa, Zea mays
  Clone ID: MRT4577_77893C.1.pep
SINLISNSARRRLGWYFRPPCYLIRLDAGWGGISRRPARCATEQCPVCRHVILLLGLGASRPLEALSSCGTGQSGAPLTSALTSEFNCSPFQSRPLRADSRCSA

SEQ ID NO: 345096 - protein, 249 aa, Zea mays
  Clone ID: MRT4577_77894C.1.pep
MEALAGAAASSALLPAFPAHQPHSRVALRARPCGPIRAAGGGGGKDDAAKPNGTPVVKSKVDPSQNGALGPVATDKSRTTSSTNSTPDSSGSRAGLFRTPISGGVQSATFAHGLPPPALAVRNLMEQARFAHLCTVMSGMHHRRAGYPFGSLVDFANDSMGHPIFSLSPLAIHTRNLLSDPRCTLVVQVPGWSGLSNARVTIFGDVYPLSAEQQEWAHKQYVAKHQQLASQQWGNFYYYRMQNISDIYF

SEQ ID NO: 345097 - protein, 128 aa, Zea mays
  Clone ID: MRT4577_77895C.1.pep
MAAWSRRDGMGGGNYARQMAMCLSMIASGIGMETGGIKLLDRMTEDSDKEEHLGPLHDAARAGKMDVCKHLVENLGFDVDVRANDGSGKTPLTCAVSCGKVIAVRYLIAMGADLEKQDAIGFTPLHYA

SEQ ID NO: 345098 - protein, 179 aa, Zea mays
  unsure (1)..(179): unsure at all Xaa locations
  Clone ID: MRT4577_77896C.1.pep
MGGGNYARQMAMCLSMIASGIGMETGGISSEMVDQMKRNVASSDCDGSNVMELLDRMTEDSDKEEHLGPLHDAARAGKMDVCKHLVENLGFDVDVRANDXSGKTPLTCAVSCGKVIAVRYLIAMGADLEKQDAICFTPLHYAAKRGYSXLSMXLLSRGANVXXVDSSGGTPLHGFCCLW

SEQ ID NO: 345099 - protein, 264 aa, Zea mays
  unsure (1)..(264): unsure at all Xaa locations
  Clone ID: MRT4577_77897C.1.pep
MDYTNAIHIIPPMASDARTNAAASPGEDPDIWATEKDYRQWSADQGYNDRNPSSRAGSEQPPPGKKAHGGGGSSDSXAAVAAXEQVSAIGKMFFKTKLCCKFRAGTCPYVTNCNFAHGMEELCKPPPNWQEIVATHEDXHEAGRGAPDPHYDIQXSVIAGDDGGGGRAYKGRHCKKFYTEEGCPYGDTCTFLHDEQSKARESVAISLLPTIGGGGYNAASASGSMAQNSSNWKTRICNKWEMTGYCPFGSKCHFAHGSTVIPNL

SEQ ID NO: 345100 - protein, 79 aa, Zea mays
  Clone ID: MRT4577_77898C.1.pep
HKRKPIRPQNLIYYQQKQQTPGRQSAKGRHVPTKSLKFAHPTQGLRGPGQKSQGPQLMPRCSKLKGAFPRGIHQAKRGD

SEQ ID NO: 345101 - protein, 138 aa, Zea mays
  Clone ID: MRT4577_77899C.1.pep
PTRTASTERRKSTESGVVDRRGELCVSTSAHPPSAPPPRPYPSPRPDVARLPPPPFRPTAASQLELNIEVTPTLILTGFGAFIALWILSSVVAAVDSVPLLPKLLELIGTAYTIWFIARYLLFKESRDELFAKFEDLK

SEQ ID NO: 345102 - protein, 101 aa, Zea mays
  Clone ID: MRT4577_7789C.1.pep
GTADRSPAHQASPLVEFRTVKRPPLAAILGNSRWGHVPHYPLSRALRSITHSGHQPLGRVLARTKTTEEPQPTHITHSPSGGGKRRDSTPLSVSNSCESLS

SEQ ID NO: 345103 - protein, 110 aa, Zea mays
  Clone ID: MRT4577_778C.1.pep
FGSSGSKVSLRQGKTGGGTVFNEGRWEKHHMAGQYLLTESTGMSRRTVGLSGALASPEGHRIGGALVGLITKKGSSSRRSNGRPTVMKQRMDPRHMDHGPVEDMWTAGVQ

SEQ ID NO: 345104 - protein, 132 aa, Zea mays
  Clone ID: MRT4577_77900C.1.pep
MELCVSTPPSSVRATAAPISFAPPRRGASASTAVPPHRRIPTRGWRCASAAVPGPVPSEEPASASYAVVVTDKPDTPADDKTEEVSAAPSGSAEAPMAELVPSEASSSPDDGGLDEILSKLIQSPCSQNCWN

SEQ ID NO: 345105 - protein, 101 aa, Zea mays
  Clone ID: MRT4577_77901C.1.pep
MAELVPSEASPSPDDGGLDEILSKLNIEVSPTLILTGFGAFIALWILSSVVAAVDSVPLLPKLLELIGTAYTIWFIARYLLFKESRDDLFAKFEDLKQRII

SEQ ID NO: 345106 - protein, 145 aa, Zea mays
  Clone ID: MRT4577_77902C.1.pep
MELCVSTPPSSVRATAAPRRGASASTAVPPHRRIPTRGWRCASAAVPGPVPSEEPASASYAVVVTDKPDTPADDKAEVVSAAPRGSAVAPIAVLAPSEASSSLSIFPCLIFLPVFLPLFSLFPFPSLFPFVFLFPPPPFFPPFFP

SEQ ID NO: 345107 - protein, 65 aa, Zea mays
  Clone ID: MRT4577_77903C.1.pep
NGRSGCSDDSYYIMEQLQLTSDHLQLSTAFALIDSLNAHSYQREIEKEAPDGHRDISRLGFPHAS

SEQ ID NO: 345108 - protein, 197 aa, Zea mays
  Clone ID: MRT4577_77904C.1.pep
MELCVSTPPSSVRATAAPISFAPPRRGASASTAVPPHRRIPTRVWRCASAAVPGPVPSEEPASASYAVVVTDKPDTPADDKAEEVSAAPSGSAEAPMAELVPSEASSSPDDGGLDEILSKLNIEVTPTLILTGFGAFIALWILSSVVAAVDSVPLLPKLLELIGTAYTIWFIARYLLFKESRDELFAKFEDLKQRII

SEQ ID NO: 345109 - protein, 57 aa, Zea mays
  unsure (1)..(57): unsure at all Xaa locations
  Clone ID: MRT4577_77905C.1.pep
VNTACHAINXLYLHPLLKKTSYELLTGNKPNVSYFRVFGRKXYLLVKRGRRLKFAPK

SEQ ID NO: 345110 - protein, 127 aa, Zea mays
  Clone ID: MRT4577_77906C.1.pep
APPGKKPKAEKRVPPGKSPPKKGGEGKRGKKKGKKSVETSKISIFKVFKQVPPDIGISSKAMSIMNSFINDIFEKLPVEAPKLARYNKKPPLPSREIQTSVGLVLPGELAKHPVSEGPKAVPKFPSA

SEQ ID NO: 345111 - protein, 51 aa, Zea mays
  Clone ID: MRT4577_77907C.1.pep
YHQSLVHPSIPVSALYILVQHGVTYSRVQYNPLHVTELEHKVRASHIRTHG

SEQ ID NO: 345112 - protein, 81 aa, Zea mays
  Clone ID: MRT4577_77908C.1.pep
LPWQWQSKLPRRAEPALSTLAPLAYLEPALLHSTSSCRRSFCRHPPCCDTPSVRIVLLDVRALPEKSGRSWSLRELQERTL

SEQ ID NO: 345113 - protein, 55 aa, Zea mays
  Clone ID: MRT4577_77909C.1.pep
PVRIHLLTASHNPKCCVRILIIFIIDHDIMSHEGSLQSHHIAILCLTPISQYLTI

SEQ ID NO: 345114 - protein, 49 aa, Zea mays
  Clone ID: MRT4577_7790C.1.pep
DIHGLGLLVGVQIQHDPDRRGAANGHVTEDSRVRHRDLETRVWGYFSFS

SEQ ID NO: 345115 - protein, 477 aa, Zea mays
  unsure (1)..(477): unsure at all Xaa locations
  Clone ID: MRT4577_77910C.1.pep
EDPHLQAKIVSALHSSPIGGHSGVPVTYSRVKSIFAWKNMKSFVRSFVQQCQICLQAKPDRAAYPGKLQPLPVPPSAWHTISMDFVEGLPRSGSWDCILVVVDKFSKFGHFVPLSHPYTAHSVAQLFLSHIYRLHGFPAAIVSDRDPIFTSAFWRQLFQLAGTELRLSSSYHPQSDGQTERLNQCLETFLRCFVSACPKKWSSWLPAAEYWYXTSLHSALGCSPFEVLYAXKPRSLGLSFDAAAPVALSAWLQERSVMQNLIHQHLIRAQTRMKKQADKHRSERSFSVGDWVYMKLQPYVQSSVLPRAHQKLSYKFFGPYRVANRVGSVAYRLELPNSSRIHPVVHVSQLKLAKGFSGSATSSLPDELPEFSIPLRILQTRGFAKGKRFVKQVLVQWSNLPTELATWEDQDNLRQCYPFAPAWGQAGFQGGENVNNESMDSPXSAEAYQTANRKXPVVRTRRVCRANVRQQGPEWVQ

SEQ ID NO: 345116 - protein, 248 aa, Zea mays
  unsure (1)..(248): unsure at all Xaa locations
  Clone ID: MRT4577_77911C.1.pep
FLGRTIQPSYSNFNRWYVAWICFASLYHLPSFQSMGVDMRMXXXXXXXXXXXXXXXXXXXXXXXXXXXXXXXXXXXXXXXXXXXXNLSLFLTIYFSSVLFIIAFHIIFIGLWYIGLVARLAGTRPGVWTILQNCTVISIACCVFYSHCGNLAVHKSKSFGSSSDPNLLAFLKNENGSTWISNFLRMNQLKDEICSSWFAPVGSASDYPILAKWVIYXELVCSGSCAGPSDEISPLYSLWATFVGLYIA

SEQ ID NO: 345117 - protein, 63 aa, Zea mays
  Clone ID: MRT4577_77912C.1.pep
KDHPGARNSNRTETSRLPPLVLVFWAHHGILYAVNPSHKEFYSAITIGPTKALFCNQSHLRHE

SEQ ID NO: 345118 - protein, 142 aa, Zea mays
  Clone ID: MRT4577_77913C.1.pep
GILPCSSSSAETKTLALVIVVVGGGGDRGGSDSQPSSQDKDIHRIAWQPGRHAVVQLPRRRTSLCSPDPEPCGWCSGFGDRKEKRFGPGIQRLLLLFPPILWFVYLTLQLDCEEPIYSIFIVCIHIPCNHVTLHFPHHAVLT

SEQ ID NO: 345119 - protein, 159 aa, Zea mays
  unsure (1)..(159): unsure at all Xaa locations
  Clone ID: MRT4577_77914C.1.pep
MPARAIPGSRSDKRDEAPKPKRAAANPKARTAGASHPAYFQMIKEAITAEKERIASRXSKRIDKEVGDKDDXSLPANLKKMLSIQLRXTXAKGKLGKAKAXSDKLSDAAXNASPKTKAKTRKAAAAKNTAPKCGKDDADKSKNERVAKIKKVADAETKG

SEQ ID NO: 345120 - protein, 1028 aa, Zea mays
  Clone ID: MRT4577_77915C.1.pep
MAEAALLALSKIGSYLGGEAATFIATKFSNLIELPNTVRRIRRELLMMNIFIRKTGASYLSDELLKAWITEVRILAYRVENIMDNFSYHSLQFKQDPKGKRLANGLSYGLVFSGIAADLAQIEKEIEHVSKLKNLWLNSVHELLHTQVSSAEQQFPQYSLPQILKDENLVGLKEEREQLKEWLIPNAPVNMTNIPALKVVTLSGMGGMGKTTLLTSVYDKLKDIFEIHAWLTVSQTYRSVDTLLKELLKIVSASEHTTLVNNDYQKEVIVPVDIDIRDKKQLKPDVIDKMGILDLKSTLKAVLKHKRYIVVLDDVWNRRVHDGISDVFEDCGKESRIVITTRKQDVAALATPGYQLNLNPLDIKDALQLFCTKAFPNKNHFDWTSVLLEHAKDMMKRYEGLPLEKCPLELQELATHIVRKCEDFSVSKCPSELQDLATYTVNKFKGFSLSACPSELQNLATDIVNHCEDLPLVKCPSELQEIAIDIVKKCRGLPLAIVSVGSRLSSRKQIVPVWRQMCNELPCELEKDDQVRGILNLSYYDLPSDLRNCFLYCSLFPEDYHFSKDDLVRLWVAEGFVEKKGDSTPEEVAEGYLTELIHRNMLQLVENDELGRVNTCKMHDILRELALHISKAEMFGTVNDFGAMVQMDTDVRRISSYGWKKMKKNKSKLKFPHLRTLMASDTIVDYVPSILSESKYLTVLELQNSDFQALPTSIGNLFNLKYIGLRNTRITSLPDSIKNLSNLQTLDVKSTSIKALPPGIVNLTKLRHLLADKFADKNQSEFRYFVGVDAPEGLSNLEELQTLETVQASMDLPEQLDNLLQLRSLWVDNITSAHCAGLFATLSTMPLLSSLLLSAADEKETPLLNHFNPTCTKLHKLIVRGLWSLTGCPILQNHGRYLKYLALSRCHFVGDPLVVLASTVPNITYLRLNNIPSPPTLDLLEGSFPQLKTLVLKNMNDVSLLKISSGALPVIECLYITSLPKLQTVPRGIKSLSSLKKLWLLGLHSNFKARWDMEGMQKDLQHVLEIRT

SEQ ID NO: 345121 - protein, 68 aa, Zea mays
  Clone ID: MRT4577_77916C.1.pep
VAYVLVQFPVNAKTTFVAIVEKVDRVLHTVDLTGITVPANCRRINFNVKICTSSAASTASLVWALATV

SEQ ID NO: 345122 - protein, 43 aa, Zea mays
  Clone ID: MRT4577_77917C.1.pep
MAVSGFTVSFLACAFLASRGALCTSYTLGSRVSDRNPIISRNL

SEQ ID NO: 345123 - protein, 83 aa, Zea mays
  Clone ID: MRT4577_77918C.1.pep
GGFFLGCFPNVGPQCKGWFPFQGFAQGRIWPIFFCPSQLWPKGFTLWGHARQGFIIRAIWAPYPPPKGALAPRKFVYKLQSFP

SEQ ID NO: 345124 - protein, 86 aa, Zea mays
  Clone ID: MRT4577_77919C.1.pep
SSKKKKLVVFERPTFSIAAVHCSRHHQAATSWIATLSLYLPQFLLYSRLYCFVNTSMSQPHNSSPAFRNSGIRIMTRTRYALFLGD

SEQ ID NO: 345125 - protein, 81 aa, Zea mays
  Clone ID: MRT4577_7791C.1.pep
IGLPKRGFMGQPNPFRTPLKNLGGVFFWKPGKTNPEFLKGSLGAPPPQPVNPHFFYPSFPGRRVPVGIFFFWRNPNAGGGP

SEQ ID NO: 345126 - protein, 95 aa, Zea mays
  Clone ID: MRT4577_77921C.1.pep
SLMAFYAFFSSLCKYAADQGGGSHPVLLLVHNRPGSVWDVKMAEWVCLAWGLPVSVADLVRNGGLSLARLMPRCGVKPHQVFEGLHVQINVLALP

SEQ ID NO: 345127 - protein, 46 aa, Zea mays
  Clone ID: MRT4577_77922C.1.pep
GQTISPNLRVDCFQQFLNQLGQPQTLILFNRWRPYSNILFFPGQLK

SEQ ID NO: 345128 - protein, 61 aa, Zea mays
  unsure (1)..(61): unsure at all Xaa locations
  Clone ID: MRT4577_77923C.1.pep
ETEVDLARGSSMKLXVVLMKLANRDKLATDQRSKSAGFCGQCKSLKCYTSNIELNPRLSTC

SEQ ID NO: 345129 - protein, 155 aa, Zea mays
  unsure (1)..(155): unsure at all Xaa locations
  Clone ID: MRT4577_77924C.1.pep
MAAAFEPTPNISEQPEHRPATNKGTLVFSYTCVGLTGTALVADLLFYCYHQLLRRRAPVTAAAAAGAAAETNNPPGSEGHHVGGVDISKLPGFAYAATSSRRRRNGGDGAHCSVCLGAVTRREMLRRLPLCKHLYHVECIDMSLESHATXPLCRS

SEQ ID NO: 345130 - protein, 143 aa, Zea mays
  unsure (1)..(143): unsure at all Xaa locations
  Clone ID: MRT4577_77925C.1.pep
MQTRRKISMSAELCLAVQLELSVLAMSRAFDDYYIKDYAVISRRSTSMTTHRPSXSPQSSKRRRNLSFTTRSARVGSQNGVQMLSPSEIPQRDWVPSDYNFGAATSAHQIEGAWNEDGKGESNWDHFCHNHPERILDGSNPHI

SEQ ID NO: 345131 - protein, 132 aa, Zea mays
  Clone ID: MRT4577_77926C.1.pep
ARPIFGCGLFPLPPPRSPPPGGPSPRAVRVSAFGLWPSSRPPPAQCSGPRVRGALAGRGPALRAPGWADWVRAWGRVGCVVGAGSRAGAPLLAPRSSGGGRLPAFPSPRELGVVTRIDQVLPFGFQSKFSDT

SEQ ID NO: 345132 - protein, 143 aa, Zea mays
  unsure (1)..(143): unsure at all Xaa locations
  Clone ID: MRT4577_77927C.1.pep
MAGQHQIWKHNLHDGITKVISGDGYERNLNGSXEMHELLVADSESSSIRVVNLKTGGSRLLAGGDPVFPENLFRFGDYDGTGSDVLLQHPLGVVYANDNQVYIADSYNHKIKKLDPVTRKVTTIAXTXSAGYRDGPGLTAQLS

SEQ ID NO: 345133 - protein, 145 aa, Zea mays
  Clone ID: MRT4577_77928C.1.pep
KLFFFFFFFFFFFFFFFLEKENIQHPWGPKTHNKGGKGPLIGGGQHPGRDPTGGENHNTGGRYKGGPARHQRRGKKRQSWLPGEKVIRPQNPTKKKPGAKKENPGAPKEGDKPQLWGGAHRPLYKKKKRAPRPNKKNNTPRGEGG

SEQ ID NO: 345134 - protein, 587 aa, Zea mays
  unsure (1)..(587): unsure at all Xaa locations
  Clone ID: MRT4577_77929C.1.pep
RTRGVLRCRVTHPVVNDGDMYLWRELGVNSWPTFVLIGPNGEVLAQISGEGHRKDLDEVVGAALEFYEEKKLLQNDPLPLALEKDKDSRLLTSPLKFPGKLAVDVQNNRLFISDSNHNRIVVTNLEGQFIYQVGSSEEGLLDGPFDAALFNRPQXIAYNSKRNILYVADTENHALREINFVDETVRTLAGNGTKGSDYRGGGQGTNQVLNSPWDVCYDPAEEAVYIAMAGQHQIWKHNLHDGITKVISGDGYERNLNGSSATSTSFAQPSGISLAFEMHELLVADSESSSIRVVNLKTGGSRLLAGGDPVFPENLFRFGDYDGTGSDVLLQHPLGVVYANDNQVYIADSYNHKIKKLDPVTRKVTTIAGTGSAGYRDGPGLTAQLSEPAGLVEVGDGRLLVADTNNNAIRYITLSDKGAEVKTLELIGVQPPSPKPKVLKRLRRRLSADTDVINVDGGSSKEGFLSLAVTVPDGYHFSKEARSKFDVETEPPNAVEIEPANGFLNSEGLASLKFRRISSSLSMGRINCKVYYCKEDEVCLYQSIAFDVKFREEAEPNPAQITLSYTVSPRDNSGSTQLLAARKNAKV

SEQ ID NO: 345135 - protein, 168 aa, Zea mays
  Clone ID: MRT4577_7792C.1.pep
HWDPRGRAASFPPEPDLSFPPEPDRASPFGYWSSAGGRRTPLPPCDLLATHGNGSLNFLAEPRPPSPHELRWPTSSLHSCTRRRLAEGAFVAIHHAATRRASSLFSSPSELCPRLSTLQPLLRRRRSRGRRLPGVPRLRRVFRCGLAATPSQLLVKALSLLRFASTLI

SEQ ID NO: 345136 - protein, 66 aa, Zea mays
  Clone ID: MRT4577_77930C.1.pep
TGKFQALSARSSVICEKSWAWFRAPIHAESSDQPQACSREVLSVGAQLSEKGNGVRLTGICEVVDG

SEQ ID NO: 345137 - protein, 39 aa, Zea mays
  Clone ID: MRT4577_77931C.1.pep
LQCGTHGLRVSPAPRSGALAVGGYKRPRGTERAALRERH

SEQ ID NO: 345138 - protein, 162 aa, Zea mays
  unsure (1)..(162): unsure at all Xaa locations
  Clone ID: MRT4577_77932C.1.pep
MECQALLSGRKLLGRPVQSSGSRSTARKAXFVVRCSSSPPDKQGADRQMRVASNQFLSYLDGTLPGDYGFEPLGLSDPEGDXGRFIETKWLVYVEVINGRYVMLGAVVVIDPEIFGEMGIIPPETAMSXLEXDVIPPVLTYKYCVDSYTLFGFNMKLMYFAE

SEQ ID NO: 345139 - protein, 173 aa, Zea mays
  Clone ID: MRT4577_77933C.1.pep
EDVLIFNPRALRRLRTSCERAKRTLSSTAQTTIEIDSLYEGIDFYSTITRARFEELNMDLFRKCMEPVEKCLRDAKMDKSSVHDVVLVGGSTRIPRVQQLLQDFFNGKELCKNINPDEAVAYGAAVQAAILSGEGNEKVQDLLLLDVTPLSLGLETAGGVMTVLIPRNTTIPT

SEQ ID NO: 345140 - protein, 55 aa, Zea mays
  Clone ID: MRT4577_77934C.1.pep
ISATHNMLCMVNCHWHHQHKYLDRPMAFELQMVHDLVILIGGGIHLVQNKRSAAL

SEQ ID NO: 345141 - protein, 69 aa, Zea mays
  Clone ID: MRT4577_77935C.1.pep
LKCKGFQLNLLTLMDRYSNKHRNFMVLISPHQTDATWLPTPCIPKGHNLHGEGLKTKTACLTACLSSGG

SEQ ID NO: 345142 - protein, 223 aa, Zea mays
  unsure (1)..(223): unsure at all Xaa locations
  Clone ID: MRT4577_77936C.1.pep
MAGKGDGPAIGIDLGTTYSCVGVWQHDRVEIIANDQGNRTTPSYVAFTDSERLIGDAAKNQVAMNPINTVFDAKRLIGRXKATAGDTHLGGEDFDNRMVDHFVQEFKRKNKKDITGNPRALRRLRTACERAKRTLSSTAQTTIEIDSLYEGIDFYSTITRARFEELNMDLFRKCMEPVEKCLRDAKMDKSTVHDVVXLVGGSTRIPRVQQLLQDFFTGKELCK

SEQ ID NO: 345143 - protein, 649 aa, Zea mays
  Clone ID: MRT4577_77937C.1.pep
MAGKGDGPAIGIDLGTTYSCVGVWQHDRVEIIANDQGNRTTPSYVAFTDSERLIGDAAKNQVAMNPINTVFDAKRLIGRRFSDASVQSDIKLWPFKVISGPGEKPMIVVQHKGEEKQFAAEEISSMVLIKMREIAEAYLGSTIKNAVVTVPAYFNDSQRQATKDAGVIAGLNVQRIINEPTAAAIAYGLDKKATSVGEKNVLIFDLGGGTFDVSLLTIEEGIFEVKATAGDTRLGGEDFDNRMVNHFVQEFKRKNKKDITGNPRALRRLRTACERAKRTLSSTAQTTIEIDSLYEGIDFYSTITRARFEELNMDLFRKCMEPVEKCLRDAKMDKSTVHDVVLVGGSTRIPRVQQLLQDFFNGKELCKNINPDEAVAYGAAVQAAILSGEGNEKVQDLLLLDVTPLSLGLETAGGVMTVLIPRNTTIPTKKEQVFSTYSDNQPGVLIQVYEGERTRTRDNNLLGKFELSGIPPAPRGVPQITVCFDIDANGILNVSAEDKTTGQKNKITITNDKGRLSKEEIEKMVQDAEKYKSEDEEHKKKVEAKNSLENYSYNMRNTIKDEKIASKLPADDKKKIEDAIDAAISWLDANQLAEADEFEDKMKELESLCNPIIAKMYQGAGEDMGGAGGMDEDAPAGSGGPGPKIEEVD

SEQ ID NO: 345144 - protein, 649 aa, Zea mays
  unsure (1)..(649): unsure at all Xaa locations
  Clone ID: MRT4577_77938C.1.pep
MAGKGDGPAIGIDLGTTYSCVGVWQHDRVEIIANDQGNRTTPSYVAFTDSERLIGDAAKNQVAMNPINTVFDAKRLIGRRFSDASVQSDIKLWPFKVIPGPGEKPMIVVQHXXXEKQFAAEEISSMVLIKMREIAEAYLGSTIKNAVVTVPAYFNDSQRQATKDAGVIAGLNVLRIINEPTAAAIAYGLDKKATSVGEKNVLIFDLGGGTFDVSLLTIEEGIFEVKATAGDTHLGGEDFDNRMVNHFVQEXXXXXXXXITGNPRALRRLRTSCERAKRTLSSTAQTTIEIDSLYEGIDFYSTITRARFEELNMDLFRKSMEPVEKCLRDAKMDKSSVHDVVLVGGSTRIPRVQQLLQDFFNGKELCKNINPDEAVAYGAAVQAAILSGEGNEKVQDLLLLDVTPLSLGLETAGGVMTVLIPRNTTIPTKKEQVFSTYSDNQPGVLIQVYEGERTRTRDNNLLGKFELSGIPPAPRGVPQITVCFDIDANGILNVSAEDKTTGQKNKITITNDKGRLSKEEIEKMVQDAEKYKSEDEEHKKKVESKNSLENYAYNMRNTIKDEKIASKLAADDKKKIEDAIDAAISWLDANQLAEADEFDDKMKELESLCNPIIAKMYQGAGADMGGAGGMDEDAPAGSGGPGPKIEEVD

SEQ ID NO: 345145 - protein, 649 aa, Zea mays
  Clone ID: MRT4577_77939C.1.pep
MAGKGDGPAIGIDLGTTYSCVGVWQHDRVEIIANDQGNRTTPSYVAFTDSERLIGDAAKNQVAMNPINTVFDAKRLIGRRFSDASVQSDIKLWPFKVIPGPGEKPMIVVQHKGEEKQFAAEEISSMVLIKMREIAEAYLGSTIKNAVVTVPAYFNDSQRQATKDAGVIAGLNVLRIINEPTAAAIAYGLDKKATSVGEKNVLIFDLGGGTFDVSLLTIEEGIFEVKATAGDTHLGGEDFDNRMVNHFVQEFKRKNKKDITGNPRALRRLRTSCERAKRTLSSTAQTTIEIDSLYEGIDFYSTITRARFEELNMDLFRKCMEPVEKCLRDAKMDKSSVHDVVLVGGSTRIPRVQQLLQDFFNGKELCKNINPDEAVAYGAAVQAAILSGEGNEKVQDLLLLDVTPLSLGLETAGGVMTVLIPRNTTIPTKKEQVFSTYSDNQPGVLIQVYEGERTRTRDNNLLGKFELSGIPPAPRGVPQITVCFDIDANGILNVSAEDKTTGQKNKITITNDKGRLSKEEIEKMVQDAEKYKSEDEEHKKKVESKNSLENYAYNMRNTIKDEKIASKLAADDKKKIEDAIDAAISWLDANQLAEADEFDDKMKELESLCNPIIAKMYQGAGADMGGSGGMDEDAPAGSGGPGPKIEEVD

SEQ ID NO: 345146 - protein, 138 aa, Zea mays
  Clone ID: MRT4577_7793C.1.pep
MTRSRCDLLLLILACSIFSEPQLPRYIEEWVRVFYATIWIDPDHQWMRFSLQFGFYCPAPEDIAPTPALDIRVEDETIRKFEDQGAVADTSSDDDEDLGIPPPPPVGGLRLPKVTLDSNRYHSGRSPKNTKVDTAPKL

SEQ ID NO: 345147 - protein, 88 aa, Zea mays
  Clone ID: MRT4577_77940C.1.pep
VWPPLFSQEGFLGFPSSSSLPSFKLCPLLFSKKGWRICRGGFFFQIMPPPPLFVGAPWGGPLFFVPPGFSNFFSTLLGLIGWPWPRKR

SEQ ID NO: 345148 - protein, 649 aa, Zea mays
  Clone ID: MRT4577_77941C.1.pep
MAGKGDGPAIGIDLGTTYSCVGVWQHDRVEIIANDQGNRTTPSYVAFTDSERLIGDAAKNQVAMNPINTVFDAKRLIGRRFSDSSVQSDIKLWPFKVIPGPGEKPMIVVQHKGEEKQFAAEEISSMVLIKMREIAEAYLGSTIKNAVVTVPAYFNDSQRQATKDAGVIAGLNVLRIINEPTAAAIAYGLDKKATSVGEKNVLIFDLGGGTFDVSLLTIEEGIFEVKATAGDTHLGGEDFDNRMVNHFVQEFKRKNKKDITGNPRALRRLRTSCERAKRTLSSTAQTTIEIDSLYEGIDFYSTITRARFEELNMDLFRKCMEPVEKCLRDAKMDKSSVHDVVLVGGSTRIPRVQQLLQDFFNGKELCKNINPDEAVAYGAAVQAAILSGEGNEKVQDLLLLDVTPLSLGLETAGGVMTVLIPRNTTIPTKKEQVFSTYSDNQPGVLIQVYEGERTRTRDNNLLGKFELSGIPPAPRGVPQITVCFDIDANGILNVSAEDKTTGQKNKITITNDKGRLSKEEIEKMVQDAEKYKSEDEEHKKKVESKNSLENYAYNMRNTIKDEKIASKLAADDKKKIEDAIDAAISWLDANQLAEADEFDDKMKELESLCNPIIAKMYQGAGADMGGSGGMDEDAPAGSGGPGPKIEEVD

SEQ ID NO: 345149 - protein, 61 aa, Zea mays
  Clone ID: MRT4577_77942C.1.pep
VPARSLCMGVARGWDEKAITNIRGALLVPLKKNGECEMPVAETWGAQGLAVFGSVGCPRYD

SEQ ID NO: 345150 - protein, 42 aa, Zea mays
  Clone ID: MRT4577_77943C.1.pep
LTVDMYYLYSLYLFIGDICFKIYTTMYIQLTERFLTLLIELH

SEQ ID NO: 345151 - protein, 34 aa, Zea mays
  Clone ID: MRT4577_77944C.1.pep
GLGQGYCRNKESAQRVLSMHDQTVCCGVLSRSMA

SEQ ID NO: 345152 - protein, 51 aa, Zea mays
  Clone ID: MRT4577_77945C.1.pep
TNYCFYRSFVGDFSNLGGVIRFLVSQIAVFLDDTGPLPNGRKTPASFLSLF

SEQ ID NO: 345153 - protein, 88 aa, Zea mays
  Clone ID: MRT4577_77946C.1.pep
MAYKMKGVFKGLKVISQIFVVKEHQIEIGYPTDVKHVAHIGWDSPTGSVASPSWMNGMESPDFSSLSNAGPSARTSWASQGDLQVSCS

SEQ ID NO: 345154 - protein, 107 aa, Zea mays
  Clone ID: MRT4577_77947C.1.pep
MVVELEHGEASAGSHDHHHHLQPQGSEEDTDVEAAQEPEVEPPVPLVPIRHQSQALVADQEGEEVRLELTLGFEPVVRQQPRLSCCDSSGLSAASSLIGLRLQLPAA

SEQ ID NO: 345155 - protein, 102 aa, Zea mays
  Clone ID: MRT4577_77948C.1.pep
MVVELEHGEESAGSHDHHHHHLQPQGSSEDTDVEAASHVSQAEAEPPVSSQSQALVADQEGEEVRLELTLGFEPVVRQQPRLSCCDSSGLSAASSLIGLRLQ

SEQ ID NO: 345156 - protein, 83 aa, Zea mays
  Clone ID: MRT4577_77949C.1.pep
YGKGQIAFTVSIWGLNNNLYPCYKDSAVKFTEHILWLLKWVLFFFVGICASLLDKSRENTFFKTRGNTPMLKSTFGYNRFFDP

SEQ ID NO: 345157 - protein, 81 aa, Zea mays
  Clone ID: MRT4577_7794C.1.pep
NQIPFIISFFSIPSGKGRPEFTCQLPNSGMVLYTVHLDRDFSLWQLTPDNIGFFKLLGLDKPQLVGGILAYPNPGCLSEAI

SEQ ID NO: 345158 - protein, 119 aa, Zea mays
  unsure (1)..(119): unsure at all Xaa locations
  Clone ID: MRT4577_77950C.1.pep
TLSSKFFSTFPYGTCXLSVSCRYLALDGVYHPLWAAFPSNPTPGRPEPGAPGAATGLTPSTGWASIRRTWAPHERRRGVGLPYATFPTPRRAAGIRRWALPCSLAVTEGILVSFFSSAD

SEQ ID NO: 345159 - protein, 111 aa, Zea mays
  unsure (1)..(111): unsure at all Xaa locations
  Clone ID: MRT4577_77951C.1.pep
GSQRRNGGHVRRASGKQVPAKDGQGSCGHRNKRGCCRCWRRCFAEPNESHGQAYRFSEKGGKERKLLGIFLLEKNTRCMIQQLRGVVRPPYLMSRRXQAMQVLLVSYLWLL

SEQ ID NO: 345160 - protein, 51 aa, Zea mays
  Clone ID: MRT4577_77953C.1.pep
LTLTNTHSTFFHRAQQNTEGAQCYAFPIPTHHALTIASSRPPHHRTSAQAW

SEQ ID NO: 345161 - protein, 38 aa, Zea mays
  Clone ID: MRT4577_77954C.1.pep
QCPYGLTPVGSLFVVWSILLQQLFKGSLSVFLTLTVRA

SEQ ID NO: 345162 - protein, 50 aa, Zea mays
  Clone ID: MRT4577_77955C.1.pep
TDGGWGHYGYAPHQLADGPQGIQMLERHKLLTFFNVRRFDMLSPSFKLCF

SEQ ID NO: 345163 - protein, 58 aa, Zea mays
  Clone ID: MRT4577_77956C.1.pep
LFYAKAPYLYKEYIFVLRMYYFLSPIMELRSINRSYLARITYILVRPKSVSTPAQDSW

SEQ ID NO: 345164 - protein, 395 aa, Zea mays
  Clone ID: MRT4577_77957C.1.pep
DAQRERSLLRDWLLPVEGAVALSIVLAFAWQKAVRAWPRAMVRVILWSSFGVTLAVGALLMCFSMLATVGLGVAMVVFSIGTGLYACWVTRRVGFTARVFERAVQPVDKFHGLNGPAYLMVAAGFAWISVWCVAVIGAVNFRFPGLTILGLVVSLAWTAEVMRNVANLTASRVIALYYLRGMQSSVQFSFHRALSHNLGSACLGSLFVPTIEALRILARGLNLLEGEDEFMFSCAHCCLHVMNAIFSFGNSWAFVHIAAYGRGFVQASRSTWSQFEALPGMAALVDSDITSSVCFLTGVTSGALCVALAGSWAFATHRHYTATVSLLAFYVGYLMTRIGMALPQACVGCYYVCYAENPTSRLFDGNIPNQLSKMQESRGPSVPTPRFPHRQHVGA

SEQ ID NO: 345165 - protein, 72 aa, Zea mays
  Clone ID: MRT4577_77958C.1.pep
GNYSAPTKPFFWMHKLGFPLWVTGQLVQAFGIVVVIVRLTLGHSFFIVRGMFCASIKNGRPCTRFPVLFSLI

SEQ ID NO: 345166 - protein, 180 aa, Zea mays
  unsure (1)..(180): unsure at all Xaa locations
  Clone ID: MRT4577_77959C.1.pep
MSLRQLLHQTRPWRALEQPTKMSCLLSIFRALSILRSEGSAEPLRRSSSVPAPLPRSLPCSSSDPLGPRFSIDVVDSDHWPSSFDLLSDAARSNECPDVFEQREDDELHDSDDEIDDMRHRKKLFYKLDRGSREFEENNVLLRRRKRDKTSAKNQRSARXAQPPKSVSTNDPKLKGKRSM

SEQ ID NO: 345167 - protein, 134 aa, Zea mays
  Clone ID: MRT4577_7795C.1.pep
LPRRAAPALSTRAPLAYLVPALLHSSSSCRRSFCRHPPCCDTPSVVIVLLVVRALPEISGRSWSLRELQERTLSSSSLVKVVHIATTAQEKTKSWKETSRSSKTTTSFRCGLAATPSQLLVKALSLLRFTSTLI

SEQ ID NO: 345168 - protein, 129 aa, Zea mays
  Clone ID: MRT4577_77960C.1.pep
TPAFRFRTPSARVLRLIPCIAPATPGLCADDRYFFSSAAAREVDEAAGGYCYADDPRSARHVEEEEEDELSCCGDDEQLLERVVAEACHASTAGSVAGEGGEDAGVDVKAEEFIARFYAQMKLQRQISW

SEQ ID NO: 345169 - protein, 93 aa, Zea mays
  unsure (1)..(93): unsure at all Xaa locations
  Clone ID: MRT4577_77961C.1.pep
XXGLFFSLFXXXXWSFXCXXXFSXCXXXXSXXXGRXXXXXXXXSPSXXXXXXXXXVXXRGXGSFFCRXSXXVXXXLWPXXPPPCSLXXXVGXA

SEQ ID NO: 345170 - protein, 92 aa, Zea mays
  Clone ID: MRT4577_77962C.1.pep
PNASLIHPTGSHQIVNRPHPLSPHANPNPSHRRHRRVPGLRGTPHRPACRSTPPCSVRHPPHGGEGALRWRSRDGSTRLLGYQLAIRILPRS

SEQ ID NO: 345171 - protein, 81 aa, Zea mays
  Clone ID: MRT4577_77963C.1.pep
SSVFISKIIAKPDVGLLGVDGVKDALVPDLALQSQANAAPDVQLCGSDRPTTRGRGSREVEEENVEADGGASAAMAVIGTR

SEQ ID NO: 345172 - protein, 71 aa, Zea mays
  unsure (1)..(71): unsure at all Xaa locations
  Clone ID: MRT4577_77964C.1.pep
ESGLAIFMEPNNTHMSLFPLLGGXGTHTGGIFGLKTIPGGSLFPKKKKKXPPKKKKKKKIKPKKKKKKINK

SEQ ID NO: 345173 - protein, 87 aa, Zea mays
  Clone ID: MRT4577_77965C.1.pep
GLQHTWICELKVRRLTWKKLWQHQFRMDNNQNLLQKLFLMCYRAPVCSYAIWSSYRLQEKLRNDSFCKGSTTLGSTRGRATRKRWTS

SEQ ID NO: 345174 - protein, 83 aa, Zea mays
  unsure (1)..(83): unsure at all Xaa locations
  Clone ID: MRT4577_77966C.1.pep
LWLAMAPPAACCLHLPPFIRRIVLRSVASLHRRLMLXXLALWSPPFSAILQQHQSLPSIQFSLYCAHVISRQLPVAAGAIHLI

SEQ ID NO: 345175 - protein, 138 aa, Zea mays
  Clone ID: MRT4577_77967C.1.pep
MEGDKKAGAVAEKKAAAADQSKEVAAGDVSLKELSRRLNDFAKERDWEQYHSPRNLLLAMIAEVGELSELFMWKGEVRKGLADWDEAEKEHLGEELSDVLLYLVRLSDMCGVDLGDAALRKIVKNAVKYPAPSKEQGA

SEQ ID NO: 345176 - protein, 68 aa, Zea mays
  Clone ID: MRT4577_77968C.1.pep
RVRGLAVTEQVVLRLLLFSYVRPHFFFRINLFHIMTVVLASLYPQSIVVQAWVFCSLVLAQHHQLFQN

SEQ ID NO: 345177 - protein, 206 aa, Zea mays
  unsure (1)..(206): unsure at all Xaa locations
  Clone ID: MRT4577_77969C.1.pep
RPCRRSCLTTSFFSSWATLHSVVMEPPRKNKSSGMQVKEEVKLEDGNDLLVKRRRTELPGSIVQLQQKIEVFDMENKVPDGLSVEDSTGKDPMDVLTRYAAQNSGQGNSCSNEPAISRLTKICKAIGWKEPSYDFEEQGPPHNRMTTQFHLLDPYYDEHHRGRLIAEGQVLPVLRSRTHDRFLDMRYDDRYTXSLERAAWTSYRSR

SEQ ID NO: 345178 - protein, 61 aa, Zea mays
  Clone ID: MRT4577_7796C.1.pep
ILHIYIAVVMNIIFKTPGSGSLVDEVELNHILRAILADYDDIMVLHKADFIIDPSLVYGFC

SEQ ID NO: 345179 - protein, 94 aa, Zea mays
  Clone ID: MRT4577_77970C.1.pep
GQLGPLNKSCTACQFFGFSKISPFGAPPRQGIRKWCPKTGMFFLKIINILIGIYLKIFLKKIKKNINKKKNIKKKKKKKKIKKNKKKKKKKKLY

SEQ ID NO: 345180 - protein, 111 aa, Zea mays
  Clone ID: MRT4577_77971C.1.pep
SISCPQVMNSFLFKSSTAFYLTRFQFLAGTLSLLPSSTIMLQSRPSVSILRLLDHYRTCNLMAAIVASYSSFGFKVIGLFSICICREWRARTRSEIVDILGLGVWDEWDYV

SEQ ID NO: 345181 - protein, 141 aa, Zea mays
  Clone ID: MRT4577_77972C.1.pep
RPFRRSCLTTSFFSSWATLHSVVMEPPRKHKFSGMQVKEEVKLEDGNDLLVKRRRTELPGSIVQLQQEIEVFDMENKVPDGLSVEDSTGKDSMDVLTRYAAQNSGQGNSCSNEPAISRLTKICKAIGWKDHHTTLKNRTSA

SEQ ID NO: 345182 - protein, 145 aa, Zea mays
  Clone ID: MRT4577_77973C.1.pep
PDPHFIPPEINPQHNKLSINNFVMAFPSRKRATAIPMRRPLSPTHHPKSKSRVGAASPERRQIIQDREQQIMHLRGSFFAVRFRCLEQRRVSVRNLLFLLPHHQSNKAAIFFGVSFLFSIITSTSYYYYSTTTSGAAKQTPPSKG

SEQ ID NO: 345183 - protein, 104 aa, Zea mays
  Clone ID: MRT4577_77974C.1.pep
GCFRAPRTVSVPASPTHAHADQVARCLALHSRAPAARERAASGVNKICSEIEEQTRFATADFACAPAECRLRRRRSRSRWLPVSRLPLHVSTWQKPLRYASLLL

SEQ ID NO: 345184 - protein, 188 aa, Zea mays
  Clone ID: MRT4577_77975C.1.pep
MPRATASLRLQAAASSTSTATPREQQASSSSSSWPVPPPLPQQPAVSVNSDTVMILASFLCALVCVLGLALVSRCTCRPASSSTATGIPQQARPPKGLKKKAIDALPTAPFTAAASSDCAICLDEFSDGDALRVLPRCGHAFHVACVDAWLRTRATCPSCRAGIVIAHQPLMAASLSPGYLDPSVVSI

SEQ ID NO: 345185 - protein, 254 aa, Zea mays
  Clone ID: MRT4577_77976C.1.pep
KKKHFFGLGFEIKNPPFKPWGPWEGTKRFWPFPPLFKNWGFWEKKNKKTLWGEGGVFLKTPRGKFFWGGGGFIFPPPGGGGVYYIIQLRAPPPIIMGGGGDPPPPPPPEKKKSVARLRTRQNLRQSLPHHLLDHKSHAGFPQTNSGPLPHNQLLPLFLVRRGAGSEHGRGDGDRLSRGVGKGDVEVLGSAGRRRTAAGSMRTAPRSPGGGSEAPAAVSRAPAAVGASREDESVRASSGLQGTGTTGSRARSFVL

SEQ ID NO: 345186 - protein, 92 aa, Zea mays
  Clone ID: MRT4577_77977C.1.pep
SRHHRSYPRACRSARPGGEWGGLRCSEESRRTVGLGRWNRSGWIRVGCSGREEGGLWECVAARVVKGGAARRRRRWRSRKGRFIMGFGSGSA

SEQ ID NO: 345187 - protein, 136 aa, Zea mays
  unsure (1)..(136): unsure at all Xaa locations
  Clone ID: MRT4577_77978C.1.pep
HPPPFWVFASSRFFLDFFFFFWCSXWAFWGGGAGPFPFPAFGPPPDFSFPWAWALFLLVNRVLIRAGRLGFPSELGSSNPNKGSLPGTLFGACPSLGVLYASGLSPFFLWCFFLWVSSFLPLRVVPSAWPPFPVRE

SEQ ID NO: 345188 - protein, 78 aa, Zea mays
  Clone ID: MRT4577_77979C.1.pep
FRGREKTRGAPTGFSPNFKNRAQRPLGGPTPKFFVQEKPHLVFNRFGPKSLKKKGRRCPYPVAPRPRKACKKKGKIPP

SEQ ID NO: 345189 - protein, 201 aa, Zea mays
  Clone ID: MRT4577_7797C.1.pep
LLMAMAVLTSSPSRARPLHTSSAGLPRPCTPALVVVLPKELLSPSTMLRHAERRHCSPRRPSSARDIGPFVESEGIAGEDPEQQQIGEGCSHGDQDPGHLPVADCASPYRYWSDEGGMRAPLPPCEVLAAHGNVSLNYLAQSRPCSPHELRWPTSSLHSCTRRRLAEGAFVAIHHAATRRASSLFSSPSELCPRYRAVRGV

SEQ ID NO: 345190 - protein, 93 aa, Zea mays
  Clone ID: MRT4577_77980C.1.pep
YITDPNSSERANGDMMSMIAKKHGLGALCTFCRPAYRGLTVGNTYFLTIHSTQDMNALNHMSIHRDKMYNYCMPYYKTLQPLEDDTDTDISFI

SEQ ID NO: 345191 - protein, 155 aa, Zea mays
  unsure (1)..(155): unsure at all Xaa locations
  Clone ID: MRT4577_77981C.1.pep
XPAAKGXXEXXEXQEXEGRRGXXXXXXXAAEGGGEAXXXXKXKNXPTGRSSGXRRAXXEAXXXXEEKXAXKGDKXGKEXLINFAKTSMSSKXINSDSVFFASLVVFLVYFFFFFKVFFFFFLSNLDHHYFESFVLALYDHLEWLCTTQALQLFEF

SEQ ID NO: 345192 - protein, 59 aa, Zea mays
  Clone ID: MRT4577_77982C.1.pep
CHRESERRAYIQLHAPSIAFSNGCVERRVHKLYLTYESSLCLSNNYHTTHSLEHYLPIM

SEQ ID NO: 345193 - protein, 77 aa, Zea mays
  Clone ID: MRT4577_77983C.1.pep
EGRRTALPTLPHRPGRAPGCDARSCAGGTEMCGACGRVRTLVVGPSVRPPASWFRLVRMRLVGEPPDVEWLHSRFGE

SEQ ID NO: 345194 - protein, 139 aa, Zea mays
  unsure (1)..(139): unsure at all Xaa locations
  Clone ID: MRT4577_77984C.1.pep
RQMLKAGVTPXAQNKSACISSILVRKXSAKPCKXRWYAAVDPSIIQAQWRRDLHERLLHLVRLILTQWRIIRRIVGLIPSEGLDRFKKLLFTGCLMADDYEANDNLRXMRPGKINSNVXSEPKIPDTIDIAEAGSGMLS

SEQ ID NO: 345195 - protein, 50 aa, Zea mays
  Clone ID: MRT4577_77985C.1.pep
GGPPFFFFFKKKKITVNKYLLNTNGRSNLRRIIQVLALTKSSMIERSLVR

SEQ ID NO: 345196 - protein, 145 aa, Zea mays
  unsure (1)..(145): unsure at all Xaa locations
  Clone ID: MRT4577_77986C.1.pep
KKPPQIFGGPQPPXLGGPGKNPSRGFGPPPNPPRPRFLRKTPRSGPQGRGGAPPXHFPPPGPPRGGGGDPYSPXRAVPLGGGFWPKNPHGRGPPPPPGGPPGLGANPANSHPPGGRSGLPXGAPFPPKGAGLQYPGPGFPTPGPG

SEQ ID NO: 345197 - protein, 70 aa, Zea mays
  unsure (1)..(70): unsure at all Xaa locations
  Clone ID: MRT4577_77987C.1.pep
XRSTTPTPDPFPLRRLPXRKXEDTRXXRGLEEEKETYEVDEWGFTPILVLLRWARGCYRTRLGQDYVYMQ

SEQ ID NO: 345198 - protein, 155 aa, Zea mays
  Clone ID: MRT4577_77988C.1.pep
MNGDVGRDDDDNNGGGGGEEEEEEEEREGEFAAAMAQLAPEGVRALHARVEAEWGPVLQSACQTAAARALWGRAVRDPAAGLLAGERYLRGLRDKMRRDEQAGASQVHGVMIAVRTLWFDARVEAAVAALGGDPQVVILGAGMDARAYRLSCLKG

SEQ ID NO: 345199 - protein, 52 aa, Zea mays
  Clone ID: MRT4577_77989C.1.pep
TYHALIIATRMRNKDLYYIFFCRCESETGLWSRAKYQLKCCSGAANNRFSPD

SEQ ID NO: 345200 - protein, 243 aa, Zea mays
  unsure (1)..(243): unsure at all Xaa locations
  Clone ID: MRT4577_7798C.1.pep
MAFPNIKLVSFLLSFIQIFVADAQPHLRPVARSAKLASSIANKPIVCNENATIAKRMPAHSWDTHMHVTDPSYPEAADAEYTPGLHNLSSALSFESTVGMRSIVIVQPSIYGNDNTLLINALTRLGTRHGRGVVGFDANTISFKTLQEWDKLGVRGVRLNIKSNNIXHRSPTAGAGQAVRRXIKPLNWVLELYIGMEDLPKLEPIVGDLGVTLSIAHFGAPNLPPPENRTLPFDHNTLAGFHL

SEQ ID NO: 345201 - protein, 58 aa, Zea mays
  unsure (1)..(58): unsure at all Xaa locations
  Clone ID: MRT4577_77990C.1.pep
GGRRRLPPASLXLGSRGGPLNQGAALSEGTYRAVVGSRVPHRALETAAVYATLILVPX

SEQ ID NO: 345202 - protein, 78 aa, Zea mays
  Clone ID: MRT4577_77991C.1.pep
FVRGSVIRIFGPPFLRPFLFLGRSLILERLVKGIRCWGLKDSLAKGFGDVSRCGGVYYPPKPLKNPPNKERKEEEYKI

SEQ ID NO: 345203 - protein, 108 aa, Zea mays
  Clone ID: MRT4577_77992C.1.pep
AVFGIKQGALVFTTHITVVFPCQFQFSTHNGNPKLLVKLPTLRIQGHRTAPTAKGEPHTVPFFGPFFLKTILFGLKKKTRLGASEINDFGATVRDLFRGGALLEEKTV

SEQ ID NO: 345204 - protein, 145 aa, Zea mays
  Clone ID: MRT4577_77993C.1.pep
MPSHAGSGPADLAAAGLHSSCLRRRSKRYAIRPLLSSEPNDRWQLGRSPREAGYEFGQNISHLFDLSNSLSLISRAHQLVMEGFNWCQDKNVVTVFSAPNYCYRCGNMAAILEIGENMDQNFLQFNPAPRQIEPDTTRKTPDYFL

SEQ ID NO: 345205 - protein, 306 aa, Zea mays
  Clone ID: MRT4577_77994C.1.pep
MPSHADLDRQISQLRDCKFLPEAEVKTLCEQAKAILMEEWNVQPVRCPVTVCGDIHGQFYDLIELFRIGGDAPDTNYLFMGDYVDRGYYSVETVSLLVALKVRYRDRITILRGNHESRQITQVYGFYDECLRKYGNANVWKYFTDLFDYLPLTALIENQIFCLHGGLSPSLDTLDNVRSLDRIQEVPHEGPMCDLLWSDPDDRCGWGISPRGAGYTFGQDIAQQFNHTNGLSLISRAHQLVMEGFNWCQDKNVVTVFSAPNYCYRCGNMAAILEIGENMDQNFLQFDPAPRQIEPDMTRKTPDYFL

SEQ ID NO: 345206 - protein, 183 aa, Zea mays
  Clone ID: MRT4577_77995C.1.pep
MPSHADLDHQISQLRDCKFLPEVEVKTLCEKAKAILMEEWNVQPVRCPVTVCGDIHGQFYDLIELFRIGGDAPDTNYLFMGDYVDRGYYSVETVSLLVALKVRYRDRITILRGNHESRQITQVYGFYDECLRKYGNANVWKYFTDLFDYLPLTALIENQIFCLHGGLSPSLDTLDNIRRPDRI

SEQ ID NO: 345207 - protein, 183 aa, Zea mays
  Clone ID: MRT4577_77996C.1.pep
MPSHADLDHQISQLRDCKFLPEVEVKTLCEKAKAILMEEWNVQPVRCPVTVCGDIHGQFYDLIELFRIGGDAPDTNYLFMGDYVDRGYYSVETVSLLVALKVRYRDGITILRGNHESRQITQEYGFYDECLRKYGNANVWKYFTDLFDYLPLTALIENQIFCLHGGLSPSLDTLDNIRALDRI

SEQ ID NO: 345208 - protein, 110 aa, Zea mays
  Clone ID: MRT4577_77997C.1.pep
MEFCPVCGILLQIDPGTGSHRLRLFCPVCPYVCPILNKIVKKARLVKKEVEPISSTADEMKSAPKTAVTCQRCNHGEAYFKQMQIRSADEPMTTIYRCCKEECQHEWRED

SEQ ID NO: 345209 - protein, 388 aa, Zea mays
  unsure (1)..(388): unsure at all Xaa locations
  Clone ID: MRT4577_77998C.1.pep
MPSHADLDRQISQLRDCKFLPEAEVKTLCEQAKAILMEEWNVQPVRCPVTVCGDIHGQFYDLIELFRIGGDAPDTNYLFMGDYVDRGYYSVETVSLLVALKVRYRDRITILRGNHESRQITQVYGFYDECLRKYGNANVWKYFTDLXLFVDFRWKNFLDYCRFRCGXDRIXIPNLQLQITWSGFLTVGHYSACLSGLNPXTFPTRYGFYDECLRKYGNANVWKYFTDLFDYLPLTALIENQIFCLHGGLSPSLDTLDNVRSLDRIQEVPHEGPMCDLLWSDPDDRCGWGISPRGAGYTFGQDIAQQFNHTNGLSLISRAHQLVMEGFNWCQDKNVVTVFSAPNYCYRCGNMAAILEIGENMDQNFLQFDPAPRQIEPDMTRKTPDYFL

SEQ ID NO: 345210 - protein, 131 aa, Zea mays
  unsure (1)..(131): unsure at all Xaa locations
  Clone ID: MRT4577_77999C.1.pep
GRVGGRVGGRVGGRVGGRVGAAGGPGPTAATGAAASAAXPPPAGLSRYESQKRRDWNTFLQYLRNHKPPLTLARCSGAHVIEFLRYLDQFGKTKVHTEGCAHFGQPNPPAPCACPLRQAWGSLDALIGRLR

SEQ ID NO: 345211 - protein, 70 aa, Zea mays
  Clone ID: MRT4577_7799C.1.pep
FAFGLPSETGCDNDDADDDDEGDVGGDGDGSGRGGGSGNKGGDGGGSRGGSGGGGSSRGSTRGGSNRASG

SEQ ID NO: 345212 - protein, 72 aa, Zea mays
  Clone ID: MRT4577_779C.1.pep
LTMLRSTCTVTATRRYTMVSWLTRATLRKLRIILSAITVSTLLCTHRVCMTALQLHTTTDAYVYATDAIATT

SEQ ID NO: 345213 - protein, 574 aa, Zea mays
  unsure (1)..(574): unsure at all Xaa locations
  Clone ID: MRT4577_77C.1.pep
MLVASTGTGKGRHMAGGGGGRDLPSTPTWAVALVCAVIVLVSVAMEHGLHKLGHWFHTRQKKAMREALEKIKAELMLMGFISLLLAVGQTPISKICIPAKAGSIMLPCKPPKGAAAADDDDKSDGRRRLLWYPPYPGYDEPGHHRRFLAGAAPDDNYCSDQGKVSLISSAGVHQLHIFIFVLAAFHIVYSVATMALGRLKMRKWKKWESETNSLEYQYANDPSRFRFTHQTSFVKRHLGLSSTPGVRWVVAFFRQFFASVTKVDYLTMRQGFINYHLSPSTKFNFQQYIKRSLEDDFKVVVGISLPLWFVAIFTLLIDIKGFGRVGFVPLVILLLVGAKLEVVIMEMAKEIQDKATVIKGAPVVEPSDRFFWFNRPGWVLFLIHLTXLPERLPDGAFRLDTAHPRPEEMLPREAGXLSIMKVAVGLALQFLCSYITFPLYALVTQMGSHMKKTIFEEQTAKAVMKWRKTAKDKVRQREAAGFLDVLTSADTTPSHSRATSPSRGNSPVHLLHKYRGRSEEPQSAPASPGRELGDMYPVADQHRLHRLDPERMRPASSTAVNIDIADADFSFSMR

SEQ ID NO: 345214 - protein, 133 aa, Zea mays
  Clone ID: MRT4577_78000C.1.pep
MAITNLGFAAMLVILLQVSTLCAVAQHHGVMTLNGFEKGQDGGGPSECDGKYHSNKEMIVALSTRWYGGGRRCQKMIRITSEHNGRTAQAKVVDECDSSNGCKDSIVDASAAVWKALGLNTDIGEAPVTWTDA

SEQ ID NO: 345215 - protein, 360 aa, Zea mays
  Clone ID: MRT4577_78001C.1.pep
HWVPRGRPGEEVPKAATKALLAPAIPSVSARAGGIFLPLVKSLCEACGSRAGDGTERRLGAWLMLTCFQTSGVSSAMFLTAMAANPLSANLTAATIGEGIGWTLWAKAAIVPGLLSLVLVPLILYVIYPPEVKASPDAPRLAKERLAKMGPMSKEETIMAGTLLLTVGLWIFGGMLNVDAVSAAILGLAVLLISGVVTWKECLAESVAWDTLTWFAALIAMAGYLNKFGLISWFSETVVKFVGGLGMSWQLSFGVLVLLYFYSHYFFASGAAHIGAMFTAFLSVASALGTPSLFAAMVLSFLSNLMGGTTHYGIGSAPVFYGAGYVPLAQWWGYGFVISVVNIIIWLGVGGFWWKIIGLW

SEQ ID NO: 345216 - protein, 79 aa, Zea mays
  Clone ID: MRT4577_78002C.1.pep
LAYTTSYIGNKIPTNTGSRSPSNKRGWQTHLLALKASLWQNQSLHCADKSSLPLNQRVLILKYIITRPSTVNCSLRQQS

SEQ ID NO: 345217 - protein, 178 aa, Zea mays
  unsure (1)..(178): unsure at all Xaa locations
  Clone ID: MRT4577_78003C.1.pep
SARGVVYAFFGAFGSSSLGRGYSLSLAEALLAPAIHSGSARAGGIFLPLAKTLCEACGSRAGDGTERRLGAWLMLTCFQTSVVSPAIVPRLLTLVLVPLILHVIYPPEVKASPEAPRPAKERLAKMGPMSKEETIMAGTLLLTVGLWIFGGMLNVDAAPAAILGLPVLLISGLXTWQE

SEQ ID NO: 345218 - protein, 56 aa, Zea mays
  Clone ID: MRT4577_78004C.1.pep
VKPTSYSHKAFRFRVCTIKYDIMRLIPDYCCPGLYIEIKTLHEHTPLFNLIIKNIR

SEQ ID NO: 345219 - protein, 73 aa, Zea mays
  Clone ID: MRT4577_78005C.1.pep
GVRKGASDHLLCASLHFQPTVCQPTHACLKRAAGVRVSRWFLVRCAAALAYAQTCRQSVVCAAGLDLQMQMHS

SEQ ID NO: 345220 - protein, 47 aa, Zea mays
  Clone ID: MRT4577_78006C.1.pep
AQINSNYWSPSWCFCVQVLSICNQGLLDLTKVARSPVNKSATALYLL

SEQ ID NO: 345221 - protein, 45 aa, Zea mays
  unsure (1)..(45): unsure at all Xaa locations
  Clone ID: MRT4577_78007C.1.pep
RFIFGVKNLSDGGRLADYNILEESTXHLVLRLRGGMQIFVKTLAG

SEQ ID NO: 345222 - protein, 214 aa, Zea mays
  Clone ID: MRT4577_78008C.1.pep
MGAKIFALLALLALSASAATSTFIPQCSQQYLSPATAVGFQYPTIQSYMVQEAIQASILRSLALTLQQPYALLQQPSLVHLYLQRIAAQQLQQQLLPTINQVVAANLAAYLQQQQFLPFNQLDGVNPAIYLQAQQLLPFNQLVGSPYAFLLQQQLLPFHLQAVANIAAFLRQQHLLPFYPQVVGNINAFLPFSQHALTNPTTLLQPPTIGGAIF

SEQ ID NO: 345223 - protein, 213 aa, Zea mays
  Clone ID: MRT4577_78009C.1.pep
MLAPMGAKIFALLALLALSASAATSTFIPQCSQQYLSPATVVGFQYPTIQSYMVQEAIQASILRSLALTLQQPYALLQQPSLVHLYLQRIAAQQLQQQLLPTINQAQQLLPFNQLVGSPYAFLLQQQLLPFHLQAVANIAAFLRQQHLLPFYPQVVGNINAFLQQQQLLPFYPQNVANIVAFLQQQQLLPFSQHALTNPTTLLQPPTIGGAIF

SEQ ID NO: 345224 - protein, 276 aa, Zea mays
  Clone ID: MRT4577_7800C.1.pep
QAGAEGHRDAAGVWYVPYWEGYDDGFDRDAHDATHYMEQIKLVGAATLGAVLDRLHGVGRPVTLVVYTLLVFGVADVARARSVPAALYWIQPATVLAVYLHFFRATDGVDRAIAAAGGDPWASVRFPGLPPLRVRDLPSFIVSTPENDPYAFVADAFRELVETLGREDKPSVLANTFDAVEPEAAASLREAGVDVVPVGPVVSFLDDAAAGAGGAKNGGNNNDLFKQDGEGYLDWLDAQAPGSVVYISFGSLSVMSKRQIEEVARGMAEGGRRLES

SEQ ID NO: 345225 - protein, 66 aa, Zea mays
  Clone ID: MRT4577_78010C.1.pep
NYEPRAKLEVRPQKGRKGFLIFWGTSGGLVYLGGSENFTPGGKSQLQGGRRGFLRLLCFRGNAKCF

SEQ ID NO: 345226 - protein, 240 aa, Zea mays
  Clone ID: MRT4577_78011C.1.pep
MAAKIFAILALLALSASVATATIIPQCSQQYLSPVTAARFEYPTIQSYRLQEAIAASILRSLALTVQQPYALLQQPSLMNLYLQRIAAQQLQQQLLPIINQVVAANLAAYLQQQQFLPFNQLAGVNPAIYLQAQQLLPFNQLVGSPYAFLLQQQLLPFHLQAVANIVAFLRQQHLLPFYPQVVGNINAFLQQQQLLPFYPQNVANIVAFLQQQQLLPFSQHALTNPTTLLQPPTIGGAIF

SEQ ID NO: 345227 - protein, 70 aa, Zea mays
  Clone ID: MRT4577_78012C.1.pep
EKESEASRKRHMLVLGPVVLDFVPKHEANLRERQFSLSIRMTHRFATHGANALAVRYLDHSQPGNRDEMR

SEQ ID NO: 345228 - protein, 176 aa, Zea mays
  Clone ID: MRT4577_78013C.1.pep
DDVRAPYLSAFGPMARFGLKGPNLQSSLALARARFLTPLTFAFSHMMRCRTACLDSHRSCMSSCRFFRSRSCHWIAFFVLRISLSFLAWRAALRPGRTTNWLMVGRIAAMDVDVGGFADYRAMEQWAWTGASSGFSGSIDFFGFTASASLQWLGPCGDGLAGSRPSSRSRPARGTQ

SEQ ID NO: 345229 - protein, 100 aa, Zea mays
  unsure (1)..(100): unsure at all Xaa locations
  Clone ID: MRT4577_78014C.1.pep
MAASIFSLLALLTLSASAFTSTFIPQCSQQYLSTVTAVGFQYPTIQSYMVQEAIQASILRSLALTLXQPYALLQQSSLVHLFLQRIVAXQLQQQXLPTIN

SEQ ID NO: 345230 - protein, 49 aa, Zea mays
  Clone ID: MRT4577_78015C.1.pep
SAHDSSRGPQRATMIITYLQEIRAHRRLTRMDLAGRERLIAPMHGDHNR

SEQ ID NO: 345231 - protein, 76 aa, Zea mays
  unsure (1)..(76): unsure at all Xaa locations
  Clone ID: MRT4577_78016C.1.pep
AGGPRCWPCRCAXSRRSAARRRGRCRRXPRPLGAARPRRPGGARWAPXGWARGSPRCASCWRCRRWGGGAAAAVWV

SEQ ID NO: 345232 - protein, 143 aa, Zea mays
  unsure (1)..(143): unsure at all Xaa locations
  Clone ID: MRT4577_78017C.1.pep
RCPVTDAGFQHPTIQSYMRQDAIVASILRSLALTLQQPYALLQQPSLVHLYLQRIATQQLQQQLLPTINQVVAANLAAYXQQQQSLSFNQLAAVNPAVYWQAQQLLQFNQLVGSPNAFXLHHQLLPFHLQAVENIASFLRQQQ

SEQ ID NO: 345233 - protein, 197 aa, Zea mays
  Clone ID: MRT4577_78018C.1.pep
MAAKIFALLALLALSASAATSTIIPQCSQQYLSLATAARFQYPTIQPYMLQEAIAASILQSLAFTLQQPYALLQQPSLVHQYLQRIATQQLQQQLLPTINQLLPFYPHVVGNITAFLQQQQLLPFYPQNVANIVAFLQQQQLLPFSQLALTNFFFLLQQLSHPVLEGKPNANHVRARISYSRTQQLHNMDIITQCSK

SEQ ID NO: 345234 - protein, 38 aa, Zea mays
  Clone ID: MRT4577_78019C.1.pep
KKKKKKKKKKKKKKKKKKKKKKKKLKKKKIKKKKNFVL

SEQ ID NO: 345235 - protein, 240 aa, Zea mays
  Clone ID: MRT4577_78020C.1.pep
MAAKIFALLALLALSASVATATIIPQCSQHYLSPVTAASFEYPTIQSYRLREAIAASILRSLALTVQQPYALLQQPSLVNLYLQRIAAQHLQQQLPPTINQVVAANLAAYLQQQQFLPFNQLAGVNPAAYLQAQRLLPFNQLVGSPAAFLLQQQLLSFHLQVVANIAAFLQQQQLLPFYPQVVGNINAFLQPQQLLPFYPQDVANNVAFLQQQQLLPFSQLALTHPTTFLQQPTIGGAIF

SEQ ID NO: 345236 - protein, 153 aa, Zea mays
  Clone ID: MRT4577_78021C.1.pep
TQQLQQQLLPTINQVVAGNLVVYFQQQQFFPFNQQVGVNPAVYLQAQQLLPFNQLVGSPNAFLLQQKLLPFHLQGVENIVFFLGQQQLLPFYPQVVGNINAFLQKQQLLPFYPQNVANIVAFLQQQQLVPFSQHALTNPPPLLQSPPMGGAIF

SEQ ID NO: 345237 - protein, 82 aa, Zea mays
  Clone ID: MRT4577_78022C.1.pep
PPKIPPCWGQGIIFPVAFIQFPLKLSWGLYLDALHVCMGASLFWGGGGLLTPNIRFKCGLFSFPIKCTSACPYMFGFPPWAL

SEQ ID NO: 345238 - protein, 149 aa, Zea mays
  unsure (1)..(149): unsure at all Xaa locations
  Clone ID: MRT4577_78023C.1.pep
RPGRYAGNQVVAANLAAYLQQQQFLPFNQLAVVNPADYLXAQQLLPFNQLVGSPAAFLLQQQLLPFRLQVVANIAAFLQQQQLLPFYPQVVGNINAFLQQQQLLPFYPQDVANIVAFLQQQQLLPFXQLALTNPTTLLHQPTIGXGAIF

SEQ ID NO: 345239 - protein, 40 aa, Zea mays
  Clone ID: MRT4577_78024C.1.pep
VQFKNPFAQVKDASYAEQLPGNAGCFKTHGAKKNDSSNQI

SEQ ID NO: 345240 - protein, 130 aa, Zea mays
  Clone ID: MRT4577_78025C.1.pep
SARGSKPTPKCPKALPGPRKALYDMTPAIPNPQEKLWKVCGAGNKARMGETTLPLRSLSIPPWGNLPNGDNGAQDVISPAPKFSNSKLTKVPGNWRIVGWMGGRLPKKCPIGQAWEGILRVKRKNPFRFG

SEQ ID NO: 345241 - protein, 58 aa, Zea mays
  unsure (1)..(58): unsure at all Xaa locations
  Clone ID: MRT4577_78026C.1.pep
QQWSPALTISXALMSICALLTRPYTDDPLVPENAHMCKTDQATYESTARSWTQKYTMG

SEQ ID NO: 345242 - protein, 37 aa, Zea mays
  Clone ID: MRT4577_78027C.1.pep
DATEVQPIKKVSFLGPMIQTFSSFNILARKVSSLPIP

SEQ ID NO: 345243 - protein, 189 aa, Zea mays
  Clone ID: MRT4577_78028C.1.pep
GTRVPLLLSLGRWISRASAPWYLGFCILALAPRLIVDLVAIFLFQKLCCSPMLISSNTCGVVPCLCLGEKFLVWAAKTAKANCDACQVLDVKPEPRSHHCSCEVQANYNFERRFGAEVEASSPFILRRQPTPRRDVPVDPDALSASCVPLVLSSEAPVELFPCKPPSNTTLAKCLIGSLNQYSSLFYDY

SEQ ID NO: 345244 - protein, 87 aa, Zea mays
  Clone ID: MRT4577_78029C.1.pep
LICLASLIYKHLLHYLLFYNFLPPTPALLSFSLFAVPPIHSPHVNFLQLFQTLSFHLFPIFTIHPVSSVLFLYSLLSLFYFFIFSFF

SEQ ID NO: 345245 - protein, 49 aa, Zea mays
  Clone ID: MRT4577_7802C.1.pep
TYAPCALCKRLLQARHYATMLTRCYSFPSSPVPHTTRALGMMKPNHSAV

SEQ ID NO: 345246 - protein, 196 aa, Zea mays
  Clone ID: MRT4577_78030C.1.pep
YGLSQHSTNNTRFYLIILAMFGIINSLFTLGRAFSFAFGGLRAAIHIHASLLENIISAPICFFDQNPSGRILNRLSSDLYAVDDSLPFILNIFVANFFSLFGTLVVLSYSQVSFLFVLLPLWLIYRKLQFYYRSTSREVRRLDSVARSPIYSSFTETLDGSSTIRAFQNEGFFFERFIQHVTLYQKTSYTELVASL

SEQ ID NO: 345247 - protein, 43 aa, Zea mays
  Clone ID: MRT4577_78031C.1.pep
KISQRGKKPDRANWVMHQYHHGEDEDEKDGELCSIYHILSVAI

SEQ ID NO: 345248 - protein, 38 aa, Zea mays
  Clone ID: MRT4577_78032C.1.pep
DLNLTIFCMRLSFRFIPSIHTTVQQSYSEHPLRSLSAR

SEQ ID NO: 345249 - protein, 56 aa, Zea mays
  Clone ID: MRT4577_78033C.1.pep
TSSHKPFPTGAKLSYAPGLLRLSEPFHCTLYASFPILTRVQGKTNVTSDQASQLTI

SEQ ID NO: 345250 - protein, 56 aa, Zea mays
  Clone ID: MRT4577_78034C.1.pep
FSGSAFVQSDTGQYCLRCRGQKHTIEHLENGHHILISQYMIWYDPKGPPKGPAKGP

SEQ ID NO: 345251 - protein, 103 aa, Zea mays
  Clone ID: MRT4577_78035C.1.pep
PKHVDRIETNTAPCFRRNRNELRTTRIDPSTILTYIYPCSRVLLSHRVEGTNAIATSSSTKDEIECHRSGFSASPRMEATTARLLVKDRYYKMRNMKDVAMSL

SEQ ID NO: 345252 - protein, 77 aa, Zea mays
  Clone ID: MRT4577_78036C.1.pep
NRLNSLQLASRPLTPGGRWPDSQWRPAEEKAIDDWLPINARRNAKWWYSAFHNVTAMVGAGVLGLPYAMSELGWCVR

SEQ ID NO: 345253 - protein, 321 aa, Zea mays
  Clone ID: MRT4577_78037C.1.pep
REAIAPIPRPPADWRGLGCAAAAQAHAPAAAVEAARPTADWRRLGCAAGAAPAVQAQAPRRSEEWRVRRRRNERERRKARAGGVSGGGGASAGMGVGGDVWCTPGIPFAAEASSVDCVVAPHHTVAARRRAEADRPRRERPGAPPARRVTMREHMSSSPLSSPPHHVMPFVDVDRAPSGRIRHVSGRRHSHARVEEEMMFQTRMLLGRMGIYDQYQDWRLDVDNMTYEELLDLEDRIGYVSTGLREDEIIQSLRMVKYSAFNPRHFSTEMDRRCSICQEEFEVHEETGKLSCGHSYHVHCIKQWLSRKNACPVCKTTVSKT

SEQ ID NO: 345254 - protein, 34 aa, Zea mays
  Clone ID: MRT4577_78038C.1.pep
DIKRDETLLSEPVLFFIRPISGPDYGIRFLESVE

SEQ ID NO: 345255 - protein, 111 aa, Zea mays
  unsure (1)..(111): unsure at all Xaa locations
  Clone ID: MRT4577_78039C.1.pep
ASFPTARASQWAWCCSKTPRRARPTGKHAHTPSRRGAHTGAEPTTHRLGVIPXGPDERCITGNTIAVQADTPYGGPQKRGTPLWPKGQRCQQXHTLQEPLTRQDTPGGPSG

SEQ ID NO: 345256 - protein, 76 aa, Zea mays
  Clone ID: MRT4577_7803C.1.pep
KKNKVTKQCKKDPANSWGGVPSISTLKKSNTSKEKKMTQTMKTQKFTLKQLKTPKGQLLLKLKTQDPFYSNKTLLS

SEQ ID NO: 345257 - protein, 64 aa, Zea mays
  unsure (1)..(64): unsure at all Xaa locations
  Clone ID: MRT4577_78040C.1.pep
NRGAKDKRXLRVKGPVRMPTKVLHITTRKSPCGEXTNTWDRFVLRVHKRAIDLFSCPDVDMLFT

SEQ ID NO: 345258 - protein, 38 aa, Zea mays
  Clone ID: MRT4577_78041C.1.pep
HNPLQRNAGSRLPVIKSASPKQKCGDTTNNGLFRGKYN

SEQ ID NO: 345259 - protein, 195 aa, Zea mays
  unsure (1)..(195): unsure at all Xaa locations
  Clone ID: MRT4577_78042C.1.pep
KGCPLVKGEKQWRRLERVEERGARKIWWGIGECGEVFEGXRXXLYXWGRGGEXRGGRXIVXGFXXIKCTVLNFPRVVXERRXKTIXIRRGEXXMLKXVVNLWXEEGXVKILELWRKAIXSGEEGGKVIXIEIFLXXXGAGXVXEXELLMDMFMMVXTKGRXGXEEDWGXIFTKVGFXDXKVVKKMGXXGVXEVYX

SEQ ID NO: 345260 - protein, 53 aa, Zea mays
  Clone ID: MRT4577_78043C.1.pep
SPPLLDSARSAGPTYWRRRSNYWFVVYFPLGFSLMGTWWRLMLLSGSKVLQYW

SEQ ID NO: 345261 - protein, 139 aa, Zea mays
  Clone ID: MRT4577_78044C.1.pep
EGTSSSYGAWGKASLNHRISFEVTGGQPRPPPSAQCLPGAVSSGLGEAEAAGPLGFSPWERDAAACKATPQSTTPTTLCVLLQGSRLEEWLSHVVGAVYAPKLNVALDVGIPLPKVLNINFSNSVLEIVENAVVLTVAS

SEQ ID NO: 345262 - protein, 73 aa, Zea mays
  Clone ID: MRT4577_78045C.1.pep
CAIAVRDYLNSPWTSRLAHTQAFMSIQRSRDLCQTLSIKPRGVRRSLCPTEVRVPSACSTDNVTFELMRHIVH

SEQ ID NO: 345263 - protein, 109 aa, Zea mays
  unsure (1)..(109): unsure at all Xaa locations
  Clone ID: MRT4577_78046C.1.pep
MLAYCGKIKDELITNAVYIGTHGKGILADDESTGTIGTRLXSRINRQNVEENRTTLRELLFXSPGAIQYITHVILLDDTMHHKTKDGYPSXDVLKDAGITAWTSKGGGF

SEQ ID NO: 345264 - protein, 131 aa, Zea mays
  unsure (1)..(131): unsure at all Xaa locations
  Clone ID: MRT4577_78047C.1.pep
RLYIKNAFFHGTHIETVYCSXLAGFVNSTHPHLVCKLNHSLYGLKQAPQTWYSRFASXLVSLAFVKAKSDMSLFVLRRSTNTCYPXLYVDDIVHIASNXALLHHTITSLRQEFATKDLGPLHHFVGVVVGR

SEQ ID NO: 345265 - protein, 178 aa, Zea mays
  unsure (1)..(178): unsure at all Xaa locations
  Clone ID: MRT4577_78048C.1.pep
AGSGRLYGSARRPARPLPPSPSPPQSAXPLPPPXLMASRAPIPPAPXPPPPPRRVPLLAAPPTPSRACPAMPRRTEPPPLSAAVXPPRQPRARRASPQXPIERELPGPAPTPXSSRTRIRRSPRRSLASPPPARGSARRTRSVRSSARSTLSPASRRSSARSPAAGCWACSSPARCSC

SEQ ID NO: 345266 - protein, 105 aa, Zea mays
  unsure (1)..(105): unsure at all Xaa locations
  Clone ID: MRT4577_78049C.1.pep
MASTSCWLLHQSTARLGASPGLADDPPRSAQLLVCMARMQEAAADQSDVSRRAALVLLVXGTADAGAKVVPDVVAYREADNALCKGRASTDYMMTNGDCCKLLIP

SEQ ID NO: 345267 - protein, 66 aa, Zea mays
  Clone ID: MRT4577_7804C.1.pep
MSVGREVTRVWRVQAQDNWGLYYIEAESRSNMYWHASSLKQRTSLFYISANLDSTVVFRKQRTYPR

SEQ ID NO: 345268 - protein, 102 aa, Zea mays
  unsure (1)..(102): unsure at all Xaa locations
  Clone ID: MRT4577_78050C.1.pep
IRPGPQQGHSXSSSHGFKREGTRARQVNHLGGTPCGKWIQPFQHQSIPPEPAPSRPYLVTKQTPSDRGLTEEQCWADLRQGDRERGPSTTFSERVGGRSPPP

SEQ ID NO: 345269 - protein, 229 aa, Zea mays
  unsure (1)..(229): unsure at all Xaa locations
  Clone ID: MRT4577_78051C.1.pep
NSARHEGRVLSPVPTPDLAPIPWTPMRWTSTPHPRPPPRPPPAPSPPSSLSSPPXPPPRVXPPPSPPRPCPCPPSHSSPPAPQPSRPSSLASPRPASPHPPCCPRSRPRSPRTRSPQPSPTSASSSPRPPRFSPSSPRXIPLPPPRHPXRPPPPSPEPAAPPPTLAPFPAAPPTPASARTSARSQQRLRGRRRRCSRRRSPCSRTPRGGCRSGPTRTRGGRSSIPPRSS

SEQ ID NO: 345270 - protein, 54 aa, Zea mays
  Clone ID: MRT4577_78052C.1.pep
RLNLCLSDSLEPNPSPHSSLWRLQNSEEYQVSPILFHKTYLCIHTKEYFLRSTS

SEQ ID NO: 345271 - protein, 91 aa, Zea mays
  Clone ID: MRT4577_78053C.1.pep
SAFSFFSAMGILSVKACFRESIFPTALVSQAWCVYRVPPWEPFHGRCQLSAQSFEPSCAPRLGWVILCHHSSFACLCPPSIQTLLPGFSAR

SEQ ID NO: 345272 - protein, 72 aa, Zea mays
  Clone ID: MRT4577_78054C.1.pep
FPIRIQSVNRREGPHTHALAEKRCAAKPRNLDPWPIEARRQAGTILALHLPLAQGNQHHTSTEVRCDIYLHR

SEQ ID NO: 345273 - protein, 43 aa, Zea mays
  Clone ID: MRT4577_78055C.1.pep
RGAPFSKKKKKKKKKKKKKKKKKKKKKKKKKKKKKKLEEVPRY

SEQ ID NO: 345274 - protein, 249 aa, Zea mays
  Clone ID: MRT4577_78056C.1.pep
MDVKSAFLNGNLQEKGAGESMLLVGVYVDDLINCGPIVININSFKQQMMQTLSMSYLGLLTYYLGMEVRQDVNEITICQKAYASKIVEKCNMANCNPTDTPMEQRMKLSSVVKGTEVDVTRYRSIIGSLRYLVNSRPDLEFAVGLSRRLLDMWLSMLIADVKAESIQKFSLLVDKMSAIELSKNPVFHDRSKHIDTRYHYIRDCVDKNVVDVEHVRTIDQLADILTKPLGRVRLAELRSRLGVGRVQQD

SEQ ID NO: 345275 - protein, 162 aa, Zea mays
  Clone ID: MRT4577_78057C.1.pep
AAMSFCYSTIAVGLALGQTISGPTGKTTLYGTQVGVDVGSAEEKIWLTFQALGNIAFAYSYTIVLIEIQDTLRSPPAENKTMRQASVLGVATTTAFYMLCGCLGYSAFGNAAPGDILSGFYEPYWLVDFANVCIVIHLVGGFQVFLQPLFAAVEADVAARWP

SEQ ID NO: 345276 - protein, 92 aa, Zea mays
  unsure (1)..(92): unsure at all Xaa locations
  Clone ID: MRT4577_78058C.1.pep
GNPPAAAXPSPPLSSVHAPPLTRSPDLTLRWDGGAGAVAPWIMRCALPRPSYPAGRQPTGVLGAASVLRRLLLRALPDRVTHIFTPRCRCXP

SEQ ID NO: 345277 - protein, 103 aa, Zea mays
  Clone ID: MRT4577_7805C.1.pep
QRYPSRACDVWHVPHASPHMHARVSYSSCRNCLSLLISAHCLLYPQLKRPHASSVLLRAVLHAAATLSMDPATSPKYVRRARIYSRRTILYDHKMTICSGMAI

SEQ ID NO: 345278 - protein, 83 aa, Zea mays
  unsure (1)..(83): unsure at all Xaa locations
  Clone ID: MRT4577_78060C.1.pep
MEPPVLSGFSKDLAXTELSEVWDKTFLGDVIXLSMLHSRKLFLAGCIAALIEMTAMSAPLCWAVPDLICSKWTHHATTLLVLA

SEQ ID NO: 345279 - protein, 91 aa, Zea mays
  Clone ID: MRT4577_78061C.1.pep
SDCVNAESRCLRMFLVSLVFCSMRLVVSFIAPRKLGAVGHQFGRQFLHSVEWCIGQSGAPPDNHCSSSVLDFLPYRAQPTVGPRDRLAHRT

SEQ ID NO: 345280 - protein, 103 aa, Zea mays
  Clone ID: MRT4577_78062C.1.pep
MTKLYNRAMTRHLFGQQNTQHRSSDTVFYTEPMRQRVLISYKRSEGHRYLGTTICFLTRSSPAVVLASHSEELLVTHTTKFTELLQTIKAQNLVDIIWGRRQN

SEQ ID NO: 345281 - protein, 62 aa, Zea mays
  Clone ID: MRT4577_78063C.1.pep
VHNIFLGRTSVHNGSANRASNIHHTITWHICKNCGPRSSKRGVYSTTNVSVEQSIPVTRPPC

SEQ ID NO: 345282 - protein, 140 aa, Zea mays
  Clone ID: MRT4577_78064C.1.pep
MAVPSSDRARRPFPLSPSLSLFLLISAILVLLFLFLDPSPGSLAFLPSRLSASAPSLAPPLTPQQQSRAPRSRSPPHSRPDGSSATEKAEEGTTATASQPVTKADANGSASGPSAKESSGGSGSGGNSGARGAGADGETG

SEQ ID NO: 345283 - protein, 40 aa, Zea mays
  Clone ID: MRT4577_78065C.1.pep
NASLPLHSMRLHRISLKYKDTCLHQSLIYSLLIRIKKDDP

SEQ ID NO: 345284 - protein, 99 aa, Zea mays
  Clone ID: MRT4577_78066C.1.pep
FFGPKKESQEELLSRPSCFVSLFCSCFFVSVDKVFGCPTGYRFLLFKDCNIYSYLCFSLVILDTYVRFIQSNLIRCLVRLLNKSGRCSDFVMCHLYLVQ

SEQ ID NO: 345285 - protein, 180 aa, Zea mays
  unsure (1)..(180): unsure at all Xaa locations
  Clone ID: MRT4577_78067C.1.pep
ADEHWASRCSSPLLFLPPTPAPTPAPRGRAGARVWIRGWSPRLDPAGGGEGRGRVGGSSRRGWPPPPGRRTTAVAWAAAXGGERMKLLCSLGGRILPRPGDGTLRYAGGDTRIVSVPRGVSLPDLLGRLADAYGGATGPHFAVKYQLPDEGLDALISVSSPEDLDNMVEEYDKLSGASPN

SEQ ID NO: 345286 - protein, 44 aa, Zea mays
  Clone ID: MRT4577_78068C.1.pep
RASTRSSTTVDRDRSSLMRAHYDYTHAGRDECRRTLTPTERTKS

SEQ ID NO: 345287 - protein, 47 aa, Zea mays
  Clone ID: MRT4577_78069C.1.pep
KTPVEPQADRALPSMPGPFGQDTLAWYSIIAFRSICVGLRDRSKINR

SEQ ID NO: 345288 - protein, 152 aa, Zea mays
  unsure (1)..(152): unsure at all Xaa locations
  Clone ID: MRT4577_7806C.1.pep
MPPMTNLHMALSRYPPRRGRPGEADAADEAADRMRRDXRWQRKLVRXGKWMPKAGADTYVAPEGVLAVQATAHDGASFWNGXGLAGRIXTTITAGAACDSLHERCVLHAAXAAPTGVTADTMRDRAVTASTYXLARSCTMDAERIIGHYSVL

SEQ ID NO: 345289 - protein, 112 aa, Zea mays
  Clone ID: MRT4577_78071C.1.pep
MASFSEAPPGNPTAGEKIFKTKCAQCHTVDKGAGHKQGPNLNGLFGRQSGTTPGYSYSSANKNMAVIWEENTLYDYLLNPKKYIPGTKMVFPGLKKPQERADLIAYLKNATV

SEQ ID NO: 345290 - protein, 40 aa, Zea mays
  Clone ID: MRT4577_78072C.1.pep
GEGTAARYAIEGVVGAVDVSRTSEARLWDGARGYPVYDIA

SEQ ID NO: 345291 - protein, 78 aa, Zea mays
  Clone ID: MRT4577_78073C.1.pep
TTIHPRQHAATHTLLVNGGPHRDEERSTSQQADFEIYTTTSSKMTFSFGKLGHFNVHFFLQKSVYLRRLFCIELSCLL

SEQ ID NO: 345292 - protein, 93 aa, Zea mays
  Clone ID: MRT4577_78074C.1.pep
DPWPRFNLEPLCDCDHRIIDQWPQFYYTLSSAHSQINAQDLSSQTGNSALIMTVELEIDDPHISSSLPMLCTGGGVLSPRRRHHRKSQPGTEA

SEQ ID NO: 345293 - protein, 38 aa, Zea mays
  Clone ID: MRT4577_78075C.1.pep
VHALTDHAGVLLTRNVGIYDSQLVANPLGYLTDVELAV

SEQ ID NO: 345294 - protein, 184 aa, Zea mays
  Clone ID: MRT4577_78076C.1.pep
IRHEAGDPAPAGEPVPTPLQGPAQRRISTSRISHIVRTYLDLSSSRKRRSAPKNQPKAGDKERDAAAAETDGSKAGPSSSHPSRLLRELGIRVSRYTHEERRDIILRYMQKRSGRQIVNRAASKVPSRQALAVRRRRGAGGKFLGKDDAQITDKLEEKAEEEPELPPEVVSNAGGVPIVGMVFE

SEQ ID NO: 345295 - protein, 123 aa, Zea mays
  Clone ID: MRT4577_78077C.1.pep
NILATKTASGNDPLEPFLMAKPLPYSALPPLRDPPPHSQMNGSSHTPGSSVSASSGLEFPYTARLVSLGLVVALGRSITNTPPQNVCLVSNSVVSPSNKGLSSALVVTTTTPHALRVMVKVFK

SEQ ID NO: 345296 - protein, 524 aa, Zea mays
  unsure (1)..(524): unsure at all Xaa locations
  Clone ID: MRT4577_78078C.1.pep
MGSCLSSETPAASAGAAAWWRKGRRGTREGAAGGLPSGGKKPPGRGGEMTEDELARVSGRMCGNGASAVACLHTQQGRKGTNQDAMVVWESFNSSDSIFCGVFDGHGPYGHFVAKKVRDSLPVKLRTQWQTSANGPCSSPHQNGSISGSINSEETASIVDDEWGDGDNTEKLPEMFLPLKRSYLKAFKLMDKELKLHPTVDCFCSGSTAVTLVKQGLDLVIGNLGDSRAIMGTRDASNNLTALQLTVDLKPNLPREAERIQQCKGRVFALQDEPEVARVWLPNNDSPGLAMARAFGDFCLKDYGLISVPEISYRLLTEKDEFIILATDGVWDVLSNKEAVDIVASAPSRATAARALVDSAVRSWRLKFPTSKSDDCAVVCLFLDRAGSAQESESEAIVETAEPTGEEVCRRDAGEVDEDMAVADAGVHVVSSAEHSAEATPLQHSTTSRELDDEIVPADEXRASRRPEGACEVRXSARSLAECISTSEEEEWSALEGVTRVNSLLNLPRIMSGDRRSASWRKRR

SEQ ID NO: 345297 - protein, 110 aa, Zea mays
  Clone ID: MRT4577_78079C.1.pep
VVGDPFLNIPPLESLLLFRGHKVKAVSCRTIIKECGEVRNPIWRPKVSQGLPQKREMHVSELGAVVWLKRITYVESNKDICDHCSTSAVTELLHHCRLACVELITCKWYV

SEQ ID NO: 345298 - protein, 63 aa, Zea mays
  Clone ID: MRT4577_7807C.1.pep
SKIWNVIQDKQRPLAARPRQEFCHELIMRNHLHLRRGLNDGELKRRNAGGHQVVRFTGRAFKG

SEQ ID NO: 345299 - protein, 139 aa, Zea mays
  Clone ID: MRT4577_78080C.1.pep
AQPVGGCRQQPAATSVAPPPSPPTPSQPQLERESISLPSDRVRLPPLPPVRFLVTARRLGWPASPPVDPTDSPPFGQPGGGGGGGGDLLDFLKLLARFSPSVAAAGQRPRGFFSSLTPSFKWRRRSAGSKSLARNRLGL

SEQ ID NO: 345300 - protein, 261 aa, Zea mays
  Clone ID: MRT4577_78081C.1.pep
MSAQAGPGTYSPAAAAGDKRRERKEELRRHLAEDADWPRADGRSFHDCRPAFMQTGPTTAASGSAYAEFGKTKVIVSVFGPRESKKAMMYSDVGRLNCNVSYTTFATPVRGQGADNKEYSSMLHKALEGAVMLHTFPKTTVDVFALVLESGGSDLPIIISCASLALADAGIMMYDLVTSVSVSCFRKNIIIDPTSDEEAWQDGSLVVAFMPARKEITQLTLTGEWSDGRITNAVELCMDACSKLGDILRDRLKDTATLTCE

SEQ ID NO: 345301 - protein, 256 aa, Zea mays
  Clone ID: MRT4577_78082C.1.pep
MNALAATSRNFRQAARLLGLDSKLEKSLLIPFREIKVECTIPKDDGTLASFVGFRVQHDNARGPMKGGIRYHPEVDPDEVNALAQLMTWKTAVAAVPYGGAKGGIGCSPGDLSRSELERLTRVFTQKIHDLIGTHTDIPAPDMGTNSQTMAWIFDEYSKFHGHSPAVVTGKPIDLGGSLGRDAATGRGVMYATEALLAEYGKSISGSTFVIQGFGNVGSWAAQLIHEKGGKVIALGDVSGTIRNKAGIDVPALMKH

SEQ ID NO: 345302 - protein, 121 aa, Zea mays
  Clone ID: MRT4577_78083C.1.pep
GAPFWGRPCPRRGGPGKLLVAHPAGRYGPGLRALTWKHWKNPGFGATGHTWGHFGHMHACRMTFSYPRGREHTSIWCGSHVRARRTMFACTRGPTTGGGGRPPPVGGPPSCLGPVGSAPPG

SEQ ID NO: 345303 - protein, 61 aa, Zea mays
  Clone ID: MRT4577_78084C.1.pep
ARARRKLLFREGGPQANQGFFKGAAFARGWAGARRSFEGPLNGQQCWFPTWKYFVTAQGFE

SEQ ID NO: 345304 - protein, 55 aa, Zea mays
  Clone ID: MRT4577_78085C.1.pep
AWRLSCAGCTSAAAVWPCNRQSVHERTEDAQLITRMAQKQQGVSYGDAGCGVGTT

SEQ ID NO: 345305 - protein, 55 aa, Zea mays
  Clone ID: MRT4577_78086C.1.pep
FGPRFFKHSKEMGTTLLWLLKKARSVSSSRWLQTQFLGLTGLLKKASNFNLGPVF

SEQ ID NO: 345306 - protein, 54 aa, Zea mays
  Clone ID: MRT4577_78088C.1.pep
MDVGSKDVLMESPPDYSAAPRGRFGIPCCPVHLKRLRIVVVVVVLIVVVIVGAL

SEQ ID NO: 345307 - protein, 67 aa, Zea mays
  Clone ID: MRT4577_78089C.1.pep
FRPNMVLAESQIAMPPTSNSILGRWSLSWAATSISSLSICRHRIAARSQRPLMRRTWRRQNGHSKTT

SEQ ID NO: 345308 - protein, 120 aa, Zea mays
  unsure (1)..(120): unsure at all Xaa locations
  Clone ID: MRT4577_7808C.1.pep
IYSIGHGWVIIHLRAASSWPPPRRSPPPAPWPRACPPPPPPARSSPSTCPPGRGRRPSRAAATRARRRRPPRPLAALWTPPPPSCPASXPPPSXPPSPPTREPRLPDGSKLSFFRRGRDT

SEQ ID NO: 345309 - protein, 77 aa, Zea mays
  Clone ID: MRT4577_78090C.1.pep
DLWADLCACLPLPVLSVPSSLILSYLNVVVLFCPTGCCLCYTVIALYCCGYLPLSAYCTVLVFSVTDLLAFRRVLVT

SEQ ID NO: 345310 - protein, 62 aa, Zea mays
  Clone ID: MRT4577_78091C.1.pep
YRHSPDQLFPTFFGLIHKVTPDNNLVVPGRSHMCGYCKLANHVAEKVRDSQLEPTVARKHLA

SEQ ID NO: 345311 - protein, 117 aa, Zea mays
  Clone ID: MRT4577_78092C.1.pep
FSDECYLDWPRPRAQNAVAERMRGGWLPPASAPPCAGLLQTSRSPKIFVVPHPADLVLEESLPERGGRAPPVELPGEEITSMQRPAAGGPRMATKRRRPRRKKQPTPLLLLRPFTFP

SEQ ID NO: 345312 - protein, 73 aa, Zea mays
  Clone ID: MRT4577_78093C.1.pep
FCSDYGPHSVTVLGKIPIFSLSLFPALATIVPMWYLLMNISKSTCPTQASRTKALCHVIQGVQMKTSVAYQYL

SEQ ID NO: 345313 - protein, 85 aa, Zea mays
  Clone ID: MRT4577_78094C.1.pep
EARNSVRAQTAKRMFISGAADGRESRVWGDGGPTPLPNGPQLATTSRGSSKRRGGAAGGPAKKDRFHAVHKVPAADGQDHRARNL

SEQ ID NO: 345314 - protein, 135 aa, Zea mays
  unsure (1)..(135): unsure at all Xaa locations
  Clone ID: MRT4577_78095C.1.pep
SGRPSFFXXWISTXKQPPQTERGWIKKTKREGQKSKEKTGPRRKPHKADTGQHPATPALGMAKAKASTSQREASEAILETLLFSIKVRRNSIPRQGSNRGPTSYSAQNGSSPKADGTVTTRPWPLTNPSWNGATR

SEQ ID NO: 345315 - protein, 64 aa, Zea mays
  Clone ID: MRT4577_78096C.1.pep
PTPALQNKSVTRSMALSPRALCRLSYQIDEEHRRTPLASNNSPRTTTYMPVGALYSYRTRTPHL

SEQ ID NO: 345316 - protein, 55 aa, Zea mays
  Clone ID: MRT4577_78097C.1.pep
RCLLKQVLLGDPEDDDVGLLSPRCDKGAGKHEDEAPDSLRLRVLKKGAKELCYAG

SEQ ID NO: 345317 - protein, 115 aa, Zea mays
  unsure (1)..(115): unsure at all Xaa locations
  Clone ID: MRT4577_78098C.1.pep
RGHSRRYPARARARSRSRRAKPGPPRRAASASGARLPRGACAQTRRAEAGRQNPSSRARTGRRQRSIKRRKPGWRPKSWKCWKKRPSWGRTRGAGPPTTTAARTYXKRARGSSVI

SEQ ID NO: 345318 - protein, 129 aa, Zea mays
  unsure (1)..(129): unsure at all Xaa locations
  Clone ID: MRT4577_78099C.1.pep
STKSDNALDPYQLSYDQKLPIGTLXSLTRHPHIQIHLIYYTHVQLSHASPTTTSFFTAYKCXRTHSTNXMNLDSKEKNHELTVSXHIKSHPSCNDSXKTTERQMTASXKSISYSNTSKDDDDSDDDDTD

SEQ ID NO: 345319 - protein, 59 aa, Zea mays
  Clone ID: MRT4577_7809C.1.pep
FRRERALGPASTRAASLAFLGHLNQSGCLSNGNRMSRALLQRRLNVPVWAYEARNLINK

SEQ ID NO: 345320 - protein, 44 aa, Zea mays
  Clone ID: MRT4577_780C.1.pep
VPTHPACVLGMLRCTFKLSPVCSLSGLRIIPVFSSPRAKFRAFV

SEQ ID NO: 345321 - protein, 113 aa, Zea mays
  Clone ID: MRT4577_78100C.1.pep
MQPMPMHLLLLLFLSLAFPLQPMVVRASPASSSSSSSSSSSPRHDCPSKCGDVSIEYPFGIGPGCAMEKGFELHCNESRSQDGRRSSTAYFSDGDLPVLADILLLHGQVRVMS

SEQ ID NO: 345322 - protein, 96 aa, Zea mays
  unsure (1)..(96): unsure at all Xaa locations
  Clone ID: MRT4577_78101C.1.pep
MASIPATTFAVILSDLFCAAAGTGXGDLPDYVIQGRVYCDTCRAGDATNVTEYIADTKERLESKHLGTGKHERCIEGETEGNGTYTKELKANHEED

SEQ ID NO: 345323 - protein, 139 aa, Zea mays
  unsure (1)..(139): unsure at all Xaa locations
  Clone ID: MRT4577_78102C.1.pep
KRKNPPPGWADFSPSRVAHALSPSPPPTQAAQLRAPAPHLTNRPHRSAAPPLSLSRRSPTGSPGPPVRTFVPPMPSPARSPPHAPSPXPLMLAPASATTPPXSEPSPHPSPARAPFHPHQPRPSPPLLPEPNRAGAARD

SEQ ID NO: 345324 - protein, 138 aa, Zea mays
  Clone ID: MRT4577_78103C.1.pep
MWSLPLLADFDLCCDCYNEGKFDPGMAKTDFILMDSAGVSGASGTSWTDEETLLLLEGLEIFGGKWAEIAEHVATKTKAQCMLHFLQMQIEDRFHDGKDINQNIPVKTEQATTEKAIAETSEKMEVEDKVEGRGTVDE

SEQ ID NO: 345325 - protein, 64 aa, Zea mays
  Clone ID: MRT4577_78104C.1.pep
PTRPLTHTLTRILTLTNTHTRRISTTQTLKQSKNNIYNQKQYPLSLLFLLSPYLSNILSITIPI

SEQ ID NO: 345326 - protein, 104 aa, Zea mays
  Clone ID: MRT4577_78105C.1.pep
NPTGPNYGSHSKGQPPQGNPKPKPKKVNPDFFLPRNPLEKPKKNFFDFFLLHRFKKPGEQTFNYNWAPFFPGHACFKKLPLNFHLTFQNENVLLTRGIVNPFGG

SEQ ID NO: 345327 - protein, 470 aa, Zea mays
  Clone ID: MRT4577_78106C.1.pep
MEVEDKVEGRGTADEKASEKTEGNCEETKTENASVVVNKDTQNSDGRDSGASPCTEEPKQSSDEQPVVKENSADVDTSGEKLSNVAIDILKCAFEAAGHSPEYEGSFADAGNPVIALAAYLAGLVEDGNATTSFRSSLKSISEVPPALQLASRHCFILEDPPNELKDICVSVSKKNTDADQTKDEDMISNSIANEKKEINEKEDKSLSVEKTNNSSMSQNDHQESNIKSVSRDDCSSVEPKGNNAKESSDSTGIGDMSAIGTTKDVVAGNSKQVNDSPSVEVEAPDDSSLKSKDELNDTEDAVATPATVQEQKHSQTLENGDKAEPNNIERVVVDEKGSIVTANQNDSITRLKRAAATAVSAAAVKAKFLGDQEEYHIRRLTALMIEKLFQKLEVKMSLFSEIEQVVLRTREYTEKTRKKLLMERNAIIAARMGALPSRPNQPGVAGNRLPPGYGNPPLRSPNAMPRPSS

SEQ ID NO: 345328 - protein, 312 aa, Zea mays
  Clone ID: MRT4577_78107C.1.pep
HASEYHCNSCSVDCSRKRYHCRTQADFDLCCVCYNEGKFDPGMAKTDFILMDSAEVSGASGTSWTDEETLLLLEGLEIFGGKWAEIAEHVATKTKAQCMLHFLQMQIEDRFHDGDDINQNIPVSTEQATTEKAIVETPEKMEVGDKVEGRDNADEKASEKTEGSCEETKTEDANVVNKDTQKSGGKDSGASPSTEEAKQSSDDQPIVKENSVDVDTSGEKLSNVAIDILKCAFEAAGHSPEYEGSFADAGNPVMALAAYLAGLVEDDNTTTSFRSSLKSVSDVSPALQLSSRHCFILEDPPDELKDICASVR

SEQ ID NO: 345329 - protein, 901 aa, Zea mays
  unsure (1)..(901): unsure at all Xaa locations
  Clone ID: MRT4577_78108C.1.pep
MEPKPSSAAHADAPAVEAPRRRGGGGKRKSAGSSFTPSKRQAKERNASFHVPPHLLHSGPPTRAARQSPHKLSGXAVGVGASVVXAAATGDGVSGGQAVVDAIRPETEETPAPELPLVDEMFEAVRSRGAGVHVVPTFAGWFSWKEIHPVEKQTLPSFFNGKSEKRTPEVYLAVRNSIMMKFHANPQLHLESKDLAELSIGETDARQEILEFLDHWGLINFHPFPPDGHEESKPEETQDNSNDEKASLIEQLFKFESVQSYMTPLPMKEDVRAPPPLPSLIPESVLIQDVVAAAEPSVEYHCNSCSVDCSRKRYHCRTQADFDLCCDCYNEGKFDPGMAKTDFILMDSAGVSGASGTSWTDEETLLKRXEKEGKSLSVEKKNNSSMSQHXTTKNQALRASQVMIAPXVEPKTNNAKESGDSTAIGDKSATETTKENGSXIKWKEEVLWMKRPDRKQRETVKKXTENASVVVNKDTQNSDGRDSGASPSTEEPKQSSDEQPVVKENSADVDTSGEKLSNVAIDILKCAFEAAGHSPEYEGSFADAGNPVMALAAYLAGLVEDDNTTTSFRSSLKSVSDVSPALQLSSRHCFILEDPPDELKDICASVSKKNRDADQKQDEDMIQNSIDTEKKEINEKEGKSLSVEKKNNSSMSQHDHQESGIKSVSSDDCSLVEPKTNNAKESGDSTAIGDKSATETTKGNTEQVNDLPSVEVEAPDDSSSKGKDELNKTKDAVATPATVQEQKHSQTLGNGDREEPNNIESVVVDEEKGSVVTANRPDSIARLKRAAATAVSAAAVKARFLGDQEEYQIRRLTALVIEKLFQKIEVKMSLFSEIEQVVFRTREYTEKTRKKLLKERNAIIAARMGALPSRPNQPGVAGNRLPPGYGNPPVRPPNAMPRPTS

SEQ ID NO: 345330 - protein, 78 aa, Zea mays
  Clone ID: MRT4577_78109C.1.pep
TYLWRPYICTHPLLCNSRPTEPRAVPTSAARTVAADLPLQVPHENGSSSAPLPVHAPAAGPATQAAAGEERRHRPVRR

SEQ ID NO: 345331 - protein, 66 aa, Zea mays
  Clone ID: MRT4577_7810C.1.pep
MGAPVHGALALFLLLLVGAGDGAQGDGAAGTDIASHRFRCYRRDGCRGELQLRARGAAGCLLRGAV

SEQ ID NO: 345332 - protein, 56 aa, Zea mays
  Clone ID: MRT4577_78110C.1.pep
TQSTSKVPKEGLLSLHLLCSTAHYQKTADMKSIYFVAGLFVMLVQGSWQRSLQDTE

SEQ ID NO: 345333 - protein, 72 aa, Zea mays
  Clone ID: MRT4577_78111C.1.pep
GGLRQAQALAQEAARVHGALVALGRPPSRKRHYARHRNKITLNANRIEDFKGFSAFIKKKLGYNLIIYFKYI

SEQ ID NO: 345334 - protein, 119 aa, Zea mays
  Clone ID: MRT4577_78112C.1.pep
LLNVGKTSLANTIDTVGCREDMIPTERVIMKMDTLGNVRIKSWDIVGQHRFRNVRERECRASTAIGYADDAPDRENMSIVEGELHDLLSRPSLTGIPLLVIGNNVDKPEAFPRRTFAEI

SEQ ID NO: 345335 - protein, 93 aa, Zea mays
  Clone ID: MRT4577_78113C.1.pep
HNTAGILRLAPVLNRYKQLTRRPSRVLRVPSHARQLLPLIIHTSTLGRSQHARVSNFLNCTRTTRENIRTGGATAHHKRLLATARGVHTPLRM

SEQ ID NO: 345336 - protein, 161 aa, Zea mays
  unsure (1)..(161): unsure at all Xaa locations
  Clone ID: MRT4577_78114C.1.pep
AGGGGFFFFFLLFPRAASFGGRCCPLSVLLFPARALFGSRRSPSAXVYLGGGGGLFFAAVPLGASSGVCDALALRALGXTRSLGKGVSLAVERFLSPVAPALVSWRRCVVVRVLFVPLLIAMGGSGNTSKFGASAVLGVSLAVCRAGAVVKXCPLYRRIAD

SEQ ID NO: 345337 - protein, 80 aa, Zea mays
  Clone ID: MRT4577_78115C.1.pep
LDMLSIYRVGQKERSIQLSLYSALLQLMLVQATAASLPCAVVCFLHTFDQNYNHLIITKTFRLFLVYLTKYSGNLWFWEW

SEQ ID NO: 345338 - protein, 42 aa, Zea mays
  Clone ID: MRT4577_78116C.1.pep
FNYLKVVQIHIKIHYLIQNHNLHMRPIHTLNLYHNHIQILNL

SEQ ID NO: 345339 - protein, 446 aa, Zea mays
  Clone ID: MRT4577_78117C.1.pep
MAVENGSADEAAAATVTVTVTGARTVAPAKNRCTLATFDLPYITFYYNQKLLLYRAAPDFPDAVARMTAALADALRVFYPLAGRIRQDDGGALAVEGDEGAEVFEAEAQGVAVDDLAGGDCSDEAEKVLQHLVPYTGVMNLEGLRRPLLAVQFTKLKDGLAVGCAFNHAVLDGTSTWHFMSSWAELCRGVPLSLQPIHDRSLSRSVRVRLELPASAEAHEKTDPNGPKKALVARVFSFPEPTVARIKAAANAALPPGAKPFSTFQSLGAHIWRAVSRARGLGPADITAFAVFADCRARLDPPLPPAYFGNLIQAVFTGVPAGMLLGGPPELPAGLLQKAIDEHDAAAVTRRLEEYEAAPKLFHYSDAGPNCVAVGSSPRFRVYDVDFGFGRPERVRSGGNNKFDGMVYLYPGRGGDGGIDVELALQPEPMQRLEKDDDFFLRQAAA

SEQ ID NO: 345340 - protein, 34 aa, Zea mays
  Clone ID: MRT4577_78118C.1.pep
FQTLMVTKDIKRLPPTNHVARSCFSSGLILSGLR

SEQ ID NO: 345341 - protein, 60 aa, Zea mays
  Clone ID: MRT4577_78119C.1.pep
CGTLVMGFFIQKSKQTKVDESSTVGVDSSLGKSIPAGYKKMGKWLINLRQALSSRVTHLC

SEQ ID NO: 345342 - protein, 111 aa, Zea mays
  Clone ID: MRT4577_7811C.1.pep
SLQPGLGGITFFFGFHTLYFLGKALSPKSIQLAVLGKTHETGTPHNSYTNIRLDPPPTKKTYYSNFILNKMKYSQPQMWLGIINLIPGKNLMYMPHEGAKQATVFFKIRIF

SEQ ID NO: 345343 - protein, 67 aa, Zea mays
  unsure (1)..(67): unsure at all Xaa locations
  Clone ID: MRT4577_78120C.1.pep
HYRTPFPSHHHPKLNIELSPHYYINLNXFYIYAPLNLYTSLFPIPPSFSFLSFLYLHIHLLFLSTSK

SEQ ID NO: 345344 - protein, 80 aa, Zea mays
  unsure (1)..(80): unsure at all Xaa locations
  Clone ID: MRT4577_78121C.1.pep
SSEPTIVDVSSECLTSKLVLHVLRPRWCASRTQGLYWFERNVTTTVLLAYASGTILLVVGVKKKKKKKKKKKKKKKKKKX

SEQ ID NO: 345345 - protein, 70 aa, Zea mays
  Clone ID: MRT4577_78122C.1.pep
LGAFLWKMAAYITLKKMFLKWVFELPMHRGGGSYRTGGSFKQIHRCLPSVITDCFDSVGIANLIQVMHMN

SEQ ID NO: 345346 - protein, 125 aa, Zea mays
  Clone ID: MRT4577_78123C.1.pep
SALSFVQSLQENNSSDCVRGPHLAKIEIERQRCLNGNPDNIKLMEALVQYLHRFGHLSCSASDVEIYLHMLSNNEISELLDEITRSFDASSISVNTLGSTITLFKVQELLGTSFTKPTSELEGIA

SEQ ID NO: 345347 - protein, 115 aa, Zea mays
  Clone ID: MRT4577_78124C.1.pep
MAMKKGGGAAGLKQILRRCSSLGRRQQHGAGYEEEEDEAAATGLPSDVPRGHFAVYVGERRRRFVVPIALLDRPEFRSLLRRAEEEFGFGAGGILVLPCEEVAFRSLTSALACAR

SEQ ID NO: 345348 - protein, 75 aa, Zea mays
  unsure (1)..(75): unsure at all Xaa locations
  Clone ID: MRT4577_78125C.1.pep
QFLAMSLAYYXVNPLVVPLVASVTPAWGGKGWLPLDLNDGPLGYYFWLWTGISVVNYVVYPAFPRRYTVKKVVGQ

SEQ ID NO: 345349 - protein, 117 aa, Zea mays
  Clone ID: MRT4577_78126C.1.pep
MAMKKGGGAAGLKQILRRCSSLGRRQQHGGSGYEEEEDEAAATGLPSDVPRGHFAVYVGERRGRRFVVPIALLDRPEFRSLLRRAEEEFGFGAGGMLVLPCEEVAFRSLTSALACAR

SEQ ID NO: 345350 - protein, 95 aa, Zea mays
  Clone ID: MRT4577_78127C.1.pep
SPRSYIDGKMHGKLSESESSRSASLSATYGYHHLSSRTLPRWPLLLAALHACTLFVMRFTYWPLLVQQVNHHFSPFFSVHAKILLAGCGYVARAR

SEQ ID NO: 345351 - protein, 42 aa, Zea mays
  Clone ID: MRT4577_78128C.1.pep
KIQLSYTVLNCYLSSYTFSCQQLMCLRMTHTGSSSSDLEPCY

SEQ ID NO: 345352 - protein, 111 aa, Zea mays
  unsure (1)..(111): unsure at all Xaa locations
  Clone ID: MRT4577_78129C.1.pep
HSQTSTLAPKILCLCMLFDMLASDATATMMTKCSQATIATILXPRTSXAMTSVGENAILECYRIQQAIATGILDLSRSMLQQSSAISQQMXIEHILTQNIRTQQLQQLMLA

SEQ ID NO: 345353 - protein, 85 aa, Zea mays
  Clone ID: MRT4577_7812C.1.pep
VGPSGFFRPAGVGHFYLWPPSPGPDLMLPALAACLAPLIGPRGPSWQPYFLYLVSRSAMIVSGFFKKKKKKKKKKKHPQKKKTPH

SEQ ID NO: 345354 - protein, 113 aa, Zea mays
  Clone ID: MRT4577_78130C.1.pep
MGTEVLRPHDCLARARRPRPLRPTAGRRTAARQGCGTRGDRRSPSAAVTVPRHVVRTKVAMADAYAGPAFGAMSPSPRALPLPRFSSRTVVHATVSGVDAAATRELRRLLGLH

SEQ ID NO: 345355 - protein, 37 aa, Zea mays
  Clone ID: MRT4577_78131C.1.pep
RHVLINFIGAILSKDHDRSVHFESLPEEHSCHHLEGY

SEQ ID NO: 345356 - protein, 153 aa, Zea mays
  unsure (1)..(153): unsure at all Xaa locations
  Clone ID: MRT4577_78132C.1.pep
RKPRRKPPPKKKSWGLAPAPPMVPARGGGGPPXPGPNPRGNPPGKKKKGFFGGGARPPPPXPKSGAPPSXITTGPPLXWKGGKPNKPXGGPPPVGSGAHSQFLKKPAGGPPGNFGGKKIGPPGPTPLKXEGLPPPDGFPGGGGGGPPVKPHFP

SEQ ID NO: 345357 - protein, 78 aa, Zea mays
  Clone ID: MRT4577_78133C.1.pep
RLVSSIASGPTLFFFSFFLFLFYTVFVSDNRGLAILSNDQDLKHWSQDPTSSMFKQLGPTHHPRGLHIIRLAARVLFS

SEQ ID NO: 345358 - protein, 143 aa, Zea mays
  Clone ID: MRT4577_78134C.1.pep
MAGSKDHTDISPDNILKPVVESMTTDEQQQYEDYTRQAKEKFLSQYTVDRHQKVIKHGETDVASLLSSLQVPNSGGLEESIGKLTRTLEKSVAPSFPSYETSNRVFMSDVSATNGDSQPQPLYGMPINSYSGQIQPPSSLKVA

SEQ ID NO: 345359 - protein, 152 aa, Zea mays
  unsure (1)..(152): unsure at all Xaa locations
  Clone ID: MRT4577_78135C.1.pep
MRQLLQAGKGRILLHRRFCGRMDLYLRAFKEDALHRPYAYXLIAGLHDHPKTVILTKSASNTGKXKRMAXIIMIDHFXHLVLTDYFLDVDYDDNATVSPDELPMHEKNVADCXTDKERLEKMFKTDNNRCVYINFHFYMMGLTNRPGLALEI

SEQ ID NO: 345360 - protein, 103 aa, Zea mays
  Clone ID: MRT4577_78136C.1.pep
MPARQGLQIRTRVIHYHDLKKKKSFPRFKNLTGEDCHKKLFIQPFLLKPLAWPGIKKALFFFTLSKPNKIVKGPGPWGLSPPRVLKGPRLGNPQNPPVGGGGP

SEQ ID NO: 345361 - protein, 100 aa, Zea mays
  unsure (1)..(100): unsure at all Xaa locations
  Clone ID: MRT4577_78137C.1.pep
RVVWGPSKLVPVGYGIKKLQIMMTVVDDVVXVNTLSEDYVCDEPVKEYVQSCEIVAYKKIEVCLRITPSWGALPMVVCGQRPTLIYPHQYVFFVCPVIFP

SEQ ID NO: 345362 - protein, 48 aa, Zea mays
  Clone ID: MRT4577_78138C.1.pep
KIRRSSDEHLRQTRSETMSNSVKSSFHDPKLKGKPSRERYVTHNRAHW

SEQ ID NO: 345363 - protein, 504 aa, Zea mays
  Clone ID: MRT4577_78139C.1.pep
MRKPAALVVSTAVFAAAAVAAVMARQRLREARRWARAGAVLRDLQERCAAPVERLRQVADAMVAEMRAGLASNDSEGDSGSSVLLKMLVTYVDSLPSGDEKGLFYALDLGGTNFRVLRIQFGGKEQRIVKQESKTVSIPQHLMSRGSNELFDFIAAALAKFIASEGEGFYLPEGMQRQLGFTFSFPVKQNSVASGTLIKWTKGFAIDEMVGKDVVAELNKAIKRQGVDMEVTVLVNDTVGTLAAGRYVDNDTVAAVILGTGTNAAYIEHMDSIPKWCGPPPESGNMVINMEWGNFRSTHLPLTEFDVALDAESLNPDEQIYEKLISGMYMGEIVRRVLLKMAQDASLFSDNVPLELEVPYILRTYHVLMMHQDTSPDLRTVGNKLKEVFRIEDTCFKTRKLVVDVCEVVASRAARLAAAGIHGILKKLGRDVASPDKQKTVIAVDGGVYKHYTFFAQCMESTLRDLLGEGVASSLVIKLAEDGSGTGAALLSASYSQRLQAVDD

SEQ ID NO: 345364 - protein, 72 aa, Zea mays
  Clone ID: MRT4577_7813C.1.pep
PRVRPRVRPLVRKCACRPVPCKFLRVGLVLLPGFVRFFRFGESGATYLHCYTRLICVNGILLYFVFLLKKKN

SEQ ID NO: 345365 - protein, 68 aa, Zea mays
  Clone ID: MRT4577_78140C.1.pep
FRFGPTLPPHPSFPPNPPVWNIFNLRRGCSLESGEENVSKLFKYTLEFKPNPNPFWVYKVFQFSFYLT

SEQ ID NO: 345366 - protein, 110 aa, Zea mays
  unsure (1)..(110): unsure at all Xaa locations
  Clone ID: MRT4577_78141C.1.pep
RAGAGSSVAADAXGXGXGAAECAVCLGVLGEGQMVRQLSGCKHVFHQECIDVWLATRASCPVCRGKAEPPARAEDRATAASAPPRVAAVEMLGDELELASSSTPVAAPGR

SEQ ID NO: 345367 - protein, 69 aa, Zea mays
  Clone ID: MRT4577_78142C.1.pep
QTGAKNMDCGVLLPKGKTLIICMYCRGWKGTIRHCPRREPHGLKKNLRDKIRSLNGFRLLNRTKPYKKI

SEQ ID NO: 345368 - protein, 404 aa, Zea mays
  Clone ID: MRT4577_78143C.1.pep
MDMAIDTPSPAPPTPPAPSAAAGRQTRAAEAVRLEHQLVRVPLESLRATVRSNHRLAEKEIAAVLSSASAAPAESSAAAVDHLTSLVSRLHGLKRKMEEGARAEELQVQRCRARLDRLATASTGDDAEWEDMRLKRILVDYMLRMSYYNSATKLAETSGIQDLVDIDVFLDAKRVIDSLQNNEVSPALAWCAENKSRLKKSKSKLEFLLRLQEFVEFVKVKNFIQAIAYARKHLAPWGSVHMKELQRVTATLVFRSNTNCTPYKILFEQDRWDYLVDIFKQDFCKLYGMTLEPLLNIYLQAGLTALKTPFCSEGSCPKEDPLSLEGFRKLAEPLPFSKQHHSKLVCYITKELMDTENPPQVLPNGYVYSEKALQEMSKKNDGKITCPRTGDVYDVSECVRAFIS

SEQ ID NO: 345369 - protein, 46 aa, Zea mays
  Clone ID: MRT4577_78144C.1.pep
MDQFRPIPAKLWFGVQVGHYRMSYGCVMQLLDDAEFVGRIESIIFP

SEQ ID NO: 345370 - protein, 253 aa, Zea mays
  Clone ID: MRT4577_78145C.1.pep
MAPAQQVQVPVQASPPAILSVLETTLVAPSPSAGAAPLESSLPLTFFDVLWLNSPPVERVFFYRLAADADVPAILSNLRTSLPQALHAYYPLAGRLRLTPGTADRYEIYYQPGDGVTFTVAEYRDDVDIDELVVDKPREVCKIGPLAPPLPKGGPVLALQATVLQRGLAIGVAVHHAACDGAISTRFLHTWAAAGTGVVAPSPPVIDRTLIKDATGLYDVFVKAMPSADEMEHVKELDDKLLATFTLSKQDIQ

SEQ ID NO: 345371 - protein, 243 aa, Zea mays
  Clone ID: MRT4577_78146C.1.pep
MAPAQQVQVSPPPILSVLETTLVTPSPSAGAAPPECSLPLTFFDVLWLTSPPVERVFFYRLAADADVPAILSNLKTSLAKALSAYYPLAGRLRLTPGTADRHEIYYQPGDGVTFTVAQYYRDHVDFDELVVDKPRKVCKIAPLAPPLPKGGAVLALQATVLRRGLAVGMAVHHAACDGAISTRFLHAWAAAGTGAVAPSPPVIDRTLIKDATGLYDVFLKAMPSADEMEHVKVLDDKLLATFT

SEQ ID NO: 345372 - protein, 64 aa, Zea mays
  Clone ID: MRT4577_78148C.1.pep
PQSCSSVELCINVYTRFAGPYLGLYLVGVFYQYAECAESFLPILLHDRLSPMLPVYRKFPHPFH

SEQ ID NO: 345373 - protein, 50 aa, Zea mays
  Clone ID: MRT4577_78149C.1.pep
VVDCSHGRSSWVDEAICYYWQWITGGMQWGIGVYPGQIIHLKGFFGAIEN

SEQ ID NO: 345374 - protein, 325 aa, Zea mays
  Clone ID: MRT4577_7814C.1.pep
MELSSSVSSTAAAAAQARLLRPPSFRQPGPAGFVSCRSYAIRSKLVRAMPPILASFQPASPRYPSFQDANGKRRNVPCYQRQQTPQVEARSMEEVYDALAEHLLSVLKNIEHLDSKYIVGLAGPPGAGKSTVASEVVRRVNTFWSQKHTKGSGAPLPTKEIAAMLPMDGFHLYRAQLDAMEDPKEAHARRGAPWTFNPSLFLKCLHTLRTEGSVYAPSFDHGVGDPVENDIFVKPQHKIVIVEGNYLLLEEDVWTEIRDLFDEKWFIDIDIDISMQRVLKRHIATGKEPDVAAWRISYNDRPNAELILESRKNADLVIRSVDFSS

SEQ ID NO: 345375 - protein, 179 aa, Zea mays
  Clone ID: MRT4577_78150C.1.pep
MGDAANASRRRRLASILLSRKPRLTDSRNETTATAESKDGFTMAVSFWMADPPQLSIFSIHCCRPPHFQDGPYCNFKDLPHVVGVGAAGRFVLIRAVFDRRATSEYFLYKAGESPLLDPILPPYDYRDGDRDDLRGVREFGVLQLGSQYLVAALCLDPLSDDYYLRIYVREKIMEHQDP

SEQ ID NO: 345376 - protein, 229 aa, Zea mays
  Clone ID: MRT4577_78151C.1.pep
MARPSDQSVHVLLLPFPTQGHINPLLQFGKRLAGRAGVRCTLAATRFVVSSTKPTPSSVHVAVISDGCDEGGPAEVGGMGARYFERLESAGSETLDELLRSESALGRPVHVVVYDAFAPWAQRVARRRGAACAAFLTQTCAVDIVYAHAWAGRVPVPPLPLRPEEARGLALAGLSTQLEVDDMPTFLGDTRFPPCFRELLMNQFLGLDTADHVLVNSVYDLEPQEAGLP

SEQ ID NO: 345377 - protein, 100 aa, Zea mays
  Clone ID: MRT4577_78152C.1.pep
AGGRLLSVVAVGCFLLFVVVVFTLSSRRYATLVLDARDRRGDFHPSQLQGGSHGGGGEGDLKHLLAAQRTNDDDKAVTEPELEESGIRGKISSNVVGAGG

SEQ ID NO: 345378 - protein, 185 aa, Zea mays
  Clone ID: MRT4577_78153C.1.pep
MEHRGLLLVLAAALCLAGAADARHAKKSYQAVFSFGDSLSDAGNLIVDGIPKALTTARAPYGMTFFGRPTGRCSNGRVVVDFLAEHFGLPLPPASQAHGKDFKKGANFAITGATALEYSFFKAHGIDQRIWNTGSINTQIGWLQKMKPSLCKSEKECKDYFSKSLFVVGEFGGNDYNAPLFSGDY

SEQ ID NO: 345379 - protein, 45 aa, Zea mays
  Clone ID: MRT4577_78154C.1.pep
SYSPSPWEADTYKLISYLEPIILQSYHYEGHQKQSCSLLDGRTPR

SEQ ID NO: 345380 - protein, 285 aa, Zea mays
  Clone ID: MRT4577_78155C.1.pep
MPRRRRSIASIHSARAAVSSSSPRSSIISPWRPPHPPLHPPPPPVGVPATLPRQQRRRRLGAPAPYASKPSKTRPTSTLASTENLSVIHAFDGESFERWYINQEPRKRRLSDAHELVSQFYNMKETTSNISGVQQYWEQQRYLRKKIWLQTWLRREIQALTRDENVEVIVHHIHGVMGSFMKRLEKEHTSSRWTTSPEKRREEFRRLVSDAARPFLLGRTERFVAEVELFLASDLNMEAYNKLRVQRFRESSSHLTREQDALPRDRSLEEHYMYFLCNDTDCDEM

SEQ ID NO: 345381 - protein, 60 aa, Zea mays
  Clone ID: MRT4577_78156C.1.pep
GQNHRGAVGVPTCRFIIKLGNKAHNKKGIFFKSPGWGLYFFCKPLKGFPPKLLMGNSPRA

SEQ ID NO: 345382 - protein, 121 aa, Zea mays
  Clone ID: MRT4577_78157C.1.pep
GYIATLSFLQDENVDVIVHHIHGVIGSFMKRLEKEHTSSRWTTSPEKRREEFRRLVSDAARPFLLGRTERFVAEVELFLASDLNMEAYNNCASRGLGSPAHLTREQMALPRDRSLEEHYMY

SEQ ID NO: 345383 - protein, 51 aa, Zea mays
  Clone ID: MRT4577_78158C.1.pep
SARASYLTLFLDPNRRLNAGGLLIDRVVLDQGNIMVEGASGANYKAAHKDG

SEQ ID NO: 345384 - protein, 78 aa, Zea mays
  Clone ID: MRT4577_78159C.1.pep
GKKKKKKKKKKKKKKKKKKKKKKKKKKKKKKKKKKKPPRRKNRAQKKLPPGGNTRPILNPPRGFKKKTEGPPGGIRGV

SEQ ID NO: 345385 - protein, 114 aa, Zea mays
  unsure (1)..(114): unsure at all Xaa locations
  Clone ID: MRT4577_7815C.1.pep
KPPLGGKNPQPFPPPPLKVKYGGARGSPPPPPPTGKRGPXGPPPXGGQNQRPKGWGPQKGSNPNPQTGAPPRPFPKPRKRVGTLGRTRGPKAPGGEGPRRPSGXPKPGPQQGET

SEQ ID NO: 345386 - protein, 164 aa, Zea mays
  unsure (1)..(164): unsure at all Xaa locations
  Clone ID: MRT4577_78160C.1.pep
RARRYTRAVSSEFGSRTRNRSCCAXARASTELDTXPRASGWRGCSPDMDRTRGSSCAPRRSKPTSCGPTPRRVVTARXTGPCHTSVSRAAPTCFWTSDPASPTSTVSYTRPTRADSTTYPSTTLAXPLTTSLGGSMSAPLLNNRSIKIAYVPNGKVYAVIVXPH

SEQ ID NO: 345387 - protein, 41 aa, Zea mays
  Clone ID: MRT4577_78161C.1.pep
FERTAQLPVYPLHTAPFSLHVLTKEIGFGHISTIGCSPLAI

SEQ ID NO: 345388 - protein, 221 aa, Zea mays
  unsure (1)..(221): unsure at all Xaa locations
  Clone ID: MRT4577_78162C.1.pep
MQSQASRMARSSGSRPVALVLLALCAAALSSATVTVNEPIANGLSWSFYDVSCPSVEGIVRWHVAEALRRDIGIAAGLIRIFFHDCFPQXEQIEVPNQTLRPEALKLIDDIXRAAVHAVCXXTVSCADITTLATXXRXVVASGGPXXFEVPLXXRRDGLXAPASAEXVGTLPAPFFDVPTLIESFKNRSLDKADWVALSGAHTVGRGHCVSFSDRLPPNAD

SEQ ID NO: 345389 - protein, 414 aa, Zea mays
  Clone ID: MRT4577_78163C.1.pep
MKETTLENIQGTLIYMPSKVFFLFFSCCLMALSEIPRPGPGFLLGLFTNYMQSQASRMARSSGSRPVALVLLALCAAALSSATVTVNEPIANGLSWSFYDVSCPSVEGIVRWHVAEALRRDIGIAAGLIRIFFHDCFPQGCDASVLLSGSNSEQIEVPNQTLRPEALKLIDDIRAAVHAVCGPTVSCADITTLATRDAVVASGGPFFEVPLGRRDGLAPASSDLVGTLPAPFFDVPTLIESFKNRSLDKADLVALSGAHTVGRGHCVSFSDRLPPNADDGTMDPAFRQRLTAKCASDPSGNVVTQVLDVRTPNAFDNKYYFDLIAKQGLFKSDQGLINHPDTKRAATRFALNQAAFFDQFARSMVKMSQMDILTGSAGEIRRNCSVRNTALGDVSSSAHQLETTAGDEGLAADA

SEQ ID NO: 345390 - protein, 92 aa, Zea mays
  Clone ID: MRT4577_78164C.1.pep
ALNCPSGGLSDSKERVALLLAELSDASLLSLAPVGAATTCAPTQLTPYAPAIVLNTALTAQHYAILNEHPQTCYYQYKMNPIMQRYIYCPNG

SEQ ID NO: 345391 - protein, 385 aa, Zea mays
  Clone ID: MRT4577_78165C.1.pep
MAEKSPSSAPQGGSGGNESFDNLVIQAPQLMREDYIQNAVKFLSHPKVKGSPVFHRRSFLEKKGLTSEEIDEAFCRVPDPKPNGTDAVAAGRQQANNPSQSVVLQPYTEVQPQAATASATAGPIVPHTKAQLSWVNTLLGAGLFLGLGASAAITLKKLVIPSLKSWTRRVVAEGDENAKSEHTSKLCEEIREAIKVSASAFSDIAKINQEVLASKDEDRKVLMKLTEAFESQENVFKSLSETLNRIRENQLSQHSLLEEHVQPSSWNGPIDYQGRAFQQTNMYATPPNNSFDTGRNSFMPLAAESSYGPFPGSYSERVQRPGGYGFQQQTSSDRLNVVGPRSSYQGGSSNHHAGSNAMDDPAAVAAELQRRWVPPQPPGVIMPEA

SEQ ID NO: 345392 - protein, 77 aa, Zea mays
  Clone ID: MRT4577_78166C.1.pep
LRANSPNLRHDMNCKAPDHVTAWSATSCFLNLNCYQYMVDDLFDPKYFSMTPLLASDSSGTVEPTDIIESARMMSEK

SEQ ID NO: 345393 - protein, 59 aa, Zea mays
  Clone ID: MRT4577_78167C.1.pep
HKLLRLNNRNSSLGPHTRRYYCLYRNSPSKTAVHKPTPFSRTKLVKPRSNIALATNTNK

SEQ ID NO: 345394 - protein, 64 aa, Zea mays
  Clone ID: MRT4577_78168C.1.pep
YKCGNTSGWELGYACMRPHIAAYTTTGSRLTDRHLTYRVWDMAVVGRRTSPGITCAFPEMAWYR

SEQ ID NO: 345395 - protein, 92 aa, Zea mays
  Clone ID: MRT4577_78169C.1.pep
KNSFNYFKVKSAFSKAYSVLTDANLFISLGHNRSILGTIVRPDSVLLDRKGWNNEDMLAEPWEPITQQFDTENDAVYNWHVIDEDEPLPRNS

SEQ ID NO: 345396 - protein, 29 aa, Zea mays
  Clone ID: MRT4577_7816C.1.pep
KEKRKHKDTYSTEAPLGEGTEQYVNSISD

SEQ ID NO: 345397 - protein, 70 aa, Zea mays
  Clone ID: MRT4577_78170C.1.pep
DFGGGVQVRVSLQDVTLALVVAQLHLHGRRRGSLLPSGERIAGARVATAHADWGEERRTGSLDPAGSSAA

SEQ ID NO: 345398 - protein, 44 aa, Zea mays
  Clone ID: MRT4577_78171C.1.pep
KTKLTPFPQKKKKKKKKKKKKKKKKKKKKKKKKKKKKKKHRAPA

SEQ ID NO: 345399 - protein, 114 aa, Zea mays
  Clone ID: MRT4577_78172C.1.pep
CHFREWRCFGARVRRLVVHEALRTLPLFRRWGCRSPPATCCRCREPPSPGIPPQCLNLGSDRAVGSRPRRLSTSTRPFACASLLALPVGWTRPRERETGKGVGNGDSGFIIPAG

SEQ ID NO: 345400 - protein, 193 aa, Zea mays
  Clone ID: MRT4577_78173C.1.pep
TQDDLMHVFSKLPRDLNFIDHTSNISWKAFARAMPVIIDPALYMKKKGDLFWVPERRSLPTAFKLFTGSAWMVLSRAFVEYMIWGWDNLPRTVLMYYANFISSPEGYFHTVACNADGFRNTTVNSDLHFISWDNPPMQHPHQLTVGDWDRMLGSGAPFARKFRRDDPVLDRIDADILARGPGTVAPGGWCGRS

SEQ ID NO: 345401 - protein, 119 aa, Zea mays
  unsure (1)..(119): unsure at all Xaa locations
  Clone ID: MRT4577_78174C.1.pep
SHRQEQRGTLVEGRSVRKLPVFAIQPCGSYXLAGSPSSNLLGRISRRIRXFLSRRSTCSMEALLVGWFSSSQPITQSPLTTTAHCLHGSSRLLKRETRGSGEEMEGDRRRGRWYCGCSG

SEQ ID NO: 345402 - protein, 113 aa, Zea mays
  Clone ID: MRT4577_78175C.1.pep
GKVIKWTFEKITIENRMNKGEILVCDKKLWSVNYVQYSVTIIPSENKKVGMSFGQQGKRLLKTQACSPSPFEKVKCASVIIQINKPSRYPYWSRQYPVFMNRKFSSFFVSPSL

SEQ ID NO: 345403 - protein, 43 aa, Zea mays
  Clone ID: MRT4577_78176C.1.pep
DEAPASIEQAKITLHTTTLVQHNKAHHKFTVLVDTRTTTCAQT

SEQ ID NO: 345404 - protein, 145 aa, Zea mays
  unsure (1)..(145): unsure at all Xaa locations
  Clone ID: MRT4577_78177C.1.pep
XKISQPLVPIRSAGARFSCVSVVLILSPATVPDCVIFFGRRSPPVKIPPPFSPDAALSPPSLLMPRSLSQRLLLPACLSLPACTHSLSSPASRALFFQSSPSAAALRRALLSSKPISLLPRRVYPCARPFARPPSSFPLPHSRAP

SEQ ID NO: 345405 - protein, 93 aa, Zea mays
  Clone ID: MRT4577_78178C.1.pep
FFFFFFFFFFFWVLFFFFLQTGYVHYKMGQNTIFREFSGATYRNSPLWSKKYCVALSITLYKESAFKVNMGVDKPWTTRFNIIQPQITFLYTS

SEQ ID NO: 345406 - protein, 36 aa, Zea mays
  Clone ID: MRT4577_78179C.1.pep
GGKIAHLRSAGRRLFCGLSGSGIKRDPHPAWARRHA

SEQ ID NO: 345407 - protein, 48 aa, Zea mays
  Clone ID: MRT4577_7817C.1.pep
MSSYIYYISSPKLNLLSIFLQHFYLNILDFTKFNIFSHINLFYIFNYI

SEQ ID NO: 345408 - protein, 147 aa, Zea mays
  unsure (1)..(147): unsure at all Xaa locations
  Clone ID: MRT4577_78180C.1.pep
RFYFLCFFGITFKNEESYIKIPFSPRSYQEILINLRIGYWVLHIGYKVWKICLDVAFHATSEQITLIQVEIHDSNNKAHDALFSCHSLAEFERVGHFAMAHAIWSTLXKLHECNDHMKTRLFEMYRQEYKNFVQLPGETIDIMFYRF

SEQ ID NO: 345409 - protein, 41 aa, Zea mays
  Clone ID: MRT4577_78181C.1.pep
MISTIKQCLATVSRVTQAVKCHTCYQRAKDNLTDRYAHDAR

SEQ ID NO: 345410 - protein, 111 aa, Zea mays
  unsure (1)..(111): unsure at all Xaa locations
  Clone ID: MRT4577_78182C.1.pep
MAAKGLCFLMLLGLSASAATATIFPQCXQAHIACFLPPYLSPAESSGCENPILQPYRIHQAIASGILPLSPLILQQRVDLFQTLPLVHYFGQSMQAQLLPLLALRNLDAYY

SEQ ID NO: 345411 - protein, 289 aa, Zea mays
  Clone ID: MRT4577_78183C.1.pep
MAGSAAYSASATTVVAMAKGNGNSKGVRGGGSAGTNKVTRPPRITSNVKQNLRILKFWKEFERRQTSGPQPATRYRKKKVIKEVLPDDTDFYEDPSSTLHLTNEGLEIASPVILVDGYNVCGYWGKLKKDFMNGRQEIARQTLIDELVSFSAVREVKVVVVFDAANSGLSTHKETYKGVDVVYSADLSADSWIEKEVEALVADGCPKVWVVTSDALEQQLAHGEGALIWSSKRLVKELKESEKELDLELKETRSTSLQGKLLQHKLNPKVVRALKGLRNKLEEQERGKK

SEQ ID NO: 345412 - protein, 95 aa, Zea mays
  Clone ID: MRT4577_78184C.1.pep
HPFRLPLLCKVRSRAGLVGDGYQSTYVTQAHRSGLKDQCYSEDPWASRPGCSFPPLHPGWSLQILMFCSYMNYGQPYWAFQSRPCWLLIIAAAFL

SEQ ID NO: 345413 - protein, 525 aa, Zea mays
  Clone ID: MRT4577_78185C.1.pep
MELSLTSSAALQFVLLLPLFSVLCILYLRQDPKKQPRAHGLKVYPLVGTLPHFVKNQRRFLHWSTDVLKRDPSHTLSFKALGLTGGVITANPANVEHILKTNFANYPKGELTVSMIEDFLGHGIFNSDGEQWLWQRKAASYEFSKRSLRSFVVDAVRFEVVERLLPLLDRAQRDGRTLDVQDVLERFALDNICRVAFGDDPACLAEEEGMGMAMAAQQRQSAEFMRAFNDAQSAIMARFMSPVKSLWRLKRLLNVEPERRMREAVRTVHGYADRIIRERRARGEAAGPARDDDFLSRFAASGEHSDESLRDVVTNFLLAGRDTTSSALTWFFWLVSTRPDVEEKIVREVRAVRRLGSAGAAAPAFSFDELRDMQYLHAAITESMRLYPPVAMDTHSCKEDDFLPDGTFVGKGWLTTYSAFVMGRVEDIWGADCEEFRPERWVGEDGAFRPESPFKYPVFHAGPRMCLGKEMAYIQMKSIAACVLERFSFQFVGGGERPGLVLSLTLRMQGGLPMKVVTRTNSALG

SEQ ID NO: 345414 - protein, 48 aa, Zea mays
  Clone ID: MRT4577_78186C.1.pep
FSACLFVVCPLCVVCRPFGFFAPSCLKSRGSFRVFRSGSCWRACFPYC

SEQ ID NO: 345415 - protein, 156 aa, Zea mays
  unsure (1)..(156): unsure at all Xaa locations
  Clone ID: MRT4577_78187C.1.pep
PTRPDSCPACRRRCRAGARIVTVVVARIMVHELGRKXKTDLQAHLKELMTELYLLLLVIGTGGAPNKLSKIKVVSTSIARLLTLILKKHKXKLKEAYKKKNLMNIQLRPKMTRAMSRRMTKHQIYLKIYMENKREKYFHMKKYAMKAYVKTERCCA

SEQ ID NO: 345416 - protein, 103 aa, Zea mays
  unsure (1)..(103): unsure at all Xaa locations
  Clone ID: MRT4577_78188C.1.pep
YNPIFLINLYFKYXLHVLSYFNYLLLFIYKYYYFXFFLFYFFLIFFFIIYFFSLFFIFIYFFFLFFFFIIYFFFXFFFFFIFFFFYFFIIFSFYIFYINFYNF

SEQ ID NO: 345417 - protein, 75 aa, Zea mays
  Clone ID: MRT4577_78189C.1.pep
MEGTLLLLLGLLLVLPLLLVKLVVVNKYFPAAPWQPGKPPLRLPPGPRQLPVIGSLHHLLASRHGGLLHRAMRSC

SEQ ID NO: 345418 - protein, 49 aa, Zea mays
  Clone ID: MRT4577_7818C.1.pep
LDCLSSALYLTPFLTIFVLARLCIECCLSPTYSSYGDHLCLYLSLSLSL

SEQ ID NO: 345419 - protein, 59 aa, Zea mays
  Clone ID: MRT4577_78190C.1.pep
SNSSLVVFAQVMVFAIAQASKFKAIFENQNLLSVLCLTVVRFETKSVLVEKQLNFFSCS

SEQ ID NO: 345420 - protein, 166 aa, Zea mays
  Clone ID: MRT4577_78191C.1.pep
LYVSTCNKIVPVKIETPRCSTRPLGSMKRFRLWIGTIGSAECSTVLEIPTKLSMTMTDPWGDGDETETTLRDDAPRRRRCQLPQHTAFPGCGEDSRIRRWRQQGPENSAEEQVAETQRTGRETPAVARDGHATTGAAAGGGGGDEGFATCWGRRWGRWAASAIRPW

SEQ ID NO: 345421 - protein, 91 aa, Zea mays
  Clone ID: MRT4577_78192C.1.pep
HPPPPPPPQPPPPPPPPPQPPPPPPPPPPQPPPPPAAIAALTAGLYLGGLGLSELSPQRKMASVMAQTESMATPSTASHGETKPAAAAAPP

SEQ ID NO: 345422 - protein, 91 aa, Zea mays
  Clone ID: MRT4577_78193C.1.pep
HPPPPPPPQPPPPPPPPPQPPPPPPPPPPQPPPPPAAIAALTAGLYLGGLGLSELSPQRRMASVMAQTESMAAPSTASHGETKPAAAAAPP

SEQ ID NO: 345423 - protein, 67 aa, Zea mays
  Clone ID: MRT4577_78194C.1.pep
ATNLFWGKCPYFLLRWVFKTGLVWAGDTAQCLVYPPWGLCKSKKKFYGGFVPRNIRKEETQTKKTTQ

SEQ ID NO: 345424 - protein, 78 aa, Zea mays
  Clone ID: MRT4577_78195C.1.pep
RYRSKRDARANTSQREQYGDTVHLFIGTGRSPVKITFMSFTTSYNHDTNYHGPIGLFIFKSVQPFVSSRVAMPKLPGW

SEQ ID NO: 345425 - protein, 90 aa, Zea mays
  unsure (1)..(90): unsure at all Xaa locations
  Clone ID: MRT4577_78196C.1.pep
AIITSGPRXNATRIGSSGVVRRQAVNISPVRRVSSXVXFITTGDRESAFSNITTLAECSAHQLMNSCKGSCPTVAIXEEEXIERVTKTSR

SEQ ID NO: 345426 - protein, 75 aa, Zea mays
  Clone ID: MRT4577_78197C.1.pep
QYMALPKPHFFFFFYPGRGPTNNKRNPLNFILSARRLPFHHFTCKKPTSPFPFKKGFPKLSTIPQSFTLTPFGPY

SEQ ID NO: 345427 - protein, 53 aa, Zea mays
  Clone ID: MRT4577_78198C.1.pep
LLCQNICTMSAGSRGLDPVVRTGSRVKEIRSFLPPTQVVSPPACSLTRIRTSG

SEQ ID NO: 345428 - protein, 39 aa, Zea mays
  Clone ID: MRT4577_78199C.1.pep
HGSEQMLSDYLHESREAGASVLKKFVNNDVPSRQIVRIP

SEQ ID NO: 345429 - protein, 127 aa, Zea mays
  Clone ID: MRT4577_7819C.1.pep
LGSLLGAWIFVRVWGWAPSWCVLWEGLFCWILSVGPVVLACLRLLVPLVSWAGLLCASGRSRWHLVCSSWFMPASTSWGRTMEGRVHSLSSGGPCRVFPFLICPGPSGAPVVCKRGGIMALEQCSEL

SEQ ID NO: 345430 - protein, 55 aa, Zea mays
  Clone ID: MRT4577_781C.1.pep
SETFPFPHPLVWKSQICSPYQQGRFKERGNDRREKLQSLDSPERKRIKYSRETGR

SEQ ID NO: 345431 - protein, 272 aa, Zea mays
  unsure (1)..(272): unsure at all Xaa locations
  Clone ID: MRT4577_78200C.1.pep
MDMIARTSCHVRTTYSLRHGRWQXDRXETIGPDDGTPTLSAHVGRTQSECLIGEALKNQRAMNPIHTVFDAKRLIGRRISFFFVPTPIKLWPFKVISGPGEKPMIVVQHKGEXEKQFAAXEEISSMVLIKMREIAEAYLGTTIKNAVVTVPAYFNDSQRQATKDAGVIAGLNVLCIINEPAAAAIAYGLDKKATSXGDNNVLIFDLGXGGTFDVSLLTIEEGIFEVXKATAADTRLGGEDFDHXMVNHFXQQVRSNTINDISVNPKAHRRLT

SEQ ID NO: 345432 - protein, 146 aa, Zea mays
  Clone ID: MRT4577_78201C.1.pep
MSDLENYQPEGQEEGEGSAHAPFKGQMSVLDPFKGVLRLSLIQHGLAPGLRQGFKGLDRRQAHIFLLNQGFQEDAYQKLVIALGFQHKNPLIKGPYRKQLGEWARLFLLEPEGHPPKGGNWFCLVLKDLGEESQEPFILVNFFQNQ

SEQ ID NO: 345433 - protein, 244 aa, Zea mays
  Clone ID: MRT4577_78202C.1.pep
RPGPGKDPKLKGHIYRPERRSNIIRWTTTQRTRTYGPGASMNKIASAGALLAVVAVVAALAATTASAKDYTVGGSDRWDTYVDYGKWTAGKTFMVGDTITFEYMPYHNVLEVTAADYASCNAGSPISTHSGGSTAFKLTATGTRYFICGIPRHCLNGTMHVTITTVPYDSATAAASGPAQAPLQSSSSPPAADAYAPGPAAGHKVALGAAGKSPAGAPSSAPRYQQPAAAVAGLAVAALVALVA

SEQ ID NO: 345434 - protein, 119 aa, Zea mays
  Clone ID: MRT4577_78203C.1.pep
LPNEKARRVFCRIRKKGPVPLFQKFSSGDPLALKLVEKLFAVDSKDRLTAEEALRDPYFKGLARAVREPFCRPIRKVEFDFLHKRMSKGEIRELVFRGILEYYPQLLGSFIYGAERTTF

SEQ ID NO: 345435 - protein, 168 aa, Zea mays
  Clone ID: MRT4577_78204C.1.pep
MWRSRARALLLLRSSAPSSAPPQQNPLRSLARAPPPPPGLLSRFLSSSSQKAPPAASPPSSSAPAAAPGSAAPPAYTGNLKKALAGLRRIDLEGLRWRVFDAKGQVLGRLASQIAVVLQGKDKPTYAPHVEAGDMCIVLNAKDICVTGRKMTDKIYYWHTGYIGHLKE

SEQ ID NO: 345436 - protein, 95 aa, Zea mays
  Clone ID: MRT4577_78205C.1.pep
AVPLAPTSASIAVENRDTSQTRQWNQATASAADQVNNPSWPPPLPLSPLPHHPFLPTVGAGALLPLLLLLPVHRQAPVAIQEPAVDVAPVEPQRP

SEQ ID NO: 345437 - protein, 51 aa, Zea mays
  Clone ID: MRT4577_78206C.1.pep
LTTVFFAPLPIFLSGYIKRQDAAIYSQAIEPWKATDPAPNLRTACRIASLH

SEQ ID NO: 345438 - protein, 54 aa, Zea mays
  Clone ID: MRT4577_78207C.1.pep
THPIEFGPGSRRKVSHRHQDLEMSTPMICKMPSQVPTKALLGYIKFPVGLSAPQ

SEQ ID NO: 345439 - protein, 145 aa, Zea mays
  Clone ID: MRT4577_78208C.1.pep
PAVPPRAGLVFQVFISPKRLALFPGFFSPPPRWGGVPLCSCPASPGAPFPFPRAGFLRFPPSPSRPPVAFVSGPVSPLGGFPSGQGFSPAFFPPLRRLCSPLFSSPCPLCFFRFAPFPLGRRGPLCGPSSAPPRGVLGSGSTPPF

SEQ ID NO: 345440 - protein, 59 aa, Zea mays
  unsure (1)..(59): unsure at all Xaa locations
  Clone ID: MRT4577_78209C.1.pep
DITLCCCDGVKCRWVRPFFISIPSLYVIAEDGHLSEDIYISKLYFCNCSDKGRXXFCTL

SEQ ID NO: 345441 - protein, 102 aa, Zea mays
  Clone ID: MRT4577_7820C.1.pep
RVLRIKSRVGPNKRGARKKKAAASASASSVTLPPVPLREPRSALGAPVELGFTAYSDRINGALAALGLAMVLLVDLGSGQALVKNLQPVALFLQAKTRAAAD

SEQ ID NO: 345442 - protein, 135 aa, Zea mays
  unsure (1)..(135): unsure at all Xaa locations
  Clone ID: MRT4577_78210C.1.pep
HXKWLHCSVSPTLSSIFVFDIRPEDEGKTCNLEFHMPPVSPWPDMSPVKLRSPAGITVSSVGQQAASAGISANDVVNSTIVGSVPSVQPANRYSIVSVPCAAGQRVAYQLDSAGGLDMDFFQMTTPALGLFMSVS

SEQ ID NO: 345443 - protein, 69 aa, Zea mays
  unsure (1)..(69): unsure at all Xaa locations
  Clone ID: MRT4577_78211C.1.pep
LPRTILGPLDGXLFFFFCRGKDSISFIVLLLQAACSSRSSKFLLSLISTYRTWLFNRCVGGHSGGGARP

SEQ ID NO: 345444 - protein, 126 aa, Zea mays
  Clone ID: MRT4577_78212C.1.pep
ITDFWRSSWIRGQTPRNIAPTLYMKAKRKNISVALRNNRWMHFCSPYTQDREIKEFISLWQGINNTHELNDLDDTILWRWTADGKYSTSSAYKIQFTTNFCKMKICPIWKARTEPKCRFFAWTLLY

SEQ ID NO: 345445 - protein, 80 aa, Zea mays
  Clone ID: MRT4577_78213C.1.pep
KKKKGAPLHSQKAEIPKTYLFQCETITPFKKNPPPAVFGTHHQAPTSVTLVWSTTPTQKCQRDGPRSCLYDPSTLDKNVF

SEQ ID NO: 345446 - protein, 65 aa, Zea mays
  Clone ID: MRT4577_78214C.1.pep
QPRSVSLFFFLQMLSKKNERNIIFFRSFIDSICKIKKRLPFWADRSRWSAMIYWTDTYWRACFLL

SEQ ID NO: 345447 - protein, 209 aa, Zea mays
  Clone ID: MRT4577_78215C.1.pep
MAPAVVSALAKYKLVFLGDQSVGKTSIITRFMYDKFDTTYQATIGIDFLSKTMYLEDRTVRLQLWDTAGQERFRSLIPSYIRDSSVAVVVYDVSNRQSFLNTSKWIDEVRTERGGDVIIVLVGNKTDLVDKRQVSTEEGESKAKELNVMFIETSAKAGFNIKPLFRKIAAALPGMETLSAKQEDMVDVNLKSTSSQSNSQQQEGSGCAC

SEQ ID NO: 345448 - protein, 84 aa, Zea mays
  unsure (1)..(84): unsure at all Xaa locations
  Clone ID: MRT4577_78216C.1.pep
NPNFQCIAGIGKSVTRSFSPHGLRRXKHSDLSSVCGSLWPTLHAFQRAYWSGLPLWLTSCRWPSLLLFCFPSNXETEVSGFFMS

SEQ ID NO: 345449 - protein, 88 aa, Zea mays
  Clone ID: MRT4577_78217C.1.pep
MAEVGSRVRGFLRNRWLVFVAAMWMQSCAGVGYLFGSLSPVIKASLGYNQRQVAGLGVAKDLGDSVGFLAGTLCAVLPLWAALLVGAE
